United States Patent Application Publication US 2003/0194704 A1 - sequence listing, part 8

SEQ ID NO: 25638 - DNA, 199 bp, Homo sapiens
  MAP TO CHR16.3; EXPRESSED IN LUNG, SIGNAL = 1.1; EXPRESSED IN HELA, SIGNAL = 1.1; EXPRESSED IN PLACENTA, SIGNAL = 1.2; NT HIT: AF336873.1, EVALUE 1.00e-108; SWISSPROT HIT: O88573, EVALUE 1.10e+00; EST_HUMAN HIT: BE270441.1, EVALUE 4.00e-03
tcatcaccatcagccccagtgaattcaggtgggcagagctgaagctacatgctcacaaatacatcaggtcttttatcctggtcctgtgctggattctgaacacgctggtaaatattactgttcttctacatgtgactggcaagtggaacagcataaatagcacaaagacaaatgattatggatattgttctggaggaag

SEQ ID NO: 25639 - DNA, 192 bp, Homo sapiens
  MAP TO CHR16.3; EXPRESSED IN PLACENTA, SIGNAL = 5.2; EXPRESSED IN HELA, SIGNAL = 5.5; EXPRESSED IN LUNG, SIGNAL = 5.9; EXPRESSED IN FETAL LIVER, SIGNAL = 2.9; EXPRESSED IN BONE MARROW, SIGNAL =  14; SWISSPROT HIT: O18303, EVALUE 2.90e-01; EST_HUMAN HIT: BG757374.1, EVALUE 1.00e-104; NT HIT: AB054211.1, EVALUE 2.70e+00
gatgaaaacaactcatctctgctgaataactacgtcctgggggcccagctgagtcatgggcacgtgaacaacctcagggatcctgtgaacatcagcttctggcacaaccaaagcctggtactgctgggggcgcccccgtttccactgcacccctgcccctctgtgactctcctgttgaacactggtttgact

SEQ ID NO: 25640 - DNA, 158 bp, Homo sapiens
  MAP TO CHR19.3; EXPRESSED IN FETAL LIVER, SIGNAL =  49; EXPRESSED IN PLACENTA, SIGNAL = 5.6; EXPRESSED IN HEART, SIGNAL =  26; EXPRESSED IN HELA, SIGNAL =  44; SWISSPROT HIT: P18124, EVALUE 2.00e-17; EST_HUMAN HIT: AI246632.1, EVALUE 2.00e-51; NT HIT: X52967.1, EVALUE 3.00e-52
caagaaaagctggcaacttctatgaacctgcagaatccagactggcgtttgtcatcaggatcagaggtatcgatggtgtgagcccaaaggtccgaaatgtgttgcagcttctttgcctttgtcaaatcttcaatggaacctttgtgaaggccaattaa

SEQ ID NO: 25641 - DNA, 140 bp, Homo sapiens
  MAP TO CHR14.3; EXPRESSED IN HELA, SIGNAL = 1.1; EXPRESSED IN LUNG, SIGNAL = 1.9; EST_HUMAN HIT: AI969318.1, EVALUE 4.00e-73; NT HIT: gi16162506, EVALUE 3.00e-73
ggtctcagggaaccagcatgaagaactacagaacgtcagaaaacacatccattcctgtttcaccaacatttcctgttttctgctacctcatcctggcttaaaagtagctaccaatccaaactttgatggaaaattgaaag

SEQ ID NO: 25642 - DNA, 692 bp, Homo sapiens
  MAP TO CHR16.3; EXPRESSED IN HELA, SIGNAL = 1.6; EXPRESSED IN LUNG, SIGNAL = 1.6; EXPRESSED IN PLACENTA, SIGNAL = 1.2; SWISSPROT HIT: P24906, EVALUE 7.20e-02; EST_HUMAN HIT: AI857618.1, EVALUE 0.00e+00; NT HIT: AY005471.1, EVALUE 3.00e-21
ggagctgtcaatcagggcccaatcagctgactgtcagctgggacgggctggcttaacccttcctgcgccgctgcctacccgggagggaacgaggcccggcgcaaagtttggtgtaagaggggaaggagtttttccagaggggcttcggcaatccgggcggacctgggagggcggtttgcttttctttggagcgcgagacaggcctcccatccggagccccagctcgctgggggctcactcggctgggattggcctgattcccctcccctgcctgccctccacccccaggattgtgaattcgcctcccagcttttcctcctcgcaccaactctggtacccaggtgtcttccggggaccttccttccctgagcctggccgtgcccggcgctcaaacttggccccaactctttgtccgtctctcgggcgcccgtgcgaggaagggaccgggaagggagggatgcagtggggtgtccggatcggggctgcgggctgggcgccgcccggccatgcgcctgcccagaaggctgggcatccgtggagagggaaagcccattttatccctctctttacaacgaggtaaaataagttgtttagaggccattcttcacggagaccggctgcccgctggcgtcgcgtgcccttggacagagcgagcgcctatgcgagataactccggggaagctcaaagtcag

SEQ ID NO: 25643 - DNA, 167 bp, Homo sapiens
  MAP TO CHR14.3; EXPRESSED IN HEART, SIGNAL =  10; EXPRESSED IN HELA, SIGNAL =   2; EXPRESSED IN FETAL LIVER, SIGNAL = 1.6; EXPRESSED IN LUNG, SIGNAL = 1.3; NT HIT: M36682.1, EVALUE 3.00e-89; SWISSPROT HIT: P17931, EVALUE 1.00e-28; EST_HUMAN HIT: AW778869.1, EVALUE 4.00e-89
gaattgctttagatttccaaagagggaatgatgttgccttccactttaacccacgcttcaatgagaacaacaggagagtcattgtttgcaatacaaagctggataataactggggaagggaagaaagacagtcggttttcccatttgaaagtgggaaaccattcaaa

SEQ ID NO: 25644 - DNA, 332 bp, Homo sapiens
  MAP TO CHR14.3; EXPRESSED IN HELA, SIGNAL = 1.4; EXPRESSED IN PLACENTA, SIGNAL = 1.4; EXPRESSED IN BONE MARROW, SIGNAL = 1.4; SWISSPROT HIT: Q9Z6K9, EVALUE 3.70e-01; EST_HUMAN HIT: BF570850.1, EVALUE 1.80e+00; NT HIT: M68896.1, EVALUE 1.20e+00
cacactgaaagacttcccactcccatgatctcagactttgccttgttgctgtcttgcccctttacttttactggtgaatgagctctccagtcctgtgatccagtgtccattactgactctacctcccagtgccgggacagcagggtctgaagatggactccacacttaacatcagcaccaggaaccaagtcatcaccacagagcccgtggaagtgattatagctacaggtttgctgcaccttccctgtggaagactgatgtgggcaagtgctttcatggtcatggtccttgaatcttgtaccggaaacacccaggtcaatcatgaagggaac

SEQ ID NO: 25645 - DNA, 76 bp, Homo sapiens
  MAP TO CHR18.3; EXPRESSED IN HELA, SIGNAL = 1.5; EXPRESSED IN BONE MARROW, SIGNAL = 1.1; SWISSPROT HIT: P97526, EVALUE 3.00e-05; EST_HUMAN HIT: BE779692.1, EVALUE 3.00e-23; NT HIT: D26141.1, EVALUE 5.00e-33
attggtgatgatttgatggagtgaatttaccagcacatagtgaaatgtagaatgtgaattctgcaccaggaagatc

SEQ ID NO: 25646 - DNA, 184 bp, Homo sapiens
  MAP TO CHR18.3; EXPRESSED IN HELA, SIGNAL = 0.91; SWISSPROT HIT: P27902, EVALUE 4.30e+00; EST_HUMAN HIT: BI254524.1, EVALUE 1.00e-98; NT HIT: gi16178116, EVALUE 9.00e-99
ccttgtgtgttcttgaaggacataatggcttgtctgtaggggtttggcgcatctgaggcatctgtcagattggccaacaccagcagaagcaggagactctggttggccagaggggaagaaagctctggagaggcagccgctttgctgcccacaccacctagtgtgaagacagtccagagtcctg

SEQ ID NO: 25647 - DNA, 151 bp, Homo sapiens
  MAP TO CHR14.3; EXPRESSED IN HELA, SIGNAL = 1.6; NT HIT: gi14748497, EVALUE 9.00e-80; SWISSPROT HIT: O08545, EVALUE 1.50e+00; EST_HUMAN HIT: BF195587.1, EVALUE 1.00e-79
gacagtgtttaagaatgaaagcctcaacgcagaatcaaaatctggctgcaaacttcaggagcttaaagctaagcagcttataaagaaagacactgccacctattggcccctgaactggcgtagcaagttgtgtacctgccaagactgtatg

SEQ ID NO: 25648 - DNA, 206 bp, Homo sapiens
  MAP TO CHR18.3; EXPRESSED IN HELA, SIGNAL = 3.1; EXPRESSED IN FETAL LIVER, SIGNAL = 1.3; EST_HUMAN HIT: BE893259.1, EVALUE 2.70e-01; NT HIT: gi9630525, EVALUE 4.70e-02
acctgtttcctaatgtcagttaacgtcattggccagcgaatggatttctatgccatgatccacgcctgctggctgatcgctgtcttatatagacgcagaaggaaagccatcgcagagatctggcccaagtactgctgcttcctggcatgcatcatcaccttccagtatttcatctgcattggcatcccacctgctccttgccgagg

SEQ ID NO: 25649 - DNA, 103 bp, Homo sapiens
  MAP TO CHR19.3; EXPRESSED IN PLACENTA, SIGNAL = 2.3; EXPRESSED IN HELA, SIGNAL = 2.7; EXPRESSED IN LUNG, SIGNAL = 2.5; EXPRESSED IN FETAL LIVER, SIGNAL = 1.1; SWISSPROT HIT: P01028, EVALUE 1.20e+00; EST_HUMAN HIT: BE537337.1, EVALUE 1.20e-01; NT HIT: gi15302735, EVALUE 2.00e-42
gtggctgcatgcagggtcttccaatatggctgtcctggaggtgcccctgctgtcaggcttccgggcagacatcgagagcctggagcaggtgaggcagcgccgg

SEQ ID NO: 25650 - DNA, 134 bp, Homo sapiens
  MAP TO CHR16.3; EXPRESSED IN HELA, SIGNAL = 1.1; EST_HUMAN HIT: BF364992.1, EVALUE 2.00e-66
gccactcaatgacaaaaatagtaacagtgggaattcagctttgaacaatgccacacctaacacaccaagacagaatacatctactcctgtgagaaagccaggacctctgccttctagcctggatgacttaaagg

SEQ ID NO: 25651 - DNA, 151 bp, Homo sapiens
  MAP TO CHR14.3; EXPRESSED IN HELA, SIGNAL = 1.3; EXPRESSED IN PLACENTA, SIGNAL = 0.92; EXPRESSED IN LUNG, SIGNAL = 1.3; SWISSPROT HIT: Q9JHU4, EVALUE 4.00e-23; NT HIT: gi13384735, EVALUE 6.00e-53; EST_HUMAN HIT: AA469281.1, EVALUE 5.00e-79
attgaaagaatattgggcgtccgtctgcaagctggcctgagagcttggacgcaggttcttcttggacaagctgaagataaagcagaagttgacatggacacagatgctccacaagttagtcacaagcctggtggagagccaaagatcaaag

SEQ ID NO: 25652 - DNA, 271 bp, Homo sapiens
  MAP TO CHR14.3; EXPRESSED IN PLACENTA, SIGNAL = 1.1; EXPRESSED IN HELA, SIGNAL =   1; SWISSPROT HIT: Q46124, EVALUE 7.40e-01; NT HIT: gi15791399, EVALUE 2.50e-01; EST_HUMAN HIT: BG566492.1, EVALUE 3.70e-01
gcaggcctagaatataagtatgtgttgatctctctcctggtatttaaagatgtaggaaaacttgaagatgctcagaatagacttgctatcaaacagctcatcaaagagattggggagcctcgaaattatggtttaacagacgaagaaaaggcagaagaggagcggaaggctgcggaggagcggctggccagggaggctgctgaggaagcagaacgcgagcaccaggaggccgtggagatggcagagaagatagctcgctgggaggagtggg

SEQ ID NO: 25653 - DNA, 82 bp, Homo sapiens
  MAP TO CHR14.3; EXPRESSED IN HELA, SIGNAL = 1.1; NT HIT: gi14784665, EVALUE 6.00e-39; EST_HUMAN HIT: BE294216.1, EVALUE 9.00e-39
acgttatcatttgtcttataagattgtacgaacggacagtcgcctagtacgcagcattctgacagcccatggatttcatgaa

SEQ ID NO: 25654 - DNA, 459 bp, Homo sapiens
  MAP TO CHR19.3; EXPRESSED IN HELA, SIGNAL =  12; EXPRESSED IN BONE MARROW, SIGNAL =  26; NT HIT: gi15302322, EVALUE 0.00e+00; EST_HUMAN HIT: BG325197.1, EVALUE 0.00e+00; SWISSPROT HIT: P42428, EVALUE 8.00e-01
gctgcatagagcctggacctgggcactggggtgagctgagccggacaccagtcccatctaaaccccaggacaaagtggaagcagctgaggcaacaccagtggccctggacagtgacacctccggggctgaaaatgcagcagtgagtgctatgctgcacgctgtagccgccagccgcctgcctgtttgcagccagcagcagggtgaacccgacttgacagagcatgagaaagtggccatcctggcccagctgtaccacgagaagccactggtgttcctggagcgcttccgcacaggcctccgtgaggagcatctggcctgctttggccacgtgcgtggcgaccaccgtgcagacttctactgtgctgaggtggcccggcagggcactgcccggccccgcaccctgcgtacccgcctgcgtaaccggcgctatgctgccctgcgagagctgatccaaggtg

SEQ ID NO: 25655 - DNA, 209 bp, Homo sapiens
  MAP TO CHR18.3; EXPRESSED IN HELA, SIGNAL = 1.6; EXPRESSED IN BONE MARROW, SIGNAL = 1.3; SWISSPROT HIT: O43520, EVALUE 1.00e-36; NT HIT: gi16163940, EVALUE 1.00e-114; EST_HUMAN HIT: BE392855.1, EVALUE 1.00e-114
catatatctgcccgttgatacagcactttttaaaggtcatgatattttgtgtgagtgtccccgtcttatcagagaagatataatggatctgcccgagctgttcattgagtgtggtggttctagcttttgcgggtgtgtccttctcagcatagtacatttgcaggtcccagttgatgaagtgactctgtccaagacgaatcacttccacg

SEQ ID NO: 25656 - DNA, 214 bp, Homo sapiens
  MAP TO CHR18.3; EXPRESSED IN HELA, SIGNAL = 1.4; EXPRESSED IN FETAL LIVER, SIGNAL = 1.6; EXPRESSED IN PLACENTA, SIGNAL = 1.5; EST_HUMAN HIT: BE966125.2, EVALUE 5.00e-03; SWISSPROT HIT: O13433, EVALUE 1.10e-01
attattgataaggtgtatgtcacacctgtttctctctttcctactcaatggtcacaacacctgcctacacctgggtggcaggtattggcgcctagtgagtcgccgccagattcccagcttcaaatggcatctagcaagcagcccacgacccatcttccaattttccactacaatcctggggagtatgagcactcctattgccaatctccttagc

SEQ ID NO: 25657 - DNA, 112 bp, Homo sapiens
  MAP TO CHR14.3; EXPRESSED IN HELA, SIGNAL = 3.4; EXPRESSED IN HEART, SIGNAL = 3.7; NT HIT: gi12963662, EVALUE 6.00e-09; EST_HUMAN HIT: BF312811.1, EVALUE 2.00e-56; SWISSPROT HIT: P13942, EVALUE 4.60e+00
cttgaagcagccgcaccgggcaccccaaggctctgcaatcgttttaggacctcaggcacctctgggtacagtcggacgtcttggccccgcctatctcgtacagttccatcac

SEQ ID NO: 25658 - DNA, 121 bp, Homo sapiens
  MAP TO CHR18.3; EXPRESSED IN HELA, SIGNAL = 0.89; EXPRESSED IN PLACENTA, SIGNAL = 1.2; EXPRESSED IN LUNG, SIGNAL = 1.1; SWISSPROT HIT: Q00798, EVALUE 4.60e+00; NT HIT: AF029728.1, EVALUE 4.00e-01; EST_HUMAN HIT: BF753944.1, EVALUE 1.50e-01
tgtggaaggtgaaaggaaggaacatgaaggaaaagataagacacgaagagaaggagccatgtggaaaaacctggagtgcagaagtgttcgtctgaaaggctacgatgaccgtgatgagtaa

SEQ ID NO: 25659 - DNA, 121 bp, Homo sapiens
  MAP TO CHR14.3; EXPRESSED IN HELA, SIGNAL = 1.2; EXPRESSED IN FETAL LIVER, SIGNAL =   1; EXPRESSED IN PLACENTA, SIGNAL = 1.1; SWISSPROT HIT: P55018, EVALUE 1.00e-03; NT HIT: U20975.1, EVALUE 2.00e-03
ccgagctgagtatcattgcccccaccatcgccaacttcctcctctgttcctgtgccctcaactttggctgtctctacgcctcccttacctggttgtctggttagtgtgggcaggtgttcag

SEQ ID NO: 25660 - DNA, 316 bp, Homo sapiens
  MAP TO CHR18.3; EXPRESSED IN FETAL LIVER, SIGNAL = 2.6; EXPRESSED IN PLACENTA, SIGNAL = 1.6; EXPRESSED IN HELA, SIGNAL = 1.5; SWISSPROT HIT: Q92804, EVALUE 8.00e-05
ctccaggcctttgtttctggggccccccctttcccagtcaccactgaaatcctggctcgagtccccttggatgtcactgcctccatggtcaccgctgaactcctggctcgagtccccttggatgtcactgcctccatgatcacctctgaaatcctgactcaagtccccctggatgtcactgcctccatggtcaccgctgaactcctggctcgagtccccttggatgtcactgcctccatgatcacctctgaaatcctgactcaagtccccttggatgtcactgcctccatggtcaccgctgaaatccaggcttgag

SEQ ID NO: 25661 - DNA, 166 bp, Homo sapiens
  MAP TO CHR14.3; EXPRESSED IN LUNG, SIGNAL = 1.5; EXPRESSED IN HELA, SIGNAL = 1.2; SWISSPROT HIT: Q63515, EVALUE 4.40e+00; NT HIT: AF256215.1, EVALUE 2.30e+00
tggttccatgctggccccaaggacgtgcccttcgttggtgccgaatgtcatttggtcatagaggctgaaagtcattctggagttgatgtttccaaggtcaaaaaccttgctggggctgtggaaagagctcgttgtttgctggcctgctttgttggtgaccagcatt

SEQ ID NO: 25662 - DNA, 175 bp, Homo sapiens
  MAP TO CHR14.3; EXPRESSED IN HELA, SIGNAL = 0.98; SWISSPROT HIT: P47113, EVALUE 1.90e+00; EST_HUMAN HIT: AL558569.1, EVALUE 3.00e-93; NT HIT: gi14749604, EVALUE 5.00e-91
gctcctctgctgtttaatggctgccgctctggggaaatctttgccattgatctgcgttgtggaaatcaaggcaagggatggaaggccacccgcctgtttcatgattcagcagtgacctctgtgcggatcctccaagatgagcaatacctgatggcttcagacatggctggaaagg

SEQ ID NO: 25663 - DNA, 382 bp, Homo sapiens
  MAP TO CHR19.3; EXPRESSED IN HELA, SIGNAL =  23; SWISSPROT HIT: O10341, EVALUE 2.10e-01; NT HIT: gi14785880, EVALUE 0.00e+00; EST_HUMAN HIT: AI077344.1, EVALUE 0.00e+00
gtgctctccctcaaaggaagtgtttattttttggagctcaaagaccccagaaaaaagcaaccccccccgcaaaaaaaacccataacaacaggcagcacatgccccccacaccgcaccccatgcccaatctcagggtgggagacaagaggggggactcattgtccggagggaggctctggagggagacagccctgggtcaacccgactgtgtccccacacccaggacttccccatggcccctccagacctgctccagaggcccttctccggctaccccgtgctctccccgctaaccgtgttgccccatgacccgctcagaactgatgagatcaagggaatgttcaagcgaaaagccgagcaggacggaccttccaagatgtgc

SEQ ID NO: 25664 - DNA, 99 bp, Homo sapiens
  MAP TO CHR16.3; EXPRESSED IN HELA, SIGNAL = 5.8; NT HIT: gi14775826, EVALUE 2.00e-48; EST_HUMAN HIT: AA994837.1, EVALUE 8.00e-49; SWISSPROT HIT: P22695, EVALUE 2.00e-12
atgtcattgaaaatttgcatgcagcagcttaccggaatgccttggctaatcccttgtattgtcctgactataggattggaaaagtgacatcagaggagg

SEQ ID NO: 25665 - DNA, 232 bp, Homo sapiens
  MAP TO CHR19.3; EXPRESSED IN HELA, SIGNAL = 1.4; EXPRESSED IN LUNG, SIGNAL = 1.5; NT HIT: AF166267.1, EVALUE 8.00e-35; EST_HUMAN HIT: AA613202.1, EVALUE 1.00e-127; SWISSPROT HIT: Q9DBS5, EVALUE 1.00e-10
ctggctctccgccggtgggtcgtactgtcgcagctgccccaggaactccaggtggcgcttctcctcctccagctgggccacggactcctcgctggcccgaagccgccgctgcgtctcctccagttcctcccgcagccacacgttctcctgggccagccgccgggcctgcgagcgcagccgctgcttctctgcctccagtgcacccacatgtgccgacagggccagcagcacc

SEQ ID NO: 25666 - DNA, 475 bp, Homo sapiens
  MAP TO CHR14.3; EXPRESSED IN HELA, SIGNAL = 1.5; SWISSPROT HIT: P08567, EVALUE 9.00e-05; NT HIT: gi14784173, EVALUE 0.00e+00; EST_HUMAN HIT: AW139577.1, EVALUE 0.00e+00
cctcataagaagagagttttattcaacattatggcatggccagtgtaattgttccaacaaagggaacctactttggtgcccgaggaaatggctgtttgtgatgctggggaaaagtcaagatgctgacgcctaatggctgttctagcctttccaggtttgtaacatgaagatggggaaggaaatggcaccactgctgtttgtaatctgaggaactcttggcagcattcactctccaaagcagtacaaaacttacaaagaagtcaaaagtcttaacactcccattctccaggaactcttgtctgtgtcatctggtaggagggaggaatcctggttccctcaggtccttgtcatgttagctttttgatagcttcaatccactcggctcgctcagccttgctgctggcctgaatgtaatagtgtgtgtcatccttagtaatcactttgaagaggtttccctggacattccctttaaccc

SEQ ID NO: 25667 - DNA, 138 bp, Homo sapiens
  MAP TO CHR14.3; EXPRESSED IN HELA, SIGNAL = 2.5; SWISSPROT HIT: P43139, EVALUE 5.90e+00; NT HIT: gi7019432, EVALUE 3.00e-27; EST_HUMAN HIT: U82984.1, EVALUE 4.00e-27
taatatctgatgtctgtggtgttgaaaaggtgtttggggtcaatgttttcttgctccaccatcatgaactgactccagtacaccaggggcagggaaagcaggcgcttgatcaccttgagttgacacttgatgtcctgt

SEQ ID NO: 25668 - DNA, 104 bp, Homo sapiens
  MAP TO CHR14.3; EXPRESSED IN HELA, SIGNAL = 0.89; NT HIT: Y11484.1, EVALUE 1.30e+00; EST_HUMAN HIT: AI264706.1, EVALUE 1.90e+00
tttttgtgctgttttcatttgtgagatagtaggccaggtaaatcttgaaatctaaagtattctgtttgtaagcatcatccacactagaagagacaaacttttct

SEQ ID NO: 25669 - DNA, 272 bp, Homo sapiens
  MAP TO CHR19.3; EXPRESSED IN FETAL LIVER, SIGNAL = 2.8; EXPRESSED IN HELA, SIGNAL = 3.2; NT HIT: AF133298.1, EVALUE 0.00e+00; EST_HUMAN HIT: BG743661.1, EVALUE 0.00e+00; SWISSPROT HIT: P98187, EVALUE 6.00e-47
cctcgctcagcaggagcacatcaataaagtccaaagtcttggacttggccttggcttggaggaagtcatcaacaccctggctagtgagggtgcggcgccgctcctggatgacggcatctgtgaagtcgtgcaccagtctgcaggccctgtggaagcgccgtccacagggagtgaggaagtacaggaagtccttgtaccggaagaactggttattccgtttcactacaagggcactgagctccatgatcgcagtaatatattcactgggcttc

SEQ ID NO: 25670 - DNA, 243 bp, Homo sapiens
  MAP TO CHR14.3; EXPRESSED IN HELA, SIGNAL = 1.5; SWISSPROT HIT: P35574, EVALUE 4.00e+00; NT HIT: gi14753323, EVALUE 0.00e+00; EST_HUMAN HIT: AU129896.1, EVALUE 0.00e+00
cctctgtgataaacaatgaaaagctgttctccatgtcctgccattgacaccacaggtccagcaaggctgaatacctctttttgaacccctccaatagtaaacaatcgaagaagcagggcactagtagcggcagcagcccatccttgaccgagacatatggcttcaatatcctcattctgaggcaagtctattatccactctttgcttgaatcccaagaactaaagtgcaggcagtgaagcttg

SEQ ID NO: 25671 - DNA, 332 bp, Homo sapiens
  MAP TO CHR19.3; EXPRESSED IN HELA, SIGNAL = 6.2; NT HIT: gi14756113, EVALUE 0.00e+00; EST_HUMAN HIT: AI380205.1, EVALUE 0.00e+00; SWISSPROT HIT: Q15102, EVALUE 3.00e-45
gggcctgcttccgcgaggccaacatcccaacccacttcgggagaagaaccgacaggtgaacgagctggtacgggcggcactggctggccaccctcgggcccacttcctagatgccgaccctggctttgtgcactcagatggcaccatcagccatcatgacatgtatgattacctgcatctgagccgcctgggctacacacctgtttgccgggctctgcactccctgcttctgcgtctgctggcccaagaccagggccaaggtgctcccctgctggagcccgcaccctaagcatcctgctgccttcccacaacattaaactctccttcctcag

SEQ ID NO: 25672 - DNA, 181 bp, Homo sapiens
  MAP TO CHR14.3; EXPRESSED IN HELA, SIGNAL = 5.5; EXPRESSED IN FETAL LIVER, SIGNAL = 2.3; EXPRESSED IN BONE MARROW, SIGNAL = 2.4; NT HIT: U89432.1, EVALUE 5.00e-14; EST_HUMAN HIT: BE409559.1, EVALUE 2.00e-97; SWISSPROT HIT: P43652, EVALUE 7.40e+00
cacatcttcagtgctgaggtagggagccatggtggtcagagtgcgcagggagtagaagagcagcccaggagagcccacctcaccaagagtctcattcagaagccgaagaagctcccggtggtggggttggaaggcctcgggccgggaggtcaccaccacacttagcagcaaaagccccatc

SEQ ID NO: 25673 - DNA, 161 bp, Homo sapiens
  MAP TO CHR16.3; EXPRESSED IN HELA, SIGNAL = 2.2; EXPRESSED IN LUNG, SIGNAL = 1.8; EXPRESSED IN FETAL LIVER, SIGNAL = 2.4; EXPRESSED IN BONE MARROW, SIGNAL = 3.2; SWISSPROT HIT: P42567, EVALUE 1.10e+00; EST_HUMAN HIT: AI028638.1, EVALUE 2.10e-01
gggattgggcatttctgtggctataggacaggaacccagctggctgaatgctgcctttgatgcgagccagaactgccttcgtgctgggggaaggcaggccggatgcaggctctgaggccacgcgcttggggccccactgggcactgtggccctgtaggctc

SEQ ID NO: 25674 - DNA, 442 bp, Homo sapiens
  MAP TO CHR14.3; EXPRESSED IN HELA, SIGNAL = 2.3; EXPRESSED IN LUNG, SIGNAL = 1.4; EXPRESSED IN BONE MARROW, SIGNAL = 0.9; NT HIT: gi16162508, EVALUE 0.00e+00; SWISSPROT HIT: P48037, EVALUE 3.80e+00; EST_HUMAN HIT: BE884331.1, EVALUE 0.00e+00
cctgaagcatgcctcccctgattctgtggcattctttggaagagatcatggttgtattcataatatctgtagtcttcatgtgcacgatctccaagtggccgctttctctgaccatcaaaaaaattgtctgaataataatatcgggaaccagagtctccattttcaacagcaaaactaacttccgttacaaatgactgagaagaaccatactctctagggacatctgctagacttctggcaagataagaaggtgcagataatctgttgctttctcttctcattatttcatgaggtgttctttgaattggagttctaaggaaactctggtttcttgaaactacatctccagaagttgaaaaggcattagggcttgaatctggaagacagatatcagttcgtcttggaattgttggaccatgccggatgaatgaaggcataagat

SEQ ID NO: 25675 - DNA, 129 bp, Homo sapiens
  MAP TO CHR16.3; EXPRESSED IN FETAL LIVER, SIGNAL = 6.9; EXPRESSED IN LUNG, SIGNAL = 2.9; EXPRESSED IN HELA, SIGNAL = 3.3; EST_HUMAN HIT: BF908754.1, EVALUE 4.00e-64; SWISSPROT HIT: P47563, EVALUE 7.80e+00; NT HIT: AF375447.1, EVALUE 1.70e+00
atctttaaagtcgatgacaagagttccagtcctgaatcatggcaaagtgcagtagtgaactgcggggttaatgacaccatattctggaaggatctctctatggctgatggtctcagttccggcatcagc

SEQ ID NO: 25676 - DNA, 127 bp, Homo sapiens
  MAP TO CHR14.3; EXPRESSED IN FETAL LIVER, SIGNAL = 1.4; EXPRESSED IN BONE MARROW, SIGNAL = 0.82; EXPRESSED IN HELA, SIGNAL = 0.87; NT HIT: M91436.1, EVALUE 4.20e-01; EST_HUMAN HIT: BG535136.1, EVALUE 2.00e-65
cctatcatagagctcaatgattaaatggtaagcagcttcatcacttccaaattgaaaatctacaattctatccacaccaagctgttttgcactgactaatctccgactcttcaaatgttttcggcac

SEQ ID NO: 25677 - DNA, 186 bp, Homo sapiens
  MAP TO CHR18.3; EXPRESSED IN HELA, SIGNAL = 1.3; NT HIT: gi13645276, EVALUE 1.00e-100; SWISSPROT HIT: Q02487, EVALUE 2.00e-30; EST_HUMAN HIT: BE000097.1, EVALUE 6.00e-73
cttaactacacaaagaactccttcattggttttggcatctgttacaattttaaaattgccattttcattgccctttaaaatggtataattagctctccagttagcagtattcactaagtccttatcctcaacagtaactcgtaagatttccacatcaactgtattttcttccactgatgtcacata

SEQ ID NO: 25678 - DNA, 160 bp, Homo sapiens
  MAP TO CHR18.3; EXPRESSED IN HELA, SIGNAL = 0.9; EXPRESSED IN BONE MARROW, SIGNAL = 1.1; EXPRESSED IN FETAL LIVER, SIGNAL = 0.92; NT HIT: M57592.1, EVALUE 1.40e-01; EST_HUMAN HIT: Z78315.1, EVALUE 8.10e-01; SWISSPROT HIT: P54254, EVALUE 2.60e+00
tccttcctgggttgctccactgttttcttgctgttcaggctcagctctgcagttcctgcagactccatgctcctccctttctttgggccactcagtccttcctctgacccactggtgagccaacctttcttcttttctttggcctctcttccatcaacaa

SEQ ID NO: 25679 - DNA, 304 bp, Homo sapiens
  MAP TO CHR16.3; EXPRESSED IN HELA, SIGNAL = 2.9; EXPRESSED IN LUNG, SIGNAL = 2.1; NT HIT: gi16164702, EVALUE 0.00e+00; EST_HUMAN HIT: AI302395.1, EVALUE 0.00e+00; SWISSPROT HIT: Q00653, EVALUE 1.60e+00
ggctccaggccgggccctttacctcctgtgggtgaatgtgctgggcccctggttcactgcagacagtggcaccccagcaccagagcacaatgagaaacggcagcgccgacaggagcggcggcagatgaagcggttatagccattgacattgtggccacaggccactggccctgggtggctctgtcagggtgcacagcccctcatgcctggagcaatgagggtctagtccaggggccaaaagcagtctgaggtattgggtatacttatactctatagggtcgttgaataaatggcttagaatgtg

SEQ ID NO: 25680 - DNA, 119 bp, Homo sapiens
  MAP TO CHR18.3; EXPRESSED IN HELA, SIGNAL = 1.5; EST_HUMAN HIT: BF829331.1, EVALUE 2.30e+00; NT HIT: AF060913.1, EVALUE 1.50e+00
tgcaggatgaggggaccaaagaagaggacaaagccctggcttgtagccccatccaaataacagcggggaggaggcggagcctgtggtacgcaacccattaccccactgatgagagaaaa

SEQ ID NO: 25681 - DNA, 148 bp, Homo sapiens
  MAP TO CHR14.3; EXPRESSED IN HELA, SIGNAL =   1; SWISSPROT HIT: O88573, EVALUE 3.40e+00; EST_HUMAN HIT: BG774335.1, EVALUE 2.00e-20; NT HIT: gi14739656, EVALUE 2.00e-12
agccagagtagtcacacactcaaaaagggggtccagcggggccaccagattgtccaggtgctgctctgcctggatcagctgttgctccaactgcaatgggtgcttcttgcctgactcctcttggagaactgcagcttcatctttcccc

SEQ ID NO: 25682 - DNA, 198 bp, Homo sapiens
  MAP TO CHR14.3; EXPRESSED IN BONE MARROW, SIGNAL = 1.7; EXPRESSED IN FETAL LIVER, SIGNAL = 3.7; EXPRESSED IN HELA, SIGNAL = 6.1; EXPRESSED IN LUNG, SIGNAL = 2.9; NT HIT: gi13655074, EVALUE 5.00e-82; SWISSPROT HIT: P55861, EVALUE 1.40e+00; EST_HUMAN HIT: BE178587.1, EVALUE 7.00e-82
atatcattgatgagttcatctaccagtttcagtcattcagtcagtactgctgtaagactgctaagaagtcggaggaggagattgacttcctttgttccaatcccaaaatctggaatgttcacagtgtcctcaatgtccttcattcctgggtagacaaatccaacatcaaccgacagttggaggtatacacaagcgagg

SEQ ID NO: 25683 - DNA, 76 bp, Homo sapiens
  MAP TO CHR19.3; EXPRESSED IN HELA, SIGNAL = 1.3; EXPRESSED IN LUNG, SIGNAL = 1.4; EST_HUMAN HIT: AL138162.1, EVALUE 3.00e-35
atgggtctgtgaagaaatcccggatctcaagctcgctatggagaattacgttttaattgactatgacaccaaaagg

SEQ ID NO: 25684 - DNA, 91 bp, Homo sapiens
  MAP TO CHR16.3; EXPRESSED IN HELA, SIGNAL = 0.99; EST_HUMAN HIT: BF943329.1, EVALUE 4.20e-01; NT HIT: AF217490.1, EVALUE 3.00e-44
catctcacttgtatttgatcattgatgtgttttaaggagctcggttcagtggcatcagagagttcgttttctccttcttccataaggtccc

SEQ ID NO: 25685 - DNA, 200 bp, Homo sapiens
  MAP TO CHR18.3; EXPRESSED IN HELA, SIGNAL = 0.87; EXPRESSED IN FETAL LIVER, SIGNAL = 0.96; NT HIT: M60340.1, EVALUE 7.10e-01; SWISSPROT HIT: P57155, EVALUE 3.70e-01
cgtgtcactccttcctagtttatcgctgatgtcttccatagagtcaccttcctgtctgtctctgagaaagataatgcaggcttccattcttccacatgggcttttcccaaatatattcaccaacttagtcaacagactagttgtgggtaacacagagtatctctgtaggttatctccaggtgaatgcttagtgttggagt

SEQ ID NO: 25686 - DNA, 170 bp, Homo sapiens
  MAP TO CHR16.3; EXPRESSED IN HELA, SIGNAL =  11; EXPRESSED IN FETAL LIVER, SIGNAL = 1.5; NT HIT: gi14785404, EVALUE 5.00e-91; SWISSPROT HIT: P53350, EVALUE 6.00e-27; EST_HUMAN HIT: BG685341.1, EVALUE 7.00e-91
ctattttcacctccagatcttcattcaggaaaaggttgcccagcttgaggtctcgatgaataactcggtttcggtgcaggtactggcagccaagcacaatttgccgtaggtagtatcgggcctcaggctcagtcagggctttcctcctcttgtgcagctccaggagagac

SEQ ID NO: 25687 - DNA, 297 bp, Homo sapiens
  MAP TO CHR16.3; EXPRESSED IN HELA, SIGNAL = 1.3; EXPRESSED IN FETAL LIVER, SIGNAL = 1.2; EXPRESSED IN LUNG, SIGNAL = 1.3; EXPRESSED IN BONE MARROW, SIGNAL = 0.82; NT HIT: Y08512.1, EVALUE 1.10e+00; EST_HUMAN HIT: BE644986.1, EVALUE 0.00e+00
aactttgtattttgccacacattgttttcatttacagctatgtctgacaaatgagcacgtttgacatcactgataaatgcaacaccgtctagggcctacgagaaaaccagggggctcggctccgctggagcctctgcccgtggatttgtttagggaaggggagtcgaatatctatttttcttcttagtaaaattatctgccagagaaacaacgaagcatgaaaaagtactatttagaatgtgcatgcctatatatgattttaaaatgctaattgttgcattccgggaaactttccat

SEQ ID NO: 25688 - DNA, 158 bp, Homo sapiens
  MAP TO CHR16.3; EXPRESSED IN HELA, SIGNAL = 2.8; EXPRESSED IN LUNG, SIGNAL = 1.6; SWISSPROT HIT: O75351, EVALUE 2.00e-24; EST_HUMAN HIT: BG252701.1, EVALUE 9.00e-84; NT HIT: AF255952.1, EVALUE 6.00e-84
ttttcactctcccccagccacttggacatcagatctgaggaggacacagagaagaaggtggagttgttggcctctgttgccacggctttggccaggtaggatttccctgtgccagggggtccgaacagcagaatcccccgccagggggtgcgcttgcc

SEQ ID NO: 25689 - DNA, 256 bp, Homo sapiens
  MAP TO CHR19.3; EXPRESSED IN LUNG, SIGNAL = 1.2; EXPRESSED IN FETAL LIVER, SIGNAL = 8.2; EXPRESSED IN HELA, SIGNAL = 1.5; SWISSPROT HIT: P05362, EVALUE 2.00e-43; EST_HUMAN HIT: BE927155.1, EVALUE 0.00e+00; NT HIT: X59288.1, EVALUE 0.00e+00
ggctttccggcgcccaacgtgattctgacgaagccagaggtctcagaagggaccgaggtgacagtgaagtgtgaggcccaccctagagccaaggtgacgctgaatggggttccagcccagccactgggcccgagggcccagctcctgctgaaggccaccccagaggacaacgggcgcagcttctcctgctctgcaaccctggaggtggccggccagcttatacacaagaaccagacccgggagcttcgtgtcctgt

SEQ ID NO: 25690 - DNA, 77 bp, Homo sapiens
  MAP TO CHR16.3; EXPRESSED IN HELA, SIGNAL = 0.96; EST_HUMAN HIT: BE886652.1, EVALUE 8.50e-02; NT HIT: AE001206.1, EVALUE 2.30e-01
gctgcaaatggactgagctgcgtgaagcggtaaaaaacaaacctgcttgcatggaaggaatgttcctagccatttga

SEQ ID NO: 25691 - DNA, 149 bp, Homo sapiens
  MAP TO CHR16.3; EXPRESSED IN HELA, SIGNAL =  11; SWISSPROT HIT: O24495, EVALUE 5.80e+00; EST_HUMAN HIT: AU121805.1, EVALUE 7.00e-72; NT HIT: gi15319042, EVALUE 5.00e-75
  unsure 63
gaaataaaattggcctgaaagacgtcattactctacggaggcatgtggaaacaaaagttaganctaaaatccgtaagaggaaggtgacaacgaaaatcaaccgtcatgacaaaatcaatggaaagaggaagaccgccagaaaacagtaa

SEQ ID NO: 25692 - DNA, 135 bp, Homo sapiens
  MAP TO CHR14.3; EXPRESSED IN HELA, SIGNAL =  10; NT HIT: X15183.1, EVALUE 3.00e-70; SWISSPROT HIT: P07900, EVALUE 1.00e-20; EST_HUMAN HIT: AV758047.1, EVALUE 4.00e-70
aaaaagagtaatgggatatccaataaactgagaatgtttcttcacaatctcctttattcttcgttcctccaagtactcagtttggtcttctttcaggtgtaggataacttttgttccacgacccataggttcacc

SEQ ID NO: 25693 - DNA, 162 bp, Homo sapiens
  MAP TO CHR18.3; EXPRESSED IN HELA, SIGNAL = 1.2; NT HIT: AE005190.1, EVALUE 5.60e-01
taaagagaccaatgacagcacactttataaatccacagaagcagacatcagaaatcatttacagataaagccgcagaagactggccaagagattgacaatcagtggatacaggtctgggtaatcctaattcatgaaatagcactcaattccaggttttgcat

SEQ ID NO: 25694 - DNA, 171 bp, Homo sapiens
  MAP TO CHR19.3; EXPRESSED IN HELA, SIGNAL = 2.3; EXPRESSED IN LUNG, SIGNAL = 2.3; EST_HUMAN HIT: BF890779.1, EVALUE 8.00e-69; SWISSPROT HIT: P78363, EVALUE 2.00e-14; NT HIT: gi16163368, EVALUE 1.00e-91
agtgcaccctcagacagctgctccttggtgaggttcaaggggtggttgagtgtggtgatgctgtgggcgtggcgggccgggcctgggggcaggtgagcacggaggattgcgttgctggctcggttgacaaaggccaccatggagtgccagcctttgttgttgaaccagatc

SEQ ID NO: 25695 - DNA, 96 bp, Homo sapiens
  MAP TO CHR16.3; EXPRESSED IN HELA, SIGNAL = 0.87; EXPRESSED IN FETAL LIVER, SIGNAL = 1.3; EXPRESSED IN BONE MARROW, SIGNAL = 1.7; EST_HUMAN HIT: BF850369.1, EVALUE 5.00e-47; SWISSPROT HIT: O60268, EVALUE 2.00e-12; NT HIT: gi7662163, EVALUE 3.00e-47
gcacattcacgcacaacatgctggcctttggactgaacaagaagctgtgcaatgacttcctgaagaagcaggctgtgattggcaacctggatgaag

SEQ ID NO: 25696 - DNA, 128 bp, Homo sapiens
  MAP TO CHR19.3; EXPRESSED IN BONE MARROW, SIGNAL = 0.94; EXPRESSED IN HELA, SIGNAL = 1.2; NT HIT: gi14766466, EVALUE 5.00e-07; EST_HUMAN HIT: BF315871.1, EVALUE 6.00e-66; SWISSPROT HIT: O75820, EVALUE 1.00e-07
ggcttggtgatgtttgaggatgtgacggtatatttctccagggaggagtgggggctccttaatgtgacccagaagggcctataccgggatgtgatgctggagaactttgcactcgttagctcactggg

SEQ ID NO: 25697 - DNA, 268 bp, Homo sapiens
  MAP TO CHR18.3; EXPRESSED IN HELA, SIGNAL = 2.2; NT HIT: gi14759631, EVALUE 0.00e+00; EST_HUMAN HIT: AL539763.1, EVALUE 0.00e+00; SWISSPROT HIT: P33213, EVALUE 7.00e-03
cctttgtcactggaataaggcgcgtgaacattattgctggggacagacacattctggtggtgtggctggttcacagtttctaaaaatgaaaccagattctcatgatgtgaaagttcttctgcaacagggaaagaaacgatgttccaattcaactgagtatctccttctgtgagtgcccggaagagagaagggatcggttcatgcagctcctccactgtgctctttgaagttggaggtgtgtcactataatttcgaggattacacatac

SEQ ID NO: 25698 - DNA, 200 bp, Homo sapiens
  MAP TO CHR16.3; EXPRESSED IN HELA, SIGNAL = 2.1; NT HIT: gi14777707, EVALUE 1.00e-109; EST_HUMAN HIT: AA576054.1, EVALUE 1.00e-108; SWISSPROT HIT: P37945, EVALUE 5.00e-13
gtgggtggaattaaagacaaagtgctggcggcacacagagcgggactgaagcaagtcattattcctcggagaaatgaaaaagaccttgagggaatcccaggcaacgtacgacaggatttaagttttgtcacagcaagctgcctggatgaggttcttaatgcagcttttgatggtggctttactgtcaagaccagacctgg

SEQ ID NO: 25699 - DNA, 280 bp, Homo sapiens
  MAP TO CHR19.3; EXPRESSED IN HELA, SIGNAL = 0.95; NT HIT: AF287892.1, EVALUE 0.00e+00; SWISSPROT HIT: P20138, EVALUE 1.00e-27; EST_HUMAN HIT: BI906741.1, EVALUE 1.00e-53
caggacacatcgaggcggacggtactggtcgtggtcacacctgtcccaggcaaggtcacctgacaggtgaggctggtgccgtggtcctggggctttggggtaagggtgagcactgaggagcgggcagtagtggggcccggggaggacacggaggccccaatccaggagatcatggggggtgtcccctgcttacaggcccagggcacagagcaggtcaggttcctggagtggccagactctagggtccctaggatgaggatgtcaggcctatgggtcaggg

SEQ ID NO: 25700 - DNA, 176 bp, Homo sapiens
  MAP TO CHR14.3; EXPRESSED IN HELA, SIGNAL = 1.2; NT HIT: U19260.1, EVALUE 1.00e-94; SWISSPROT HIT: Q13114, EVALUE 1.00e-26; EST_HUMAN HIT: BI761302.1, EVALUE 2.00e-94
gcgagtgatagacagccaagcagagaaactgaaggagcttgacaaggagatccggcccttccggcagaactgggaggaagcagacagcatgaagagcagcgtggagtccctccagaaccgcgtgaccgagctggagagcgtggacaagagcgcggggcaagtggctcggaacacag

SEQ ID NO: 25701 - DNA, 174 bp, Homo sapiens
  MAP TO CHR14.3; EXPRESSED IN HELA, SIGNAL = 0.93; SWISSPROT HIT: Q06639, EVALUE 3.30e+00
gatattgttaaaatgagtgtgttaatagatcttattgagatgttaaaatggaagagttattcagtgtcagtaccttttctcactcaatttttatgtgtaactatgatgaagaccttaatactttttgtctacaccctgttaattttaggaggtaagaaaaagtttggcaggtgg

SEQ ID NO: 25702 - DNA, 184 bp, Homo sapiens
  MAP TO CHR16.3; EXPRESSED IN HELA, SIGNAL = 1.4; SWISSPROT HIT: P48322, EVALUE 1.50e-02; NT HIT: gi16164646, EVALUE 2.00e-99; EST_HUMAN HIT: AI660308.1, EVALUE 3.00e-99
actgtaaaaccatgcctagatcttttggttaactggctgcacatataccttaataaccaggattcgggaacaaaggcattctgcgatgttgctctccatggaccattttactcagcctgccaagctgtgttctacacctttgtttttagacacaagcagcttttgagcggaaacctgaaagaag

SEQ ID NO: 25703 - DNA, 186 bp, Homo sapiens
  MAP TO CHR16.3; EXPRESSED IN HELA, SIGNAL = 0.97; EST_HUMAN HIT: AI188004.1, EVALUE 1.00e-77; NT HIT: gi14775113, EVALUE 1.00e-82; SWISSPROT HIT: P08120, EVALUE 3.80e-01
gaccgggccaaagccgaggcagtgaataagaggctccggaagcagctggccgagttccgggcaccacaggtgatgacttacgtccgggagaagatcttaaatgcggacctggagaagagcatcaggatgtgggaaaggaaagtggagatagcagaggtgagccacggggagccccaagatgggcag

SEQ ID NO: 25704 - DNA, 304 bp, Homo sapiens
  MAP TO CHR16.3; EXPRESSED IN HELA, SIGNAL =   1; NT HIT: gi4759143, EVALUE 0.00e+00; SWISSPROT HIT: Q14940, EVALUE 2.00e-42; EST_HUMAN HIT: AL541352.1, EVALUE 0.00e+00
gtgtttcacctgtctcggaaagtaacatctctggtccctgagagctgcctgctgattttgctgggcctggtgctagggggaattgttttggctgtggccaagaaagctgagtaccagctggagccaggcaccttcttcctcttcctgctgcctcctattgtgttggactcaggctatttcatgcctagcaggctgttctttgacaacttgggtgccatcctcacctatgccgtggtaggcacactctggaatgccttcacaacaggcgctgccctctggggcttgcagcaggctggacttgtag

SEQ ID NO: 25705 - DNA, 108 bp, Homo sapiens
  MAP TO CHR9.3; EXPRESSED IN BRAIN, SIGNAL =   2; EXPRESSED IN LUNG, SIGNAL = 1.8; EXPRESSED IN HELA, SIGNAL = 7.8; EXPRESSED IN FETAL LIVER, SIGNAL = 2.4; EST_HUMAN HIT: BG944436.1, EVALUE 4.00e-54; SWISSPROT HIT: P10599, EVALUE 3.00e-15; NT HIT: X54540.1, EVALUE 3.00e-54
actcacatgaaagaaaggcttgatcattttgcaaggcccacaccacgtggctgagaagtcaactactacaagtttatcacctgcagcgtccaaggcttcctgaaaagc

SEQ ID NO: 25706 - DNA, 193 bp, Homo sapiens
  MAP TO CHR19.3; EXPRESSED IN ADULT LIVER, SIGNAL =  12; EXPRESSED IN HELA, SIGNAL = 5.9; SWISSPROT HIT: P18377, EVALUE 2.00e-13; NT HIT: gi14787068, EVALUE 1.00e-104; EST_HUMAN HIT: BI769530.1, EVALUE 1.00e-104
aggaacctccaactggtctggcaactacttcacggagacggcgggcacctcgctgctggtgacgcagaatgggaggggcggcctgcggagccagctggaggccattttcctgagggactgggactccccttacagccatgaccttgacacctcagctgacagcgtgggcaacgcctgccgcctgctctgaggc

SEQ ID NO: 25707 - DNA, 319 bp, Homo sapiens
  MAP TO CHR6.3; EXPRESSED IN LUNG, SIGNAL = 3.2; EXPRESSED IN HELA, SIGNAL = 5.9; EXPRESSED IN HEART, SIGNAL = 3.7; EST_HUMAN HIT: BI868590.1, EVALUE 0.00e+00; SWISSPROT HIT: Q02084, EVALUE 9.00e-15; NT HIT: gi14761275, EVALUE 0.00e+00
tcagggtcttagcaggaggcgtgttcctggccacttgagccacaggaaggggaccaggcgccgggtgaaggtggcagtgaaggtgtagatgagttcctgtgactctgcgttggtgaaagtcacggtgcccccttcataatccagggcgatgcccactctccggggccgcagtgctgggaaaagctcagcctcggggctggtgttggcccagatgccggaggaggagaggcgcagcgcccacacgccatcctctggccgcagggagaggtctcccttcctcttcacagagtctctagccacccccaccatgcagctttcc

SEQ ID NO: 25708 - DNA, 193 bp, Homo sapiens
  MAP TO CHR3.3; EXPRESSED IN LUNG, SIGNAL = 2.6; EXPRESSED IN HELA, SIGNAL = 2.1; EXPRESSED IN PLACENTA, SIGNAL = 1.9; EXPRESSED IN HEART, SIGNAL =   2; EXPRESSED IN FETAL LIVER, SIGNAL = 2.3; EXPRESSED IN ADULT LIVER, SIGNAL = 1.9; EXPRESSED IN BRAIN, SIGNAL = 2.2; SWISSPROT HIT: Q12860, EVALUE 2.00e-12; NT HIT: U35371.1, EVALUE 1.00e-45; EST_HUMAN HIT: AI272244.1, EVALUE 1.00e-95
tccagatccaacaagggtaatggtacccccttccagtatggatgtcactgttggagagagtattgttttaccgtgccaggtaacgcatgatcactcgctagacatcgtgtttacttggtcatttaatggacacctgatagactttgacagagatggggaccactttgaaagagttggaggggtaagtattaat

SEQ ID NO: 25709 - DNA, 167 bp, Homo sapiens
  MAP TO CHR5.3; EXPRESSED IN LUNG, SIGNAL = 0.69; EXPRESSED IN HELA, SIGNAL = 2.1; EXPRESSED IN BRAIN, SIGNAL = 0.78; EST_HUMAN HIT: AI339444.1, EVALUE 4.00e-89; SWISSPROT HIT: O88895, EVALUE 9.00e-26; NT HIT: AF059650.1, EVALUE 3.00e-89
cccagacctgctatagttctcctcaggacccctctcctctgcatcagcctcatcagtcctgtcataggtcaggaggtctgcaggcacgtcatgaatctggacactaggtgcatggttcagcatcttcaggttttcaaagattgtctggcggatctggtccagatact

SEQ ID NO: 25710 - DNA, 172 bp, Homo sapiens
  MAP TO CHR17.3; EXPRESSED IN HEART, SIGNAL = 2.1; EXPRESSED IN HELA, SIGNAL =   3; EXPRESSED IN PLACENTA, SIGNAL =   2; EXPRESSED IN ADULT LIVER, SIGNAL = 2.1; EXPRESSED IN BRAIN, SIGNAL = 3.8; EST_HUMAN HIT: BF594748.1, EVALUE 2.00e-54; SWISSPROT HIT: P36199, EVALUE 4.00e-28; NT HIT: gi13652709, EVALUE 2.00e-90
cacctccgtagaaggagaagggaccattggggatgagctcgcccggctccaggcggtccaccagcggccgcatccggcgcggactgcggaagaaggcgtggcgccgggcgcccagggcgctcagctgcttcatcctccgctccttggagcgccggttctggaaccagacctg

SEQ ID NO: 25711 - DNA, 187 bp, Homo sapiens
  MAP TO CHR19.3; EXPRESSED IN BRAIN, SIGNAL = 3.2; EXPRESSED IN HELA, SIGNAL = 4.8; EST_HUMAN HIT: AA130225.1, EVALUE 2.00e-97; SWISSPROT HIT: P38117, EVALUE 1.00e-21; NT HIT: gi4503608, EVALUE 1.00e-97
tgtgcagaaagccaagaagaagaagatcgaggtgatcaagcctggggacctgggtgtggacctgacctccaagctctctgtgatcagtgtggaggacccgccccagcgcacggccggcgtcaaggtggagaccactgaggacctggtggccaagctgaaggagattgggcggatttgagcccctccc

SEQ ID NO: 25712 - DNA, 185 bp, Homo sapiens
  MAP TO CHR17.3; EXPRESSED IN HELA, SIGNAL = 5.2; EXPRESSED IN LUNG, SIGNAL = 6.9; EXPRESSED IN HEART, SIGNAL = 4.7; EXPRESSED IN PLACENTA, SIGNAL = 3.7; EXPRESSED IN ADULT LIVER, SIGNAL = 4.8; EXPRESSED IN FETAL LIVER, SIGNAL = 3.1; EXPRESSED IN BRAIN, SIGNAL =   4; EST_HUMAN HIT: AW207518.1, EVALUE 7.00e-88; SWISSPROT HIT: Q15027, EVALUE 4.00e-27; NT HIT: gi13632792, EVALUE 5.00e-88
tctgaggacctgggaagcctgcaccctggggccctactgtttcgagcgtctgggcatcctccatctcttcccaccatggctgatgcccttgcccatggagctgatgtcaactgggtcaatgggggccaagataatgccacaccgctgatccaggccacagctgctgtaagagccctgctgacctc

SEQ ID NO: 25713 - DNA, 128 bp, Homo sapiens
  MAP TO CHRX.3; EXPRESSED IN PLACENTA, SIGNAL =  21; EXPRESSED IN ADULT LIVER, SIGNAL =  22; EXPRESSED IN HELA, SIGNAL =  15; EST_HUMAN HIT: BE880321.1, EVALUE 9.00e-62; SWISSPROT HIT: P49061, EVALUE 6.00e-08; NT HIT: L47361.1, EVALUE 4.00e-66
atggccccctttgagcccctggcttctggcatcctgttgttgctgtggctgatagcccccagcagggcctgcacctgtgtcccaccccacccacagacggccttctgcaattccgacctcggtgagtc

SEQ ID NO: 25714 - DNA, 314 bp, Homo sapiens
  MAP TO CHR10.3; EXPRESSED IN LUNG, SIGNAL = 5.5; EXPRESSED IN HELA, SIGNAL = 2.5; EST_HUMAN HIT: BG954398.1, EVALUE 0.00e+00; SWISSPROT HIT: P30205, EVALUE 2.00e-38; NT HIT: AB020830.1, EVALUE 0.00e+00
gtttggccctgaggctggtgaatggaggtgacaggtgtcagggccgagtggaggtcctataccgaggctcctggggcaccgtgtgtgatgactactgggacaccaatgatgccaatgtggtttgcaggcagctgggctgtggctgggccatgtcagccccaggaaatgcccggtttggccagggttcaggacccattgtcctggatgatgtgcgctgctcaggacatgagtcctatctgtggagctgcccccacaatggctggctctcccacaactgtggccatcatgaagacgctggtgtcatctgctcaggt

SEQ ID NO: 25715 - DNA, 171 bp, Homo sapiens
  MAP TO CHR6.3; EXPRESSED IN BRAIN, SIGNAL =   3; EXPRESSED IN HELA, SIGNAL = 2.2; EXPRESSED IN HEART, SIGNAL = 2.5; SWISSPROT HIT: Q03518, EVALUE 1.00e-25; NT HIT: X66401.1, EVALUE 1.00e-91; EST_HUMAN HIT: AL571889.1, EVALUE 2.00e-88
tacctgtgtcatagccctgagggagtccagagatgaaactatgggccccagactttactgcagcagctgtgatttcctccatagttggcttctgggtcaggccataggcaatattttcttgaagacttcttccaaatacctgtggctcttgtcccactgcagccacctgag

SEQ ID NO: 25716 - DNA, 168 bp, Homo sapiens
  MAP TO CHR6.3; EXPRESSED IN LUNG, SIGNAL = 5.6; EXPRESSED IN HELA, SIGNAL = 2.1; EXPRESSED IN BRAIN, SIGNAL = 0.95; EST_HUMAN HIT: M78052.1, EVALUE 1.00e-89; SWISSPROT HIT: Q03518, EVALUE 8.00e-27; NT HIT: L76469.1, EVALUE 7.00e-90
ggtttgggtaggcaaaggagacatcttggaactggacaaggccctccaagtgtaagggagtcaacagaccactgggtgggcagcgaggggtgcggtccaggtactcaaatattttctctgaggagcccacagccttctgtactctggggtagatggagagcagtacct

SEQ ID NO: 25717 - DNA, 121 bp, Homo sapiens
  MAP TO CHR8.3; EXPRESSED IN BRAIN, SIGNAL = 1.6; EXPRESSED IN LUNG, SIGNAL = 1.6; EXPRESSED IN HELA, SIGNAL =   2; EST_HUMAN HIT: AW662606.1, EVALUE 8.00e-62; SWISSPROT HIT: P05824, EVALUE 6.90e-01; NT HIT: gi14744937, EVALUE 5.00e-62
ctggggcctcatagttgagcacgtagtagtcgtggacgtacatgaggacggctattggctgtccgatgatgagcgacagccacacagctgcgttgccatagttgccctggaaaaagcggcc

SEQ ID NO: 25718 - DNA, 179 bp, Homo sapiens
  MAP TO CHR17.3; EXPRESSED IN ADULT LIVER, SIGNAL = 8.2; EXPRESSED IN BRAIN, SIGNAL = 4.6; EXPRESSED IN HELA, SIGNAL = 3.4; EXPRESSED IN LUNG, SIGNAL = 3.6; SWISSPROT HIT: P30054, EVALUE 4.00e-21; EST_HUMAN HIT: AV753617.1, EVALUE 3.00e-47; NT HIT: U14973.1, EVALUE 3.00e-46
ctgaaagcaagatgggtcaccagcagctctactagagccacccatgaaaattcggccggggttctcactcttgctgcgtctgctcaaaccagcatggtctgatcctgaaacatggcctcaataggtgctgccagtgtttccatcagtacatgaaggatataggtttcattaagttggac

SEQ ID NO: 25719 - DNA, 208 bp, Homo sapiens
  MAP TO CHR19.3; EXPRESSED IN HELA, SIGNAL = 5.2; EXPRESSED IN LUNG, SIGNAL = 0.46; SWISSPROT HIT: P32447, EVALUE 1.50e-02; EST_HUMAN HIT: BE018858.1, EVALUE 1.00e-113; NT HIT: gi15303185, EVALUE 1.00e-113
agatgcagtccatggagttctcagggaggaggccagggatgcagccagggagccccaagcccttgataggagtgcagttgagtgggaggccgcagcccagggaggggtcctgggtctctatggcctccagcctgtccatgttgttgtcccagttgatatggaagcgggtcacccgggggttcgaggccaagatgttccgctggagctg

SEQ ID NO: 25720 - DNA, 174 bp, Homo sapiens
  MAP TO CHR4.3; EXPRESSED IN LUNG, SIGNAL = 3.3; EXPRESSED IN HEART, SIGNAL = 5.7; EXPRESSED IN HELA, SIGNAL = 2.8; EXPRESSED IN PLACENTA, SIGNAL = 6.7; EXPRESSED IN ADULT LIVER, SIGNAL = 5.9; EXPRESSED IN BRAIN, SIGNAL = 4.8; SWISSPROT HIT: Q14141, EVALUE 3.00e-28; EST_HUMAN HIT: BG616046.1, EVALUE 7.00e-91; NT HIT: gi16158905, EVALUE 5.00e-91
tagttgagaatgaaaatcattgcgattttgtgaaacttcgagagatgctgatccgcgtgaacatggaggacttgcgagagcagactcacacccgccactatgaattgtaccgacgctgtaagcttgaagagatggggttcaaggacactgaccctgacagcaaacccttcaggt

SEQ ID NO: 25721 - DNA, 153 bp, Homo sapiens
  MAP TO CHR6.3; EXPRESSED IN LUNG, SIGNAL =  12; EXPRESSED IN HELA, SIGNAL =  60; EXPRESSED IN HEART, SIGNAL = 8.9; EXPRESSED IN PLACENTA, SIGNAL = 4.7; SWISSPROT HIT: P25388, EVALUE 7.00e-20; EST_HUMAN HIT: AW938235.1, EVALUE 3.00e-74; NT HIT: gi14732184, EVALUE 2.00e-68
ccaggatggccagtccatgttatggatctcaacgaaggcaaacacctttacacgctagatggtggggacatcatcaacgccctgtgcttcagccctaaccgctactggctgtgtgctgccacaggccccagcatcaagatctgggtgagtgtg

SEQ ID NO: 25722 - DNA, 188 bp, Homo sapiens
  MAP TO CHR20.3; EXPRESSED IN HEART, SIGNAL = 5.3; EXPRESSED IN HELA, SIGNAL = 5.6; EXPRESSED IN PLACENTA, SIGNAL = 4.4; EXPRESSED IN ADULT LIVER, SIGNAL = 5.9; EXPRESSED IN BRAIN, SIGNAL = 5.4; NT HIT: gi14770087, EVALUE 5.00e-88; SWISSPROT HIT: Q12381, EVALUE 2.00e-10; EST_HUMAN HIT: BG762169.1, EVALUE 7.00e-88
cagagtgaagatgtctggctggaagcagccaggttgcagcctggggacacagccaaggccgtggtagcccaagctgtccgtcatctcccacagtctgtcaggatttacatcagagccgcagagctggaaacggacattcgtgcaaagaagcgggttcttcggaaaggtgagcctccctcggaggtgct

SEQ ID NO: 25723 - DNA, 131 bp, Homo sapiens
  MAP TO CHR16.3; EXPRESSED IN ADULT LIVER, SIGNAL = 1.8; EXPRESSED IN BRAIN, SIGNAL = 1.9; EXPRESSED IN LUNG, SIGNAL = 1.7; EXPRESSED IN HEART, SIGNAL = 1.8; EXPRESSED IN HELA, SIGNAL = 3.4; EXPRESSED IN PLACENTA, SIGNAL = 1.7; SWISSPROT HIT: Q48251, EVALUE 4.50e+00; EST_HUMAN HIT: AW205308.1, EVALUE 9.00e-68; NT HIT: gi13628127, EVALUE 1.00e-63
cgctcaccggttgaaatgatccaccacactgagcagcaccagggggtggaccaccaccttctgcactgccagctccggcatcgcgacacaccccgctcgccaggcctggctccctgccacacgcaaacacc

SEQ ID NO: 25724 - DNA, 230 bp, Homo sapiens
  MAP TO CHR6.3; EXPRESSED IN HELA, SIGNAL = 5.3; EXPRESSED IN PLACENTA, SIGNAL = 2.8; EXPRESSED IN ADULT LIVER, SIGNAL = 4.4; SWISSPROT HIT: P43275, EVALUE 2.00e-27; EST_HUMAN HIT: AI283902.1, EVALUE 8.00e-39; NT HIT: U91328.1, EVALUE 1.00e-126
gccttcttgttgagcttgaaggaacccgaggctccggtaccctttgtctgcaccaacgttcccttgcttaccaggctcttaatgcccagcttaatgcggctgttgttcttctccacgtcgtagcctgcggccgccagcgcctttttaagagctgccaacgacacaccaccacgctccttagaggaggaagcagcctgcacgatcagctctgacacggaagggccagcggg

SEQ ID NO: 25725 - DNA, 203 bp, Homo sapiens
  MAP TO CHR4.3; EXPRESSED IN HELA, SIGNAL = 3.3; EXPRESSED IN ADULT LIVER, SIGNAL = 1.3; NT HIT: AF183409.1, EVALUE 1.00e-110; SWISSPROT HIT: P52875, EVALUE 5.00e-24; EST_HUMAN HIT: AI375366.1, EVALUE 1.00e-110
ccagttcataccaataaagaagatcctgctacccaaactaatttgggatttatccatgcatttgtcgctgccatatcagttattattgtatctgaattgggtgataagacattttttatagcagccatcatggcaatgcgctataaccgcctgaccgtgctggctggtgcaatgcttgccttgggactaatgacatgcttgtc

SEQ ID NO: 25726 - DNA, 155 bp, Homo sapiens
  MAP TO CHR8.3; EXPRESSED IN HELA, SIGNAL = 2.9; EXPRESSED IN PLACENTA, SIGNAL = 2.2; EXPRESSED IN LUNG, SIGNAL = 1.3; EXPRESSED IN HEART, SIGNAL = 3.2; EXPRESSED IN FETAL LIVER, SIGNAL = 2.4; EXPRESSED IN ADULT LIVER, SIGNAL = 2.4; SWISSPROT HIT: P21642, EVALUE 8.80e-01; EST_HUMAN HIT: BG425621.1, EVALUE 4.00e-55; NT HIT: AJ249601.1, EVALUE 4.00e-82
tggcagtggtccggctgcagcaacagctggaagaggctgagggcagagaccctcagggtgccatggtcatctgtgagcagctaggggacctcttctccaaggcaggagactttcccagggcagctgaggcttaccagaagcaggtgtgtggcccc

SEQ ID NO: 25727 - DNA, 291 bp, Homo sapiens
  MAP TO CHR1.3; EXPRESSED IN HELA, SIGNAL = 4.7; EXPRESSED IN PLACENTA, SIGNAL =   4; EXPRESSED IN ADULT LIVER, SIGNAL = 6.4; EXPRESSED IN BRAIN, SIGNAL = 8.4; SWISSPROT HIT: P42898, EVALUE 4.00e-43; EST_HUMAN HIT: BG979786.1, EVALUE 0.00e+00; NT HIT: AF105978.1, EVALUE 0.00e+00
ggaaagccagaacccagagtgtaggggagtgctggctccacacctccccgcagcgccatgatgttcttcaggcccagctgcttagctttgtgcagatggcccgtgatctcctccaggcgctgacggcagcaggtcatgtgcaggatggtctccaggccacagtagttcacggcggtgctggcgatcatcatggaggaggtctccttgtctgagccagggtcacctgctgggtgccaggtcacgtctatgtagagggggccacctgctgccatccggtcaaacctgtagggg

SEQ ID NO: 25728 - DNA, 121 bp, Homo sapiens
  MAP TO CHR14.3; EXPRESSED IN ADULT LIVER, SIGNAL = 5.7; EXPRESSED IN BRAIN, SIGNAL = 3.1; EXPRESSED IN HELA, SIGNAL = 3.8; EXPRESSED IN PLACENTA, SIGNAL = 6.8; EXPRESSED IN HEART, SIGNAL = 3.7; SWISSPROT HIT: P35166, EVALUE 2.70e+00; EST_HUMAN HIT: BG617620.1, EVALUE 2.00e-53; NT HIT: AF079558.1, EVALUE 1.00e-59
cccaggcttaccagaatgcatttctctttgagagtccagacttctggcttaaccagggcaagcagggacaggactttctcattcccagggagaaatccacacttatggactgtgagaaaga

SEQ ID NO: 25729 - DNA, 148 bp, Homo sapiens
  MAP TO CHR1.3; EXPRESSED IN LUNG, SIGNAL =  31; EXPRESSED IN HELA, SIGNAL =  46; EXPRESSED IN PLACENTA, SIGNAL =  28; EXPRESSED IN ADULT LIVER, SIGNAL =  23; EXPRESSED IN BRAIN, SIGNAL =  31; EST_HUMAN HIT: BF834713.1, EVALUE 3.00e-77; NT HIT: M20543.1, EVALUE 5.00e-78; SWISSPROT HIT: P10994, EVALUE 8.00e-23
tctagaagcatttgcggtggacgatggaagggccggcctcgtcgtactcctgcttggtgatccacatctgctggaaggtggacagcgaggccaggatggagccgccgatccacaccgagtatttgcgctccggcggggcgatgatctg

SEQ ID NO: 25730 - DNA, 160 bp, Homo sapiens
  MAP TO CHR19.3; EXPRESSED IN ADULT LIVER, SIGNAL = 1.8; EXPRESSED IN BRAIN, SIGNAL = 2.6; EXPRESSED IN HELA, SIGNAL = 4.9; SWISSPROT HIT: P15121, EVALUE 3.00e-20; EST_HUMAN HIT: BG707126.1, EVALUE 3.00e-56; NT HIT: gi14745057, EVALUE 2.00e-56
agtcccctccaggccgggtgactgaggccgtgaatgtggccatcaatgtcgggtactgccacattgactgtgcccacgtgtactagcatgagaatgaggtgggggtggccattcaggagaagctcagggagcaggtggtaaagcgtgaggagctcttcat

SEQ ID NO: 25731 - DNA, 192 bp, Homo sapiens
  MAP TO CHR17.3; EXPRESSED IN LUNG, SIGNAL =   2; EXPRESSED IN HELA, SIGNAL = 3.2; EXPRESSED IN HEART, SIGNAL = 1.2; SWISSPROT HIT: Q92610, EVALUE 2.50e+00; EST_HUMAN HIT: AL552204.1, EVALUE 2.00e-94; NT HIT: gi9910241, EVALUE 1.00e-94
attggcctcacttacccactaaagtaaagttgctctccaaaagctccctatgagtgttaaaccaggcctgtgcaaggcgactgtttttattcttcccaatgatgtaattcatgatataagcaagcagaccagtcaccatcaaaatttctagataataactctcccagctgttctggaggtgtgcaggaacct

SEQ ID NO: 25732 - DNA, 177 bp, Homo sapiens
  MAP TO CHR13.3; EXPRESSED IN LUNG, SIGNAL = 3.5; EXPRESSED IN HEART, SIGNAL = 2.6; EXPRESSED IN HELA, SIGNAL = 2.5; EXPRESSED IN PLACENTA, SIGNAL = 1.2; EXPRESSED IN ADULT LIVER, SIGNAL = 2.1; EST_HUMAN HIT: AW806634.1, EVALUE 7.00e-88; NT HIT: gi13649251, EVALUE 7.00e-53; SWISSPROT HIT: Q61087, EVALUE 6.60e-01
tcagggaaatgcatgggaacccgtggcctccttaaaaggcaagaaattttctctctgatttgctctcttacatttgaatctgagatagcagtcgttgcagtacagttggtggtttctgatcctgacttcagctcctgaggaagagcctccgaggtcacactcacaggcaacacactg

SEQ ID NO: 25733 - DNA, 385 bp, Homo sapiens
  MAP TO CHR6.3; EXPRESSED IN BRAIN, SIGNAL = 3.7; EXPRESSED IN HELA, SIGNAL =  11; EXPRESSED IN LUNG, SIGNAL = 4.5; EXPRESSED IN HEART, SIGNAL = 2.7; EXPRESSED IN ADULT LIVER, SIGNAL = 2.4; EST_HUMAN HIT: BG722363.1, EVALUE 0.00e+00; NT HIT: gi16174414, EVALUE 0.00e+00; SWISSPROT HIT: P02262, EVALUE 1.00e-55
acttgcccttggccttgtggtggctctcagttttcttaggcagcagcacggcctggatattgggcaggacaccaccctgggcgatggtcactttaccaagcagcttgttgagctcctcgtcgttgcggatggccagctgcaagtggcgcgggatgatgcgggtcttcttgttgtcgcgggccgcgttgccagccagttccaggatctcggcggttaggtactccaacaccgccgccaggtacaccggcgctccggcaccgacccgctcagcgtagttgcccttgcggagcagtcggtgcactcggcccactgggaactgaagacccgcccttgaagaacgggtcttagccttggcgcgagctttgccgccctgcttgccacgtcc

SEQ ID NO: 25734 - DNA, 105 bp, Homo sapiens
  MAP TO CHR17.3; EXPRESSED IN LUNG, SIGNAL = 2.9; EXPRESSED IN HEART, SIGNAL = 1.9; EXPRESSED IN PLACENTA, SIGNAL = 4.7; EXPRESSED IN HELA, SIGNAL =   2; EXPRESSED IN FETAL LIVER, SIGNAL = 4.9; EXPRESSED IN ADULT LIVER, SIGNAL = 2.7; EXPRESSED IN BRAIN, SIGNAL = 3.5; SWISSPROT HIT: Q9QX11, EVALUE 2.00e-15; NT HIT: AF125357.1, EVALUE 2.00e-52; EST_HUMAN HIT: BE769287.1, EVALUE 1.00e-50
agccagccttctcggtctggattgaagaaagtgtgagtgaggtcattcccgtcgtcttctgggattttaaagggttcattttttatgctctcatagagattctgg

SEQ ID NO: 25735 - DNA, 261 bp, Homo sapiens
  MAP TO CHR12.3; EXPRESSED IN LUNG, SIGNAL = 1.3; EXPRESSED IN HEART, SIGNAL = 1.6; EXPRESSED IN HELA, SIGNAL =   2; EXPRESSED IN FETAL LIVER, SIGNAL = 1.9; EXPRESSED IN ADULT LIVER, SIGNAL =   2; EXPRESSED IN BRAIN, SIGNAL = 0.78; EST_HUMAN HIT: AU143101.1, EVALUE 1.00e-127; SWISSPROT HIT: P31276, EVALUE 3.00e-36; NT HIT: gi14762944, EVALUE 0.00e+00
agacgtggttcccctgcagcccgaggtgagcagctaccggcgcgggcgcaagaaacgcgtgccctacactaaggtgcagctgaaggagctagagaaggaatacgcggctagcaagttcatcaccaaagagaagcgccggcgcatctccgccaccacgaacctctctgagcgccaggtaaccatctggttccagaaccggcgggtcaaagagaagaaggtggtcagcaaatcgaaagcgcctcatctccactccacctgacc

SEQ ID NO: 25736 - DNA, 106 bp, Homo sapiens
  MAP TO CHR1.3; EXPRESSED IN LUNG, SIGNAL = 1.7; EXPRESSED IN HEART, SIGNAL = 0.82; EXPRESSED IN HELA, SIGNAL = 2.2; EXPRESSED IN BRAIN, SIGNAL = 0.48; EXPRESSED IN ADULT LIVER, SIGNAL = 0.92; NT HIT: gi7705619, EVALUE 1.00e-50; SWISSPROT HIT: P36416, EVALUE 3.60e+00; EST_HUMAN HIT: BE876695.1, EVALUE 1.00e-50
cagcgtgataagaggctggagtgggaaatgatgtgcagagtaaagccagatgttgtccaagacaaagagacagagagaaatcttcagagaattgcaacaaggtaag

SEQ ID NO: 25737 - DNA, 114 bp, Homo sapiens
  MAP TO CHR18.3; EXPRESSED IN HELA, SIGNAL =   2; EXPRESSED IN HEART, SIGNAL = 1.2; EXPRESSED IN FETAL LIVER, SIGNAL = 0.98; EXPRESSED IN BRAIN, SIGNAL = 1.2; SWISSPROT HIT: P70362, EVALUE 3.00e-17; EST_HUMAN HIT: AV703518.1, EVALUE 2.00e-50; NT HIT: gi16166906, EVALUE 1.00e-50
ccagtgtgggaggtagcagatgccctcatcagccacaaactccagcacgccacagtgcgtcatgcggtccaaattcttactggtcagtttgaacagcatgggataggtaatgtt

SEQ ID NO: 25738 - DNA, 173 bp, Homo sapiens
  MAP TO CHR19.3; EXPRESSED IN HEART, SIGNAL = 3.1; EXPRESSED IN HELA, SIGNAL = 6.9; EXPRESSED IN ADULT LIVER, SIGNAL = 2.2; EXPRESSED IN BRAIN, SIGNAL = 3.7; SWISSPROT HIT: P54725, EVALUE 1.00e-24; EST_HUMAN HIT: R33188.1, EVALUE 1.00e-89; NT HIT: gi13631475, EVALUE 7.00e-87
cccaccttggtcaccatgacgaccacaaagttcttctcatcgatgcgatagtccctgatagggacatcgtcactcaagatcttgccggcatagatgagtttctgtccagccacggggaaggcatcacgacccttctcagcttctatcttctcctttagcaccttcacctagag

SEQ ID NO: 25739 - DNA, 128 bp, Homo sapiens
  MAP TO CHR6.3; EXPRESSED IN LUNG, SIGNAL =   6; EXPRESSED IN HELA, SIGNAL = 3.6; EXPRESSED IN PLACENTA, SIGNAL = 5.8; EXPRESSED IN HEART, SIGNAL = 7.9; EXPRESSED IN ADULT LIVER, SIGNAL = 8.1; EXPRESSED IN BRAIN, SIGNAL =  10; EXPRESSED IN FETAL LIVER, SIGNAL = 4.1; SWISSPROT HIT: Q03519, EVALUE 7.00e-16; EST_HUMAN HIT: BI760174.1, EVALUE 2.00e-53; NT HIT: X66401.1, EVALUE 4.00e-66
gagaagaggcacatgaagaagatggcactggcaaaggcatgggggtcaaaatcacctcccaggatgtcaatcacacgaccagaatagtgagggattaatgtctcacctgaaagaggcatgaaaaataa

SEQ ID NO: 25740 - DNA, 391 bp, Homo sapiens
  MAP TO CHR18.3; EXPRESSED IN LUNG, SIGNAL = 4.7; EXPRESSED IN HELA, SIGNAL = 2.8; EXPRESSED IN PLACENTA, SIGNAL =   3; EXPRESSED IN FETAL LIVER, SIGNAL = 2.3; EXPRESSED IN ADULT LIVER, SIGNAL = 3.7; NT HIT: M63599.1, EVALUE 0.00e+00; EST_HUMAN HIT: BI909660.1, EVALUE 0.00e+00; SWISSPROT HIT: O75363, EVALUE 3.20e-02
gagggtctcttctgtgacgccatcacatccaggctctcggaggtggctgcactgtcttcttggatggtctggagctcgtcggactcagagggcctgtctttgaaggtgttgtcctccctccccggggcatctcgggaaaagaggcggatcaagtgggggcggctccctgggtcagctgggtgggcatcctgccaggcattcttcgggtccgctgtgcgcttggagtcagtcaccgctgtgtcctgagaggaggtcccattgttctggttcgcatctgcctctcctgcaaacaacaatgagatatgaatacgggcctgtgcaaagctgagcaccggacaaagcagctttctctgaggggtcttgacctagctgtctcctataaaacccacag

SEQ ID NO: 25741 - DNA, 205 bp, Homo sapiens
  MAP TO CHR11.3; EXPRESSED IN LUNG, SIGNAL = 1.6; EXPRESSED IN HELA, SIGNAL = 1.9; EXPRESSED IN BRAIN, SIGNAL = 1.9; NT HIT: AJ297412.1, EVALUE 1.00e-112; SWISSPROT HIT: P15407, EVALUE 6.00e-37; EST_HUMAN HIT: BE907296.1, EVALUE 1.00e-109
cttacctgttcacaaggccttcgacgtacccctggaggcggccccagggcccggatgactcctggccggggttgtggggggctgtactgagggtaggtcagaggcctggggtaactgctgggccccaggaaatgaggctgtaccatccactgcagctcctgactgccactcatggtgttgatgcttggcaccaggtggaacttct

SEQ ID NO: 25742 - DNA, 188 bp, Homo sapiens
  MAP TO CHR6.3; EXPRESSED IN LUNG, SIGNAL = 1.7; EXPRESSED IN HELA, SIGNAL = 2.4; EXPRESSED IN HEART, SIGNAL =   3; EXPRESSED IN FETAL LIVER, SIGNAL = 2.2; EXPRESSED IN ADULT LIVER, SIGNAL = 3.4; EXPRESSED IN BRAIN, SIGNAL = 4.1; EST_HUMAN HIT: AI347640.1, EVALUE 1.00e-83; SWISSPROT HIT: P19811, EVALUE 7.40e+00; NT HIT: gi16174895, EVALUE 7.00e-84
tctctctctctctttattttcagtttttttgctgttatccagataattaataaaaaccaaccacgcaaaactgggtcccaccctctccttttgctcccagcctacctccccagttgtgggaacaggtctggagtgagaggcagggagtggctaatgccaccaggaagaaatgaaaactggctcagaga

SEQ ID NO: 25743 - DNA, 415 bp, Homo sapiens
  MAP TO CHR6.3; EXPRESSED IN ADULT LIVER, SIGNAL = 2.5; EXPRESSED IN BRAIN, SIGNAL = 3.8; EXPRESSED IN HELA, SIGNAL = 6.8; EXPRESSED IN LUNG, SIGNAL = 6.7; NT HIT: X96670.1, EVALUE 0.00e+00; SWISSPROT HIT: P25440, EVALUE 4.00e-48; EST_HUMAN HIT: BG028202.1, EVALUE 0.00e+00
cagaaaaaaggcgtaaagcggaaagcagatactaccacccctacacctacagccatcttggctcctggttctccagctagccctcctgggagtcttgagcctaaggcagcacggcttccccctatgcgtagagagagtggtcgccccatcaagcccccacgcaaagacttgcctgactctcagcaacaacaccagagctctaagaaaggaaagctttcagaacagttaaaacattgcaatggcattttgaaggagttactctctaagaagcatgctgcctatgcttggcctttctataaaccagtggatgcttctgcacttggcctgcatgactaccatgacatcattaagcaccccatggacctcagcactgtcaaggtacccactgcatggggcagatgggatgctcaggcag

SEQ ID NO: 25744 - DNA, 343 bp, Homo sapiens
  MAP TO CHR6.3; EXPRESSED IN LUNG, SIGNAL = 1.6; EXPRESSED IN PLACENTA, SIGNAL = 2.3; EXPRESSED IN HEART, SIGNAL = 2.9; EXPRESSED IN FETAL LIVER, SIGNAL = 1.6; EXPRESSED IN ADULT LIVER, SIGNAL = 2.7; EXPRESSED IN BRAIN, SIGNAL = 1.8; EXPRESSED IN HELA, SIGNAL = 2.1; NT HIT: gi14755122, EVALUE 0.00e+00; SWISSPROT HIT: P51684, EVALUE 2.00e-60; EST_HUMAN HIT: AW855262.1, EVALUE 3.00e-61
tatttgtaccgattgcctactccttgatctgtgtctttggcctcctggggaatattctggtggtgatcacctttgctttttataagaaggccaggtctatgacagacgtctatctcttgaacatggccattgcagacatcctctttgttcttactctcccattctgggcagtgagtcatgccaccggtgcgtgggttttcagcaatgccacgtgcaagttgctaaaaggcatctatgccatcaactttaactgcgggatgctgctcctgacttgcattagcatggaccggtacatcgccattgtacaggcgactaagtcattccggctccgatccagaacact

SEQ ID NO: 25745 - DNA, 204 bp, Homo sapiens
  MAP TO CHR5.3; EXPRESSED IN HELA, SIGNAL =   3; EXPRESSED IN PLACENTA, SIGNAL =   2; EXPRESSED IN BRAIN, SIGNAL = 2.7; EST_HUMAN HIT: H51918.1, EVALUE 1.00e-86; SWISSPROT HIT: Q9Y5E3, EVALUE 2.00e-20; NT HIT: gi15295795, EVALUE 1.00e-111
tctacctggtggtggcgttggcctcggtgtcgtcgctcttcctcttttcggtgctcctgttcgtggcggtgcggctgtgcaggaggagcagggcggcctcggtgggtcgctactcggtgcccgagggtccctttccagggcatctggtggatgtgagcggcaccgggaccctatcccagagctaccagtacaaggtgtgtctga

SEQ ID NO: 25746 - DNA, 236 bp, Homo sapiens
  MAP TO CHR17.3; EXPRESSED IN HELA, SIGNAL = 6.2; EXPRESSED IN LUNG, SIGNAL = 3.5; EXPRESSED IN HEART, SIGNAL = 7.1; EXPRESSED IN PLACENTA, SIGNAL = 4.6; EXPRESSED IN ADULT LIVER, SIGNAL = 5.7; NT HIT: M22568.1, EVALUE 1.00e-130; EST_HUMAN HIT: BE241740.1, EVALUE 1.00e-122; SWISSPROT HIT: P08514, EVALUE 2.00e-14
gagctggcccattcctgcctgggaggttgtggaagaaggaagatggccagagctttgtgtccactgcaagccctctggcttctggagtgggtgctgctgctcttgggaccttgtgctgcccctccagcctgggccttgaacctggacccagtgcagctcaccttctatgcaggccccaatggcagccagtttggattttcactggacttccacaaggacagccatgggaggtgagc

SEQ ID NO: 25747 - DNA, 142 bp, Homo sapiens
  MAP TO CHR1.3; EXPRESSED IN HEART, SIGNAL = 2.8; EXPRESSED IN FETAL LIVER, SIGNAL = 6.2; EXPRESSED IN ADULT LIVER, SIGNAL =  18; EXPRESSED IN BRAIN, SIGNAL = 3.6; EXPRESSED IN HELA, SIGNAL = 3.3; EST_HUMAN HIT: BF794091.1, EVALUE 2.00e-69; SWISSPROT HIT: P01131, EVALUE 5.00e-10; NT HIT: gi15451869, EVALUE 1.00e-69
ttggctgcttcagctcatggaagatgacaatgtcatgtgggttgttgcaggttctcagccaggatggagatttccaggccattgagccgatttgcactgaaaatggcctcgttctccaggtctgtccagaacaccttgtcct

SEQ ID NO: 25748 - DNA, 158 bp, Homo sapiens
  MAP TO CHR11.3; EXPRESSED IN FETAL LIVER, SIGNAL = 0.91; EXPRESSED IN HELA, SIGNAL = 3.4; NT HIT: gi8922421, EVALUE 4.00e-79; EST_HUMAN HIT: BI335471.1, EVALUE 5.00e-79; SWISSPROT HIT: P54703, EVALUE 2.00e-02
tcactcacgttcttggccctgaacacaggttcctcagagccctgcaggtcccatatcttcaaagcattctctttcccacctgtggcaaccacatgggggtgtgctgggtcttggcgcatcctacacaccccagggcccactctcagttccaggagctg

SEQ ID NO: 25749 - DNA, 214 bp, Homo sapiens
  MAP TO CHR11.3; EXPRESSED IN HEART, SIGNAL = 9.1; EXPRESSED IN FETAL LIVER, SIGNAL = 3.8; EXPRESSED IN BRAIN, SIGNAL = 7.4; EXPRESSED IN ADULT LIVER, SIGNAL = 5.6; EXPRESSED IN HELA, SIGNAL = 9.8; NT HIT: AF013711.1, EVALUE 1.00e-117; EST_HUMAN HIT: AL551937.1, EVALUE 2.00e-76; SWISSPROT HIT: Q01995, EVALUE 1.00e-21
agggatcagaaaacgggtggaaaacacacagttctaccaagtctttatcctggttcctcctcttctaggaaagcgcaggagcataagagggaattcacagagagccagctgcaggagggaaagcatgtcattggccttcagatgggcagcaacagaggggcctcccaggccggcatgacaggctacggacgacctcggcagatcatcagttaga

SEQ ID NO: 25750 - DNA, 131 bp, Homo sapiens
  MAP TO CHR19.3; EXPRESSED IN PLACENTA, SIGNAL = 1.7; EXPRESSED IN LUNG, SIGNAL = 1.1; EXPRESSED IN HEART, SIGNAL = 1.3; EXPRESSED IN HELA, SIGNAL = 2.5; EXPRESSED IN ADULT LIVER, SIGNAL = 0.85; EXPRESSED IN BRAIN, SIGNAL =   1; NT HIT: AF354258.1, EVALUE 6.00e-68; EST_HUMAN HIT: AW374369.1, EVALUE 2.00e-56; SWISSPROT HIT: Q19683, EVALUE 7.80e+00
tccccagctggtgatcttcaccaaccagatgagcatcgggcgcgggaagctgccagccgaggagttcaaggccaaggtggaggctgtggtggagaagctgggggtccccttccaggtatggctggaaggga

SEQ ID NO: 25751 - DNA, 206 bp, Homo sapiens
  MAP TO CHR9.3; EXPRESSED IN HELA, SIGNAL = 4.3; EXPRESSED IN LUNG, SIGNAL = 2.2; EXPRESSED IN BRAIN, SIGNAL = 1.1; NT HIT: AF078866.1, EVALUE 1.00e-102; EST_HUMAN HIT: AL561436.1, EVALUE 1.00e-102; SWISSPROT HIT: O15260, EVALUE 1.00e-22
tctgttcctcaggaacctggccctgggaggaggcctgttgctgctcctagcagaatcccgttctgaagggaagagcatgtttgcgggcgtccccaccatgcgtgagagctcccccaaacagtacatgcagctcggaggcagggtcttgctggttctgatgttcatgaccctccttcactttgacgccagcttcttttctgtaagta

SEQ ID NO: 25752 - DNA, 152 bp, Homo sapiens
  MAP TO CHR2.3; EXPRESSED IN HELA, SIGNAL = 3.6; EXPRESSED IN HEART, SIGNAL = 3.3; EXPRESSED IN FETAL LIVER, SIGNAL = 2.7; EXPRESSED IN ADULT LIVER, SIGNAL = 4.5; NT HIT: AB017268.1, EVALUE 2.00e-80; EST_HUMAN HIT: BE843251.1, EVALUE 1.00e-51; SWISSPROT HIT: P39012, EVALUE 9.00e-05
ccaaggaccaggagcaagaagctggtggcgggcatgtagaggccgatggagacgaagcgggacagagtggggagcaggtagaggaagaacagctggtgcgggtgttccaggaggtggttgagcttgcagaacatgccctccaaagccttgcc

SEQ ID NO: 25753 - DNA, 214 bp, Homo sapiens
  MAP TO CHR10.3; EXPRESSED IN HEART, SIGNAL = 2.4; EXPRESSED IN HELA, SIGNAL = 4.9; EXPRESSED IN ADULT LIVER, SIGNAL = 2.9; EXPRESSED IN FETAL LIVER, SIGNAL = 0.91; EST_HUMAN HIT: BF725380.1, EVALUE 1.00e-107; NT HIT: AF157623.1, EVALUE 1.00e-117; SWISSPROT HIT: P18584, EVALUE 4.00e-09
ttgtggtttcagggcaagctgcctgtcctgctgcttggccgctcctcagagctgcggccgggagagttcgtggtcgccatcggaagcccgttttcccttcaaaacacagtcaccaccgggatcgtgagcaccacccagcgaggcggcaaagagctggggctccgcaactcagacatggactacatccagaccgacgccatcatcaacgtgagcc

SEQ ID NO: 25754 - DNA, 152 bp, Homo sapiens
  MAP TO CHR17.3; EXPRESSED IN ADULT LIVER, SIGNAL = 5.3; EXPRESSED IN HELA, SIGNAL =   6; EXPRESSED IN PLACENTA, SIGNAL =  14; EXPRESSED IN LUNG, SIGNAL = 3.8; EXPRESSED IN BRAIN, SIGNAL = 6.8; NT HIT: AF047002.1, EVALUE 1.00e-75; SWISSPROT HIT: Q13595, EVALUE 4.00e-05; EST_HUMAN HIT: AI272944.1, EVALUE 3.00e-80
caggaactctttgctgaatttggaacgctgaagaaggcggctgtgcactatgatcgctctggtcgcagcttaggaacagcagacgtgcactttgagcggaaggcagatgccctgaaggccatgaagcagtacaacggcgtccctctggatgg

SEQ ID NO: 25755 - DNA, 110 bp, Homo sapiens
  MAP TO CHR12.3; EXPRESSED IN LUNG, SIGNAL = 1.4; EXPRESSED IN HELA, SIGNAL =   6; EXPRESSED IN PLACENTA, SIGNAL = 2.4; EXPRESSED IN HEART, SIGNAL = 2.8; EXPRESSED IN ADULT LIVER, SIGNAL = 4.9; EST_HUMAN HIT: BG830008.1, EVALUE 3.00e-52; NT HIT: gi14783876, EVALUE 3.00e-54; SWISSPROT HIT: P22516, EVALUE 7.00e-01
ccaggtcacgtgatccctccagacaacatcctgcccctcgtcatctgcagcgggatctccaaccagccgctggaattcacgttccagaaaagagagctgcctcagatggt

SEQ ID NO: 25756 - DNA, 202 bp, Homo sapiens
  MAP TO CHR17.3; EXPRESSED IN HEART, SIGNAL = 2.6; EXPRESSED IN BRAIN, SIGNAL = 3.2; EXPRESSED IN HELA, SIGNAL =  23; EST_HUMAN HIT: AW606313.1, EVALUE 1.00e-105; NT HIT: gi14774546, EVALUE 1.00e-105; SWISSPROT HIT: P07737, EVALUE 2.00e-31
agccagctgaggtgggtgtcctggttggcaaagaccggtcaagtttttacgtgaatgggctgacacttgggggccagaaatgttcggtgatccgggactcactgctgcaggatggggaatttagcatggatcttcgtaccaagagcaccggtggggcccccaccttcaatgtcactgtcaccaagactgacaagagtgagtt

SEQ ID NO: 25757 - DNA, 116 bp, Homo sapiens
  MAP TO CHR8.3; EXPRESSED IN LUNG, SIGNAL =  19; EXPRESSED IN HELA, SIGNAL = 1.3e+02; EXPRESSED IN HEART, SIGNAL =  12; EXPRESSED IN PLACENTA, SIGNAL = 7.1; EXPRESSED IN BRAIN, SIGNAL = 8.1; EXPRESSED IN FETAL LIVER, SIGNAL =  22; NT HIT: gi15299527, EVALUE 5.00e-59; EST_HUMAN HIT: AA826245.1, EVALUE 4.00e-51; SWISSPROT HIT: P50890, EVALUE 5.00e-16
gctctgtgtaacacagattctcctctgcgctatgtgcacattgccatcccatgcaacaacaagggagctcactcagtgggtttgatgtggtggatgctggcttgggaagttctgtg

SEQ ID NO: 25758 - DNA, 346 bp, Homo sapiens
  MAP TO CHR6.3; EXPRESSED IN HELA, SIGNAL = 4.1; EXPRESSED IN LUNG, SIGNAL = 2.5; EXPRESSED IN HEART, SIGNAL = 1.5; EXPRESSED IN PLACENTA, SIGNAL = 1.5; EXPRESSED IN BRAIN, SIGNAL = 1.8; SWISSPROT HIT: O60320, EVALUE 8.90e-01; NT HIT: X96670.1, EVALUE 1.00e-101; EST_HUMAN HIT: BE246019.1, EVALUE 1.00e-101
cagccaattggcttggagatgtggcgggttgccacttccctgtgggtctctgcggcactcttctgcctggtgactgacaccttggaaatgaagtttatgacgtcatcgttgcggctggccaatagaaaaagctcccgcggagaggtgttccttccccttcgactcagcttcttcacccgcgtgagcgagcgcgcgcgcgcggagggggtggggaaaatctcaagcagggtggcgcgcatgagcggcgaagctcctcctccccgcctatatataaagggctggcgcggggctcggcggcgccatttcgtgctggagtggagcagcctctagaacgagctggaggatt

SEQ ID NO: 25759 - DNA, 174 bp, Homo sapiens
  MAP TO CHRX.3; EXPRESSED IN HEART, SIGNAL = 1.1; EXPRESSED IN HELA, SIGNAL = 3.4; EXPRESSED IN PLACENTA, SIGNAL = 1.1; NT HIT: gi16161715, EVALUE 2.00e-59; EST_HUMAN HIT: BE536357.1, EVALUE 7.00e-60; SWISSPROT HIT: P51858, EVALUE 3.00e-17
cctcttcctcctcctcttcttcctcttggggaggcccccggccagagccgggctcagagagggtgctattcttttccacctccacaagaagtgtcttctcaccttccaaggtggctgcctccttcttctccccttcagggttttctgcttccttgggacatttaggggagtcct

SEQ ID NO: 25760 - DNA, 134 bp, Homo sapiens
  MAP TO CHR6.3; EXPRESSED IN LUNG, SIGNAL = 0.7; EXPRESSED IN HEART, SIGNAL = 1.3; EXPRESSED IN HELA, SIGNAL = 2.2; EXPRESSED IN FETAL LIVER, SIGNAL = 0.71; EXPRESSED IN ADULT LIVER, SIGNAL = 0.9; SWISSPROT HIT: Q01860, EVALUE 4.00e-13; NT HIT: Z11898.1, EVALUE 1.00e-69; EST_HUMAN HIT: AA205468.1, EVALUE 5.00e-54
ccctcaggctgagaggtctccaagccgccttggggcactagccccactccaacctggggcccacagtacgccatccccccacagaactcatacggcggggggcatgggggaatcccccacacctcagagcctgg

SEQ ID NO: 25761 - DNA, 326 bp, Homo sapiens
  MAP TO CHR19.3; EXPRESSED IN HEART, SIGNAL = 1.6; EXPRESSED IN HELA, SIGNAL = 2.7; EXPRESSED IN ADULT LIVER, SIGNAL = 1.6; EXPRESSED IN FETAL LIVER, SIGNAL = 1.2; SWISSPROT HIT: P52742, EVALUE 2.00e-34; NT HIT: gi16162715, EVALUE 0.00e+00; EST_HUMAN HIT: BF058102.1, EVALUE 0.00e+00
agcaccagcgcgtgcacacaggcgagaagcccttcgcctgcccacagtgcggccgcgcctttagccacagctccaacctcacccagcaccagctcctgcacacgggcgagcggcccttccgctgcgtggactgtggcaaggccttcgccaagggcgccgtgctgctcagccaccggcgcattcacacgggcgagaagcccttcgtgtgtacgcagtgtggccgcgccttccgtgagcgcccggccctcttccaccaccagaggatccataccggcgagaagaccgtccggcgatccagggccagcctgcacccccaggccaggtct

SEQ ID NO: 25762 - DNA, 220 bp, Homo sapiens
  MAP TO CHR19.3; EXPRESSED IN HELA, SIGNAL = 3.4; EXPRESSED IN LUNG, SIGNAL = 1.3; EXPRESSED IN ADULT LIVER, SIGNAL = 1.9; SWISSPROT HIT: P12694, EVALUE 7.00e-29; NT HIT: S38322.1, EVALUE 1.00e-121; EST_HUMAN HIT: BG748580.1, EVALUE 1.00e-113
tgcagcggtgggggcggcgtacgcagccaagcgggccaatgccaacagggtcgtcatctgttacttcggcgagggggcagccagtgagggggacgcccatgccggcttcaacttcgctgccacacttgagtgccccatcatcttcttctgccggaacaatggctacgccatctccacgcccacctctgagcagtatcgcggcgatggcattggtatgggc

SEQ ID NO: 25763 - DNA, 143 bp, Homo sapiens
  MAP TO CHR18.3; EXPRESSED IN HELA, SIGNAL = 4.3; EXPRESSED IN LUNG, SIGNAL = 2.9; EXPRESSED IN ADULT LIVER, SIGNAL = 2.9; EXPRESSED IN BRAIN, SIGNAL =   4; SWISSPROT HIT: Q58357, EVALUE 5.20e-01; NT HIT: AJ130978.1, EVALUE 4.00e-63; EST_HUMAN HIT: BE880594.1, EVALUE 6.00e-63
gtgggaaaaccacaacaaaagcttgcagctagaggcacagacataccagcagattcatgagaagattcaggagagggtcatgaacaatctggggacatggattgactggcagtacctacagaatgcagccaagctcttggcca

SEQ ID NO: 25764 - DNA, 105 bp, Homo sapiens
  MAP TO CHR10.3; EXPRESSED IN PLACENTA, SIGNAL = 1.7; EXPRESSED IN LUNG, SIGNAL = 4.4; EXPRESSED IN HELA, SIGNAL = 2.5; EXPRESSED IN FETAL LIVER, SIGNAL = 1.2; EXPRESSED IN BRAIN, SIGNAL = 2.1; EXPRESSED IN ADULT LIVER, SIGNAL = 1.8; SWISSPROT HIT: P30205, EVALUE 2.00e-09; NT HIT: gi16156357, EVALUE 2.00e-52; EST_HUMAN HIT: BG954398.1, EVALUE 5.00e-35
ggtttggccctgaggctggtgaatggagatggcaggtgtcagggccgagtggagatcctataccgaggctcctggggcaccgtgtgtgatgacagctgggacacc

SEQ ID NO: 25765 - DNA, 257 bp, Homo sapiens
  MAP TO CHR2.3; EXPRESSED IN FETAL LIVER, SIGNAL = 9.2; EXPRESSED IN ADULT LIVER, SIGNAL = 6.4; EXPRESSED IN LUNG, SIGNAL = 7.5; EXPRESSED IN HELA, SIGNAL = 4.8; EXPRESSED IN PLACENTA, SIGNAL = 6.9; EXPRESSED IN HEART, SIGNAL = 7.6; NT HIT: gi14734102, EVALUE 0.00e+00; EST_HUMAN HIT: AU134634.1, EVALUE 0.00e+00; SWISSPROT HIT: P05111, EVALUE 2.00e-43
ttacctgtggctgggaaaaggatggcttgggagacatcctcctcttcctcgggctcagagcccctgtgtgtgaagccccccagggcatgtcttcggggcagccgcctgactccagggtccccaccttccctggtcaccgcggggggccccaaggcatccaagaacagggccctcaccttggccagaacaagttcccgggccagctccagcccctggcagctgtgcccaccctgtggggtcagcagcaagaagagcag

SEQ ID NO: 25766 - DNA, 108 bp, Homo sapiens
  MAP TO CHR12.3; EXPRESSED IN FETAL LIVER, SIGNAL = 3.1; EXPRESSED IN ADULT LIVER, SIGNAL = 4.6; EXPRESSED IN BRAIN, SIGNAL = 3.3; EXPRESSED IN HEART, SIGNAL = 3.2; EXPRESSED IN HELA, SIGNAL = 2.6; EXPRESSED IN PLACENTA, SIGNAL = 4.6; SWISSPROT HIT: P46527, EVALUE 9.00e-14; NT HIT: S76988.1, EVALUE 3.00e-54; EST_HUMAN HIT: AI201163.1, EVALUE 2.00e-52
cttagattcttctactcaaaacaaaagagccaacagaacagaagaaaatgtttcagacggttccccaaatgccggttctgtggagcagacgcccaagaagcctggcct

SEQ ID NO: 25767 - DNA, 397 bp, Homo sapiens
  MAP TO CHR11.3; EXPRESSED IN LUNG, SIGNAL = 3.8; EXPRESSED IN HELA, SIGNAL = 3.7; EXPRESSED IN FETAL LIVER, SIGNAL = 2.8; EXPRESSED IN BRAIN, SIGNAL = 6.7; SWISSPROT HIT: P17405, EVALUE 3.00e-69; EST_HUMAN HIT: BG756928.1, EVALUE 0.00e+00; NT HIT: X63600.1, EVALUE 0.00e+00
ctggggcgaatacagcaagtgtgacctgcccctgaggaccctggagagcctgttgagtgggctgggcccagccggcccttttgatatggtgtactggacaggagacatccccgcacatgatgtctggcaccagactcgtcaggaccaactgcgggccctgaccaccgtcacagcacttgtgaggaagttcctggggccagtgccagtgtaccctgctgtgggtaaccatgaaagcacacctgtcaatagcttccctccccccttcattgagggcaaccactcctcccgctggctctatgaagcgatggccaaggcttgggagccctggctgcctgccgaagccctgcgcaccctcaggtacttatcgtccgtggaaacccaggaagggaaaagaaag

SEQ ID NO: 25768 - DNA, 181 bp, Homo sapiens
  MAP TO CHR17.3; EXPRESSED IN ADULT LIVER, SIGNAL =   6; EXPRESSED IN BRAIN, SIGNAL = 5.1; EXPRESSED IN HELA, SIGNAL = 3.1; EXPRESSED IN PLACENTA, SIGNAL = 5.9; EXPRESSED IN LUNG, SIGNAL = 7.5; SWISSPROT HIT: P17209, EVALUE 5.00e-24; EST_HUMAN HIT: BI835446.1, EVALUE 4.00e-80; NT HIT: X58853.1, EVALUE 1.00e-97
tatagctgggtcttctctccacagagttcaaagaggccttttcattgtttgaccggaccccgactggagagatgaagatcacctacggccagtgcggggatgtactgcgggccctgggccagaaccctaccaatgccgaggtgctgcgtgtgctgggcaagcccaagcctgaaggtcagtg

SEQ ID NO: 25769 - DNA, 133 bp, Homo sapiens
  MAP TO CHR1.3; EXPRESSED IN LUNG, SIGNAL = 7.2; EXPRESSED IN HEART, SIGNAL = 6.7; EXPRESSED IN HELA, SIGNAL = 6.8; EXPRESSED IN FETAL LIVER, SIGNAL = 5.6; EXPRESSED IN ADULT LIVER, SIGNAL = 6.6; EXPRESSED IN BRAIN, SIGNAL = 5.5; EST_HUMAN HIT: AL524527.1, EVALUE 6.00e-63; SWISSPROT HIT: Q15928, EVALUE 2.00e-14; NT HIT: gi9966870, EVALUE 4.00e-63
ttctttttcagggactattggcattcagggatgtggctctagaattctctccagaggagtgggaatgcctggacccagctcagcggagtttgtatagggatgtgatgttagagaactacagaaacctgatctc

SEQ ID NO: 25770 - DNA, 287 bp, Homo sapiens
  MAP TO CHR9.3; EXPRESSED IN BRAIN, SIGNAL = 5.1; EXPRESSED IN HELA, SIGNAL =   2; EXPRESSED IN LUNG, SIGNAL = 2.2; EXPRESSED IN PLACENTA, SIGNAL = 3.5; EXPRESSED IN HEART, SIGNAL = 5.1; EXPRESSED IN FETAL LIVER, SIGNAL = 0.49; NT HIT: X13257.1, EVALUE 0.00e+00; SWISSPROT HIT: P09172, EVALUE 3.00e-40; EST_HUMAN HIT: BE382676.1, EVALUE 0.00e+00
catgtacagcacagcagtggccatcttcctggtcatcctggtggccgcactgcagggctcggctccccgtgagagccccctcccctatcacatccccctggacccggaggggtccctggagctctcatggaatgtcagctacacccaggaggccatccatttccagctcctggtgcggaggctcaaggctggcgtcctgtttgggatgtccgaccgtggcgagcttgagaacgcagatctcgtggtgctctggaccgctggggacactgcctattttgcggtgagtc

SEQ ID NO: 25771 - DNA, 234 bp, Homo sapiens
  MAP TO CHR15.3; EXPRESSED IN ADULT LIVER, SIGNAL = 4.8; EXPRESSED IN LUNG, SIGNAL =   7; EXPRESSED IN PLACENTA, SIGNAL = 3.2; EXPRESSED IN HEART, SIGNAL = 6.1; EXPRESSED IN HELA, SIGNAL = 4.2; EXPRESSED IN BRAIN, SIGNAL = 6.1; SWISSPROT HIT: Q05860, EVALUE 1.00e-21; EST_HUMAN HIT: BE546031.1, EVALUE 3.10e-01; NT HIT: X62379.1, EVALUE 8.00e-35
cagtacctttttgaccttgtttttcttctcataagtctctgacagaggttttttcttctgttgagttgtgtctttggagaataaatactcaaattcactggggtcccgaatgtcaggttcttctaaggagtcccataaggttggtgtagcattttggcttaaaagagaaaatgacaagttaaccataagaaccaaaacaggaaggaatgtaatacaatgaaatctttctctaat

SEQ ID NO: 25772 - DNA, 174 bp, Homo sapiens
  MAP TO CHRX.3; EXPRESSED IN HELA, SIGNAL = 2.9; EXPRESSED IN PLACENTA, SIGNAL = 3.4; EXPRESSED IN HEART, SIGNAL = 6.5; EXPRESSED IN ADULT LIVER, SIGNAL = 5.6; EXPRESSED IN BRAIN, SIGNAL =  11; SWISSPROT HIT: P09951, EVALUE 2.00e-26; EST_HUMAN HIT: BG912972.1, EVALUE 1.00e-83; NT HIT: M58353.1, EVALUE 2.00e-87
cttcctgttacttaccacccagggcttgtcacagaagttgtagacagaatgcaaggagttaacactggggattccagcatactgcagcccaatgaccaaactgcggtagtctccgttgcgtgccatgctgaaggcgtgctggcggatcagcacaaaatccggcttcagagacct

SEQ ID NO: 25773 - DNA, 170 bp, Homo sapiens
  MAP TO CHR19.3; EXPRESSED IN FETAL LIVER, SIGNAL = 1.8; EXPRESSED IN HELA, SIGNAL = 2.1; EXPRESSED IN HEART, SIGNAL = 1.2; EXPRESSED IN ADULT LIVER, SIGNAL = 2.6; EXPRESSED IN BRAIN, SIGNAL = 1.5; EST_HUMAN HIT: BI838248.1, EVALUE 2.00e-88; NT HIT: AF012340.1, EVALUE 5.00e-91; SWISSPROT HIT: Q92947, EVALUE 4.00e-26
gggcaggtacttctgccgctgttcctcgctgccataggcatagatagggtgcatgacgagggaggactggacactcatcgccgacctgtagccactgtccacccgctccagctctcgggccaggagcccataggccacagacgaaaccccagcacagccatatcctggtg

SEQ ID NO: 25774 - DNA, 203 bp, Homo sapiens
  MAP TO CHR2.3; EXPRESSED IN HEART, SIGNAL = 1.3; EXPRESSED IN ADULT LIVER, SIGNAL = 1.4; EXPRESSED IN HELA, SIGNAL = 2.8; NT HIT: gi14736927, EVALUE 4.00e-98; SWISSPROT HIT: P52701, EVALUE 4.00e-07; EST_HUMAN HIT: AU133348.1, EVALUE 6.00e-98
gataagagtgaagaagataatgaaattgagagtgaagaggaagtacagcctaagacacaaggatctaggcgaagtagccgccaaataaaaaaacgaagggtcatatcagattctgagagtgacattggtggctctgatgtggaatttaagccagacactaaggaggaaggaagcagtgatgaaataagcagtggagtggggga

SEQ ID NO: 25775 - DNA, 186 bp, Homo sapiens
  MAP TO CHR1.3; EXPRESSED IN LUNG, SIGNAL = 2.4; EXPRESSED IN HELA, SIGNAL = 2.2; EXPRESSED IN PLACENTA, SIGNAL = 1.3; EXPRESSED IN BRAIN, SIGNAL = 1.6; EXPRESSED IN FETAL LIVER, SIGNAL = 2.7; EXPRESSED IN ADULT LIVER, SIGNAL = 2.1; NT HIT: gi15299056, EVALUE 3.00e-74; SWISSPROT HIT: Q9UKF2, EVALUE 1.90e+00; EST_HUMAN HIT: BI753393.1, EVALUE 4.00e-74
ttacagcggcagactgaaggacgggtgcctgttttcagccatgaggtagtccctgaccatctgagaaccaagcctgaccctgaagtggaagaacaggagaagcaactgacgacagatgctgcccgcattggtgcagatgcagcccaggttggactgagtcactgccttgctgccccatccccatcc

SEQ ID NO: 25776 - DNA, 162 bp, Homo sapiens
  MAP TO CHR17.3; EXPRESSED IN LUNG, SIGNAL = 5.4; EXPRESSED IN HELA, SIGNAL = 5.6; EXPRESSED IN PLACENTA, SIGNAL = 4.8; EXPRESSED IN FETAL LIVER, SIGNAL = 4.1; EXPRESSED IN ADULT LIVER, SIGNAL = 5.1; SWISSPROT HIT: O54898, EVALUE 6.00e-25; EST_HUMAN HIT: BI010775.1, EVALUE 8.20e-01; NT HIT: AB012043.1, EVALUE 4.00e-85
gcagatcctgacccaggaggactggaacaaagtcctctacaatggtatggcctccacgtcgtcctgggcggccctttatttcattgccctcatgaccttcggcaactacgtgctcttcaatttgctggtcgccattctggtggagggcttccaggcggaggt

SEQ ID NO: 25777 - DNA, 476 bp, Homo sapiens
  MAP TO CHR12.3; EXPRESSED IN ADULT LIVER, SIGNAL = 6.1; EXPRESSED IN HELA, SIGNAL =  41; SWISSPROT HIT: P02552, EVALUE 1.00e-91; EST_HUMAN HIT: BF337226.1, EVALUE 0.00e+00; NT HIT: AF082027.1, EVALUE 0.00e+00
tccctgagatttgatggagccctgaatgttgacctgacagaattccagaccaacctggtgccctatccccgcatccacttccctctggccacatatgcccctgtcatctctgctgagaaagcctaccatgaacagctttctgtagcagagatcaccaatgcttgctttgagccagccaaccagatggtgaaatgtgaccctcgccatggtaaatacatggcttgctgcctgttgtaccgtggtgacgtggttcccaaagatgtcaatgctgccattgccaccatcaagaccaagcgtaccatccagtttgtggattggtgccccactggcttcaaggttggcatcaactaccagcctcccactgtggtgcctggtggagacctggccaaggtacagagagctgtgtgcatgctgagcaacaccacagccattgctgaggcctgggctcgcctggaccacaagtttgacctgatgta

SEQ ID NO: 25778 - DNA, 160 bp, Homo sapiens
  MAP TO CHR19.3; EXPRESSED IN FETAL LIVER, SIGNAL = 2.3; EXPRESSED IN ADULT LIVER, SIGNAL = 2.3; EXPRESSED IN HELA, SIGNAL = 5.8; EXPRESSED IN HEART, SIGNAL = 2.7; EXPRESSED IN PLACENTA, SIGNAL = 2.1; SWISSPROT HIT: Q9Y285, EVALUE 2.00e-24; EST_HUMAN HIT: AL522127.1, EVALUE 2.00e-81; NT HIT: gi4758339, EVALUE 2.00e-81
caagtacttctccatcgaccgcgtattccggaatgagaccctggacgccacgcacctggctgagttccaccagatcgagggcgtggtggcggatcatggtctcaccttgggccacctcatgggcgttctgcgggagttcttcaccaagctgggtgagcag

SEQ ID NO: 25779 - DNA, 137 bp, Homo sapiens
  MAP TO CHR12.3; EXPRESSED IN LUNG, SIGNAL = 3.2; EXPRESSED IN HEART, SIGNAL = 3.3; EXPRESSED IN HELA, SIGNAL = 2.4; EXPRESSED IN PLACENTA, SIGNAL = 3.5; EXPRESSED IN FETAL LIVER, SIGNAL = 2.8; EXPRESSED IN BRAIN, SIGNAL = 2.4; EXPRESSED IN ADULT LIVER, SIGNAL = 2.8; SWISSPROT HIT: P54287, EVALUE 3.00e-19; EST_HUMAN HIT: AL537072.1, EVALUE 4.00e-64; NT HIT: D43702.1, EVALUE 2.00e-71
acctctttaatgtgcagaaaatctttggcctcaaagttgactccagagccctggactgggcactcctcatccagtacgccacagtagctgacattggtcctcaccgcaaatgccacaggtttgtgctggagaatttg

SEQ ID NO: 25780 - DNA, 202 bp, Homo sapiens
  MAP TO CHR1.3; EXPRESSED IN ADULT LIVER, SIGNAL = 1.1; EXPRESSED IN BRAIN, SIGNAL = 1.4; EXPRESSED IN LUNG, SIGNAL =   2; EXPRESSED IN HELA, SIGNAL = 2.4; EXPRESSED IN PLACENTA, SIGNAL = 1.4; SWISSPROT HIT: Q13291, EVALUE 1.00e-28; EST_HUMAN HIT: AA459214.1, EVALUE 1.00e-89; NT HIT: AF252304.1, EVALUE 1.00e-110
caggaggtgggagctgttggctgggttcagtgggtgggtgcccgccttttcactccagctgtaagccacatggtcccccttctccactgtgcagcccagtatcaaggtgcaggtcccgttctcctgggtcttgtttaaaactttaatttctggagtggagacctgctctgtcaggagtgggaggaagggagccatcactgaa

SEQ ID NO: 25781 - DNA, 238 bp, Homo sapiens
  MAP TO CHR4.3; EXPRESSED IN FETAL LIVER, SIGNAL = 0.91; EXPRESSED IN ADULT LIVER, SIGNAL = 0.62; EXPRESSED IN LUNG, SIGNAL = 1.4; EXPRESSED IN HELA, SIGNAL = 2.2; SWISSPROT HIT: Q9Y5Q5, EVALUE 6.00e-43; EST_HUMAN HIT: BG742247.1, EVALUE 4.00e-65; NT HIT: gi15295189, EVALUE 1.00e-128
aggtcaatgtgaaccaattacattggaactctgcatgaatttgccctacaacagtacaagttatccaaattattttggccacaggactcaaaaggaagcatccatcagctgggagtcttctcttttccctgcacttgttcaaaccaactgttataaatacctcatgttcttttcttgcaccattttggtaccaaaatgtgatgtgaatacaggcgagcatatccctccttgcaggtaa

SEQ ID NO: 25782 - DNA, 106 bp, Homo sapiens
  MAP TO CHR11.3; EXPRESSED IN LUNG, SIGNAL = 4.1; EXPRESSED IN HELA, SIGNAL =   5; EXPRESSED IN HEART, SIGNAL =  13; EXPRESSED IN PLACENTA, SIGNAL = 1.8; EXPRESSED IN FETAL LIVER, SIGNAL = 5.5; NT HIT: AF070655.1, EVALUE 6.00e-52; SWISSPROT HIT: O75964, EVALUE 9.00e-14; EST_HUMAN HIT: BG219156.1, EVALUE 2.00e-52
cagctgctgtgacttactcgaagcctcgattggccacattttggtactacgccaaggttgagctggttcctcccacccctgctgagatccctagagctattcagag

SEQ ID NO: 25783 - DNA, 137 bp, Homo sapiens
  MAP TO CHR21.3; EXPRESSED IN HELA, SIGNAL = 4.8; EXPRESSED IN FETAL LIVER, SIGNAL = 3.4; EXPRESSED IN ADULT LIVER, SIGNAL = 2.4; NT HIT: AL163300.2, EVALUE 2.00e-71; SWISSPROT HIT: P55854, EVALUE 1.00e-18; EST_HUMAN HIT: BG720620.1, EVALUE 2.00e-69
cacctgcctctcgcagtaggccttcatcagcttgctcagcggcgtgtgcctcttgatcttgaactgcaccacggagccgtcctgcccggccaccttcaggttgatgtggtcattctctgtcttcacaccctcctgca

SEQ ID NO: 25784 - DNA, 397 bp, Homo sapiens
  MAP TO CHR1.3; EXPRESSED IN HEART, SIGNAL = 2.8; EXPRESSED IN HELA, SIGNAL = 7.3; EXPRESSED IN ADULT LIVER, SIGNAL = 6.2; SWISSPROT HIT: P20670, EVALUE 2.00e-56; EST_HUMAN HIT: AI205896.1, EVALUE 0.00e+00; NT HIT: gi11426044, EVALUE 0.00e+00
gcctcacttgccctttgccttgtggtgactctccgtcttcttagggagcagtacggcctggatgttaggcaagacgccgccctgggcgatggtgactttgcccagcagcttgttcagttcctcgtcgttgcggatggccagctggaggtgacgagggatgatgcgcgtcttcttgttgtcccgagccgcgttgcccgccagctccaggatctcggcggtcagatactcgaggaccgcagccatgtagacgggcgcgccggcccccactcgctccgcgtagttgcctttgcgcagcaagcgatgcactcgccctaccgggaactgaaggccagcgcgggacgagcgcgacttggccttggcgcgggccttgcctccttgcttgccacgaccagacatg

SEQ ID NO: 25785 - DNA, 158 bp, Homo sapiens
  MAP TO CHR19.3; EXPRESSED IN FETAL LIVER, SIGNAL = 5.5; EXPRESSED IN ADULT LIVER, SIGNAL = 6.9; EXPRESSED IN BRAIN, SIGNAL = 6.8; EXPRESSED IN HELA, SIGNAL = 5.1; EXPRESSED IN PLACENTA, SIGNAL = 5.6; EXPRESSED IN HEART, SIGNAL =   7; NT HIT: gi14756592, EVALUE 1.00e-82; SWISSPROT HIT: P38789, EVALUE 1.30e-01; EST_HUMAN HIT: AL519286.1, EVALUE 1.00e-82
gtggtctcctcactgcgccggcaccgcatgcacgagcagcagtttgcccacccacccctcctggtactcaacagctttggcccccatggtatgcatgtgaagctcatggccaccatgttccagaacctgttcccctccatcaacgtgcacaaggtggg

SEQ ID NO: 25786 - DNA, 179 bp, Homo sapiens
  MAP TO CHR21.3; EXPRESSED IN LUNG, SIGNAL = 1.5; EXPRESSED IN HEART, SIGNAL = 2.1; EXPRESSED IN HELA, SIGNAL = 2.1; EXPRESSED IN PLACENTA, SIGNAL = 1.8; EXPRESSED IN ADULT LIVER, SIGNAL =   2; EXPRESSED IN BRAIN, SIGNAL = 2.6; EXPRESSED IN FETAL LIVER, SIGNAL = 0.89; EST_HUMAN HIT: BF062652.1, EVALUE 1.00e-86; NT HIT: gi9910393, EVALUE 7.00e-87; SWISSPROT HIT: Q9NRZ7, EVALUE 2.00e-28
ctccctccagagctccaaggtcctcgctaagaaggagctgctctacgtgcccctcatcggctggacgtggtactttctggagattgtgttctgcaagcggaagtgggaggaggaccgggacaccgtggtcgaagggctgaggcgcctgtcggactaccccgagtacatgtgggtgagtg

SEQ ID NO: 25787 - DNA, 173 bp, Homo sapiens
  MAP TO CHR2.3; EXPRESSED IN LUNG, SIGNAL = 2.3; EXPRESSED IN HELA, SIGNAL = 2.5; EXPRESSED IN FETAL LIVER, SIGNAL = 1.7; EXPRESSED IN BRAIN, SIGNAL = 1.9; EXPRESSED IN ADULT LIVER, SIGNAL = 1.5; SWISSPROT HIT: O59894, EVALUE 1.00e-03; EST_HUMAN HIT: AI640270.1, EVALUE 2.00e-91; NT HIT: gi16157564, EVALUE 1.00e-91
agcaggatgtggtacttcagggccctgggcaccctgttgatcacgagcctcccgtcatagctcagggaggcaaacagccacgggtcagccgaggaccagtccacggcatagacgctgtcctcgtgctcctcgtaggtggcgatcacgttgtcctgcaggggctccttgctcct

SEQ ID NO: 25788 - DNA, 131 bp, Homo sapiens
  MAP TO CHR5.3; EXPRESSED IN LUNG, SIGNAL = 1.7; EXPRESSED IN HEART, SIGNAL = 1.2; EXPRESSED IN HELA, SIGNAL =   2; EXPRESSED IN FETAL LIVER, SIGNAL = 1.5; EXPRESSED IN BRAIN, SIGNAL = 0.87; EXPRESSED IN ADULT LIVER, SIGNAL = 1.4; SWISSPROT HIT: P51959, EVALUE 5.00e-12; EST_HUMAN HIT: BG620888.1, EVALUE 5.00e-48; NT HIT: D86077.1, EVALUE 2.00e-65
catttactttaaatttatctcttttagccttctgtgttggcattttctatcattgcattagagatccaagcacagaagtgtgtagagttaacagaaggaatagaatgtcttcagaaacattccaaggtatg

SEQ ID NO: 25789 - DNA, 257 bp, Homo sapiens
  MAP TO CHR6.3; EXPRESSED IN LUNG, SIGNAL = 7.3; EXPRESSED IN HEART, SIGNAL = 1.3; EXPRESSED IN HELA, SIGNAL = 3.4; SWISSPROT HIT: P08727, EVALUE 2.00e-26; EST_HUMAN HIT: AA635956.1, EVALUE 1.00e-102; NT HIT: M33101.1, EVALUE 0.00e+00
gaaagccgccttggaagccacactggcagaaacggaggcgcgctttggagtccagctggcgcagatccagccgctgatcaactgtattgaagcccagctgggcgatgtgcgagctgatagtgagcggcagaatcaggattaacagcagttcatggacatcaagtcgcggctggagcaggagatctccacctaccgcagcctgctcgagggccagaaagatcactacaacaacctgtccgcctccaaggtcctctgag

SEQ ID NO: 25790 - DNA, 127 bp, Homo sapiens
  MAP TO CHR13.3; EXPRESSED IN LUNG, SIGNAL = 0.91; EXPRESSED IN HEART, SIGNAL =   2; EXPRESSED IN HELA, SIGNAL = 4.3; EXPRESSED IN FETAL LIVER, SIGNAL = 1.8; EXPRESSED IN BRAIN, SIGNAL = 1.7; SWISSPROT HIT: P13798, EVALUE 2.00e-15; EST_HUMAN HIT: AI952008.1, EVALUE 2.00e-59; NT HIT: U37055.1, EVALUE 2.00e-65
cccaaacacccaggtgaagacaccactgttactgatgttgggccaggaggaccggcgtgtgcccttcaagcagggcatggagtattaccgtgccctcaagacccggaatgtgcctgttcggtgagtg

SEQ ID NO: 25791 - DNA, 252 bp, Homo sapiens
  MAP TO CHR13.3; EXPRESSED IN ADULT LIVER, SIGNAL =  12; EXPRESSED IN HELA, SIGNAL =  11; NT HIT: gi14752578, EVALUE 0.00e+00; SWISSPROT HIT: P11940, EVALUE 1.00e-38; EST_HUMAN HIT: AI025825.1, EVALUE 0.00e+00
ctcctcaaaagcaaaagcaaatgttaggtgaacggctctttcctcttattcaagccatgcaccctactcttgctgggaaaatcactggcatgttgttggagattgataattcagaacttctttatatgctcgagtctccagagtcactccgttctaaggttgatgaagctgtagctgtactacaagcccaccaagctaaagaggctacccagaaagcagttaacagtgctaccggtgttccaactgtttaaa

SEQ ID NO: 25792 - DNA, 200 bp, Homo sapiens
  MAP TO CHR17.3; EXPRESSED IN BRAIN, SIGNAL = 1.3; EXPRESSED IN HELA, SIGNAL = 2.9; EXPRESSED IN FETAL LIVER, SIGNAL = 1.2; EXPRESSED IN ADULT LIVER, SIGNAL = 0.79; SWISSPROT HIT: O15491, EVALUE 9.00e-30; EST_HUMAN HIT: BF591013.1, EVALUE 1.00e-100; NT HIT: gi5031728, EVALUE 1.00e-100
gctttctttgtccctagcggatgaccaccaggctctcatctgggacatccagcaaatgccccgagccattgaggaccctatcctggcctacacagctgaaggagagatcaacaatgtgcagtgggcatcaactcagcccgactggatcgccatctgctacaacaactgcctggagatactcagagtgtagtgttggtggc

SEQ ID NO: 25793 - DNA, 109 bp, Homo sapiens
  MAP TO CHR11.3; EXPRESSED IN HELA, SIGNAL = 2.2; EXPRESSED IN PLACENTA, SIGNAL = 2.4; EXPRESSED IN HEART, SIGNAL = 2.1; EXPRESSED IN FETAL LIVER, SIGNAL =   3; EST_HUMAN HIT: BF087748.1, EVALUE 1.00e-54; NT HIT: gi7657095, EVALUE 7.00e-55
acccacctgcccctttctttcaatcccacgctgtttcctttcaaagttctgggaggacgaactcaccgaggcgagaagtgtaacattctctccacccagcttataaaag

SEQ ID NO: 25794 - DNA, 137 bp, Homo sapiens
  MAP TO CHR8.3; EXPRESSED IN ADULT LIVER, SIGNAL = 2.6; EXPRESSED IN FETAL LIVER, SIGNAL = 2.2; EXPRESSED IN BRAIN, SIGNAL =   3; EXPRESSED IN HELA, SIGNAL = 2.8; EXPRESSED IN PLACENTA, SIGNAL = 2.7; EXPRESSED IN LUNG, SIGNAL = 2.5; EXPRESSED IN HEART, SIGNAL = 2.6; SWISSPROT HIT: P55000, EVALUE 2.00e-20; EST_HUMAN HIT: AI092857.1, EVALUE 6.00e-66; NT HIT: X99977.1, EVALUE 2.00e-71
gagttgcagaggtctcggaagcagcagaagatcaggtgggcggccccgatgctgtcggggtcggtggccacacaggagctggagcaggagcgggtcaccacggggctctggttgaaggggtactctgcagggtgggc

SEQ ID NO: 25795 - DNA, 158 bp, Homo sapiens
  MAP TO CHR9.3; EXPRESSED IN LUNG, SIGNAL = 8.6; EXPRESSED IN HELA, SIGNAL = 3.2; EST_HUMAN HIT: BI861715.1, EVALUE 9.00e-84; NT HIT: gi13639276, EVALUE 6.00e-84; SWISSPROT HIT: P27105, EVALUE 5.00e-22
aggttattgcagccgaaggagaaatgaatgcatccagggctctgaaagaagcctccatggtcatcactgaatctcctgcagcccttcagctccgatacctgcagacactgaccaccattgctgctgagaaaaactcaacaattgtcttccctctgccc

SEQ ID NO: 25796 - DNA, 132 bp, Homo sapiens
  MAP TO CHR10.3; EXPRESSED IN HELA, SIGNAL = 5.8; EXPRESSED IN HEART, SIGNAL = 1.2; SWISSPROT HIT: Q9Z0F7, EVALUE 6.00e-17; NT HIT: AF037207.1, EVALUE 2.00e-68; EST_HUMAN HIT: BI603159.1, EVALUE 9.00e-65
cacttacccacatacatgaccccctccttggtcttctcagctgcttccgtcaccccctgcttggtcttttccaccgcacccaccacgccctccttggcgatggagaagcccttcttgaagacatccatggtg

SEQ ID NO: 25797 - DNA, 135 bp, Homo sapiens
  MAP TO CHR10.3; EXPRESSED IN HELA, SIGNAL = 2.4; EXPRESSED IN BRAIN, SIGNAL = 1.5; SWISSPROT HIT: P30205, EVALUE 6.00e-15; NT HIT: AJ243211.1, EVALUE 3.00e-70; EST_HUMAN HIT: BG954398.1, EVALUE 4.00e-27
tgaggctggtgaatggaggtgaccggtgtcagggccgggtggaggtcctgtaccaaggctaatggggcactatgtgtgatgacagctgggacgcccaggatgcagatgttgtctgcaggcagctcggctgtggct

SEQ ID NO: 25798 - DNA, 184 bp, Homo sapiens
  MAP TO CHRX.3; EXPRESSED IN HELA, SIGNAL = 2.4; EXPRESSED IN HEART, SIGNAL =   2; EXPRESSED IN PLACENTA, SIGNAL = 3.6; EXPRESSED IN ADULT LIVER, SIGNAL = 1.8; EXPRESSED IN BRAIN, SIGNAL = 1.8; EST_HUMAN HIT: AL040601.1, EVALUE 1.00e-80; NT HIT: U28387.1, EVALUE 2.00e-99; SWISSPROT HIT: P52789, EVALUE 3.00e-30
actggcagcaacgcctgctacatggaagagatgcgccacatcgagatggtagaaggcgacgaggggcagatgtgtatcaatatggagtggggggccttcggggacgatggctcgctcaatgacattcgcactgagtttgaccaggagattgacatgggctcactgaacctggggaagcaactgt

SEQ ID NO: 25799 - DNA, 153 bp, Homo sapiens
  MAP TO CHR2.3; EXPRESSED IN ADULT LIVER, SIGNAL = 4.3; EXPRESSED IN HELA, SIGNAL = 2.9; EXPRESSED IN HEART, SIGNAL = 4.7; SWISSPROT HIT: P49759, EVALUE 4.00e-10; NT HIT: L29222.1, EVALUE 2.00e-80; EST_HUMAN HIT: D82109.1, EVALUE 3.00e-80
ttttagagtgattgtatttgcagcgcttgttctcctgggcactgctatgtgatctcttccttcttttatgactgctgctgctcctccattttccataatcccaatccttgtcatcccaatcaggacagtaagttctctttgagtgtctcatct

SEQ ID NO: 25800 - DNA, 307 bp, Homo sapiens
  MAP TO CHR6.3; EXPRESSED IN LUNG, SIGNAL =  15; EXPRESSED IN HELA, SIGNAL = 6.9; EXPRESSED IN PLACENTA, SIGNAL = 5.2; EXPRESSED IN FETAL LIVER, SIGNAL = 9.7; EXPRESSED IN BRAIN, SIGNAL = 5.7; EST_HUMAN HIT: BG769863.1, EVALUE 0.00e+00; SWISSPROT HIT: O15533, EVALUE 8.00e-57; NT HIT: gi14782822, EVALUE 0.00e+00
ttacctgctacctccagggtgacctcagcgctgcgccccgaggcaggcaggctgggatggtgaattcgacaggcatagcgtgccccatgctgctcagtggtgactgggggcggctgcaagtgcccagagaggctgacagagccatcggaatggtggcgcagggccgagagccacctctgcccctcggccttctgagagcggccccctgggccaccccggagttcccactccacctccaggcccccagaagggtagaagtgggacacaaggcagagcaattccgggggtgcctcccctggggcggccc

SEQ ID NO: 25801 - DNA, 138 bp, Homo sapiens
  MAP TO CHR19.3; EXPRESSED IN HELA, SIGNAL = 2.7; EXPRESSED IN PLACENTA, SIGNAL = 2.8; EXPRESSED IN HEART, SIGNAL = 1.9; EXPRESSED IN ADULT LIVER, SIGNAL = 2.9; EXPRESSED IN BRAIN, SIGNAL = 5.5; EST_HUMAN HIT: BG721439.1, EVALUE 6.00e-60; SWISSPROT HIT: P54920, EVALUE 3.00e-17; NT HIT: gi14755992, EVALUE 4.00e-60
ttctgttccagctgctggaaacgcgttctgccaggctgcacagctgcacctgcagctccagagcaagcacgacgcagccacctgctttgtggacgctggcaacgcattcaagaaagccgacccccaaggtgagggcct

SEQ ID NO: 25802 - DNA, 115 bp, Homo sapiens
  MAP TO CHR22.3; EXPRESSED IN HELA, SIGNAL = 2.2; EXPRESSED IN PLACENTA, SIGNAL = 3.1; EXPRESSED IN HEART, SIGNAL = 2.9; EXPRESSED IN ADULT LIVER, SIGNAL = 3.7; EXPRESSED IN BRAIN, SIGNAL = 3.2; EST_HUMAN HIT: AI380836.1, EVALUE 3.00e-58; SWISSPROT HIT: Q07960, EVALUE 9.00e-03; NT HIT: gi14779550, EVALUE 1.00e-50
catgcccttccaggtgtggagagcagcctgcgtgtcactggctgccgccagatcttacggagcctcccagagcacaactacgtcgtcctccgctacctcatgggcttcctgcatg

SEQ ID NO: 25803 - DNA, 216 bp, Homo sapiens
  MAP TO CHR11.3; EXPRESSED IN HELA, SIGNAL = 3.8; EXPRESSED IN ADULT LIVER, SIGNAL = 3.1; EST_HUMAN HIT: AW851091.1, EVALUE 1.00e-115; SWISSPROT HIT: Q06481, EVALUE 5.00e-20; NT HIT: L09209.1, EVALUE 1.00e-115
agtgaatttcctactgaagcagatctggaagacttcacagaagcagctgtggatgaggatgatgaggatgaggaagaaggggaggaagtggtggaggaccgagattactactatgacaccttcaaaggagatgactacaatgaggagaatcctactgaacccggcagcgacggcaccatgtcagacaaggaaattactcatgatgtcaaaggtaac

SEQ ID NO: 25804 - DNA, 500 bp, Homo sapiens
  MAP TO CHR16.3; EXPRESSED IN HELA, SIGNAL = 5.1; EXPRESSED IN LUNG, SIGNAL = 3.2; EXPRESSED IN PLACENTA, SIGNAL = 4.1; EXPRESSED IN HEART, SIGNAL = 3.1; EST_HUMAN HIT: BI758647.1, EVALUE 0.00e+00; SWISSPROT HIT: P30519, EVALUE 9.00e-94; NT HIT: gi14778121, EVALUE 0.00e+00
tacctgcatgttatactcaaaagccttgttggcctcctccacgatcctctctttggtcttcatgttcaggtccagggcgttcatcctggcccggtagagctgcttgaactgctgggcattgtccacattctcaaacaggtagaactgggtcccttcccctgtgctggggagtttcagtgctcgctgggccaccttcttcagcacctggccccccgagagatcccccatgtagcgggtgtatgcatgggccaccagtagctccggctcgttctgccctatgtagtggatccgctccacgtacttctgggcagccttggggcactgcacctgctcctcccagttttcaccaaagaaatactccatgtccttggtcagcgcctccttccggtgcagctccatggggaagtacaaaggggcaaaggctggatggtccttgttgcgctccatttcctcctcgagggctgagtatgtgaagtaaagtgccgtggtggccagctgtg

SEQ ID NO: 25805 - DNA, 170 bp, Homo sapiens
  MAP TO CHR22.3; EXPRESSED IN HELA, SIGNAL = 2.3; EXPRESSED IN PLACENTA, SIGNAL = 1.6; EXPRESSED IN HEART, SIGNAL = 1.7; EXPRESSED IN ADULT LIVER, SIGNAL = 1.2; EXPRESSED IN FETAL LIVER, SIGNAL = 1.4; EST_HUMAN HIT: BG122390.1, EVALUE 9.00e-78; SWISSPROT HIT: O75419, EVALUE 2.00e-25; NT HIT: AF081535.1, EVALUE 2.00e-87
gacaggatgaaggacatgcgcgtgcagactttcagcattcattttgggttcaagcacaagtttctggccagcgacgtggtctttgccaccatgtctttgatggagagccccgagaaggatggctcagggacagatcacttcatccaggctctggacagcctctccaggta

SEQ ID NO: 25806 - DNA, 181 bp, Homo sapiens
  MAP TO CHR9.3; EXPRESSED IN HELA, SIGNAL = 5.5; EXPRESSED IN HEART, SIGNAL =   5; NT HIT: gi14741248, EVALUE 1.00e-88; EST_HUMAN HIT: BG745443.1, EVALUE 2.00e-88; SWISSPROT HIT: Q92982, EVALUE 1.00e-15
ctcacctgggtgtcctactgctggggtgccatgtccatcaagggcttctggaccccgaaggccgtgatgaagatgttgactaccacgatgatgaacaccaggcccgtggccaggttgttgaggaagtccagcttggcgtgcttggccgggttgttaaggtcgtacttgactgtgggcgaga

SEQ ID NO: 25807 - DNA, 282 bp, Homo sapiens
  MAP TO CHR6.3; EXPRESSED IN HELA, SIGNAL = 7.2; EXPRESSED IN HEART, SIGNAL = 6.2; EXPRESSED IN ADULT LIVER, SIGNAL =  11; EXPRESSED IN FETAL LIVER, SIGNAL = 5.9; SWISSPROT HIT: O15533, EVALUE 2.00e-51; NT HIT: AB012920.1, EVALUE 0.00e+00; EST_HUMAN HIT: AW134470.1, EVALUE 0.00e+00
ccccaactcactgtacacagcaagctccagggtgacctgtccttgcaggtatggcaggtgtatggtggccagataggtgccctcctgaaagggttgaactgtaggcagccagaaggtcccatttccggtccatgggccccatggctcatcatcatcccaagcagcaaatgccacggccccttcttgggctgctggcatctggccattcagcccaggagttgcagccaggagcagatgtcccttacccaggtgctggcgtcgccactctagcccaaagggagg

SEQ ID NO: 25808 - DNA, 162 bp, Homo sapiens
  MAP TO CHR22.3; EXPRESSED IN LUNG, SIGNAL = 4.6; EXPRESSED IN HEART, SIGNAL = 4.2; EXPRESSED IN ADULT LIVER, SIGNAL = 3.2; EXPRESSED IN HELA, SIGNAL = 4.1; EST_HUMAN HIT: BF315928.1, EVALUE 9.00e-78; NT HIT: gi4759199, EVALUE 6.00e-78; SWISSPROT HIT: O43759, EVALUE 4.00e-17
ccccagccttctgggctttcctctggttcgtgggattctgctacctggccaaccagtggcaggtctccaagcccaaggacaacccactgaacgaagggacggacgcagcccgggccgccatcgccttctcctttttctccatcttcacctgggtgagtacag

SEQ ID NO: 25809 - DNA, 206 bp, Homo sapiens
  MAP TO CHR10.3; EXPRESSED IN ADULT LIVER, SIGNAL = 1.1; EXPRESSED IN HELA, SIGNAL =   2; EST_HUMAN HIT: BF736296.1, EVALUE 1.00e-110; NT HIT: AJ243098.1, EVALUE 1.00e-112; SWISSPROT HIT: P70662, EVALUE 9.00e-30
atccagctgggttgctgacctgggtgaacatgggcttgccatgctgggtcaccatgctgccctggtcacagtcgagggacacaaagttgctgtggaatgcctccttggggtgcttaagaacatagtacagctccgtagcacccccctcaaagatgctgcggaagtagcgtgggatcagggtccggccaatggctgtagagatggga

SEQ ID NO: 25810 - DNA, 138 bp, Homo sapiens
  MAP TO CHR17.3; EXPRESSED IN ADULT LIVER, SIGNAL = 3.1; EXPRESSED IN BRAIN, SIGNAL = 2.9; EXPRESSED IN HELA, SIGNAL = 2.2; EXPRESSED IN PLACENTA, SIGNAL = 2.7; EXPRESSED IN HEART, SIGNAL = 3.6; NT HIT: gi16164848, EVALUE 2.00e-65; SWISSPROT HIT: P18054, EVALUE 2.00e-20
ctgggcaggtatgtggaggggatcgtccacctcttctaccaaagggatgacatagtgaagggggaccctgagctgcaggcctggtgtcgggagatcacggaggtggggctgtgccaggcccaggaccgaggtaagatc

SEQ ID NO: 25811 - DNA, 130 bp, Homo sapiens
  MAP TO CHR15.3; EXPRESSED IN HELA, SIGNAL = 3.4; EST_HUMAN HIT: BE791087.1, EVALUE 2.00e-62; NT HIT: gi13650792, EVALUE 3.00e-67
cctatggtggctgtgaaggccctgatgccacgtatgtcaaattgatatcatctgatggccatgaatttattgtaaaaagagaacatgcattaacatcaggcacgataaaagccatgttgagtggcccagg

SEQ ID NO: 25812 - DNA, 220 bp, Homo sapiens
  MAP TO CHR1.3; EXPRESSED IN HELA, SIGNAL =  12; EXPRESSED IN LUNG, SIGNAL = 2.8; EXPRESSED IN PLACENTA, SIGNAL = 2.5; EST_HUMAN HIT: AU119495.1, EVALUE 1.00e-120; NT HIT: AF000364.1, EVALUE 1.00e-121
gtatgaagattattactaccaccctcctcctcgcatgccacctccaattagaggtcggggtcgtggtggggggagaggtggatatggctaccctccagattactacggctatgaagattactatgatgattactatggttatgattatcacgactatcgtggaggctatgaagatccctactacggctatgatgatggctatgcagtaagaggaagagga

SEQ ID NO: 25813 - DNA, 496 bp, Homo sapiens
  MAP TO CHR14.3; EXPRESSED IN LUNG, SIGNAL =  19; EXPRESSED IN HELA, SIGNAL =  27; EXPRESSED IN ADULT LIVER, SIGNAL = 2.9; EST_HUMAN HIT: BI908747.1, EVALUE 0.00e+00; SWISSPROT HIT: P01100, EVALUE 8.00e-87; NT HIT: AF111167.2, EVALUE 0.00e+00
ggagacagaccaactagaagatgagaagtctgctttgcagaccgagattgccaacctgctgaaggagaaggaaaaactagagttcatcctggcagctcaccgacctgcctgcaagatccctgatgacctgggcttcccagaagagatgtctgtggcttcccttgatctgactgggggcctgccagaggttgccaccccggagtctgaggaggccttcaccctgcctctcctcaatgaccctgagcccaagccctcagtggaacctgtcaagagcatcagcagcatggagctgaagaccgagccctttgatgacttcctgttcccagcatcatccaggcccagtggctctgagacagcccgctccgtgccagacatggacctatctgggtccttctatgcagcagactgggagcctctgcacagtggctccctggggatggggcccatggccacagagctggagcccctgtgcactccggtggtcacctgtactccc

SEQ ID NO: 25814 - DNA, 177 bp, Homo sapiens
  MAP TO CHR19.3; EXPRESSED IN HELA, SIGNAL = 4.2; EXPRESSED IN HEART, SIGNAL = 1.7; EXPRESSED IN PLACENTA, SIGNAL = 1.1; EXPRESSED IN BRAIN, SIGNAL = 1.7; EST_HUMAN HIT: BE799844.1, EVALUE 3.00e-93; SWISSPROT HIT: O42904, EVALUE 9.00e-07; NT HIT: gi7661653, EVALUE 2.00e-93
ctcacccatgatcttggcggccgtggatgccccgataatgatggacaggttgggtgcgatgaaggacatccgggactccacatactcgtagatgcggtgcttggaggcgttcagctccagcgccatgtcgcaggcctcctccagccgctccagctcctcctccgacagctgctgcct

SEQ ID NO: 25815 - DNA, 125 bp, Homo sapiens
  MAP TO CHR17.3; EXPRESSED IN HELA, SIGNAL =   7; EXPRESSED IN HEART, SIGNAL =   1; EXPRESSED IN FETAL LIVER, SIGNAL = 2.1; EST_HUMAN HIT: AW069864.1, EVALUE 1.00e-63; NT HIT: gi15310155, EVALUE 9.00e-64; SWISSPROT HIT: O43242, EVALUE 1.00e-17
cagctgtcaggacaggaaacctagccaagttcaaccaggtcctggatcagtttggggagaagtttcaagcagatgggacctacaccctaattatccggctgcggcacaacgtgattaagacaggt

SEQ ID NO: 25816 - DNA, 211 bp, Homo sapiens
  MAP TO CHR11.3; EXPRESSED IN ADULT LIVER, SIGNAL = 0.86; EXPRESSED IN HELA, SIGNAL = 4.6; EXPRESSED IN LUNG, SIGNAL = 0.92; EXPRESSED IN PLACENTA, SIGNAL = 1.2; EST_HUMAN HIT: BI667086.1, EVALUE 1.00e-106; SWISSPROT HIT: P04216, EVALUE 4.00e-33; NT HIT: M11749.1, EVALUE 1.00e-115
cgggagcggtatgtgtgctcaggcacccccacagtgccaaagagcacgtgcttctttgtctcacgggtcaggctgaactcgtactggatgggtgaactgctggtattctcatggcggcagtccagacgaaggctctggtccactaggcaggccgttaggctggtcaccttctgccctcgggagacctgcaagactggcaccagcagtgcct

SEQ ID NO: 25817 - DNA, 189 bp, Homo sapiens
  MAP TO CHR4.3; EXPRESSED IN FETAL LIVER, SIGNAL =  47; EXPRESSED IN BRAIN, SIGNAL =  50; EXPRESSED IN HELA, SIGNAL = 1.7e+02; EXPRESSED IN LUNG, SIGNAL =  14; SWISSPROT HIT: P04406, EVALUE 2.00e-30; EST_HUMAN HIT: BG756163.1, EVALUE 1.00e-92; NT HIT: gi14784323, EVALUE 2.00e-90
tcacgccacagtttcccagaggggccatccacagtcttctgggtggcagtgatggcatggactgtagtcatgagtccttccacgataccaaagttgtcatggatgacattggccaggggcgctaagcagttggtggtgcagaaggcattgctgatgatcttgaggctgttgtcatacttctcatggttc

SEQ ID NO: 25818 - DNA, 205 bp, Homo sapiens
  MAP TO CHR17.3; EXPRESSED IN LUNG, SIGNAL = 1.9; EXPRESSED IN HELA, SIGNAL = 2.5; EXPRESSED IN ADULT LIVER, SIGNAL = 0.9; EST_HUMAN HIT: R05561.1, EVALUE 5.00e-86; SWISSPROT HIT: O75385, EVALUE 9.00e-11; NT HIT: gi16164307, EVALUE 3.00e-86
aaattaaaattagttcccatctcaattttttttcagttgtcaagaatctgaacgaacgatataaattctgcatcaccatgtgcaagaaacttacagaaaagctgaatcgattcttctctgacaaacagaggtttattgatgaaatcaacagtgtgactgcagagaaactcatctataattgtgctgtagaaatggtaaccctttc

SEQ ID NO: 25819 - DNA, 205 bp, Homo sapiens
  MAP TO CHR19.3; EXPRESSED IN HELA, SIGNAL = 5.6; EXPRESSED IN PLACENTA, SIGNAL = 3.5; EXPRESSED IN FETAL LIVER, SIGNAL = 1.8; EXPRESSED IN ADULT LIVER, SIGNAL = 2.3; EXPRESSED IN BRAIN, SIGNAL = 3.4; EST_HUMAN HIT: AW504739.1, EVALUE 1.00e-101; SWISSPROT HIT: P26358, EVALUE 3.00e-31; NT HIT: AF202566.1, EVALUE 1.00e-109
catccttacctctgtcccagcgtgaccccagccagcttgatcaggtcccgcatgcagggtgtcaggaagatgggctgctcatcactgtccccggcctcgtcataactctccacctgctccaccacaaactgcgcgtgtcgcaggagggagtcctctgtgaagcggttcaagttgaggccagaaggaggaaccgtggtcttgaaag

SEQ ID NO: 25820 - DNA, 322 bp, Homo sapiens
  MAP TO CHR22.3; EXPRESSED IN HELA, SIGNAL = 3.7; SWISSPROT HIT: P91917, EVALUE 3.00e-33; EST_HUMAN HIT: AA478920.1, EVALUE 0.00e+00; NT HIT: gi14779246, EVALUE 0.00e+00
ctaaattttatttcttcttcagttgttaaggtgtgttaaatttgaagaagataatatctccatcttcaacaatataatttctgccttgttgtctgtactttccagcagccttgactgcattttcagaaccttcctctttaaaatcttcatatttcattacttcagccataatgaatcccttttcaaaatctgtgtgaatctttcctgcagcctgaggagccttagtccctttcctgatggtccgtgcacgcacttcatctgggcctgcagtgaaaaagtattttagttggagtgctgcaaacccagccttaatgatctttgg

SEQ ID NO: 25821 - DNA, 103 bp, Homo sapiens
  MAP TO CHR3.3; EXPRESSED IN LUNG, SIGNAL = 2.6; EXPRESSED IN HELA, SIGNAL =   3; EXPRESSED IN PLACENTA, SIGNAL = 0.64; EXPRESSED IN ADULT LIVER, SIGNAL = 0.82; NT HIT: U36926.1, EVALUE 2.00e-51; SWISSPROT HIT: Q16850, EVALUE 2.00e-14; EST_HUMAN HIT: AV681968.1, EVALUE 9.00e-49
ctggtcataagttaaaggaggcagattctctccacagactgttttctgttctaaataacatttttcttgaagtgttttgtctctggccaaaaagaagcccatc

SEQ ID NO: 25822 - DNA, 174 bp, Homo sapiens
  MAP TO CHR6.3; EXPRESSED IN HEART, SIGNAL = 2.5; EXPRESSED IN HELA, SIGNAL = 2.3; EXPRESSED IN ADULT LIVER, SIGNAL = 3.3; EXPRESSED IN FETAL LIVER, SIGNAL = 4.1; NT HIT: gi14782536, EVALUE 2.00e-93; SWISSPROT HIT: P01903, EVALUE 3.00e-28; EST_HUMAN HIT: BF974399.1, EVALUE 3.00e-93
gagtttatgtttgactttgatggtgatgagattttccatgtggatatggcaaagaaggagacggtctggcggcttgaagaatttggacgatttgccagctttgaggctcaaggtgcattggccaacatagctgtggacaaagccaacctggaaatcatgacaaagcgctccaac

SEQ ID NO: 25823 - DNA, 449 bp, Homo sapiens
  MAP TO CHR19.3; EXPRESSED IN LUNG, SIGNAL = 4.4; EXPRESSED IN HEART, SIGNAL = 0.79; EXPRESSED IN HELA, SIGNAL = 2.4; EXPRESSED IN FETAL LIVER, SIGNAL = 1.4; NT HIT: gi14754899, EVALUE 0.00e+00; SWISSPROT HIT: P79241, EVALUE 3.00e-84; EST_HUMAN HIT: BI518820.1, EVALUE 0.00e+00
actgtagtcacacgaatgataactggcaatgtgaggagcagagccatcacccagggcccaatgatcaccttcttggccaggctcacggtgcggtggttctgggtccagactggatgcaggacgcaaacacagcggtccagagcaatgagggcgatcaggaagacacttccgaacaagttgatgtccactatggtaaagacgaatttgcacaggaaccagccgaaaggccaatgtcctcccatggccttcctgaccatgaagaatggcaaagtggaggtgaaacagaagtcagccacggccaggttcaggtaactgatggtggtgactgtgtgtgtcatccggaatccagccacccagatcacaagcccgttgcccaggaccccgaggacaaaggtgactgcaaataccagataagtgatgatatccaggaagagatagccagcagatac

SEQ ID NO: 25824 - DNA, 140 bp, Homo sapiens
  MAP TO CHR13.3; EXPRESSED IN HELA, SIGNAL = 5.6; EXPRESSED IN LUNG, SIGNAL = 4.2; EXPRESSED IN HEART, SIGNAL = 3.2; EXPRESSED IN ADULT LIVER, SIGNAL = 3.1; EXPRESSED IN FETAL LIVER, SIGNAL = 2.6; EXPRESSED IN BRAIN, SIGNAL = 4.6; SWISSPROT HIT: P54077, EVALUE 7.70e+00; EST_HUMAN HIT: BG819828.1, EVALUE 2.00e-69; NT HIT: gi16188474, EVALUE 1.00e-69
ctcaccttgctggcctttcgggcctggcagtccctgaagccctttcagccctggggggccctcaggaccagggagcccgggctcccctttgatgatgtcgtaaggacctggggggccaggaggacccgggagacctgtgg

SEQ ID NO: 25825 - DNA, 229 bp, Homo sapiens
  MAP TO CHR1.3; EXPRESSED IN FETAL LIVER, SIGNAL = 0.54; EXPRESSED IN ADULT LIVER, SIGNAL = 0.5; EXPRESSED IN HELA, SIGNAL = 2.6; SWISSPROT HIT: P12270, EVALUE 3.00e-34; EST_HUMAN HIT: BF063234.1, EVALUE 1.00e-118; NT HIT: U69668.1, EVALUE 1.00e-118
tttcttcaaaataccttatcctgttgtgctttaagttcttcatattgagtcttgtacctacgtccaattttcttaacttgagtaatagttttgactttttcttggatatcaattattttggcatctaagtccttctggatggtttccttttcagttcttactttatttagatcttccttcagactctgaattaagttctggttgttagtcaaagatgcatttgatcttt

SEQ ID NO: 25826 - DNA, 169 bp, Homo sapiens
  MAP TO CHR6.3; EXPRESSED IN ADULT LIVER, SIGNAL = 4.8; EXPRESSED IN BRAIN, SIGNAL = 3.7; EXPRESSED IN HELA, SIGNAL = 5.8; EXPRESSED IN LUNG, SIGNAL = 2.9; NT HIT: gi14755393, EVALUE 7.00e-90; SWISSPROT HIT: P14611, EVALUE 4.00e-18; EST_HUMAN HIT: AI475266.1, EVALUE 3.00e-90
taggtcaatattgaaggaggggctatagccttgggccaccctcttggagcatctggctgtcgaattcttgtgaccctgttacacacactggagagaatgggcagaagtcgtggtgttgcagccctgtgcattgggggtgggatgggaatagcaatgtgtgttcagagag

SEQ ID NO: 25827 - DNA, 395 bp, Homo sapiens
  MAP TO CHR1.3; EXPRESSED IN ADULT LIVER, SIGNAL = 0.32; EXPRESSED IN HELA, SIGNAL = 2.6; NT HIT: X55997.1, EVALUE 0.00e+00; SWISSPROT HIT: P14060, EVALUE 5.00e-75; EST_HUMAN HIT: AL571196.1, EVALUE 0.00e+00
aacccagtctatgttggcaatgtggcctgggcccacattctggccttgagggccctgcaggaccccaagaaggccccaagcatccgaggacagttctactatatctcagatgacacgcctcaccaaagctatgataaccttaattacaccctgagcaaagagttcggcctccgccttgattccagatggagctttcctttatccctgatgtattggattggcttcctgctggaaatagtgagcttcctactcaggccaatttacacctatcgaccgcccttcaaccgccacatagtcacattgtcaaatagcgtattcaccttctcttataagaaggctcagcgagatctggcgtataagccactctacagctgggaggaagccaagcagaaaac

SEQ ID NO: 25828 - DNA, 155 bp, Homo sapiens
  MAP TO CHR1.3; EXPRESSED IN HELA, SIGNAL = 2.8; EXPRESSED IN BRAIN, SIGNAL = 2.3; SWISSPROT HIT: O43865, EVALUE 2.00e-21; EST_HUMAN HIT: BI550185.1, EVALUE 1.00e-76; NT HIT: gi5729723, EVALUE 9.00e-77
agctgcatcctacacagatagctctgatgatgaggtttctccccgagagaagcagcaaaccaactccaagggcagcagcaatttctgtgtgaagaacatcaagcaggcagaatttggacgccgggagattgagattgcagagcaaggtaaagaaa

SEQ ID NO: 25829 - DNA, 327 bp, Homo sapiens
  MAP TO CHR5.3; EXPRESSED IN HELA, SIGNAL =   3; EXPRESSED IN LUNG, SIGNAL = 3.4; EXPRESSED IN ADULT LIVER, SIGNAL =   2; EXPRESSED IN FETAL LIVER, SIGNAL = 2.7; EXPRESSED IN BRAIN, SIGNAL = 1.3; NT HIT: gi14731787, EVALUE 0.00e+00; EST_HUMAN HIT: AV683354.1, EVALUE 0.00e+00; SWISSPROT HIT: Q12947, EVALUE 1.80e+00
ccaagggaaccagacaacttacctgtgatcttgacataggcaaaccaagtcccacagtgttagtgctcatcatagagaaattcatactctgggaagatgtcatggttgcctgggacgagcccataagatcaaacaggtctgaagaatttgaggcagcaggaggtgggcctagagctgattgtgagccactaacaagttctaccgctggctgtgaggcactgccaaagaactcgccactggaagcaacagggcctgatggggcttggttgaaggcactccagtcaccaaagtctccattcccacttgttgctgttactaagacagaaa

SEQ ID NO: 25830 - DNA, 124 bp, Homo sapiens
  MAP TO CHR12.3; EXPRESSED IN HEART, SIGNAL = 1.8; EXPRESSED IN HELA, SIGNAL = 6.4; EXPRESSED IN ADULT LIVER, SIGNAL = 1.7; EXPRESSED IN BRAIN, SIGNAL = 2.2; EST_HUMAN HIT: BE408562.1, EVALUE 1.00e-63; SWISSPROT HIT: Q15356, EVALUE 2.00e-19; NT HIT: gi14755614, EVALUE 9.00e-64
tttacccctcaatcccaaacctttcctcaatggactaacaggaaagccagtgatggtgaaacttaagtggggaatggagtacaagggctatctggtatctgtagatggctacatgaacatgcag

SEQ ID NO: 25831 - DNA, 308 bp, Homo sapiens
  MAP TO CHR1.3; EXPRESSED IN HELA, SIGNAL = 1.9; EXPRESSED IN PLACENTA, SIGNAL = 4.9; EXPRESSED IN LUNG, SIGNAL = 6.8; EXPRESSED IN HEART, SIGNAL = 5.5; EXPRESSED IN FETAL LIVER, SIGNAL = 3.6; SWISSPROT HIT: Q05481, EVALUE 6.00e-47; NT HIT: gi13628185, EVALUE 0.00e+00; EST_HUMAN HIT: BG288840.1, EVALUE 3.00e-79
aagaattcatactggagagaaaaccttccgatgtgaagaatgtggaaaagcctttaaccagagctcacatctgactgaacataggagaattcatactggtgagaaaccatacaaatgtgaggaatgtggcaaagcttttacctggttctcataccttattcagcataagagaattcatactgggcagaaaccctacaaatgtgaggaatgtggcaaagcttttacctggttttcataccttactcaacataagagaattcatactggagagaaaccctacaaatgtgatgaatgtggcaaagctttta

SEQ ID NO: 25832 - DNA, 215 bp, Homo sapiens
  MAP TO CHR1.3; EXPRESSED IN HELA, SIGNAL = 3.9; EXPRESSED IN LUNG, SIGNAL = 1.9; EXPRESSED IN PLACENTA, SIGNAL = 1.2; EXPRESSED IN HEART, SIGNAL = 1.6; EST_HUMAN HIT: AU140228.1, EVALUE 1.00e-114; SWISSPROT HIT: P12270, EVALUE 2.00e-22; NT HIT: U69668.1, EVALUE 1.00e-114
tcaccttattagaaggttcttgaggctcatctctctgctcaaggtgtctctcttgatgctccctgagttctctttccaagcgactaattcgaccttcatattgggactttagcgcagtaatgcgaacatccaattcatctttctgctgatctaaggctccattcctttgtttaagctcctcattttctttagttagctgatcttttacacctaaa

SEQ ID NO: 25833 - DNA, 172 bp, Homo sapiens
  MAP TO CHR17.3; EXPRESSED IN LUNG, SIGNAL =   1; EXPRESSED IN HELA, SIGNAL =   2; EXPRESSED IN HEART, SIGNAL = 1.4; EXPRESSED IN ADULT LIVER, SIGNAL = 1.4; EXPRESSED IN FETAL LIVER, SIGNAL = 1.8; EXPRESSED IN BRAIN, SIGNAL = 1.7; SWISSPROT HIT: Q60838, EVALUE 1.00e-28; NT HIT: gi13632774, EVALUE 7.00e-90; EST_HUMAN HIT: BE395528.1, EVALUE 1.00e-89
accactgaggtctccgaagacgtaatagcactgctcagagaaggtgatcttgttgacggtgtgtcggatcaggcctgctttgagcagcccgctggcatacttgcgggcctcccgccgctcaggaaagccctccacgtgatggtagagccagtcaaccacatccgagcctggg

SEQ ID NO: 25834 - DNA, 301 bp, Homo sapiens
  MAP TO CHR19.3; EXPRESSED IN BRAIN, SIGNAL = 1.6; EXPRESSED IN HELA, SIGNAL =  12; EST_HUMAN HIT: AI185780.1, EVALUE 0.00e+00; SWISSPROT HIT: P08640, EVALUE 2.20e-02; NT HIT: AF073515.1, EVALUE 0.00e+00
tctttgaccccagacacagctgtgatcagtccccaggatcccacgcttctcatcggctcctccctgctggccacctgctcagtgcacggagacccaccaggagccaccgccgagggcctctactggaccctcaacgggcgccgcctgccccctgagctctcccgtgtactcaacgcctccaccttggctctggccctggccaacctcaatgggtccaggcagcggtcgggggacaacctcgtgtgccacgcccgtgacggcagcatcctggctggctcctgcctctatgttggccgtaagt

SEQ ID NO: 25835 - DNA, 282 bp, Homo sapiens; identical to SEQ ID NO: 16155
  MAP TO CHR6.3; EXPRESSED IN HELA, SIGNAL = 2.3; EXPRESSED IN LUNG, SIGNAL = 2.7; EXPRESSED IN ADULT LIVER, SIGNAL = 1.5; SWISSPROT HIT: P40151, EVALUE 8.00e-18; NT HIT: gi14750628, EVALUE 0.00e+00; EST_HUMAN HIT: AL598440.1, EVALUE 0.00e+00

SEQ ID NO: 25836 - DNA, 142 bp, Homo sapiens
  MAP TO CHR4.3; EXPRESSED IN LUNG, SIGNAL = 3.1; EXPRESSED IN HELA, SIGNAL = 4.4; EXPRESSED IN HEART, SIGNAL = 2.5; EXPRESSED IN ADULT LIVER, SIGNAL = 2.5; EXPRESSED IN FETAL LIVER, SIGNAL = 1.7; SWISSPROT HIT: P78314, EVALUE 3.00e-17; NT HIT: gi14781048, EVALUE 8.00e-74; EST_HUMAN HIT: BI911492.1, EVALUE 7.00e-69
caggactctaagttctacctggagggcgaggtcctgtttgtgagtgtgggcagcatggtgggagcactaccacacccacgtgctgcccagccaccagagcctgctgctgcggcacccctacggctacactgggcctaggtga

SEQ ID NO: 25837 - DNA, 157 bp, Homo sapiens
  MAP TO CHR16.3; EXPRESSED IN ADULT LIVER, SIGNAL = 7.4; EXPRESSED IN HELA, SIGNAL = 3.2; EST_HUMAN HIT: BE394872.1, EVALUE 4.00e-83; SWISSPROT HIT: P98082, EVALUE 8.80e-01; NT HIT: gi7656994, EVALUE 2.00e-83
tgtggaaggggagtatgtcccagtggaaggcgacgaggtcacctataaaatgtgctccatcccacccaagaatgagaagctgcaggccgtggaggtcgtcatcactcacctggcaccaggcaccaagcatgagacctggtctggacatgtcatcagc

SEQ ID NO: 25838 - DNA, 166 bp, Homo sapiens
  MAP TO CHR1.3; EXPRESSED IN LUNG, SIGNAL = 3.6; EXPRESSED IN HELA, SIGNAL =   9; NT HIT: gi14722057, EVALUE 3.00e-70; EST_HUMAN HIT: AW007149.1, EVALUE 2.00e-88; SWISSPROT HIT: P30041, EVALUE 3.00e-19
ttgaatttcaccattctcaatgtctttcaataggatggggatagtgtgatggtccttccaaccatccctgaagaagaagccaaaaaacttttcccgaaaggagtcttcaccaaagagctcccatctggcaagaaatacctccgctacacaccccagccttaagtct

SEQ ID NO: 25839 - DNA, 189 bp, Homo sapiens
  MAP TO CHR17.3; EXPRESSED IN ADULT LIVER, SIGNAL = 0.9; EXPRESSED IN HELA, SIGNAL = 5.6; EXPRESSED IN HEART, SIGNAL =   1; NT HIT: gi14774783, EVALUE 1.00e-100; EST_HUMAN HIT: BE276213.1, EVALUE 1.00e-100; SWISSPROT HIT: Q14974, EVALUE 5.00e-29
acagcccactttccttgtggaactgtccagagtgctggcaaatccaggaaacagtcaggttgccagagttgcagctggtctacaaatcaagaactctttgacatctaaagatccagatatcaaggcacaatatcagcagaggtggcttgctattgatgctaatgctcgacgagaagtcaagaactatgt

SEQ ID NO: 25840 - DNA, 144 bp, Homo sapiens
  MAP TO CHR11.3; EXPRESSED IN LUNG, SIGNAL = 8.2; EXPRESSED IN HEART, SIGNAL = 3.5; EXPRESSED IN HELA, SIGNAL = 2.8; EXPRESSED IN FETAL LIVER, SIGNAL = 5.5; NT HIT: M63137.1, EVALUE 1.00e-75; SWISSPROT HIT: P07339, EVALUE 5.00e-20; EST_HUMAN HIT: BG696966.1, EVALUE 2.00e-69
ttcctcctagggacccagatgcgcagcctgggggtgagctgatgctgggtggcacagactccaagtattacaagggttctctgtcctacctgaatgtcacccgcaaggcctactggcaggtccacctggaccagtgagtagtgg

SEQ ID NO: 25841 - DNA, 228 bp, Homo sapiens
  MAP TO CHR8.3; EXPRESSED IN HELA, SIGNAL =  89; EXPRESSED IN LUNG, SIGNAL =  15; EXPRESSED IN HEART, SIGNAL =  13; EST_HUMAN HIT: BI822037.1, EVALUE 1.00e-124; NT HIT: gi15431304, EVALUE 1.00e-122; SWISSPROT HIT: P25120, EVALUE 2.00e-37
actcaccaaccacagctctgttggctgaggagataaccttcttggagccggagggcagcttcacacgggtcttcttggtctcagggttgtgggagataacggtggcatagttccctgatgcccgggccagcttgccacggtctccaggcttctcctccaggcagcacacgattgtaccctcaggcatggtgcccacagggagcacattgccaatgttgagctgggctg

SEQ ID NO: 25842 - DNA, 253 bp, Homo sapiens
  MAP TO CHR19.3; EXPRESSED IN LUNG, SIGNAL = 2.6; EXPRESSED IN HEART, SIGNAL = 3.1; EXPRESSED IN HELA, SIGNAL = 9.1; EXPRESSED IN PLACENTA, SIGNAL = 2.5; EXPRESSED IN FETAL LIVER, SIGNAL = 4.8; EXPRESSED IN BRAIN, SIGNAL =   2; NT HIT: gi14757019, EVALUE 0.00e+00; SWISSPROT HIT: P14866, EVALUE 1.00e-40; EST_HUMAN HIT: BE390077.1, EVALUE 0.00e+00
accgtggtgatcgaataaatggggttcaggatggtaaagagaagcacactgttcacgctccgggagtcatccgagtccccagggcgggagatcttctggctggtagagtagttgacaaaagctgggtgaccagcaatgtatatttggttgtcggctgcgtagttcactgcgttgcaagcccccaacacatcttcaaactccaccagtgcttgtctctttttaggcattaccaccacatagctggcagagagaa

SEQ ID NO: 25843 - DNA, 246 bp, Homo sapiens
  MAP TO CHR19.3; EXPRESSED IN FETAL LIVER, SIGNAL = 2.3; EXPRESSED IN LUNG, SIGNAL = 1.6; EXPRESSED IN HELA, SIGNAL = 3.1; EXPRESSED IN HEART, SIGNAL = 1.4; EXPRESSED IN PLACENTA, SIGNAL = 1.1; EXPRESSED IN BRAIN, SIGNAL = 1.8; NT HIT: gi14759514, EVALUE 1.00e-125; SWISSPROT HIT: Q92973, EVALUE 7.00e-38; EST_HUMAN HIT: BE799084.1, EVALUE 1.00e-121
aggctgcatgcagggcatggtgccctacctgcctgagctgatcccgcacctgatccagtgcctgtcggataagaaggccttggtccgctccatcgcctgctggacgctgagccgctatgcccactgggtggtcagccagccacccgacatgcacctcaagcccctgatgacagagctgctcaaacgcatcctggatggcaacaagagggtacaggaggcggcctgcaggtgaccctggacccctga

SEQ ID NO: 25844 - DNA, 410 bp, Homo sapiens
  MAP TO CHR6.3; EXPRESSED IN HELA, SIGNAL = 4.9; EXPRESSED IN LUNG, SIGNAL = 1.3; EXPRESSED IN ADULT LIVER, SIGNAL = 1.4; EXPRESSED IN BRAIN, SIGNAL = 1.4; EST_HUMAN HIT: BE336654.1, EVALUE 0.00e+00; NT HIT: Z83735.1, EVALUE 0.00e+00; SWISSPROT HIT: P16106, EVALUE 3.00e-72
catggcgcgtacgaagcagactgctcgcaagtccaccggcggcaaggctccgcgcaagcagctggccaccaaggcggctcggaagagcgctccggccaccggcggtgtcaagaagccccatcgctatcggcctggtacagtggctctccgcgagattcgccgctaccagaagtccaccgagctgctgatcagaaagctgccttttcagcgtctggtgcgtgagatcgcgcaggacttcaagaccgacttgcgcttccagagctccgcggtgatggcgctgcaagaggcatgcgaggcctacctggtggggctctttgaggacaccaacctgtgcgccatccacgccaagcgggtgactatcatgcccaaggacatccagctcgcacgtcgtatccgcggcgagagggctt

SEQ ID NO: 25845 - DNA, 189 bp, Homo sapiens
  MAP TO CHR11.3; EXPRESSED IN HELA, SIGNAL =   4; EXPRESSED IN HEART, SIGNAL = 2.4; EXPRESSED IN BRAIN, SIGNAL = 1.9; EST_HUMAN HIT: AI989635.1, EVALUE 3.00e-99; NT HIT: AF033033.2, EVALUE 1.00e-102; SWISSPROT HIT: Q13488, EVALUE 1.00e-27
tgcagagctgtccgaggttctgtgggccatggtgatgcgcataggcctgggcctgggccgggaggtgggcgtggcggctgtggtgctggtccccatctttgccgcctttgccgtgatgaccgtggctatcctgctggtgatggagggactctcagccttcctgcacgccctgcggctgcactggtgagc

SEQ ID NO: 25846 - DNA, 134 bp, Homo sapiens
  MAP TO CHR15.3; EXPRESSED IN HELA, SIGNAL =   2; EXPRESSED IN LUNG, SIGNAL = 0.64; EXPRESSED IN ADULT LIVER, SIGNAL = 1.6; EXPRESSED IN BRAIN, SIGNAL = 5.4; SWISSPROT HIT: Q06418, EVALUE 7.00e-16; EST_HUMAN HIT: BG699217.1, EVALUE 3.00e-43; NT HIT: gi5454141, EVALUE 2.00e-43
ttctggaccacagacccatccttcacccactggatgtcaggctcctccatcccctccatgctgcagctgagctttaccagctgcccctgggacactgtcagctttgccgggactcccacgagcttcagacctgc

SEQ ID NO: 25847 - DNA, 156 bp, Homo sapiens
  MAP TO CHR19.3; EXPRESSED IN HELA, SIGNAL = 2.2; EXPRESSED IN PLACENTA, SIGNAL = 1.8; EXPRESSED IN LUNG, SIGNAL = 4.4; EXPRESSED IN ADULT LIVER, SIGNAL = 1.7; SWISSPROT HIT: P43626, EVALUE 1.00e-04; EST_HUMAN HIT: BI025354.1, EVALUE 2.00e-57; NT HIT: gi13651043, EVALUE 9.00e-83
ctcaggagagaacgtgaccctgctgtgtcagtcacgggagcagttggacactttccttctgaccaaggagggggcagcccatcacccactgcgtctgagatcagagcaccaagctcagcagcaccaggctgaattccccatgagtcctgtgacctc

SEQ ID NO: 25848 - DNA, 194 bp, Homo sapiens
  MAP TO CHR13.3; EXPRESSED IN HELA, SIGNAL = 3.1; EXPRESSED IN HEART, SIGNAL = 1.8; EXPRESSED IN ADULT LIVER, SIGNAL = 1.5; EXPRESSED IN BRAIN, SIGNAL = 2.1; NT HIT: U20272.1, EVALUE 1.00e-104; SWISSPROT HIT: Q92664, EVALUE 1.00e-35; EST_HUMAN HIT: AI817246.1, EVALUE 1.00e-104
cgcaaagattaccttaagcaacacatgaaaactcatgccccagaaagggatgtatgtcgctgtccaagagaaggctgtggaagaacctatacaactgtgtttaatctccaaagccatatcctctccttccatgaggaaagccgcccttttgtgtgtgaacatgctggctgtggcaaaacatttgcaatgaaagt

SEQ ID NO: 25849 - DNA, 128 bp, Homo sapiens
  MAP TO CHR22.3; EXPRESSED IN HELA, SIGNAL = 4.8; EXPRESSED IN PLACENTA, SIGNAL = 2.1; EXPRESSED IN LUNG, SIGNAL = 2.7; EXPRESSED IN FETAL LIVER, SIGNAL = 3.4; SWISSPROT HIT: Q99757, EVALUE 1.00e-14; EST_HUMAN HIT: BE857449.1, EVALUE 3.00e-64; NT HIT: AF276920.1, EVALUE 4.00e-63
ctgcttgtcagccaatcagcttcttcaggaaggcctccaactgatcctcatccttgatgcccacaaacttgtccaccacgtccccattcttcatggccagcacagtgggcaccgctgacacctgggtg

SEQ ID NO: 25850 - DNA, 214 bp, Homo sapiens
  MAP TO CHR11.3; EXPRESSED IN FETAL LIVER, SIGNAL = 5.3; EXPRESSED IN HELA, SIGNAL = 5.8; NT HIT: gi4503538, EVALUE 1.00e-115; SWISSPROT HIT: O09012, EVALUE 3.70e+00; EST_HUMAN HIT: BG572716.1, EVALUE 1.00e-115
ctacctgcatgaagttgtcacttgtggctatcccttcctgtttgagtaaactgatcaaagaacttgctttttctttatcttcatcgcttctatctagtgacaggatgattactttgcttaacatctcaggaagaaagtgtttaggagccctcatttctcttacaccattgacagcctcatttgcatttccactatttagatattcagtcacaac

SEQ ID NO: 25851 - DNA, 125 bp, Homo sapiens
  MAP TO CHR2.3; EXPRESSED IN BRAIN, SIGNAL = 1.5; EXPRESSED IN HELA, SIGNAL = 4.7; EST_HUMAN HIT: BI260078.1, EVALUE 1.00e-42; NT HIT: gi14752972, EVALUE 7.00e-43; SWISSPROT HIT: P50096, EVALUE 1.00e-13
ttgtcatcctcaggggtgcccacagctgccccacgcagtagctgcttgtgggaatccttggaggccagagggtagtctctgttcttcttcaggtcggtgcaggtgatcatggccaccagctcatc

SEQ ID NO: 25852 - DNA, 129 bp, Homo sapiens
  MAP TO CHR19.3; EXPRESSED IN BRAIN, SIGNAL = 7.8; EXPRESSED IN HELA, SIGNAL =  27; EXPRESSED IN HEART, SIGNAL = 5.3; EST_HUMAN HIT: AA554231.1, EVALUE 1.00e-66; NT HIT: AB007152.1, EVALUE 1.00e-66; SWISSPROT HIT: P41115, EVALUE 1.00e-19
gtgaccaagatgaagatgcagaggaccattgtcatccgccgagactatctgcactacatccgcaagtacaaccgcttcgagaagcgccacaagaacatgtctgtacacctgtccccctgcttcaggtga

SEQ ID NO: 25853 - DNA, 280 bp, Homo sapiens
  MAP TO CHR2.3; EXPRESSED IN BRAIN, SIGNAL = 1.4; EXPRESSED IN HELA, SIGNAL = 2.2; EXPRESSED IN LUNG, SIGNAL = 1.8; EXPRESSED IN HEART, SIGNAL =   1; EXPRESSED IN PLACENTA, SIGNAL = 1.6; NT HIT: AF102062.1, EVALUE 1.00e-122; SWISSPROT HIT: O97159, EVALUE 6.60e-02; EST_HUMAN HIT: AL601525.1, EVALUE 1.00e-122
aactcaccattcacggtgctatctatgctggtttcctctttcaagtccacgctgggaagcctctctctctctggagcttcctccaaatctccaagtttgaatgagactgttctctcctccaccacagcctggaggggcacagtggcaggccctacctcagaaacaggatgcttgttttcaatatcaccaacagacaactttgtttcttcatggtcttctttcaagctattctttttttccattaaggggctttcagaaggactacactttatttctccta

SEQ ID NO: 25854 - DNA, 489 bp, Homo sapiens
  MAP TO CHR11.3; EXPRESSED IN HELA, SIGNAL =  29; EXPRESSED IN LUNG, SIGNAL =  32; EXPRESSED IN HEART, SIGNAL = 8.5; EXPRESSED IN BRAIN, SIGNAL =  25; NT HIT: gi14762732, EVALUE 0.00e+00; SWISSPROT HIT: P07900, EVALUE 9.00e-85; EST_HUMAN HIT: BG289859.1, EVALUE 0.00e+00
ctctgcaaaaccatgaaagacatattggagaaaaaagttgaaaaggtggttgtgtcaaaccgattggtgacgtctccatgctgtattgtcacaagcacatatggctggacagaaaacatggagagaatcatgaaagctcaagccctaagagacaactcaacaatgggttatatggcagccaagaaacacctggagataaatcctgatgattccattattgagaccttaaggcaaaaggcagaggctgataagaatgacaagtctgtgaaggatctgctcatcttgctttacgaaactgcactcctgtcttctggcttcagtctggaagatccccagacacatgctaacaggacctacaggatgatcaaacttggtctgggtattgatgaagatgatcctgctgctgatgataccagtgctgctgtaactgaagaaatgccgcccctcgaaggagatgacgacacatcatgcatggaagaagtagactaa

SEQ ID NO: 25855 - DNA, 172 bp, Homo sapiens
  MAP TO CHR19.3; EXPRESSED IN HELA, SIGNAL = 6.6; EXPRESSED IN ADULT LIVER, SIGNAL = 2.7; NT HIT: M59849.1, EVALUE 2.00e-78; SWISSPROT HIT: P35550, EVALUE 3.00e-22; EST_HUMAN HIT: AI418047.1, EVALUE 2.00e-78
ttagtcctttctcctctttaggccaactgcattgactccacagcctcagccgaggccgtgtttgcctccgaagtgaaaaagatgcaacaggagaacatgaagccgcaggagcagttgacccttgagccatatgaaagagaccatgccgtggtcgtgggagtgtacaggtgag

SEQ ID NO: 25856 - DNA, 312 bp, Homo sapiens
  MAP TO CHR2.3; EXPRESSED IN HELA, SIGNAL = 2.4; EXPRESSED IN LUNG, SIGNAL = 1.1; EXPRESSED IN HEART, SIGNAL = 0.99; EXPRESSED IN ADULT LIVER, SIGNAL = 0.84; EXPRESSED IN BRAIN, SIGNAL =   2; SWISSPROT HIT: P49792, EVALUE 8.00e-49; EST_HUMAN HIT: BF092766.1, EVALUE 0.00e+00; NT HIT: gi16158276, EVALUE 0.00e+00
aaatgaagcaaatgctacaagatgtgttgcttgtcagaatccggataaaccaagtccatctacttctgttccagctcctgcctcttttaagtttggtacttcagagacaagcaaggctccaaagagcggatttgagggaatgttcactaagaaggagggacagtgggattgcagtgtgtgcttagtaagaaatgaagccagtgctaccaaatgtattgcttgtcagaatccaggtaaacaaaatcaaactacttctgcagtttcaacacctgcctcttcagagacaagcaaggctccaaagagcggatttga

SEQ ID NO: 25857 - DNA, 148 bp, Homo sapiens
  MAP TO CHR9.3; EXPRESSED IN HELA, SIGNAL =   3; EXPRESSED IN FETAL LIVER, SIGNAL = 0.86; EXPRESSED IN ADULT LIVER, SIGNAL = 0.75; SWISSPROT HIT: Q9ULV3, EVALUE 1.00e-17; NT HIT: Y17453.1, EVALUE 1.00e-75; EST_HUMAN HIT: BF309035.1, EVALUE 1.00e-58
ctgagggagctcaggttacctccttggctttgtccttatgcccctgggacttcacgtgctccacaaacttgcgaggggttttgaagtagcggttgcaaacggtgcagaagggtcgcaaggattgtttggcaatctggaaaaaggcagg

SEQ ID NO: 25858 - DNA, 108 bp, Homo sapiens
  MAP TO CHR15.3; EXPRESSED IN ADULT LIVER, SIGNAL = 1.6; EXPRESSED IN BRAIN, SIGNAL = 2.2; EXPRESSED IN HELA, SIGNAL =  15; SWISSPROT HIT: P07355, EVALUE 9.00e-14; NT HIT: gi4757755, EVALUE 1.00e-50; EST_HUMAN HIT: BE279249.1, EVALUE 2.00e-50
cctacctttggtcttgatggctgtttcaatgttcaaagcatcccgctcagcatcaaagttagtataggctttgacagacccatatgcacttgggggtgtagagtgctg

SEQ ID NO: 25859 - DNA, 156 bp, Homo sapiens
  MAP TO CHR12.3; EXPRESSED IN HELA, SIGNAL = 2.9; EXPRESSED IN BRAIN, SIGNAL = 1.5; SWISSPROT HIT: P58108, EVALUE 4.00e-23; NT HIT: gi14761645, EVALUE 1.00e-78; EST_HUMAN HIT: AL575757.1, EVALUE 2.00e-78
cctacctctgcttccactagcctgttgatgatggtctccagagtctcatgcaggtagcacttgagaacaccctcaaagtaatgtgatcgatgttgcaaggctttagtcacagatacatctaggttgttgtaggtcttttctgctgccagattctgg

SEQ ID NO: 25860 - DNA, 148 bp, Homo sapiens
  MAP TO CHR14.3; EXPRESSED IN HELA, SIGNAL = 2.9; EXPRESSED IN LUNG, SIGNAL = 2.8; NT HIT: gi14754024, EVALUE 5.00e-75; EST_HUMAN HIT: BF911980.1, EVALUE 8.00e-78; SWISSPROT HIT: P55010, EVALUE 3.00e-20
ttattgattcatctgacaaagaaatcgttgctgaagcagaaagactggatgtaaaagccatgggccctcttgttctaactgaagttctttttaatgagaagattagagaacagattaagaaatacaggcgccatttcctacgagtaag

SEQ ID NO: 25861 - DNA, 159 bp, Homo sapiens
  MAP TO CHR14.3; EXPRESSED IN HELA, SIGNAL = 6.4; EXPRESSED IN FETAL LIVER, SIGNAL = 9.8; NT HIT: M34599.1, EVALUE 4.00e-82; EST_HUMAN HIT: AA515853.1, EVALUE 8.00e-35; SWISSPROT HIT: O46589, EVALUE 6.00e-19
actttcccatccgtggagcggttgctccaggaggccttctccttcttcttcacggctttctgtctggcagacaggtgcttgacatgggccacatcgggtacgggatagtcacgtcgatccacataagctgggagcgcatagtcatcgctcttcacaaca

SEQ ID NO: 25862 - DNA, 282 bp, Homo sapiens
  MAP TO CHR14.3; EXPRESSED IN ADULT LIVER, SIGNAL = 4.7; EXPRESSED IN HELA, SIGNAL =  13; EXPRESSED IN HEART, SIGNAL = 2.4; NT HIT: gi14751660, EVALUE 0.00e+00; EST_HUMAN HIT: BG539096.1, EVALUE 0.00e+00; SWISSPROT HIT: P07910, EVALUE 6.00e-40
acctaaaacctggccagcaatcattctgccatcctctcctgctacagcagcccgggcatttctctcattaacatactgaacgaaggcaaagcccttatgaacagagcagcccacaattttgccatacttcgaaaagattgcctccacatcagatttcttgaccacaagagtgttgagattcccaatgaatacacgggagttcatggagcgaggatctgtcttgttggtaacgttgctggccatcgtgtttgatggtaaggtttctcacaaagccgaaaactg

SEQ ID NO: 25863 - DNA, 150 bp, Homo sapiens
  MAP TO CHR9.3; EXPRESSED IN PLACENTA, SIGNAL = 4.9; EXPRESSED IN FETAL LIVER, SIGNAL = 5.2; EXPRESSED IN ADULT LIVER, SIGNAL = 6.3; EXPRESSED IN BRAIN, SIGNAL = 6.4; EXPRESSED IN LUNG, SIGNAL =   3; EXPRESSED IN HELA, SIGNAL =   2; EST_HUMAN HIT: BF111850.1, EVALUE 8.00e-75; SWISSPROT HIT: P36610, EVALUE 6.00e-23; NT HIT: gi14744878, EVALUE 8.00e-74
cagctcaccttgttttcatcaaagacgttgaaaacaaatgtggcaaacttggtggggtctccgaacgggaagaattgcttgtagatcttctggaagcctgccgcatccagctgcccactggggcagtccttgatgaagcctttgtacctg

SEQ ID NO: 25864 - DNA, 272 bp, Homo sapiens
  MAP TO CHR3.3; EXPRESSED IN HELA, SIGNAL = 2.2; EXPRESSED IN FETAL LIVER, SIGNAL = 1.1; NT HIT: gi14730458, EVALUE 0.00e+00; EST_HUMAN HIT: BI521243.1, EVALUE 0.00e+00; SWISSPROT HIT: Q10691, EVALUE 2.20e+00
ctcaggcattgatggccttccagcgctcgctgtctgtgctgttgatgctgccagtgtggcagggcatggaagcgatgtcatccaggtaggccaccccgccggcagagtcgaactgcgtgctcgagtagctggcagctgaggccccagcagcccctgcagcctccaggccctcccgccgggccacagcgtagggctggggtaggtgtacatctggctcctctgtctcgtccacttggcatttgtaggagaagaggatcttgggctccgagctg

SEQ ID NO: 25865 - DNA, 246 bp, Homo sapiens
  MAP TO CHR3.3; EXPRESSED IN HELA, SIGNAL = 2.4; NT HIT: gi7706688, EVALUE 0.00e+00; EST_HUMAN HIT: BG769312.1, EVALUE 0.00e+00; SWISSPROT HIT: P73821, EVALUE 4.70e-01
taccttctggggcttcaagggtcttcttattctgctcacaccacccaatggggtagagatcagccttcctgatgtcacaccagaaatctgctctccgatcctccccatagccatcatagcggagaaggagcaactgctcacaggtagtgataacggtggcaacccagtaggtctcaggatctgttctcacagccacctccagcttcatcccaggagcaaatccattttgcaaacgtgtgtccacct

SEQ ID NO: 25866 - DNA, 277 bp, Homo sapiens
  MAP TO CHR6.3; EXPRESSED IN FETAL LIVER, SIGNAL =  26; EXPRESSED IN HELA, SIGNAL =  67; NT HIT: X60108.1, EVALUE 0.00e+00; EST_HUMAN HIT: BG758626.1, EVALUE 0.00e+00; SWISSPROT HIT: P16189, EVALUE 2.00e-49
caggttctcacaccatccagatgatgtatggctgcgacgtggggtcggacgggcgcttcctccgcgggtaccggcaggacgcctacgacggcaaggattacatcgccttgaacgaggacctgcgctcttggaccgcggcggacatggcggctcagatcacccagcgcaagtgggaggcggcccgtgtggcggagcagttgagagcctacctggagggcacgtgcgtggagtggctccgcagatacctggagaacgggaaggagacgctgcagcgcac

SEQ ID NO: 25867 - DNA, 171 bp, Homo sapiens
  MAP TO CHR14.3; EXPRESSED IN LUNG, SIGNAL = 4.2; EXPRESSED IN HEART, SIGNAL = 4.1; EXPRESSED IN HELA, SIGNAL = 3.9; EXPRESSED IN BRAIN, SIGNAL = 3.4; EXPRESSED IN FETAL LIVER, SIGNAL = 1.8; SWISSPROT HIT: Q14934, EVALUE 4.00e-28; NT HIT: gi14750679, EVALUE 1.00e-88; EST_HUMAN HIT: BF726084.1, EVALUE 2.00e-88
ccaggacctctgccctacccccactggactggcctctgcccagccaatatgagcagctggagctgaggatcgaggtacagcctagagcccaccaccgggcccactatgagacagaaggcagccgtggagctgtcaaagctgcccctggcggtcaccccgtagtcaaggtaa

SEQ ID NO: 25868 - DNA, 274 bp, Homo sapiens
  MAP TO CHRX.3; EXPRESSED IN LUNG, SIGNAL = 5.1; EXPRESSED IN HELA, SIGNAL = 8.5; EXPRESSED IN PLACENTA, SIGNAL = 7.3; EXPRESSED IN ADULT LIVER, SIGNAL = 5.6; NT HIT: U52111.2, EVALUE 0.00e+00; SWISSPROT HIT: P53106, EVALUE 9.90e-01; EST_HUMAN HIT: BF541126.1, EVALUE 4.00e-78
gcgaccagctgggcccctggctcagggaggggccacgtcagtgctgccagagacgtcacaatgccggcccagccgttcggtgcgcgattggctgccgctgccacttacgcgtcgctcttcctcgtttgcccctcgtgttcatgggagctcgttttcttttcctctaggcagagaagaggcgatggcggcgatggcatctctcggcgccctggcgctgctcctgctgtccagcctctcccgctgctcaggtagcggcccagccggggcttctttc

SEQ ID NO: 25869 - DNA, 185 bp, Homo sapiens
  MAP TO CHR2.3; EXPRESSED IN HELA, SIGNAL =  13; EXPRESSED IN LUNG, SIGNAL =   5; SWISSPROT HIT: P50502, EVALUE 3.00e-28; NT HIT: gi14773085, EVALUE 2.00e-90; EST_HUMAN HIT: BE165440.1, EVALUE 3.00e-90
ggaatggccggaatgcctggactcaatgaaattcttagtgatccagaggttcttgcaaccatacaggatccagaagttatggtggccttccaggatgtggctcagaacccagcaaatatgtcaaaataccagagcaacccaaaggttatgaatctcatcagtaaattgtcagccaagtttggagg

SEQ ID NO: 25870 - DNA, 202 bp, Homo sapiens
  MAP TO CHR4.3; EXPRESSED IN LUNG, SIGNAL = 4.7; EXPRESSED IN HELA, SIGNAL =   7; EXPRESSED IN PLACENTA, SIGNAL = 2.2; EXPRESSED IN HEART, SIGNAL = 2.8; SWISSPROT HIT: O75083, EVALUE 4.00e-31; NT HIT: AF020056.1, EVALUE 4.00e-98; EST_HUMAN HIT: BI754853.1, EVALUE 6.00e-98
aaaagtaagttcacttacgccaattgtgaacttgaacttgaatgggggtccctcaaagaatgccgcgcagttatcatcgcttcccgtggccagccggtatggccggctctgcttgatgtccacgctgttgatgactttgttgtgtcctgtaatctcgcccacagaagagccactatcccagaggaagactgctccaaacctt

SEQ ID NO: 25871 - DNA, 383 bp, Homo sapiens
  MAP TO CHR2.3; EXPRESSED IN LUNG, SIGNAL =  20; EXPRESSED IN HELA, SIGNAL =  11; SWISSPROT HIT: P12947, EVALUE 4.00e-45; NT HIT: X15940.1, EVALUE 0.00e+00; EST_HUMAN HIT: AU122853.1, EVALUE 0.00e+00
gcagaatgtctcccgcaaagaagggtggcgagaagaaaaagggcccttctgccatcaacgaggtggtgacccaagaacataccatcaacattcacaagcgcatccatggagagggcttcaagaagcgtgctcctcgggcactcaaagagattcggaaatttgccatgaaggagatgggaactccagatgtacgcattgataccaggctcaacaaagctgtctgggccaaaggaataaggaatgtcctatagggaatccatgtgcggttgtccagaaaacgtaatgagggtgaagattcaccaaataagctctatactttggttacctatgtacctgttaccactttcaaaaatctacagacagtcaatgtggacaagaactaa

SEQ ID NO: 25872 - DNA, 103 bp, Homo sapiens
  MAP TO CHRX.3; EXPRESSED IN HELA, SIGNAL = 4.2; EXPRESSED IN HEART, SIGNAL = 2.3; EXPRESSED IN FETAL LIVER, SIGNAL = 3.3; SWISSPROT HIT: O60830, EVALUE 5.00e-13; NT HIT: AF207550.1, EVALUE 2.00e-51; EST_HUMAN HIT: BE900971.1, EVALUE 4.00e-51
gcctgttctccaccattgactgtggcctggtgcggcttcggggcaaggaggatccctggaactctatcaccagtggagcattgaccggggctgtgctggctgc

SEQ ID NO: 25873 - DNA, 139 bp, Homo sapiens
  MAP TO CHR1.3; EXPRESSED IN HELA, SIGNAL = 2.2; EXPRESSED IN BRAIN, SIGNAL = 0.88; SWISSPROT HIT: P28288, EVALUE 9.00e-20; NT HIT: gi16158353, EVALUE 1.00e-72; EST_HUMAN HIT: AU128259.1, EVALUE 2.00e-72
gtgatgagccgagaattaacatatctatattctccttcatacttttgctcagttattgtcatcttaccaatgggtcttcgaagtcgagttaggaatagcccagaaacaaccaagtaggccatcatgctcgctgggccct

SEQ ID NO: 25874 - DNA, 149 bp, Homo sapiens
  MAP TO CHR16.3; EXPRESSED IN BRAIN, SIGNAL = 0.97; EXPRESSED IN HELA, SIGNAL = 4.7; EXPRESSED IN LUNG, SIGNAL = 2.7; SWISSPROT HIT: P20839, EVALUE 5.00e-13; NT HIT: L19709.1, EVALUE 1.00e-78; EST_HUMAN HIT: BG912840.1, EVALUE 4.00e-52
cagtgatgatgggctccctgctggccaccaccacggaggcccagcggcgagtacttcttctcagacagggtgcagctcaagaagtactggggcatgggctcgctagatgccatggagaagagcagcagcagccagaaacgatacttcag

SEQ ID NO: 25875 - DNA, 135 bp, Homo sapiens
  MAP TO CHR2.3; EXPRESSED IN LUNG, SIGNAL = 7.3; EXPRESSED IN HEART, SIGNAL = 3.1; EXPRESSED IN HELA, SIGNAL =   2; EXPRESSED IN FETAL LIVER, SIGNAL =  13; NT HIT: Z48199.1, EVALUE 4.00e-66; EST_HUMAN HIT: AI247825.1, EVALUE 4.00e-70
ttcacaggactactttatattaaagtttattacatttggaaaatctactgtacagggaaaaacccattggattaagtagagttttgccaaaagcaaaagactatcactctttggaaaatattcctgattccagcc

SEQ ID NO: 25876 - DNA, 106 bp, Homo sapiens
  MAP TO CHR6.3; EXPRESSED IN HELA, SIGNAL = 4.5; EXPRESSED IN LUNG, SIGNAL = 7.3; SWISSPROT HIT: O75964, EVALUE 8.00e-11; NT HIT: gi14774138, EVALUE 3.00e-38; EST_HUMAN HIT: BF247103.1, EVALUE 5.00e-38
cgctgctgtgacttactcaaagccttgattgggcacattttggtactacaccaagtttgagctggttcctcccacccctgctgtgatccctagagctattcagagt

SEQ ID NO: 25877 - DNA, 320 bp, Homo sapiens
  MAP TO CHR13.3; EXPRESSED IN HEART, SIGNAL = 7.5; EXPRESSED IN HELA, SIGNAL =  10; EXPRESSED IN FETAL LIVER, SIGNAL =  34; EXPRESSED IN ADULT LIVER, SIGNAL =   9; NT HIT: gi13631439, EVALUE 1.00e-120; EST_HUMAN HIT: BG614633.1, EVALUE 1.00e-123; SWISSPROT HIT: P32119, EVALUE 1.00e-50
cagtcatggcctcaggtaatgcgtgcatgggaaagcctgcccctaacttcaaggccacatccatggtggatggcgccttcaaagaggtgaagctgtcagactacaaagggaagtacgtggtcctctttttctaccctctggacttcacttttgtgtgccccacggagatcactgcagtcagcagccatgccgaggacttccgcaagctgggctgcgaagtgctgggcatcttggtggactctcagttcacccacctggcttggattaacatcccccggaaggagggaggcttgggccccctgaacatccccctgcttgct

SEQ ID NO: 25878 - DNA, 109 bp, Homo sapiens
  MAP TO CHR1.3; EXPRESSED IN HELA, SIGNAL =  24; SWISSPROT HIT: P39026, EVALUE 1.00e-15; NT HIT: AF101385.3, EVALUE 7.00e-55; EST_HUMAN HIT: AI889174.1, EVALUE 1.00e-54
ctgctggaaccagcgcatggcctcctctttgctgattctgtgtttggccccaatgcagcctgtcctgcgcttcttgtctgcgatgctgaaacctggcctacccagcacc

SEQ ID NO: 25879 - DNA, 119 bp, Homo sapiens
  MAP TO CHR5.3; EXPRESSED IN LUNG, SIGNAL = 2.3; EXPRESSED IN HELA, SIGNAL = 4.2; SWISSPROT HIT: P31040, EVALUE 2.00e-16; EST_HUMAN HIT: AL567711.1, EVALUE 3.00e-58; NT HIT: AF171028.1, EVALUE 5.00e-59
ctcaccccggtcgaacgtcttcaggtgctttaggtctccatagagcttgctgattttcccacaaccttcttgcaacacgcttcccacacggaacacggcagcatgattttgcattgact

SEQ ID NO: 25880 - DNA, 210 bp, Homo sapiens
  MAP TO CHR11.3; EXPRESSED IN HELA, SIGNAL = 3.3; EXPRESSED IN FETAL LIVER, SIGNAL = 2.4; NT HIT: X15534.1, EVALUE 1.00e-107; SWISSPROT HIT: P11117, EVALUE 7.00e-32; EST_HUMAN HIT: BE315157.1, EVALUE 6.00e-95
ggtgacagctcacctgtgtctgcaggaccgcttgccagctggcactcctgctgccaatccttgggcacgacgggctctgtgaggcgaaggaagtcctgcagtgggcagcggtgagggcagccaggcaggctgagcggccagggggccttgtcactctcgttccgaaagtacatctccactgagaaattcctgagggtcgacaggaggcaa

SEQ ID NO: 25881 - DNA, 224 bp, Homo sapiens
  MAP TO CHR11.3; EXPRESSED IN HELA, SIGNAL = 2.7; SWISSPROT HIT: Q04206, EVALUE 7.00e-28; EST_HUMAN HIT: AW604285.1, EVALUE 1.00e-119; NT HIT: Z22953.1, EVALUE 1.00e-119
tctcctgcagaggacattgaggtgtatttcacgggaccaggctgggaggccgaggctccttttcgcaagctgatgtgcaccgacaagtggccattgtgttccggacccctccctacgcagaccccagcctgcaggctcctgtgcgtgtctccatgcagctgcggcggccttccgaccgggagctcagtgagcccatggaattccagtacctgccagatacaggt

SEQ ID NO: 25882 - DNA, 113 bp, Homo sapiens
  MAP TO CHR5.3; EXPRESSED IN HELA, SIGNAL =   2; EST_HUMAN HIT: BI020721.1, EVALUE 2.00e-47; NT HIT: gi16157231, EVALUE 3.00e-57
ttggtgtctgcccgcaccaaaagctgtgtcttctgatttgctgtaggttttaaatgcagagtacctatgactttctctttaaattcattatctttcttgtaaaatagtttaca

SEQ ID NO: 25883 - DNA, 194 bp, Homo sapiens
  MAP TO CHR8.3; EXPRESSED IN HELA, SIGNAL =   8; EXPRESSED IN ADULT LIVER, SIGNAL = 3.2; NT HIT: gi4505574, EVALUE 1.00e-105; SWISSPROT HIT: P11940, EVALUE 4.00e-32; EST_HUMAN HIT: BG722385.1, EVALUE 1.00e-105
accttacatgaaaggatgttaccaaaagcagaaaatgtatcatacagtgctttattatcaatggatttgtccagatttttaatgaatatgttgcctactccacttttgcgaagtgatggatcacgctgagaccacatgatgcgtactggcttgccctttataacatcaaaattcatggtgtccaaagcacgctc

SEQ ID NO: 25884 - DNA, 183 bp, Homo sapiens
  MAP TO CHR8.3; EXPRESSED IN HEART, SIGNAL = 1.2; EXPRESSED IN HELA, SIGNAL = 3.3; SWISSPROT HIT: Q10570, EVALUE 1.00e-19; EST_HUMAN HIT: BE797797.1, EVALUE 5.00e-95; NT HIT: gi9558724, EVALUE 3.00e-95
cctacctccatggtgccattctcccgcaccagcaggcaccagtgggtaggctctgcccggaagggtgcagggtcccggtcagcagggggctggctgcttcttcgggcctcctccttgctggggctgaagagggagcccgaatccccatacagcatctcctcctcgtcatccactgtggggctg

SEQ ID NO: 25885 - DNA, 193 bp, Homo sapiens
  MAP TO CHR11.3; EXPRESSED IN HELA, SIGNAL = 3.2; EXPRESSED IN ADULT LIVER, SIGNAL = 3.3; EXPRESSED IN BRAIN, SIGNAL = 4.5; EST_HUMAN HIT: AI128728.1, EVALUE 2.00e-94; NT HIT: L09209.1, EVALUE 1.00e-94; SWISSPROT HIT: Q06481, EVALUE 3.00e-30
taggctcttgcagccaatgccggaacaggatttgctgttgctgagcctcaaatcgcaatgttttgtgggaagttaaatatgcatgtgaacattcagactgggaaatgggaacctgatccaacaggcaccaagagctgctttgaaacaaaagaagaagttcttcagtactgtcaggaggtaagagtgttgccag

SEQ ID NO: 25886 - DNA, 112 bp, Homo sapiens
  MAP TO CHR10.3; EXPRESSED IN HELA, SIGNAL =  14; NT HIT: gi14744842, EVALUE 1.00e-40; SWISSPROT HIT: Q02878, EVALUE 2.00e-04; EST_HUMAN HIT: BE791389.1, EVALUE 2.00e-40
ctggaatacatagcacatcgggaatacctgccaattcctctgacaaggacagggttgtgctgcaatggggcttccccttcttgggcttcttagccttgaggtgacccttttt

SEQ ID NO: 25887 - DNA, 375 bp, Homo sapiens
  MAP TO CHR1.3; EXPRESSED IN ADULT LIVER, SIGNAL = 2.2; EXPRESSED IN BRAIN, SIGNAL = 5.9; EXPRESSED IN HELA, SIGNAL = 2.9; SWISSPROT HIT: P03186, EVALUE 8.40e-02; EST_HUMAN HIT: T10117.1, EVALUE 0.00e+00; NT HIT: gi16168368, EVALUE 0.00e+00
cctgcaccaccctgcccgccctcccagctcggtcagcccggccagccaccaagcagcaagatgcctcaagtgtcccaggaggcaaaggggacccagacgggagtagagcagcctcgcctcccagctggacctgcaaacaggccacctgagcctcacacccaggttcagagggcacaagcagaaacaggcccgacttccttcccctcccctgtgtctgtctccatgaagcctgaccttccagtctctcttcccactcagactgccccaaaacagccgttgtttgtcccaacaacctctggccccagcaccccaccaggactggttctgccacacactgaattccagccagcccccaaacaagattcctctccacac

SEQ ID NO: 25888 - DNA, 393 bp, Homo sapiens
  MAP TO CHR2.3; EXPRESSED IN HELA, SIGNAL = 4.9; NT HIT: gi4503576, EVALUE 0.00e+00; SWISSPROT HIT: Q99814, EVALUE 2.00e-57; EST_HUMAN HIT: AL540846.1, EVALUE 0.00e+00
cctcagacggatttcaatgagctggacttggagacactggcaccctatatccccatggacggggaagacttccagctaagccccatctgcccccgaggagcggctcttggcggagaacccacagtccaccccccagcactgcttcagtgccatgacaaacatcttccagccactggcccctgtagccccgcacagtcccttcctcctggacaagtttcagcagcagctggagagcaagaagacagagcccgagcaccggcccatgtcctccatcttctttgatgccggaagcaaagcatccctgccaccgtgctgtggccaggccagcacccctctctcttccatggggggcagatccaatacccagtggcccccagatccaccattacattt

SEQ ID NO: 25889 - DNA, 161 bp, Homo sapiens
  MAP TO AC026432.2; EXPRESSED IN PLACENTA, SIGNAL = 1.4; EXPRESSED IN HEART, SIGNAL = 1.6; EXPRESSED IN LUNG, SIGNAL = 0.93; SWISSPROT HIT: Q20822, EVALUE 9.90e+00; EST_HUMAN HIT: BF910120.1, EVALUE 3.20e+00
tgcttgtgactgatgaattcaatgagcgcttcaattctcctactttgttctttcagcagaccatttgtgtctttgagagcttattttggcaaatgaataatcagctatccaaattggctcaaggacgatcaaggggaatatttgacctctactttagatga

SEQ ID NO: 25890 - DNA, 342 bp, Homo sapiens
  MAP TO AC007934.7; EXPRESSED IN LUNG, SIGNAL = 0.64; EST_HUMAN HIT: T60493.1, EVALUE 0.00e+00; NT HIT: gi4503496, EVALUE 0.00e+00; SWISSPROT HIT: Q08426, EVALUE 1.00e-60
atcaacctctagaatcccgtagactctgcaacaagccaattcagagcttgcccaacatggacagcatttttagtgaggccctcttgaagatgcggaggcagcaccctgggtgtcttgcacaggaggcttgtgtccgtgcagtccaggctgctgtgcagtatccctatgaagtgggcatcaagaaggaggaggagctgtttctatatcttttgcaatcagggcaggctagagccctgcaatatgctttcttcgctgaaaggaaagcaaataagtggtcaactccctccggagcatcgtggaaaacagcatcagcgcggcctgtctcctcagttggtgttgttg

SEQ ID NO: 25891 - DNA, 174 bp, Homo sapiens
  MAP TO AJ009613.3; EXPRESSED IN LUNG, SIGNAL = 0.87; EXPRESSED IN PLACENTA, SIGNAL = 1.5; EST_HUMAN HIT: BF086483.1, EVALUE 3.00e-93; SWISSPROT HIT: Q04279, EVALUE 1.90e+00; NT HIT: gi14769995, EVALUE 2.00e-93
cctcttagcaatgcataccacgagttagcacaagtgtattcaaccaacaacccctcagaactccgaaacctggtgaataagcacagtgaaaccttcactcgcgataacaacatggggctggtgaagcaatgcttgtcatctctttataagaagaatattcagaggctaacaaag

SEQ ID NO: 25892 - DNA, 144 bp, Homo sapiens
  MAP TO AC010304.5; EXPRESSED IN LUNG, SIGNAL = 1.6; EXPRESSED IN PLACENTA, SIGNAL = 1.1; EXPRESSED IN HEART, SIGNAL = 2.2; NT HIT: AF418272.1, EVALUE 2.00e-31; EST_HUMAN HIT: AA528548.1, EVALUE 3.00e-31; SWISSPROT HIT: P06529, EVALUE 7.70e+00
tttgcgtccttcagtccaatcaagttgacagtattaaccatcacaccaccactataaggatggctaaaaggagctctaaatcttgaaacaaatcctggaaacacatcaaaacagaacttctttaaagcataaatctcaccgaat

SEQ ID NO: 25893 - DNA, 231 bp, Homo sapiens
  MAP TO AC007075.3; EXPRESSED IN LUNG, SIGNAL = 0.45; EXPRESSED IN PLACENTA, SIGNAL = 0.84; EXPRESSED IN HEART, SIGNAL = 0.97; SWISSPROT HIT: O14228, EVALUE 1.10e-01; NT HIT: AJ275318.1, EVALUE 3.30e+00
atgatccagtttttccccaactgtatcctttccatcagcataaagatatgctataattttcccagaaagagacagaagaaggaatctgccttgaccccatatcccctccaggtcaccacccattcctttggtctttatggcaaagctcacaagagttgtgtgctcatgggtttcacattttgttttgaaactcactcttgcttccactgttctatgaaatgccatggtcag

SEQ ID NO: 25894 - DNA, 157 bp, Homo sapiens
  MAP TO AC005263.1; EXPRESSED IN LUNG, SIGNAL = 0.45; NT HIT: gi15307287, EVALUE 5.00e-75; SWISSPROT HIT: Q15428, EVALUE 2.00e-23; EST_HUMAN HIT: AW249094.1, EVALUE 8.00e-75
attgactaccctgagatcgccgagggcatcatgccacgtcaccgcttcatgtctgcgtacgagcagaggatcgagcctccggaccggcgctggcagtacctgctcatggccgccgagccctacgagaccattgccttcaaggtagcgtggctgcggg

SEQ ID NO: 25895 - DNA, 127 bp, Homo sapiens
  MAP TO AC020663.1; EXPRESSED IN LUNG, SIGNAL = 1.2; EXPRESSED IN HEART, SIGNAL = 1.8; NT HIT: gi13375778, EVALUE 2.00e-65; EST_HUMAN HIT: BI824041.1, EVALUE 2.00e-65
cttgtccttgagctgctggcagagctgcagggagacggtgaagtagaccagggcgtcgttgagccaggggatcacgcactccactttgtgcacgtggctcacctccaggcgctgagagccccactcg

SEQ ID NO: 25896 - DNA, 138 bp, Homo sapiens
  MAP TO AC010504.6; EXPRESSED IN LUNG, SIGNAL = 1.3; EST_HUMAN HIT: AW997287.1, EVALUE 2.00e-53; SWISSPROT HIT: O15063, EVALUE 4.00e-04; NT HIT: gi7662075, EVALUE 5.00e-72
ggatggcctgcacggtggctggtcgggtgctcagggagactctgccagctcgagtgatgagacatcctcagccaacggggacagcttgttctccatgttttcagggcctgacctcgttgctgctgtcaagcagagaag

SEQ ID NO: 25897 - DNA, 299 bp, Homo sapiens
  MAP TO AC004192.1; EXPRESSED IN PLACENTA, SIGNAL = 2.7; EXPRESSED IN LUNG, SIGNAL =   3; SWISSPROT HIT: P12970, EVALUE 3.00e-29; NT HIT: AF055066.1, EVALUE 0.00e+00; EST_HUMAN HIT: BI596555.1, EVALUE 1.00e-120
atgccaaaaggaaagaaggccaaggagaagaaggtggctccagcccctgctgtcgtgaagaagcaggaggccaagaaagtggtaaatcccttgtttgagaaaaggcctaagaattttggcactggacaggatatccagcccaaaagagacctcacccactttgtgaaatggccctgctatatcaggttgcagcagcagagaaccatcctctataagtggctgaaagtgcctcctgagattaaccagttcacccaggcaccagacagccaaacagctactctgctgcttaagctggccca

SEQ ID NO: 25898 - DNA, 222 bp, Homo sapiens
  MAP TO AC009123.6; EXPRESSED IN LUNG, SIGNAL = 1.3; SWISSPROT HIT: P45969, EVALUE 2.00e-09; EST_HUMAN HIT: BI827859.1, EVALUE 1.00e-117; NT HIT: gi13386135, EVALUE 1.00e-27
gttttgatcgcattgagaacctggaagagtacacagggctgcgctgtctctggctgcagagcaatggaatacagaaaatcgaaaacctggaggcccaaactgagttgcgttgcctcttcttgcaaatgaacttgctccgtaaaattgagaacctggaacctctgcagaaactggatgctcttaacctcagcaacaattacatcaagaccattgaaaacctct

SEQ ID NO: 25899 - DNA, 264 bp, Homo sapiens
  MAP TO AC006154.1; EXPRESSED IN HEART, SIGNAL = 1.4; EXPRESSED IN LUNG, SIGNAL = 0.41; SWISSPROT HIT: P21439, EVALUE 5.00e-18; NT HIT: gi14739712, EVALUE 1.00e-64; EST_HUMAN HIT: BF885506.1, EVALUE 7.00e-21
ttatccatcggcattgccattttgtaggctttttaccaaaactggattcacacgcaaatttgttactgaaaaaccaatttcaaagggccaatttgtatccagcttcccactctggaaagcttggttcttcccacttactgtgccctcatcagggtcatagagcctctgtatcagctggaccgttgtgctcttcccacagccactacttccaaccagggccaccgtctgcccactctgcaccttcaggttgaggcccttcaagat

SEQ ID NO: 25900 - DNA, 97 bp, Homo sapiens
  MAP TO AC004785.1; EXPRESSED IN PLACENTA, SIGNAL =  10; EXPRESSED IN LUNG, SIGNAL = 0.7; EST_HUMAN HIT: AL601428.1, EVALUE 1.00e-47; SWISSPROT HIT: O00161, EVALUE 8.10e+00; NT HIT: gi14756092, EVALUE 9.00e-48
ctgccggtcttcccgaaatgcagaaaacatgccagggctactgctatcagagcaaccagggccactactccaatcacaatgccagcaatggccccag

SEQ ID NO: 25901 - DNA, 407 bp, Homo sapiens
  MAP TO AC013559.2; EXPRESSED IN LUNG, SIGNAL = 0.41; NT HIT: AL163227.2, EVALUE 2.00e-70; SWISSPROT HIT: P34668, EVALUE 2.30e-01; EST_HUMAN HIT: BF922594.1, EVALUE 1.00e-112
atgtggaagcgacattggaactgggtaacaggcagaggttggaacaatttggaggacacaaaagaagacaggaaaatgtgggaaagtttggaacttcctagagacttgaagggtttagaagacaggaagatgtgggaaagtttggaactttctagaaatttgttgaatggctttgaccaaaatgctgatagtgatacggaaaatgaaatccaggctgaggtggtctcagatggagaagaggaacttgttgggaactggaataaaggtaattcttgctatgttttagcaaagagactggcagcattttgcccctgcgctaaagatctgtggaactttgaacttgaaagagacaatttagggtatctggtggaagaaatttctaaggagcaaagcaatcaagaggaagc

SEQ ID NO: 25902 - DNA, 193 bp, Homo sapiens
  MAP TO AC004210.1; EXPRESSED IN PLACENTA, SIGNAL = 1.2; EXPRESSED IN HEART, SIGNAL = 1.7; EXPRESSED IN LUNG, SIGNAL = 0.49; SWISSPROT HIT: P15978, EVALUE 2.00e-06; NT HIT: X80018.1, EVALUE 3.00e-03
ctggacagcggctcaaagagcggcttggaggatccatcacacctgggagaggttctggaccgcggaggccacaagggaagccccgatgggtcactgcactaggtggctgctcagacacctggagcatggcaaggagatgatgctgccggcaggtactggggtcctccaggccccacgtcaggacctcttggag

SEQ ID NO: 25903 - DNA, 223 bp, Homo sapiens
  MAP TO AC009757.8; EXPRESSED IN LUNG, SIGNAL = 0.6; EST_HUMAN HIT: AW470791.1, EVALUE 3.00e-41; NT HIT: U60822.1, EVALUE 4.00e-27; SWISSPROT HIT: P28518, EVALUE 1.80e+00
atggtgccctgtgtccgagctgcttcagatcgagctgtgattaaaaggggccaaggtacagctcaggccattgcttcagggggtgcaagccgtaagccgtggtggcttccatatggtgttgggcctgcaggtgcacagaagtcaagaattgaagttggggaacctctgcctacattacagaggatgtttggaaacacctggatgtccaggcaaaagtttgctg

SEQ ID NO: 25904 - DNA, 282 bp, Homo sapiens
  MAP TO AC008982.4; EXPRESSED IN PLACENTA, SIGNAL = 2.3; EXPRESSED IN LUNG, SIGNAL = 2.1; NT HIT: AF030246.1, EVALUE 0.00e+00; EST_HUMAN HIT: BF685364.1, EVALUE 1.00e-113; SWISSPROT HIT: Q13011, EVALUE 3.00e-34
gactgacaggctccaactacccgggactcagtattagccttcgcctcactggctcctctgcacaagaggaggcttccggagtagccctcggtgaagccccagaccacagctatgagtcccttcgtgtgacgtctgcgcagaaacatgttctgcatgtccagctcaaccggcccaacaagaggaatgccatgaacaaggtcttctggaggtctgacctgcagatcctggaggcctgcctgcggggggaggcggggctgcgggactgggtgaaagtggaacgtt

SEQ ID NO: 25905 - DNA, 542 bp, Homo sapiens
  MAP TO AC009489.3; EXPRESSED IN LUNG, SIGNAL = 2.9; EXPRESSED IN PLACENTA, SIGNAL = 3.4; EXPRESSED IN HEART, SIGNAL = 2.8; SWISSPROT HIT: P03355, EVALUE 2.00e-13; EST_HUMAN HIT: BF770804.1, EVALUE 2.00e-81; NT HIT: AF198490.1, EVALUE 1.00e-126
ggtctgtttcccttgaccccataactgttgtgggtgtagacaaccaagcttcaaaaccccttaaaactccccaactcttgtgcagacttagacagcattcttctatgcactcttttttagttatccccacctgcccagttcccttattaggccaagacattttaaccaaattatctgcttccctgattattcctggactacagccacatctcattgctacccttctagccaaaccaaagcctccttcgtgtcttcctcttgtaccccccgaccttaacctacaagtgtgggacacctccactccctctctggcaaccaatcacaggcccattactatcccattaaaacctaatcacccttacccagctcaatgccaggatcccatcacacaacaggttcttaggggattgaaggctgttgtctcttgcctgctacagcatgggcttctaaaacctaaaaagtctccttgcaattcttccattttccctattcaaaaactggacaagtcttacaggttatttcaggatttgtgccttatcatc

SEQ ID NO: 25906 - DNA, 124 bp, Homo sapiens
  MAP TO AC005524.1; EXPRESSED IN LUNG, SIGNAL = 0.54; SWISSPROT HIT: P56674, EVALUE 6.00e+00; NT HIT: AF291755.1, EVALUE 7.00e-06; EST_HUMAN HIT: W94656.1, EVALUE 1.00e-08
gtactctggcttcccacatcataaagatgtgcatacgaaagatgagcatgctagctgaactggtgtgtcgacatcgtcccagtctgagtgtgggtgtgagtgcaccctgggatgaagtggcatt

SEQ ID NO: 25907 - DNA, 271 bp, Homo sapiens
  MAP TO AC016639.5; EXPRESSED IN HEART, SIGNAL = 0.98; EXPRESSED IN LUNG, SIGNAL = 0.52; NT HIT: gi16156979, EVALUE 0.00e+00; EST_HUMAN HIT: AA399611.1, EVALUE 2.00e-64; SWISSPROT HIT: Q61496, EVALUE 2.00e-45
atctgtcaatacttttactagaggctgtgctaaatggttatccgattcaagatcaaaaaaggaaattgctctgccagtattcccacaacgaccagtacgcccaattcgatgaacatattcatcaatggtagaaggaagatcaaaattgataacatgttgcacattttcaatatccagccctctggcagctactgaagtagcaacaagaactgggcactttccaaagcgaaaatctccaagagcttgctcccgctctctctgttcccgatca

SEQ ID NO: 25908 - DNA, 342 bp, Homo sapiens
  MAP TO AC022085.4; EXPRESSED IN PLACENTA, SIGNAL = 0.84; EXPRESSED IN LUNG, SIGNAL = 0.87; EST_HUMAN HIT: BF363236.1, EVALUE 0.00e+00; SWISSPROT HIT: Q15596, EVALUE 6.70e-01; NT HIT: gi11968022, EVALUE 0.00e+00
tattagcttccagtaattccttggacacattgcaggcagagcttggtggcacagcattcacattctcatcttgttcaggagacatgggctcttgtttaatctgaactgatgagtctggagcagggacactgccatgggtttggaaagtaggagacgtggttatttgaagagaggctccggtgggtgatggagacacatgggaagatggaggctccagaaaaagtgggaaaaagggagtgggcagcagtgcggcatcaatggatgtttgagatctactgttccttcgttctcgtgtgaggctacagggaacctggtctgggtgctcagaaggttcatatgttt

SEQ ID NO: 25909 - DNA, 136 bp, Homo sapiens
  MAP TO AC000031.5; EXPRESSED IN LUNG, SIGNAL = 0.6; NT HIT: X56837.1, EVALUE 2.00e-61; EST_HUMAN HIT: BI768076.1, EVALUE 5.00e-54; SWISSPROT HIT: P28161, EVALUE 1.00e-09
acaggttgtgcttgcgggcaatgtaccgcaggatggcgttgctctgggtgatcttgtgagtcccatcaatcaagtagggcagctggatagatgggaaaccggggaagctcagttgggccaccaggctccccagcat

SEQ ID NO: 25910 - DNA, 503 bp, Homo sapiens
  MAP TO AC011088.8; EXPRESSED IN HEART, SIGNAL = 1.2; EXPRESSED IN LUNG, SIGNAL = 4.2; EXPRESSED IN PLACENTA, SIGNAL = 3.4; NT HIT: gi11437515, EVALUE 0.00e+00; EST_HUMAN HIT: BG254693.1, EVALUE 0.00e+00; SWISSPROT HIT: P53634, EVALUE 1.00e-102
ctacaatttaggaattggtgtggctgccactgctatgctctcaattgcacactcatcagttcctctgcggatccggaagtagccattctcaccccagccggtgccccagctgtttttaacaatccagtaatccatcccagaggctgagtcagtgccatagcccacaagcagaacagcatgattagtcagctcaaaggggttgaaagggtctcttagaccagtgtggtggtagatcccctttttgtagtggaggaagtcatcatatacttcaaaagcaactgccatgggcccatgatggaccaactcaagcttcatcagggcttcattgcagcctccatagaaacctcctacatagtggtactcagaggagtaataacgaaagcagtcttccttcattttgcatggagaatcagtgcctgtgtaggggaagcaagcttcttccaccagcccaaaatcttgggcgtactttcctgcaataaggtatgggaagccgccttcacagc

SEQ ID NO: 25911 - DNA, 124 bp, Homo sapiens
  MAP TO AC010200.7; EXPRESSED IN LUNG, SIGNAL = 0.53; NT HIT: AF129756.1, EVALUE 2.60e-02; EST_HUMAN HIT: BF983696.1, EVALUE 1.00e-02
ctctgccctctcctcacagctggagagggaaagtcatggaatccttgtccttcctcttgtttccacctcttcaagattgggccaattgcaatggaatatccattggttgtgaggcctttgtact

SEQ ID NO: 25912 - DNA, 103 bp, Homo sapiens
  MAP TO AL121874.12; EXPRESSED IN PLACENTA, SIGNAL = 0.7; EXPRESSED IN LUNG, SIGNAL = 0.72; SWISSPROT HIT: P46100, EVALUE 1.00e-05; NT HIT: gi14757747, EVALUE 2.00e-51; EST_HUMAN HIT: BG119003.1, EVALUE 8.00e-43
cttgttttcactggatgaatcttcttgaaccttaatacgtcgccttttctttttctgtttatagctccgctgattttcttccaactctgctttctttgcagac

SEQ ID NO: 25913 - DNA, 231 bp, Homo sapiens
  MAP TO AC008620.5; EXPRESSED IN LUNG, SIGNAL = 0.59; EST_HUMAN HIT: AA001935.1, EVALUE 7.80e-02; SWISSPROT HIT: P15391, EVALUE 3.60e-01; NT HIT: AF396654.1, EVALUE 1.00e-125
aaacagatggcagcggagcaggagaaggtgggggcagagttccaggcactgagggctttcctggtggagcaggagggtcggctgctaggccgcctggaggaactgtcccgggaggtggcacagaagcagaatgagaacctggcccagctcggggctgagatcacccagctgtccaagctcagcagccagatccaggagacagctcaaaagcctgaccttgactttctccag

SEQ ID NO: 25914 - DNA, 137 bp, Homo sapiens
  MAP TO AC008775.5; EXPRESSED IN LUNG, SIGNAL = 0.45; SWISSPROT HIT: Q9U0S4, EVALUE 4.00e-01; EST_HUMAN HIT: BF849084.1, EVALUE 1.70e-01
ctgactcctgctgtgtatgggattcagctacacccaggggccagtcagcagcttccctagtcacctgtcccacgagggttttgttgttaatggccttttgaagaagcacttcatagcgaacatctttctctagcacc

SEQ ID NO: 25915 - DNA, 226 bp, Homo sapiens
  MAP TO AL121928.13; EXPRESSED IN LUNG, SIGNAL = 2.1; EXPRESSED IN PLACENTA, SIGNAL = 1.4; SWISSPROT HIT: Q92538, EVALUE 4.00e-37; NT HIT: gi14746257, EVALUE 1.00e-124; EST_HUMAN HIT: BG386075.1, EVALUE 1.00e-124
gtgctgctctccctgcgcattttgctactgatgaagcccagtgtgctatcccgagtcagccaccaggttgcgtatgggctccatgaactcctgaagaccaatgcagccaacatccactcaggtgatgactgggccacactcttcacactgctggagtgcatcggctcaggtgtgaagcctccagctgctctgcaggccacagccagggcagatgcacctgatgccg

SEQ ID NO: 25916 - DNA, 278 bp, Homo sapiens
  MAP TO AL109802.6; EXPRESSED IN PLACENTA, SIGNAL = 0.98; EXPRESSED IN HEART, SIGNAL = 0.97; EXPRESSED IN LUNG, SIGNAL = 1.7; EST_HUMAN HIT: BE828632.1, EVALUE 3.00e-66; SWISSPROT HIT: Q00552, EVALUE 1.00e+00; NT HIT: gi14778388, EVALUE 2.00e-66
ctacaggccagagcggatggtcatttccagcagagagccctgcctgctgccttccacacatggaacagactctggcgatggcgccaccaggaaaatgtcctcagtgcaagagcaacacgtttccacaggtatgttgcgcagctcctgtctgcactggggcaggtgtttcaaatctaactctgacaaccacacagcccatttgctgtgcttttcagcttcccagaccccaggccctagtacttcctggattttcagtaatgtgggctcattgatttcat

SEQ ID NO: 25917 - DNA, 180 bp, Homo sapiens
  MAP TO AC016594.5; EXPRESSED IN LUNG, SIGNAL = 0.73; SWISSPROT HIT: Q06455, EVALUE 2.50e+00; NT HIT: gi14781351, EVALUE 5.00e-97; EST_HUMAN HIT: BI518969.1, EVALUE 8.00e-97
ctgtatacatgagagaagacagtggataccgcaagccaagcgcatcttctgtaaaggaatcaacaaagtcctccagcatgtgaagcccaaaatctttacctctgtatttctttcttagaaacattgtatcaagaactggcaattggtaactttgggtaagaaaagaggcacatatgcttc

SEQ ID NO: 25918 - DNA, 153 bp, Homo sapiens
  MAP TO AC002380.1; EXPRESSED IN LUNG, SIGNAL = 0.42; SWISSPROT HIT: P34433, EVALUE 8.80e-01; NT HIT: AF295068.2, EVALUE 2.00e-06; EST_HUMAN HIT: BI045243.1, EVALUE 2.00e-04
atgaccggcatcctgataagaagaggagatgaggacagagacatgcacagaaagaagccacatgaagacagagagaagacggtcatctacaggccaaggagagagtccacagagaaaactgatcctgctgacaccttgatcttgggtttctag

SEQ ID NO: 25919 - DNA, 192 bp, Homo sapiens
  MAP TO AL031660.16; EXPRESSED IN LUNG, SIGNAL = 0.65; SWISSPROT HIT: O05069, EVALUE 7.40e-02; NT HIT: U66061.1, EVALUE 1.70e-01
ggaggcttccttggtttagattctggcccttggtgccccatccagcagccaacagagggaaacaaggagccctctgatggacttaagaacaggagaatcccaaaagagccagcaggtattcacgaggaagcaaggagggacaactggagacagcagcagaagctgggagggtctcgcccagtccgggagcag

SEQ ID NO: 25920 - DNA, 176 bp, Homo sapiens
  MAP TO AC026733.3; EXPRESSED IN LUNG, SIGNAL = 0.62; NT HIT: AF224669.1, EVALUE 2.00e-28; EST_HUMAN HIT: BE350127.1, EVALUE 8.00e-26; SWISSPROT HIT: P31521, EVALUE 3.30e+00
agtgtacttctattgtaaggcagcctcaggcagggccttcagtaggtattccagaagaaggcattgttatcataggagataacggctccatgtgtgctattgcacctgaagaccttccaatgggaaaagatggggaggtggtggaagacagcgacattgataaccctggccctgtg

SEQ ID NO: 25921 - DNA, 164 bp, Homo sapiens
  MAP TO AC040171.3; EXPRESSED IN HEART, SIGNAL = 3.2; EXPRESSED IN LUNG, SIGNAL = 1.4; NT HIT: gi16191829, EVALUE 1.00e-29; EST_HUMAN HIT: AA725707.1, EVALUE 8.00e-38; SWISSPROT HIT: P23389, EVALUE 1.50e+00
tgtgccagaccagtcaaagaatcctgcatcaaaatcgagagaacgaacaaaccttcatcgccatggcacatttatataaaaaaaaagggagagatgttttgggaagtgaggaaccccaaacagagggaccggctgaagccatggcagaagaacataaattgtga

SEQ ID NO: 25922 - DNA, 237 bp, Homo sapiens
  MAP TO AC013559.2; EXPRESSED IN LUNG, SIGNAL = 0.74; SWISSPROT HIT: P52374, EVALUE 3.70e+00; NT HIT: gi15304430, EVALUE 0.00e+00; EST_HUMAN HIT: AI285767.1, EVALUE 1.00e-130
tctatattcaagagctcaccactgatgggctgctttctctttggcctgccactgggtgtcatcagtatcatgtgctatggaatctacacagccgacacagatggaggttatatagaagaacgatatgaagtgtctaaaagtgaaaatgaaaaccaagaacagatagaagagagcaaagaacagcaggagcccagcagtggaggatctgtagtgcctacagtgcaggagcccaaggat

SEQ ID NO: 25923 - DNA, 150 bp, Homo sapiens
  MAP TO AC010596.5; EXPRESSED IN LUNG, SIGNAL = 0.98; EST_HUMAN HIT: BI820429.1, EVALUE 1.20e-02
agggaaaaagaagagctgaaaagctgtcaactgtctaagggccaagactgtgcgttggccactacttagtatagcactgtccacaataagtttatttgaagcaaatttatggctttttatatcttcatcataaaagcacttgttcttcat

SEQ ID NO: 25924 - DNA, 246 bp, Homo sapiens
  MAP TO AC016831.1; EXPRESSED IN LUNG, SIGNAL = 1.2; EXPRESSED IN PLACENTA, SIGNAL = 2.9; SWISSPROT HIT: P52739, EVALUE 3.00e-15; EST_HUMAN HIT: BG531197.1, EVALUE 4.00e-62; NT HIT: U09410.1, EVALUE 3.00e-62
cttcagaatgtgctgtcagcacggtctctaatcctcagcatcttcgtgatcttccctggcagcctcagcatctgcttggctaggctctgtcttctcttgggtcatgatttctggggtcatgtggacgaagcctgcttctggaagttcactttgtacttccactggcatctgattttcccgttccacatgcggctcctctccgtgtacttcagtaccttcttcaggctgaattcagcccactgctag

SEQ ID NO: 25925 - DNA, 140 bp, Homo sapiens
  MAP TO AC005081.2; EXPRESSED IN LUNG, SIGNAL = 4.1; EXPRESSED IN PLACENTA, SIGNAL =   5; NT HIT: AF045555.1, EVALUE 3.00e-73; SWISSPROT HIT: Q9WUK2, EVALUE 9.00e-20; EST_HUMAN HIT: BE732742.1, EVALUE 4.00e-73
tcattcttgctccttttgaacgacttcctctctaggcctggcacccccgaagatagcagagttgggattggctacttgattgaggggcgtcgcgactgttcgaggtttaagctggagtcgtggtctctgtgctctttcct

SEQ ID NO: 25926 - DNA, 80 bp, Homo sapiens
  MAP TO AC010629.5; EXPRESSED IN LUNG, SIGNAL = 0.67; EST_HUMAN HIT: BF133426.1, EVALUE 1.40e+00; NT HIT: gi14779389, EVALUE 3.80e+00
tgatagaacaggcactcttggtggaacagtgtaatctgcacgactgtcgcccagaagagaaggtgatgcccgaaggagag

SEQ ID NO: 25927 - DNA, 138 bp, Homo sapiens
  MAP TO AC026730.3; EXPRESSED IN LUNG, SIGNAL = 0.5; EST_HUMAN HIT: BG107680.1, EVALUE 1.10e-02; NT HIT: M57687.1, EVALUE 4.60e-01
gtttatcgatactggttcatggcagggaaggacagctacataagaggacagagtaagcgatttattgatcttgaagaagtacaacacttggatactttggcttttcatgatggtggacaagcaggcaaagaaaagaaa

SEQ ID NO: 25928 - DNA, 109 bp, Homo sapiens
  MAP TO AL021306.1; EXPRESSED IN LUNG, SIGNAL = 0.86; EXPRESSED IN PLACENTA, SIGNAL = 1.1; EST_HUMAN HIT: AI247751.1, EVALUE 1.30e-01; NT HIT: gi11225259, EVALUE 1.40e+00; SWISSPROT HIT: P48937, EVALUE 1.60e+00
atgcgaggtcactcaccaaaggtcacacagtctcaagaggcagagctgtcatttgaccctgggtctttccacctccagatgcacctgagcatggagtgtgcagggggag

SEQ ID NO: 25929 - DNA, 100 bp, Homo sapiens
  MAP TO AC017036.4; EXPRESSED IN LUNG, SIGNAL =   1; EXPRESSED IN PLACENTA, SIGNAL = 0.64; EST_HUMAN HIT: AA604289.1, EVALUE 8.00e-03; NT HIT: U66061.1, EVALUE 2.00e-08
tttcagtttgaagcatttctgttgctacatctgcaagttcagtaatctgttcttcttcaatatctaatgtatcattaatctcattcagtgtatttttcat

SEQ ID NO: 25930 - DNA, 147 bp, Homo sapiens
  MAP TO AC008600.4; EXPRESSED IN LUNG, SIGNAL = 0.64; NT HIT: AL115512.1, EVALUE 2.00e+00; SWISSPROT HIT: P35210, EVALUE 5.90e+00
tgtcgcttgggaatctccaccaaaccacccttgatcccgagaactccctcctgagcaataattctcataagtcagcgtgctgcttacataattataatagtacacttcacttcgacaaacctttatggagaaccaacaccagaccaa

SEQ ID NO: 25931 - DNA, 148 bp, Homo sapiens
  MAP TO AC009567.8; EXPRESSED IN LUNG, SIGNAL = 0.71; NT HIT: AF288742.1, EVALUE 1.00e-29; EST_HUMAN HIT: BG191802.1, EVALUE 4.00e-33; SWISSPROT HIT: Q15306, EVALUE 3.40e+00
cttgggcacatgttctcaggatcttctgagggctgtgtcctgggccatggtcactcatatttggctcagaataaatctcttcaaatactttacagaatttgactttttctgttgacataagtattagagctatgctttcttttcccat

SEQ ID NO: 25932 - DNA, 274 bp, Homo sapiens
  MAP TO AC006118.1; EXPRESSED IN LUNG, SIGNAL = 0.67; NT HIT: gi16191829, EVALUE 2.00e-88; EST_HUMAN HIT: AU140604.1, EVALUE 3.00e-88; SWISSPROT HIT: P10267, EVALUE 6.00e-15
atctttccggaagataagcagcctagacttgagtttccagatggatgcaaccaggtgcatgtctgaggcacagagacgggtatttacaacccatggtaacattaaatgcagtgccttcttctcctggttgagcagggcaacggtcatctgtggctccaggcagtcacacactatcgttagtgtagatttgtgcaggagcatctaccctggtgagaggtcgaataagtggaggaagaggcacataagcccaataagaataattatgtgtagcagg

SEQ ID NO: 25933 - DNA, 198 bp, Homo sapiens
  MAP TO AC011248.8; EXPRESSED IN LUNG, SIGNAL = 1.2; EST_HUMAN HIT: AL603576.1, EVALUE 1.00e-107; SWISSPROT HIT: O14727, EVALUE 2.00e-32; NT HIT: gi7108332, EVALUE 1.00e-107
cttctaaaagggaatgatctctaacagcttctgcagctaatacagacttcccacagcctgccattccatgtatggtgacccatcctggttcacctttcaatttggagagcttctgctgaattgcattcaccagcttcttccttgtgacaaaaacaactggcctctgtggtactccaccttcacacaggactgtcctta

SEQ ID NO: 25934 - DNA, 306 bp, Homo sapiens
  MAP TO AC005199.1; EXPRESSED IN LUNG, SIGNAL = 1.5; EST_HUMAN HIT: BF934921.1, EVALUE 1.60e+00
ttcaaaagttgttttgttattgttgttggtgttggtaatggtggtggtggtggtagtggtgacggtgttaaatgcggttttggtggatgtggtggtagtggtggtggaggtggtggtggtgaagatggtgttgaaggtcatggtggtggaggtggtgttggtggtagtggtgatggtgttgaaggtggcagtgttggagatggcgctgaaggtggcagtggtggagatggtgctgaatgctgtggtagcggaggtggcggtggtactggtactgacaatggagatggagtgataatgaggtggtga

SEQ ID NO: 25935 - DNA, 132 bp, Homo sapiens
  MAP TO AL138499.1; EXPRESSED IN LUNG, SIGNAL = 0.46; NT HIT: AB035288.1, EVALUE 1.10e-01; EST_HUMAN HIT: AI817198.1, EVALUE 2.00e-68
cctttgtattaagggactaacggcttcgcttttcaacaaagctggatcttctggcacacgctcagaagatagccagtacttcagagacagattgctttgagggcactggaaccgctgaggggcagagtaatc

SEQ ID NO: 25936 - DNA, 159 bp, Homo sapiens
  MAP TO CHR22_184_2.0; EXPRESSED IN LUNG, SIGNAL = 0.51; EXPRESSED IN PLACENTA, SIGNAL = 0.51; NT HIT: U82695.2, EVALUE 1.00e-07; EST_HUMAN HIT: BI028582.1, EVALUE 3.00e-06; SWISSPROT HIT: Q14641, EVALUE 2.00e+00
ctccagatgtgaaaactggggcacaaaaaggaaagtaacttgctcaaggtcacacagccagtaggtggcaaaatgggtacttgtgcctggaaaatctaggtccacagcccctgctcttaaacaccgtgatgtgctgcattcgggtgtggccagggccat

SEQ ID NO: 25937 - DNA, 323 bp, Homo sapiens
  MAP TO AL031283.26; EXPRESSED IN PLACENTA, SIGNAL = 0.45; EXPRESSED IN LUNG, SIGNAL = 0.51; NT HIT: AB067524.1, EVALUE 4.00e-22; EST_HUMAN HIT: BG332108.1, EVALUE 5.00e-81; SWISSPROT HIT: Q9UMN6, EVALUE 1.80e+00
ttaatagagaaaattacccaggtcactgaggacaacatcaattttcagcagaaaaagtggaccctccagaaagagacccagctgagcaactccaagcaggaggagaccaccgagaacatcgagaagctgaggacgtcgctggacagctgccaggtggcccctccttacgctttccacaaatggtctctttgtctaatttttgtgcggcttatttgggaaattgcccagcttttttggagcaagttgggcagaaatgcttggcttttctatccactttttcctcttgttggagaaacttgttggagaagaaaaaacaaagggcc

SEQ ID NO: 25938 - DNA, 135 bp, Homo sapiens
  MAP TO AC011977.3; EXPRESSED IN LUNG, SIGNAL = 0.46; EST_HUMAN HIT: BE067351.1, EVALUE 4.00e-05; NT HIT: gi9626821, EVALUE 3.00e-05
atgaaaagtgattctgatactgaagaccaggatagaatcttcacttctgaaactaccaatagtaattcacgtgttaaaatcatcaccatcatcatcactatcaccatcctcattgctgccatttattctgtctac

SEQ ID NO: 25939 - DNA, 408 bp, Homo sapiens
  MAP TO AL137800.2; EXPRESSED IN PLACENTA, SIGNAL = 0.84; EXPRESSED IN LUNG, SIGNAL = 0.82; NT HIT: AB002363.1, EVALUE 9.70e-02; EST_HUMAN HIT: BI828948.1, EVALUE 0.00e+00; SWISSPROT HIT: Q9T467, EVALUE 1.50e+00
atggagcccatatatgaggagtacctagcaaatcatggaacaatagtaaaaccatattactggctaagcttctctctcgattgctctaattgtccttaccatattcgaacaggtgaagaagcaagagtttccctcacagaattttgtcagatttttggattcccttatgggacaacatttcctcaaacaaaacacctcacattttatgaactaaaaacttcttctggtagcctggtgcaaaagggccatgctagcagttgcactgggaattatatccatccagaatcaatgctctttgaaatgaatggttatcttgactcagccatatacaataatgacagcatcaggcatatcattctgtattccaacaactccccttgtaatgaagctaaccactgctgcatcagc

SEQ ID NO: 25940 - DNA, 94 bp, Homo sapiens
  MAP TO AC020588.4; EXPRESSED IN LUNG, SIGNAL = 0.47; EST_HUMAN HIT: BF217856.1, EVALUE 8.00e-46; NT HIT: gi13194196, EVALUE 5.00e-46
agactgacttgcataccaaatgtgtggtggatgtggatgcaaacaaggttattcttaatcctgtaaatacgaatctttccaaaggagatgcccg

SEQ ID NO: 25941 - DNA, 81 bp, Homo sapiens
  MAP TO AC011802.4; EXPRESSED IN PLACENTA, SIGNAL = 0.62; EXPRESSED IN LUNG, SIGNAL = 0.66; SWISSPROT HIT: P17408, EVALUE 1.20e+00; NT HIT: gi9633809, EVALUE 9.70e-01; EST_HUMAN HIT: T39722.1, EVALUE 9.00e-02
attcccatcggcaatggatgaaggttctgatttctccatgacctgctcaacactgttgttactgttattgttattgtcatc

SEQ ID NO: 25942 - DNA, 595 bp, Homo sapiens
  MAP TO AC004493.1; EXPRESSED IN LUNG, SIGNAL =  14; NT HIT: gi16165307, EVALUE 0.00e+00; SWISSPROT HIT: Q12967, EVALUE 2.00e+00; EST_HUMAN HIT: BG471675.1, EVALUE 0.00e+00
tccacgaggctttggcgaaggagagcggcctctccttgaggttgtcttagtgcgtggagatgaagctgagcgccgtcggcgtgaagacctcgatttttcggctggctccggggaagacactgagggacttctccggtgccttgggggagttctagagcgagtttctggtgaggatgaggcagagcggcttctacgggacagtctggccttccttgttagctccggagatgatcgagagctgcgacgtcgaggtggtgtacgagacttggtcttgggctctggtgatgacctggaacctctgcgagcagttctggatttgggcggatgttcaggagaggactcggtactgctgcttccttcaggagaagggcctctgcctttgcttgatgaacctgatctgcttcgtctgggaagggcccgaggggctggagctttaggttcaggagaggaatcagaaccactctgtgccctgggtgctgctcttggcttatctttcacttcaggggaggaaccagacctactgcgccgaggggatagtcgagatttgctgtcaacctctggagatgatccagaccgactcctctgccgaagtggg

SEQ ID NO: 25943 - DNA, 833 bp, Homo sapiens
  MAP TO AF025422.1; EXPRESSED IN LUNG, SIGNAL = 0.98; SWISSPROT HIT: P04052, EVALUE 3.00e-06; EST_HUMAN HIT: N43182.1, EVALUE 0.00e+00
atgtctgcacctaagaacagtagggtcttgtctggctcttcttatgaaccgtcccccagcccggactccccaagatccatgctagcctcacccagcttctccctctctcctctcagaaactcagacttaagaggaagctcctcaccagggatccggagctacaattcaccaccctccagggcttcaccacactcacctctgtcatcaccagaatcccacaagctcccatttccctttcctcaccgtgatgggcaatcaatgaagccattgggttctcccgcgtcctcctctggggattctttagaatcaccacgttcatcaataatataccacatgttcttactgccatcacccagcagctcacccgcagctctcggggagtctcccgtgtctcccagctactccccaaacaaccccagatttcagctggagtcagccccccacacccaggaatcacctacaaactcacgagcctcacggtgctcctcccctgtgtctttcatctcttcacccccaggcctcagggactctcctgtgtctcccagttactctccaaccatccccaggtttctgcgagagtccgccccatgcacccaggagtcccccagaaactcacaggtctcgggagattatgagcggtcccccagccctgactcctcaagattcatgcctgcctcacccagcttcttctccctctcccctcccagaaactcagacccaaggggcagctcctcaccagggatgtggaagtactctacatcatgccgcagggcttcaccactctcacatccaccatcaacagaatttcacaactttacatttccctttcctga

SEQ ID NO: 25944 - DNA, 576 bp, Homo sapiens
  MAP TO AC007227.3; EXPRESSED IN LUNG, SIGNAL = 1.3; EST_HUMAN HIT: AW298440.1, EVALUE 0.00e+00; SWISSPROT HIT: Q62178, EVALUE 3.00e-78; NT HIT: gi14750170, EVALUE 0.00e+00
ctaggcagttgttgtcagcgtccacatcactggcagaggtcctgcattccttgggagactggaggtgttgctctctgcttaacggggccttctccccagggcgcagggtctcacagccctgaaccttgccccgagcccggagtgctctcaatggggaggccacgaggatgatgagggctcctgaaagcactaaggcaaagaggacagtgacagtgacaaagtggggccagtaggactgctgggcagccagggcggccccaccactgaccctggtcaacgggaccttcacatgctcccgggggatgcctgccagttcaggatccagggccagggtctggtcctggctgtccacccagtaggagatcacagggtatgaaaagccattctcagttgcccagcactggtagagacccccaactccatcctgcactatcagcaagagggagccattgtagacagtggaagaggcttctgggactgctgctgggccatgactccaataataagaggccaaggctgacaggtgggggcaggggagctccaggatggagttggggacagccaggacttctttaa

SEQ ID NO: 25945 - DNA, 1483 bp, Homo sapiens
  MAP TO AJ239328.2; EXPRESSED IN LUNG, SIGNAL = 0.94; NT HIT: AL163303.2, EVALUE 0.00e+00; EST_HUMAN HIT: BI021909.1, EVALUE 2.00e-03; SWISSPROT HIT: P51523, EVALUE 5.00e-21
aactcgacctggaacagttgagtggatagaaacagcacacgtaagatcgggtgtgcacgaggagatgcgaacaccgggaacagtcgagtgggtagaaacagcacacgtaagatcgggtgtgcacgaggagatgcgaacaccgggaacagtcgagtgggtagaaacagcacacgtaagatcaggtgtgcacgaggagatgcgaacaccgggaacagtcgagtggatagaaacagcacacgtaagatcgggtgtgcacgaggagatgcgaacaccgggaacagtcgagtgggtagaaacagcacacgtaagatcgggtgtgcacgaggagatgtgaacaccgggaacagtcgagtgggtagaaacagcacacgtaaggtcgggtgtgcacgaggagatgtgaacactgggaacagtcgcgtgggtagaaacagcacacgtaaggtcgggtgtgcacgaggagatgtgaacactgggaacagtcgcgtggatagaaacagcacacgtaagatcgggtgtgcgtgaggagatgcgaacaccgggaacagtcgcgtgggtagaaacagcacacgtaagatcgggtgtgcgtgaggagatgcgaacaccgggaacagtcgagtggatagaaacagcacacgtaagatcgggtgtgcacgaggagatgcgaacaccgggaacagtcgcgtgggtagaaacagcacacgtaagatcgggtgtgcgtgaggagatgcgaacaccgggaacagtcgagtggatagaaacagcacacgtaagatcgggtgtgcgtgaggagatgcgaacaccgggaacagtcgagtggatagaaacagcacacgtaagatcgggtgtgcgtgaggagatgcgaacaccgggaacagtcgagtgggtagaaacagcacacgtaagatcgggtgtgcgtgaggagatgcgaacaccgggaacagtcgagtggatagaaacagcacacgtaagatcgggtgtgcacgaggagatgtgaacaccgggaacggtcgagtgggtagaaacagcacacgtaagatcgggtgtgcgtgaggagatgcgaacaccgggaacagtcgtgtgggtagaaacagcacacgtaagatcgggtgtgcacgaggagatgtgaacaccgggaacagtcgagtgggtagaaacagcacacgtaaggtcgggtgtgcgtgaggagatgcgaacaccgggaacagtcgtgtgggtagaaacagcacacgtaagatcgggtgtgcacgaggagatgcgaacaccgggaacagtcgagtgggtagaaacagcacacgtaagatcgggtgtgcgtgaggagatgcgaacaccgggaacagtcgcgtgggtagaaacagcacacgtaagatcgggtgtgcgtgaggagatgcgaacaccaggaacagtcgagtgggtagaaacagcacacgtaaggtcgggtgtgcgtgaggagatgcgaacacccgcaggtctctgtctcattcca

SEQ ID NO: 25946 - DNA, 559 bp, Homo sapiens
  MAP TO AL080317.11; EXPRESSED IN LUNG, SIGNAL = 0.95; EST_HUMAN HIT: BE251956.1, EVALUE 0.00e+00; NT HIT: gi16173087, EVALUE 0.00e+00; SWISSPROT HIT: P29387, EVALUE 6.10e-01
aatggcaaccacatttccgagtggtgtttcttggattgagcagtacacgaccatccatgggaaatctgcagcattttttgtaattggtgcttccctgggagaaatggctattcctgcagtcattggaattcttcaaggaaaataccctgatttgcctgtagttctgtatacctctttgggagcatcaatagctactggtattttatttcctgtgctatataaattagccacttcacctcttgatcgccagcgaaaagaagacagaaagagtgaggaccagaaagctctgctctctagctccgggctaaatgaatatgaggaagagaatgaagaggaggatgcagaaaaatggaatgaaatggattttgaaatgattgaaacgaatgatacaatgaggcattctataatagagacatctagaagtagtctgacggagcccacagctgaagtctataatcaatacccatcaaatgcactggtgtttgagtcttctccttttaatactggcagtgcccatgtgaagcacttgccagaaaccaggacaaaagggactaacgtt

SEQ ID NO: 25947 - DNA, 492 bp, Homo sapiens
  MAP TO AC008616.2; EXPRESSED IN LUNG, SIGNAL =   1; EXPRESSED IN PLACENTA, SIGNAL = 2.2; NT HIT: gi14763316, EVALUE 6.00e-99; EST_HUMAN HIT: AL550508.1, EVALUE 9.00e-99; SWISSPROT HIT: Q9QZL6, EVALUE 6.00e-02
atggcaccaggccagaaatccaggccacctgggtccagagccagcctctttccaccccaccctgccccagggctcagatcccggctccaccactgctcagccccatgtggtcactttccctccccagacctgagtgttctcacctgtgaaatggacacagcgctgggcatgggcagggggttccctgagcaggatggaaacgtgggggtaggggttcctcccgtggcccgcagtggcccccgaggccagacagggtttgccccgtggtgcgatccccatgcactcagccccgccgccccgcgcccgccaggtgctggagaaccggaccaaggactccaagctggagatggaggtgctggagaacctccaggagctgaaagacctgaaccagcggcaggcgcacgtggacttcgaggctatgctgaggcagcaccgcctgtcggaggaggagcggcggaggcagcagcaggaggaggacgagcaggagaccgc

SEQ ID NO: 25948 - DNA, 666 bp, Homo sapiens
  MAP TO AL034417.14; EXPRESSED IN LUNG, SIGNAL = 2.8; NT HIT: Z93777.1, EVALUE 1.00e+01; EST_HUMAN HIT: BF744665.1, EVALUE 3.00e-22
atcaccatcaccaccaccacaatcactatcaccatctccatcatcatcaacatccccactgttgtcaccaccaccaccatcactatcaccatcattaccatcaccatcaccatcatcaccatcactaccaccgtcatcaccatcaccctcaccaccctcaccatcaccctcaccactatcaccacactcaccaccaccaccatcaccaccatcattaccaccagcatcaccctcaccaccatcaccatcaccaccaccatcaccttcaccaccaccaccaccatcaccaccagcatcaccctcaccatcaccctcaccaccaccatcaccacactcaccaccaccatcaccatcaccaccagcatcaccctcaccaccaccatcaccatcaccaccaccatcaccttcaccaccaccaccatcaccaccagcatcaccttcaccatcaccctcaccaccaccatcaccactaccaacaccatcaccctcaccactaccatcatcaccatcaccaccaccatcaccatcaccctcaccaccaccatcaccatcagcatcaccaccaccaccaccaccgtcaccatcattatcaccaccatcatcatctttttcacttcttgcagcttgcaggttcccaaacaagtcccggaccagctgatcagatgg

SEQ ID NO: 25949 - DNA, 1654 bp, Homo sapiens
  MAP TO AC005530.1; EXPRESSED IN LUNG, SIGNAL = 1.8; SWISSPROT HIT: P36417, EVALUE 3.00e-03; EST_HUMAN HIT: BF353364.1, EVALUE 1.00e-114
ttaggcactcaccacacagaagaagagcccagcaaagagccccacggccgccacaaccgagaccagggtgatgaggaagatttcccacggcaccagggacccaccaggctttgcctcactcactgcagtagatgcactatgggaagttgtgtgcattccagtcagagctgctgttccagagcctgcagaggtcacactggacccagagttggtggctgtgttggccccactggaggttgtgctggactcagaattggtgactgtgctgatcccactggacactgtgctagactcagagttggtggctgtgctggcctcactggaggttgtgctggagtcagagttggtggctgtgctagccccactggaggttgtgctggactcagagttggtggctgtgctgaccccactggaggttgtgctggactcagagttggtggcagtgctggccccactggacactgtgctggactcagagttggtggctgtgttggccccactggaggtcgtactggactcagagttggtggctgtgttggccccactggagggtgtgctggactcagaattggtgactgtgctgatcccactggacactgtgctggactcagagttggtggctgtgccggccccactggaggttgtgctggagtcagagttggtggctgtgctagccccactggaggtcgtgctggactcagagttggtggctgtgctggccccactggaggtcgtgctggactcagagttggtggctgtgccggccccactggaggttgtgctggagtcagagttggtggctgtgctagccccactggaggtcgtgctggactcagagttggtggcagtgctggccccactggacactgtgctggagtcagagttggtggctgtgctggccccactggaggtcgtgctggactcagagttggtggctgtgccagccccattggaggtcgttctggactcagagttggtggctgtgctggccccactggaggttgtgctggactcagagttggtggcagtgctggccctactggacactgtgctggactcagagttggtggctgtgctggccccactggaggttgtgctggactcagagttggtggctgtgctagccccactggaggttgtgctggagtcagagttggtggctgtgctggccccactggagagtgtgctagactcagagttggtggcagtgctggccctactggacactgtgctggactcagagttggtggcagtgctggctccactggaggtcacactggacccagagttggtgactgtgctggccccactggagggtgtgctggactcagagttggtggctgtgctggccccactggaggttgtgctggactcagagttggtggctatgctgatcccactggacgctgtgctgaactcagagttggtggctgtgctgatcccactggaggttgtatggaactcagagttggtgactatgctgaccccattggaggtcacgctggaccctgagatggtggctgtgctgaccccactggaggtcacactggacccagagttggtggctgtgctggctccactggagatcacactggatccagtgttggcagaggtgctagtctcattggaatttgttgctgaagaaatcatataa

SEQ ID NO: 25950 - DNA, 1834 bp, Homo sapiens
  MAP TO AC008688.4; EXPRESSED IN LUNG, SIGNAL = 2.3; EST_HUMAN HIT: BG722685.1, EVALUE 0.00e+00; SWISSPROT HIT: Q9Y5E5, EVALUE 0.00e+00; NT HIT: gi15295801, EVALUE 0.00e+00
ttaactgaataccaagctatttctgaacttggggttttccttaacttccctcccggtgtcctgaaccaagagattaggaaatattggcttcaggaacttgaactcaccagtcccagagtctcctgtcagacacacctcgtactggtagctctgggacagggtcccggtgccgcttacgtccaccagatgccctggaaaggggccctcgggcaccgagcagcgacccaccgaggccgccctgctcctcctgcacagccgcaccgccacgaacaggagcaccgagaagaggaagagcgacgacaccgaggccaacgccaccaccaggtagacggtgagagagtcggcctgggcctgggccggggccgcctcagggagaggcaggtagggctgggagaagccatccaccaggagcacgtgcagcgtggcggtggccgagcgcggaggctcgccattgtccttgacaagcaccacgagcctgtgcttggctgcgtcgcgctcgctcagcagcctggcggtgcgcacctcgccattgtgcgcccacacgccgaacagcccaggctccgtggccttgagcagctggtacgacagccaggcgttctggcccgagtcgccgtccaccgccaccaccttggtcaccaggtagcccggctcggccgcccggggcaccagctcggtgcagggcgcggagccattctgcagcgggtacagcacgaagggcgagttgtcgttggtgtccagcaccagcacgcgcaccagcgcctcgctgctcaaagccggagaaccgcggtctgaggcgcccacgcggaactcgaacgcctgcagggcctcgtagtccagcgacctgagggcgaacaggtggccgttgtctgcgttgatggagaccagggaggcgaggggcaggtgcgggtcctggggcggcagcagcgagtaggtgacctgggcgttggtgcccgagtctctgtctgtggcgctgacactgccgatgtgcagggcggggctgttgttctcgcggacgaacagggtgtaggaggtttgggtgaaggcgggggcgttgtcattgacgtcggagacctgcacggttatgttctgctgggttttcagcctgggtgtccccaagtcagtgacggcgatggtgatgttgtactcagcgctggtctctcggtccagtggtctctctgttaccagggtgtaaaaattcttcaaagttggttttagaataaacggtagattatctggaatagagcaaatcatctttccattttctccggaatctctatctcgaattcggaagatagagactaccgtctcaggagcattttctgggatggagctggtgagtgaagatatgataagttctgggggattgtcattcacatccaccacctctatgactacagtgccttttccagaaaggcctcctccatctgtggcctcaatttctacatggtaagatttaattttttcgaaatccaatttttttttcaacagtatttctcccgtgacttcatttattgagaaagtttgtttaatttcatctgatgcttggaataagccataagaaacactcccgaagtttccagcatctatatctctagctaagaccctaacaattggagagtctagggggctgttttccaggacctgcaccccatatggagtgtgcacaaactcaggagcattgtcattgatgtccatgatcaggattcgaaccatgaccgtgccagacctaggtggtgacccaccatccagcgccacgagggttaagctgaactcaggctgctcctctcgatccagtggtttgtcctgcaccaaatctgggtatttcttgccctca

SEQ ID NO: 25951 - DNA, 87 bp, Homo sapiens
  MAP TO AC016606.6; EXPRESSED IN PLACENTA, SIGNAL = 0.75; EXPRESSED IN HEART, SIGNAL = 0.99; EST_HUMAN HIT: AW504809.1, EVALUE 1.00e-41; NT HIT: gi13643006, EVALUE 7.00e-42
gaaggccctaacagtctgattaatgaagaagagttctttgatgctgttgaagctgctcttgacagacaagataaaatagaagaacag

SEQ ID NO: 25952 - DNA, 326 bp, Homo sapiens
  MAP TO AL049750.1; EXPRESSED IN PLACENTA, SIGNAL = 0.87; SWISSPROT HIT: P03222, EVALUE 8.10e-01
gatctgggaagacttacagcgtggggtgacaggtaaggtggacctgggagaggaagtagatgagaatataccagaggaggtggcactgggcatctcaggctttgagacaaaagacgaagggtcatacaagcaagaatgcaacatgcatgataaagagtggccaagccagttgcagctggaggtaggcattcaggatgcaagagcccaggaaggcagtggtggcactattggggccttaagtgcctctctctttctggagcctgttgccttcaggactgcccttagactgctgaagttgctgggcacaatagacaaaatcctaaata

SEQ ID NO: 25953 - DNA, 177 bp, Homo sapiens
  MAP TO AC020728.4; EXPRESSED IN PLACENTA, SIGNAL = 0.68; NT HIT: gi14721272, EVALUE 3.00e-95; EST_HUMAN HIT: BG741326.1, EVALUE 1.00e-86; SWISSPROT HIT: P24785, EVALUE 1.00e-15
ctcaacaggataacttcttcctgaaattctgagaatggggcagtgtgtgaaatatgtagaaaatttttcgctgtccacagtggcactcattagaatcaagtgtagatcagaacgtttctgtaaaatttccttcaagataattagtaggaagtctgactggacacttctttcatgaac

SEQ ID NO: 25954 - DNA, 198 bp, Homo sapiens
  MAP TO AC008639.6; EXPRESSED IN PLACENTA, SIGNAL = 0.52; SWISSPROT HIT: P22596, EVALUE 2.50e+00; NT HIT: gi13899234, EVALUE 3.00e-12; EST_HUMAN HIT: BF205671.1, EVALUE 5.00e-12
ctggttggtgatatgttcctggattttttctgtactcactgaaagagaaagcaaaaagaatttttacattaaagcatgaaaatgaataaaatgcggtactgatgctgctctgtttacagtaaacacttccaaagtggtcatggactctctgagcaaggatttctatcacaatgtggatgtttacaaccacttcaataa

SEQ ID NO: 25955 - DNA, 118 bp, Homo sapiens
  MAP TO AC004091.1; EXPRESSED IN PLACENTA, SIGNAL = 0.75; SWISSPROT HIT: P30620, EVALUE 7.90e+00; EST_HUMAN HIT: R48996.1, EVALUE 1.40e-01
gattacactccttccgccgaaagaaaaaattgacagaacaaaaagtaaaagtggtcatcatggtgggctttaacacctactgtctatcacaagacatgttgaaaaatgagaaaaaatt

SEQ ID NO: 25956 - DNA, 190 bp, Homo sapiens
  MAP TO AC002471.5; EXPRESSED IN PLACENTA, SIGNAL =   1; EST_HUMAN HIT: BF983466.1, EVALUE 1.00e-55; SWISSPROT HIT: Q01643, EVALUE 1.50e-02; NT HIT: gi14777514, EVALUE 3.00e-58
tggtgtgcacccggaagcacaggcttgaggacgatgagcggcagagcatccccagcatgctccagggcgaggtggccaggctggaccccaagtgcatgataaacctggactcttctcgctgcagcaacaatggcaccgtccacctggtctgcaagctgggcgagcgtccaggagggccaggccggcacaa

SEQ ID NO: 25957 - DNA, 141 bp, Homo sapiens
  MAP TO AC005173.1; EXPRESSED IN PLACENTA, SIGNAL = 0.58; EST_HUMAN HIT: BF572334.1, EVALUE 3.00e-03; SWISSPROT HIT: P45380, EVALUE 5.90e+00
acactggtgacacaacagagagcaaaaccagtctctgctgtgatggagcccacattctagtgggaggagaaggggagaggcaagagagaggcagacaatacacgaataaatacaccataggaggtcatggaataaagggcc

SEQ ID NO: 25958 - DNA, 276 bp, Homo sapiens
  MAP TO AC004182.1; EXPRESSED IN PLACENTA, SIGNAL =  14; EXPRESSED IN HEART, SIGNAL =  33; EST_HUMAN HIT: BE772813.1, EVALUE 0.00e+00; SWISSPROT HIT: P30482, EVALUE 9.00e-49; NT HIT: AJ131118.1, EVALUE 0.00e+00
ggtctcacatcatccagaggatgtacggctgcgacgtggggccggacgggcgcctcctccgcgggtatgaccaggacgcctacgacggcaaggattacatcgccctgaacgaggacctgagctcctggaccgcggcggacaccgcggctcagatcacccagcgcaagtgggaggcggcccgtgtggcggagcagctgagagcctacctggagggcctgtgcgtggagtcgctccgcagatacctggagaacgggaaggagacgctgcagcgcgcgg

SEQ ID NO: 25959 - DNA, 182 bp, Homo sapiens
  MAP TO AC002325.1; EXPRESSED IN PLACENTA, SIGNAL = 0.76; SWISSPROT HIT: Q89892, EVALUE 8.50e-01; NT HIT: AB069698.2, EVALUE 3.00e-98; EST_HUMAN HIT: T71693.1, EVALUE 9.40e-01
ctggatgtcagcatcttcctggaggggtccccagatgcggatctcctccaggcggggcagccggtcctcggtgagggccactctgtactcgacacgaccatcctccaggagggaggggtaggtggtgttaggggagatgctcatcttcccagccacgacatagcgccctccgatcctcaccg

SEQ ID NO: 25960 - DNA, 131 bp, Homo sapiens
  MAP TO AL118558.2; EXPRESSED IN PLACENTA, SIGNAL = 2.6; EXPRESSED IN HEART, SIGNAL =   3; SWISSPROT HIT: Q28651, EVALUE 2.00e-19; EST_HUMAN HIT: R16662.1, EVALUE 9.00e-68; NT HIT: gi16189362, EVALUE 6.00e-68
cttttagagctctttgacagtgaagatcctcgggagagagattttcttaaaaccacccttcacagaatctatgggaaattcctaggcttgagagcttacatcagaaaacagataaataatatattttatag

SEQ ID NO: 25961 - DNA, 268 bp, Homo sapiens
  MAP TO AC008762.5; EXPRESSED IN PLACENTA, SIGNAL = 0.62; SWISSPROT HIT: O83169, EVALUE 2.00e+00; NT HIT: gi14767924, EVALUE 8.00e-57; EST_HUMAN HIT: BI519649.1, EVALUE 1.00e-56
aagcgccctcagttcagcaagccgccaggaggccaccacaagacccagcgctcaggtgccatgggcagagggggtgggcagacggggggcgagctccaggaacccccagaggagcacaacttgctcacgagcacacaattccttggtggggggtatcaggaaggagaaggatccccagccacagcagttgccacccatggacccaaagttgctgaagcagctgaggaaggcagagaaggccgagagggagttccggaagaagttcaag

SEQ ID NO: 25962 - DNA, 219 bp, Homo sapiens
  MAP TO AC006138.1; EXPRESSED IN PLACENTA, SIGNAL = 1.2; SWISSPROT HIT: P36044, EVALUE 3.00e+00; EST_HUMAN HIT: BE797082.1, EVALUE 9.00e-94; NT HIT: gi14761357, EVALUE 6.00e-94
atgcttccggtgcttcctgtggagcagcagaggcccgcggcactcaccatgcagacccagcactggagggctgagtggtggggggtctggaaaagtgaagcgcacagtgtactccttagggcgcttcaggagctcaggggcctcctgggattcctcatcttggtttttccgtcggcatttctgctgcttccgagtcagggcttccttcgtttgtttttc

SEQ ID NO: 25963 - DNA, 218 bp, Homo sapiens
  MAP TO AC018762.4; EXPRESSED IN PLACENTA, SIGNAL = 1.3; NT HIT: U16654.1, EVALUE 7.80e-01
aatgtgaaggtaggatttgcgagatgttaatctttataataagccaatggttgattgaaaagttagaagaaaatgggacagcaggtatggaaaagcagtttatgactgatgagaaggaagaagaggaagagaagaagaagaagaaggagaaggaggaggaggaggagggagaggaggaagaggtatggggtgggaagaaagaaccgccaccacagtaa

SEQ ID NO: 25964 - DNA, 186 bp, Homo sapiens
  MAP TO AC020629.6; EXPRESSED IN HEART, SIGNAL =   1; EXPRESSED IN PLACENTA, SIGNAL = 0.67; EST_HUMAN HIT: AA758082.1, EVALUE 1.00e-100; SWISSPROT HIT: Q39085, EVALUE 7.40e+00; NT HIT: gi14754045, EVALUE 1.00e-100
ctggacattcctctctctgtgttatcagagctagagccgctttgactgtgttgatctgcagaagcagcactagatgcaggcggtgactttgttttctccttaaagtctgtaataatgactgtcagatctccaacagtaacttccaaatgctgagcactactccgatccacatttttcaatcttggc

SEQ ID NO: 25965 - DNA, 143 bp, Homo sapiens
  MAP TO AC004195.1; EXPRESSED IN PLACENTA, SIGNAL = 0.69; SWISSPROT HIT: O75154, EVALUE 5.90e+00
aggaaccaggtgaagagtgtggatgactcagtccacccctccccgcacaggaaaaacaactcagaggacatcccctactgggagtgggccaggagcgctggcttccacgccaaggagaggagggtgttgctgtggctgcagag

SEQ ID NO: 25966 - DNA, 263 bp, Homo sapiens
  MAP TO AC013602.2; EXPRESSED IN PLACENTA, SIGNAL = 0.57; SWISSPROT HIT: P57071, EVALUE 2.40e-01; NT HIT: gi14767848, EVALUE 0.00e+00; EST_HUMAN HIT: BE884008.1, EVALUE 0.00e+00
tctgtgagtcctgccaggagtacttcgtggatgaatgcccaaaccatggccccccggtgtttgtgtctgacacaccggtgcccgtgggcatcccagaccgggcggcgctcaccatcccacagggcatggaggtggtcaaggacactagtggagagagtgacgtgcgatgtgtaaacgaggtcatccccaagggccacatcttcggcccctatgaggggcagatctccacccaggacaaatcagctggcttcttctcctggctg

SEQ ID NO: 25967 - DNA, 194 bp, Homo sapiens
  MAP TO AC004493.1; EXPRESSED IN PLACENTA, SIGNAL = 3.4; EXPRESSED IN HEART, SIGNAL = 4.4; NT HIT: gi7706718, EVALUE 1.00e-105; EST_HUMAN HIT: BF926546.1, EVALUE 1.00e-105
gagaggacccagacaggctgtgcctcgagggagtcccagacccatctctaagtcctggagaagacccagacctgcttctccttgatggagttctgggtaaaccatctttcatttcaggagaagatgcagaactacttctttctctcgagggtgttctgggtacagcatcaagcacaggtgaagagatgctctga

SEQ ID NO: 25968 - DNA, 147 bp, Homo sapiens
  MAP TO AC002455.1; EXPRESSED IN HEART, SIGNAL =   1; EXPRESSED IN PLACENTA, SIGNAL = 1.2; NT HIT: gi14737316, EVALUE 2.00e-77; SWISSPROT HIT: P50749, EVALUE 2.00e-02; EST_HUMAN HIT: AA317011.1, EVALUE 2.00e-75
tgggacgccttcagcatgcctgaactacataacttcctacgtatcctgcagcgggaggaggaggagcacctccgccagatcctgcagaagtactcctattgccgccagaagatccaagaggccctgcacgcctgcccccttgggtga

SEQ ID NO: 25969 - DNA, 171 bp, Homo sapiens
  MAP TO AC026888.4; EXPRESSED IN PLACENTA, SIGNAL =   3; EXPRESSED IN HEART, SIGNAL =   2; NT HIT: gi15082217, EVALUE 1.50e-01; EST_HUMAN HIT: AA377283.1, EVALUE 5.60e-02; SWISSPROT HIT: O08638, EVALUE 1.50e+00
atctctttggcctgaagtcctcatcaaggagtttaagctttattctgagagtcatgggaaacaactgagaaattttaagaagcaaagggacctgatctgtaagatttatacaatggagaacaatatggaaaaggaaaaagacaccattaggatgctgctgcggatgctggg

SEQ ID NO: 25970 - DNA, 105 bp, Homo sapiens
  MAP TO AC003073.2; EXPRESSED IN PLACENTA, SIGNAL = 0.53
atgctccagttgcttgcagttctgtctggaaatgaaattgagaggccctcccagtaccagggtctctgcataggaaggctgggtgtactcaagctgctgatccag

SEQ ID NO: 25971 - DNA, 279 bp, Homo sapiens
  MAP TO AL021182.1; EXPRESSED IN PLACENTA, SIGNAL = 1.1; SWISSPROT HIT: P11331, EVALUE 4.60e-01; NT HIT: gi14757636, EVALUE 0.00e+00; EST_HUMAN HIT: AI110652.1, EVALUE 0.00e+00
atggaagtgaaaggttggggtggagaagatgttcatctttatcgaaaatacttacgtggtgacctcattgttattcggaatccagttcctggtcttttccacctctggcatgaaaagcactgtgctgatgagctgacccccgagcagtaccgcatgtgcatccagtctaaagccatggatgaggcttctcgctcccacctgggaatgctggtcttcagggaggaaatagagacgcatcttcataaacaggcatacaggacaaacagcgaagctgttggt

SEQ ID NO: 25972 - DNA, 93 bp, Homo sapiens
  MAP TO AC006272.1; EXPRESSED IN PLACENTA, SIGNAL = 0.72; SWISSPROT HIT: P75314, EVALUE 6.20e+00; NT HIT: M31944.1, EVALUE 2.90e-01; EST_HUMAN HIT: BF108601.1, EVALUE 4.30e-01
ctggactgcaccaacttgggaattctctctctactattccttgttcttctttccccaactggaatattgcttctggcttggtagcttgacaac

SEQ ID NO: 25973 - DNA, 464 bp, Homo sapiens
  MAP TO AC008507.6; EXPRESSED IN PLACENTA, SIGNAL = 1.6; SWISSPROT HIT: P04374, EVALUE 5.00e-70; NT HIT: AF023860.1, EVALUE 0.00e+00; EST_HUMAN HIT: BE790793.1, EVALUE 0.00e+00
gggccccatactatcagctatggtcaaccccaccaagttcttcaatgagccctggggccgcatctccatccagctgtttgcagacaagtttccaaagacagcagaaaatgtttgtgctctgagcattggagagaaaggatttggttataagggttcctgctttcacagaattattccggggtttatgtgtcacggtggtgacttcacacaccataatggcagtggtggcaagtacatctatggggagaaatttgatgatgagaacttcatcctgaagcagacaggttctggcatcttgtccaaggaaaatgctggacccaacacaaacggttcccagtttttcatctgcagtgccaagagtgagtggttggatggtgagcatgtgttctttggcaaggtgaaagaaggcatgaatattgtggaggccatggagggttttgggtccaggaatggcaagaccagca

SEQ ID NO: 25974 - DNA, 232 bp, Homo sapiens
  MAP TO AL008724.1; EXPRESSED IN PLACENTA, SIGNAL = 0.69; NT HIT: AB051435.1, EVALUE 1.00e-128; EST_HUMAN HIT: BG033924.1, EVALUE 1.20e+00; SWISSPROT HIT: P98161, EVALUE 3.10e-01
ccagcagggactggagtgtgctgctgcactgctggagccggtcgcccgggtcggaggttgggaagaagacagccgctggcaggccactggttggggggtccagccggaagcccacagcggtgaggagggcctgccagccagggatgccgcccactttgttctccacactctgctgggacgtgtacatggcattgcgctgcccattctggatgcgctgcagggatttctccac

SEQ ID NO: 25975 - DNA, 133 bp, Homo sapiens
  MAP TO AL109800.25; EXPRESSED IN PLACENTA, SIGNAL = 0.85; NT HIT: AF223391.1, EVALUE 1.00e-04; EST_HUMAN HIT: AA578352.1, EVALUE 1.00e-11
gggctcaggcccagggagatcagagctctgtccctgagccctggctgaagtttgagttcctacaaggaggccctgcagctgcagtgttggctgctgcctctcccccaaggagctcagatggcttagactgcag

SEQ ID NO: 25976 - DNA, 109 bp, Homo sapiens
  MAP TO AC009731.6; EXPRESSED IN PLACENTA, SIGNAL = 0.74; NT HIT: AF367265.1, EVALUE 1.40e+00; EST_HUMAN HIT: BF205341.1, EVALUE 1.30e-01
agggccttgtttgcatctggacccaggatgctcgtgtgtgacttttctggaatccaagcacattgtggctgttaatagtgatgatgatgatgatgatcatgataatcat

SEQ ID NO: 25977 - DNA, 168 bp, Homo sapiens
  MAP TO AC000356.1; EXPRESSED IN PLACENTA, SIGNAL = 0.39; EST_HUMAN HIT: BG527318.1, EVALUE 2.20e-01; SWISSPROT HIT: P21569, EVALUE 1.10e+00
agctatggcttgaagagactcacaactgctctccacggcaaaagtgagcctcagaaaaaacagtgtgggggtctcatggctccaggagatagaggaacagggaaacaagggaaacccagggacaaacccaggaaaactcagagacaacaaattccaagttttggacat

SEQ ID NO: 25978 - DNA, 206 bp, Homo sapiens
  MAP TO AC005952.1; EXPRESSED IN PLACENTA, SIGNAL = 1.1; NT HIT: U31602.1, EVALUE 1.00e-112; EST_HUMAN HIT: BI827293.1, EVALUE 1.00e-112; SWISSPROT HIT: P51460, EVALUE 1.00e-19
tcagtagggacagagggtcagcaggtcttgttgggtacagccactgaggcagcagtagcgtgcagggttggtggcagctgcacggtggtggcggtgatggtgagaggtctggggcaggggctgcaggccaggtcccagcgtgagattactgtcggccaccagcccatggagcagatgtcgtctctccagccactgtagcaactcac

SEQ ID NO: 25979 - DNA, 551 bp, Homo sapiens
  MAP TO AC008806.4; EXPRESSED IN PLACENTA, SIGNAL =   1; SWISSPROT HIT: P10072, EVALUE 1.00e-107; EST_HUMAN HIT: AW245709.1, EVALUE 0.00e+00; NT HIT: gi16176883, EVALUE 0.00e+00
attccctgcacacataaggctttcccccagagtgtgtccttgggtttttgatgaggactgacatactgccaaagctgtctccccactcagtgtacatgtaaggtgtctccccagtttgtgtcttctggaggctaaggaggtttgactccttgataaagcctggcccaaactcttcatatttgatttctccaaatcctgagacttctaaaccatgcaatactttgtctgtttcctctagatctgccctccgttcagggctggaccctatatccaccactgtgttgtcttccttggactgtgctggctgttgttcttcaggtgggctggaaagtgcctttgaagtgccatttttgcttactctcccaaacaggagtctggagtcttctccctcttgaatccattctgctttgccactaaagcagaatggatcctgctgttgtttctgatcttctggatagtgttttcccaggtggagaggatttcctgcccataaacttgaaaacagctgagagagatgactcagccacacatgttggctgagagcttgctga

SEQ ID NO: 25980 - DNA, 193 bp, Homo sapiens
  MAP TO AL121594.3; EXPRESSED IN PLACENTA, SIGNAL = 0.61; NT HIT: gi16171180, EVALUE 5.00e-54; SWISSPROT HIT: P32969, EVALUE 2.00e-16; EST_HUMAN HIT: BF699897.1, EVALUE 1.00e-58
catttatcaacctggagcctcttttctttctttccaagaagactgaatctacactgatgtgattgaaatccctctgcagggttcctctggggcctttcacagtaactgtgtgtcccttcagagtaatgtcaccattttctggaatgttgacagtctggttgctgagaatggtcttcgttctctcagtagacat

SEQ ID NO: 25981 - DNA, 144 bp, Homo sapiens
  MAP TO AC009320.7; EXPRESSED IN PLACENTA, SIGNAL = 0.82; SWISSPROT HIT: O15294, EVALUE 2.00e-02; EST_HUMAN HIT: BE514565.1, EVALUE 1.00e-05; NT HIT: J02889.1, EVALUE 4.90e-01
gttgtatccacgccatgcaagtgcgctcaacaaccttggaacactgacgagagacacagcagaggcaaagatgtactatcagagggctctccagctccatccacagcataaccgggctcttttcaatctggggaatctcctcaa

SEQ ID NO: 25982 - DNA, 280 bp, Homo sapiens
  MAP TO AL079302.4; EXPRESSED IN PLACENTA, SIGNAL = 1.4; NT HIT: gi14251213, EVALUE 0.00e+00; SWISSPROT HIT: P09576, EVALUE 6.90e+00; EST_HUMAN HIT: BE396072.1, EVALUE 0.00e+00
ttgaccagttaatttgcacttgtacttggctgtggctgttccggctgtggctccttcggcttctttgtcttcttcttcttctgcttggagagacagctcaaagcagactcgctcttacttggggcagacacaagcaggggcggcttgccagactgagtgggatacttggttttctggctctccgtaaacagtggctgggacagcaggtggcgcagctccttcttcagaaccttcatctgcttttgtctccgacgttcttcttgctggtcagcttttcctc

SEQ ID NO: 25983 - DNA, 123 bp, Homo sapiens
  MAP TO AC003048.1; EXPRESSED IN PLACENTA, SIGNAL = 0.43; NT HIT: AF018631.1, EVALUE 4.10e-01; SWISSPROT HIT: P54099, EVALUE 1.20e+00; EST_HUMAN HIT: BE143617.1, EVALUE 3.80e-02
cgtggtagggcacacagcggctgacttgtcctggtaaatcataagcatggtgggctccgcaggtgcctccctcctttctgtccttgagtctgaagccagcaccttctttgatggcacaaacgt

SEQ ID NO: 25984 - DNA, 194 bp, Homo sapiens
  MAP TO AC010749.3; EXPRESSED IN PLACENTA, SIGNAL = 0.88; NT HIT: AB033233.1, EVALUE 2.00e-69; EST_HUMAN HIT: BE144547.1, EVALUE 2.00e-69; SWISSPROT HIT: P14010, EVALUE 2.50e+00
atggcagcaagccttttgttccctgatctggggttcttggcctcacggattccaaggaatggaaccttgggccatgcggtgagtgttatagctctattagaagccatggatcacagaagagaaccgtggaacccagcaactagtgttcagctcaattgggacgaacccaaggacttagctgcgcaggaacaatg

SEQ ID NO: 25985 - DNA, 133 bp, Homo sapiens
  MAP TO AC010345.4; EXPRESSED IN PLACENTA, SIGNAL = 0.72; SWISSPROT HIT: Q9T1Q3, EVALUE 2.00e+00; NT HIT: AF029081.1, EVALUE 5.00e-07; EST_HUMAN HIT: AV709771.1, EVALUE 8.00e-13
cagataaggtggttttgaagcccacattagaatataatttgagcttgcataagctgtatgatgctttaatacaagcttgtccaacccgcggcccaggacggctttgaatgcagcccaacacaaattcataaac

SEQ ID NO: 25986 - DNA, 86 bp, Homo sapiens
  MAP TO AC002128.1; EXPRESSED IN PLACENTA, SIGNAL = 0.63; EST_HUMAN HIT: BF574496.1, EVALUE 3.90e-01; SWISSPROT HIT: P57429, EVALUE 4.70e+00; NT HIT: AL163213.2, EVALUE 2.70e-01
atgaacaaaagaagaatatcagcaaaaagacagaaaatgcaaaaaggaaccaaaaggaaaattctggagctaaaaatacaattaac

SEQ ID NO: 25987 - DNA, 221 bp, Homo sapiens
  MAP TO AC016602.5; EXPRESSED IN PLACENTA, SIGNAL = 0.42; EST_HUMAN HIT: BG482796.1, EVALUE 1.20e+00; SWISSPROT HIT: O57863, EVALUE 7.10e+00
aataattttaaagatgctaccagtggcatcaaatgtcagcacagtactgcctataatttttataaccgtagagatttgtgtgatagaaacaggtataaaggatcctctgaagaagctaaggagttcccagagtatgaggatatcttcccatattcttctgaaaacgtctttgttttgcccctagtcttggatgactgtttagtagggtatacaattccaga

SEQ ID NO: 25988 - DNA, 92 bp, Homo sapiens
  MAP TO AC002111.1; EXPRESSED IN PLACENTA, SIGNAL = 0.45; EST_HUMAN HIT: AV759712.1, EVALUE 4.20e-01; NT HIT: AB050846.1, EVALUE 1.10e+00
atggccatctgtcccaatgacctcacagtccaagtggggagactgactaggcagcagctgcatctgaatcctggcaccaggaaatctcccag

SEQ ID NO: 25989 - DNA, 147 bp, Homo sapiens
  MAP TO AC000074.2; EXPRESSED IN PLACENTA, SIGNAL = 0.66; EST_HUMAN HIT: BG149428.1, EVALUE 3.00e-77; SWISSPROT HIT: P98074, EVALUE 5.20e-01; NT HIT: gi14777116, EVALUE 2.00e-77
ttaatgctttttctcagtgtttttcttctgtttctgagtcacgaacagcaggcactgaaagcagtcccccagccactgccgaaggtcagtcccggaggtgctgcccaggctccaggcagatgcggcagccccggccacagccagcat

SEQ ID NO: 25990 - DNA, 162 bp, Homo sapiens
  MAP TO AC000079.1; EXPRESSED IN PLACENTA, SIGNAL = 0.5; EST_HUMAN HIT: BI458831.1, EVALUE 6.00e-51; SWISSPROT HIT: Q61666, EVALUE 4.00e-16; NT HIT: gi14777004, EVALUE 7.00e-56
cttgggcactctgccaacacgcaaagcctgcaaagggccactctgtaatacctaagtgattgtccatctggcaaagcatcttgggaatattttcatccttctcgtcatcctcctggaggactggagacatattccagatcacaaccttcccagaatcctgcc

SEQ ID NO: 25991 - DNA, 135 bp, Homo sapiens
  MAP TO AC011525.4; EXPRESSED IN PLACENTA, SIGNAL = 0.91; EXPRESSED IN HEART, SIGNAL = 1.1; NT HIT: AJ286748.1, EVALUE 1.80e+00
gaggcaggagtattttgtggccaagacaggtaactacctgtgctataggcatcacgggtcatccactcacaggagcaagaggtgctcaggagcacctttgtgtctcccggcagaaagcaccaactgcaaagagac

SEQ ID NO: 25992 - DNA, 202 bp, Homo sapiens
  MAP TO AC009086.5; EXPRESSED IN HEART, SIGNAL = 2.8; EXPRESSED IN PLACENTA, SIGNAL = 2.5; NT HIT: gi16164628, EVALUE 1.00e-110; EST_HUMAN HIT: BF448084.1, EVALUE 1.00e-107; SWISSPROT HIT: Q92617, EVALUE 3.00e-32
tttatatagttgaagtcagctttcaggttgaaggaagtgctactggtactctttttcaagtcatggatagcgttctgccattcctgcacagcagcccaatcggcaattgagatgtagcactcacatgctttatttcctaaataatttataacctcaggggaagagtcagtcggtttggacagcacagtttttctggattcac

SEQ ID NO: 25993 - DNA, 289 bp, Homo sapiens
  MAP TO AC000074.2; EXPRESSED IN PLACENTA, SIGNAL = 2.5; EXPRESSED IN HEART, SIGNAL = 1.8; NT HIT: gi14777100, EVALUE 1.00e-105; SWISSPROT HIT: P21964, EVALUE 5.00e-41; EST_HUMAN HIT: BE386349.1, EVALUE 1.00e-105
atgccggaggccccgcctctgctgttggcagctgtgttgctgggcctggtgctgctggtggtgctgctgctgcttctgaggcactggggctggggcctgtgccttatcggctggaacgagttcatcctgcagcccatccacaacctgctcatgggtgacaccaaggagcagcgcatcctgaaccatgtgctgcagcatgcggagcccgggaacgcacagagcgtgctggaggccattgacacctactgcgagcagaaggagtgggccatgaacgtgggcgacaagaaag

SEQ ID NO: 25994 - DNA, 122 bp, Homo sapiens
  MAP TO AC016602.5; EXPRESSED IN PLACENTA, SIGNAL = 0.66; NT HIT: AF031926.1, EVALUE 1.60e+00; SWISSPROT HIT: P51582, EVALUE 4.60e+00; EST_HUMAN HIT: AU160487.1, EVALUE 2.30e+00
gagactgcaaaccccttctcaggccagtgtctattcagggtggtttttgctcaccccagttcagactcctaaccggagtacaaggcgttagaaaggggtggaccgaggacagaggaagaatg

SEQ ID NO: 25995 - DNA, 156 bp, Homo sapiens
  MAP TO AC004178.1; EXPRESSED IN PLACENTA, SIGNAL = 0.64; SWISSPROT HIT: Q9GZK4, EVALUE 4.00e-19; NT HIT: AJ302613.1, EVALUE 2.00e-71; EST_HUMAN HIT: BI562613.1, EVALUE 3.00e-71
agcaggatgatgagtgtgttgcccaccagggtcaagaggtaggaagtgaagacaaccacaaagagagtcctttccagtgctgggtgttcagagaagcccagaaggaggaagcccatgggggagctttggttaaccatggcctgttcttgtttgtac

SEQ ID NO: 25996 - DNA, 193 bp, Homo sapiens
  MAP TO AC002380.1; EXPRESSED IN PLACENTA, SIGNAL = 1.6; EXPRESSED IN HEART, SIGNAL = 2.1; SWISSPROT HIT: Q9QXV8, EVALUE 3.30e+00; EST_HUMAN HIT: BG701653.1, EVALUE 1.00e+00; NT HIT: M29322.1, EVALUE 6.80e-01
ggatcaaaaagtggcaactatgacatgtcctcactactattgggggaattagagtggagggcactcaatgaattggagagcatactctttgtaaaggagacagccaatcctctggcccaggccttgggtgagtggagggcactcgataagttggagagcatactctttgtaaaggagacagccaatcctctca

SEQ ID NO: 25997 - DNA, 268 bp, Homo sapiens
  MAP TO AC016597.4; EXPRESSED IN PLACENTA, SIGNAL = 0.47; EST_HUMAN HIT: BE247362.1, EVALUE 0.00e+00; SWISSPROT HIT: Q9XHM1, EVALUE 3.70e-02; NT HIT: gi15318237, EVALUE 0.00e+00
ttttggaagctgggttaaattccagcaccacgagggtgtctgggcctggagaagagcgtccttctgtctcctgttccccgtgaacatctttctgagtccagtcgccactggaaggagggcggtcatgtctgggatggcccaccagtgccgggtcctctggctcaggctcagagagtatgtcttcctcaatagagtcatactcatcgctggaacaatccttttgtttcctttgtagatttacactaagttccaggcttcttctcagctc

SEQ ID NO: 25998 - DNA, 245 bp, Homo sapiens
  MAP TO AC010522.3; EXPRESSED IN PLACENTA, SIGNAL = 0.69; NT HIT: D21242.1, EVALUE 5.70e-02; EST_HUMAN HIT: AA773732.1, EVALUE 1.00e-123; SWISSPROT HIT: Q11130, EVALUE 1.80e+00
tctgtgacggcgccaagcgtgacccacccctgggccaggatagggaccgtcatgcccatatctcctggctggtcaccctctcctcccaaccctgctttaaaccacgtggttcgatggcggtggtggccacgctgaggctctctgctcaggtaattgtggtgccttccatgccctcaggtcacctcatcatcacccaaaagcctgtagtcttgcaaggaagagtctttaaggtggcagagccatag

SEQ ID NO: 25999 - DNA, 174 bp, Homo sapiens
  MAP TO AC004181.1; EXPRESSED IN PLACENTA, SIGNAL = 0.72; NT HIT: Z15027.1, EVALUE 1.00e-88; SWISSPROT HIT: O95670, EVALUE 1.00e-26; EST_HUMAN HIT: AW386028.1, EVALUE 3.00e-93
gccatgggctcccaggggaacctgtctgctgaggtggagcaggctacaaggcgccaggtgcagggcatgcagagctcccagcagagaaaccgagagcgtgtcctggcccagcttcttggcatggtctgcgacgtcaggccccaggtccaccccaactaccggatttctgcctag

SEQ ID NO: 26000 - DNA, 162 bp, Homo sapiens
  MAP TO AC004511.1; EXPRESSED IN PLACENTA, SIGNAL = 0.47; EST_HUMAN HIT: BG191205.1, EVALUE 2.10e-01; NT HIT: X74875.1, EVALUE 3.00e-86; SWISSPROT HIT: Q28809, EVALUE 6.00e-15
atgagccgcctgcccgtcctgctcctgctccaactcctggtccgccccggactccaagctcccatgacccagacaacgtccttgaagacaagctgggttaactgctctaacatgatcgatgaaattataacacacttaaagcagccacctttgcctttgctg

SEQ ID NO: 26001 - DNA, 110 bp, Homo sapiens
  MAP TO AC004779.1; EXPRESSED IN PLACENTA, SIGNAL = 0.42; EST_HUMAN HIT: BE505006.1, EVALUE 5.20e-01; NT HIT: AJ277662.1, EVALUE 1.40e+00
tcagggaggcttgttggaggaaggacaccagagctcattgagggtgagtagagcatcagcttgggcatctgaaggcgagataacatcaccaagggccttgaatgtcagac

SEQ ID NO: 26002 - DNA, 288 bp, Homo sapiens
  MAP TO AC004790.1; EXPRESSED IN PLACENTA, SIGNAL = 0.44; EST_HUMAN HIT: AI742120.1, EVALUE 2.00e-37; NT HIT: AB040899.1, EVALUE 1.00e-06; SWISSPROT HIT: P21414, EVALUE 3.00e-23
tatgaaacttagatatttaactttttcatggcaaatttgggctttctttttagatactttgtaacttgttttccataaaagatggaggaggtcctgggttccttggtaataatcctctcgggttggggctgccaaaagaaggtcgtccacgtactgaaacaaggcacagttatcatttggcagggtataggccttgaggtttgaggccagtgcttcctcaaagattgtaagagagtttttgaacccttgtgggagcttagtccaggtgagctgtgtagcttccttgtc

SEQ ID NO: 26003 - DNA, 171 bp, Homo sapiens
  MAP TO AC000357.1; EXPRESSED IN PLACENTA, SIGNAL = 0.39; SWISSPROT HIT: O75956, EVALUE 7.50e+00; NT HIT: gi14753053, EVALUE 1.00e-91; EST_HUMAN HIT: BF980048.1, EVALUE 2.00e-91
gcccaaatgaggaatttgggattttatttgccaatcgctccttccttgtattgcgaggtcgttatggctatgtgggctcctcatcgggccatgacctcatacagtgcaaccaggatcagcccgaccgcattcatctactaccctgccgaccgggtatctaccacttccagg

SEQ ID NO: 26004 - DNA, 240 bp, Homo sapiens
  MAP TO AC004461.3; EXPRESSED IN PLACENTA, SIGNAL = 0.55; EST_HUMAN HIT: AI025052.1, EVALUE 5.00e-37; SWISSPROT HIT: P41105, EVALUE 9.00e-18; NT HIT: L77570.1, EVALUE 0.00e+00
ctgggaggagctgccgccccggccgcacatctgcaatggatggtcgcgaggaatcatccggcctgatcaaggggaataagcagacccacagcactgagcctgagaacttaaaggctgcagctccttccactacaacgagctgattcactgcaggactgtgggtgtggacccggcagctgatggcaaaggtgtggtggtggtcatggagtggagatccggccagcagaagccagccacctc

SEQ ID NO: 26005 - DNA, 197 bp, Homo sapiens
  MAP TO AC004779.1; EXPRESSED IN PLACENTA, SIGNAL = 0.45; EST_HUMAN HIT: BE154119.1, EVALUE 5.00e-49; SWISSPROT HIT: Q12986, EVALUE 4.20e+00; NT HIT: AF209068.2, EVALUE 1.10e-02
agctctctcctttgccgcaaaaacttgtgtgccgctgcgaacaattccatctccagcgcagcttgcatttctccagtagtcttgcagtggtagcatctgaaaatcagtttctaatgaatgagtccaaattgaattacatcgctgccttcagatttgcactagacacagctgttcaacttgtggaaatagttctgtga

SEQ ID NO: 26006 - DNA, 155 bp, Homo sapiens
  MAP TO AF205588.1; EXPRESSED IN PLACENTA, SIGNAL = 0.62; EST_HUMAN HIT: AW996337.1, EVALUE 5.00e-82; SWISSPROT HIT: Q9UVX3, EVALUE 6.70e-01; NT HIT: gi14728422, EVALUE 6.00e-07
cttggttcagttctggtttatgcattgtccagactacccaggatgtgacgattgcagggaggaggtcatgtttgtcataaaaatgctttggctccttaggattcagcaaaggtatccactgcctggtgtctgtggtgcctgcaggacagtgcatt

SEQ ID NO: 26007 - DNA, 324 bp, Homo sapiens
  MAP TO AC000366.1; EXPRESSED IN PLACENTA, SIGNAL = 0.61; SWISSPROT HIT: Q08271, EVALUE 9.00e+00; NT HIT: AL163203.2, EVALUE 1.00e-12; EST_HUMAN HIT: BF820241.1, EVALUE 3.00e-39
ctaattatagggcataagcagagtagatttaacatacttcttaagggccctagggttttcaagatggtaaatgagcattggcttccacttaaagtcatcagctgcactagcacctaacaggagggtcagcctgtcctgtgaagccagcattgacttctcctccctagctatcaaagtcctagacaacatcttccaatagaaggctgctttgtctacattgaaaacctcttgtttaacatagccaccttcatcaatgctcttcactaaatctcctagataagttgcttcagcttctacattagcaccttctgctttacctggcat

SEQ ID NO: 26008 - DNA, 128 bp, Homo sapiens
  MAP TO AC000358.1; EXPRESSED IN PLACENTA, SIGNAL = 0.64; SWISSPROT HIT: P58165, EVALUE 4.60e+00; NT HIT: U82671.3, EVALUE 7.00e-03; EST_HUMAN HIT: BF811279.1, EVALUE 1.00e-08
ctctgcatcactccaacgtctacctctgtcttcacatggctttcttccctgtcaatgtccatgtcctctcctcttataaggacagcagtcattggattaaggtccattctgatccagtatgacctcat

SEQ ID NO: 26009 - DNA, 221 bp, Homo sapiens
  MAP TO AC010485.4; EXPRESSED IN PLACENTA, SIGNAL = 0.45; SWISSPROT HIT: P14147, EVALUE 3.20e-02; NT HIT: AF260225.1, EVALUE 5.10e-02; EST_HUMAN HIT: AA558685.1, EVALUE 1.00e-06
atggtggacgactggaagcatctctttttaaaagtactcaagttaatatgtgaggaagtgacagaattagaatatcaccattttgaaacccctagtgaattaacagagctaagcattgtgctgcaacagctgttagcatcacacaaagagaggcaaaccggatattatgtgcctcctaacgaaggaatgcagcacctctggtcctgccaaaaggacagaag

SEQ ID NO: 26010 - DNA, 203 bp, Homo sapiens
  MAP TO AC003048.1; EXPRESSED IN PLACENTA, SIGNAL = 0.49; SWISSPROT HIT: P11837, EVALUE 2.80e-01
ccgtgggtctcctggaaggcactgtgtcggaaaccgagcttctctcctgcttcccttgctgtggcctatctgggaatctatagtctggagcatcccagggcggcctcctttggcagatggtgtaggagtgctgcaagccctcctggatgcacccaaggacccaggaagatgggagcgtggatctctgtgcctcagcacagagg

SEQ ID NO: 26011 - DNA, 257 bp, Homo sapiens
  MAP TO AC020949.3; EXPRESSED IN PLACENTA, SIGNAL = 0.45; EST_HUMAN HIT: AW303526.1, EVALUE 1.00e-37; SWISSPROT HIT: P75086, EVALUE 1.00e-01; NT HIT: AJ131208.1, EVALUE 6.00e-39
agatttcaacctttcttttgatggaacagttttgagacactttttgtggtatctgcaagtggatattttgactgctttgaggaattcgttggaaacgggaatatcttcacataaataccacacagaggcattctcaaaaacttccttgtgatacgtgcattcaactgacagagttgaatcttcctttggatctagcagttttgaaacactcttttggtagtatctgcttgtgtatatttggagtgctttgaagcctt

SEQ ID NO: 26012 - DNA, 186 bp, Homo sapiens
  MAP TO AC008625.4; EXPRESSED IN PLACENTA, SIGNAL = 0.66; NT HIT: AF241241.1, EVALUE 5.00e-54; EST_HUMAN HIT: BG248583.1, EVALUE 1.00e-100; SWISSPROT HIT: Q29121, EVALUE 4.00e-13
caagcaaggggggaagccagttgacattggcttcacagtgtgaatccaagaatgtgatgacatccccagttgccactgaggcccccagcattcgggtccttatcagcccttcccgtttcttggttcgaagaatcctcacactggggaaaagggccatgtagtcttcaagaggcttcttcaggtgct

SEQ ID NO: 26013 - DNA, 151 bp, Homo sapiens
  MAP TO AC015896.4; EXPRESSED IN PLACENTA, SIGNAL = 0.38; EST_HUMAN HIT: AI184662.1, EVALUE 7.60e-01
atttatgaaaggaccattaaattccttgctaatagacactgtcatgctgctcagcagcttcgttagccaatccatcctgagtcttaaattaaagccaggaaaccccagggtgtcactcagtgttaatgtcttgaaagcattaagaggttta

SEQ ID NO: 26014 - DNA, 118 bp, Homo sapiens
  MAP TO AC022247.2; EXPRESSED IN PLACENTA, SIGNAL = 0.45; NT HIT: AF401529.1, EVALUE 1.50e+00; EST_HUMAN HIT: BG723884.1, EVALUE 5.00e-60
cttttaaagcaaatttataaatggcttcacatgctttagccaaaatttcctcttctggagaattaagcattaacaccacagttgctgcttttttgctttcaatcattaatgggtcaaa

SEQ ID NO: 26015 - DNA, 181 bp, Homo sapiens
  MAP TO CHR22_192.0; EXPRESSED IN PLACENTA, SIGNAL = 0.32; NT HIT: AF251402.1, EVALUE 1.60e-01; EST_HUMAN HIT: BF870640.1, EVALUE 3.00e-25; SWISSPROT HIT: P42592, EVALUE 3.30e+00
cagccagaaggggttgtccagccagcacctgggttttggtgctcctcaagcaggtggaggaagtttcaggcacctggctcctcaggtgtctgccatccagctgctcttcaggcctgcccagcagagagctctcttgatccagctagaactggccagaactgattcactcaggaatgtgtag

SEQ ID NO: 26016 - DNA, 239 bp, Homo sapiens
  MAP TO AL137798.1; EXPRESSED IN PLACENTA, SIGNAL = 0.87; EST_HUMAN HIT: BE904110.1, EVALUE 1.00e-107; SWISSPROT HIT: P31305, EVALUE 2.90e+00; NT HIT: gi16161792, EVALUE 1.00e-115
tccctggccccacctcttctgccacaaacgtcagcatggtggtatcagccggccctttgtccagcgagaaggcagagatgaacattctagaaatcaacgagaaattgcatccccagctggcagagaagaaacagcagttcagaaacctcaaagagaaatgttttgtaactcaactggcctgcttcctggccaaccagcagaacaaatacagtaagatctataggctcaccatcacgaaa

SEQ ID NO: 26017 - DNA, 88 bp, Homo sapiens
  MAP TO AC022525.3; EXPRESSED IN PLACENTA, SIGNAL = 0.32; EST_HUMAN HIT: AI142273.1, EVALUE 6.00e-03
gcacagtgattgtgagactttgtgttggaacacagttctgtgctgtctcagtggaaagcaacactggaaaaaactcagctgacaccat

SEQ ID NO: 26018 - DNA, 135 bp, Homo sapiens
  MAP TO AL137118.3; EXPRESSED IN PLACENTA, SIGNAL = 0.31; SWISSPROT HIT: P11369, EVALUE 1.80e-01; NT HIT: gi14861872, EVALUE 1.80e+00; EST_HUMAN HIT: H87821.1, EVALUE 4.30e-02
gcaaaagatattaaagagaaaatttttaagaaggaaattttaattgccaatatgcatatgaaaaacatctcaacttcactagtaatcaaaggaaaacaaattaaagccacgatgagatgttatttcaccctgatc

SEQ ID NO: 26019 - DNA, 132 bp, Homo sapiens
  MAP TO CHR22_120.0; EXPRESSED IN PLACENTA, SIGNAL = 0.35; NT HIT: AB070367.1, EVALUE 6.90e+00; EST_HUMAN HIT: BI561795.1, EVALUE 6.50e-01
caggacaaagcatcggtagaggaaagcacattcccgacgctgacccatgaacttctcacactccagagttcccctcacaggcggcagcagggcctgtgtttcccagttggaacaggggtcgttttggcccat

SEQ ID NO: 26020 - DNA, 131 bp, Homo sapiens
  MAP TO AC017082.3; EXPRESSED IN PLACENTA, SIGNAL = 0.44; NT HIT: U82367.1, EVALUE 4.40e-01
tcagctatactagccaagtcagccatgatgcctgtcctgcacaaatttccattccagatgatgtcaccctgcccatggttctagctcataaaatgaccatcaatcagaccatcagccttgttcttcatgag

SEQ ID NO: 26021 - DNA, 267 bp, Homo sapiens
  MAP TO AC025179.2; EXPRESSED IN PLACENTA, SIGNAL = 0.41; NT HIT: L27746.1, EVALUE 9.70e-01; EST_HUMAN HIT: BG178665.1, EVALUE 0.00e+00; SWISSPROT HIT: P12263, EVALUE 4.10e-01
aggcatgaaatctcagttgaaacccaagaccacaaatctgctgtcaggggaaataacacacacgacaactatgaaaatgtggaagcaggtcctcccaaagctaaaggaaaaaccgataaggaactatatgaaaacacagggcagtctaatttcgaggagcatatctatggaaatgagacatcttctgactattataacttccagaagcctcgtccttctgaagttcctcaagatgaagatatatacattcttccagattcatattag

SEQ ID NO: 26022 - DNA, 114 bp, Homo sapiens
  MAP TO AC015833.3; EXPRESSED IN PLACENTA, SIGNAL = 0.31
aattggagacttcagcattcttttttccatagttgatacgcaaaaaagacagaaaatcattgagaatacagaaattatcaatcaacttaaccaaaatgactttcacgtcataat

SEQ ID NO: 26023 - DNA, 82 bp, Homo sapiens
  MAP TO AC015833.3; EXPRESSED IN PLACENTA, SIGNAL = 0.35; SWISSPROT HIT: Q04891, EVALUE 3.60e+00; EST_HUMAN HIT: AW994466.1, EVALUE 7.00e-15
atggagaaaggacagtacgatgtgtggcaaggagaggtggaagcaggaaaaaataatatactggaggaagaacctataatcc

SEQ ID NO: 26024 - DNA, 129 bp, Homo sapiens
  MAP TO AC012432.4; EXPRESSED IN PLACENTA, SIGNAL = 0.4; EST_HUMAN HIT: AI263039.1, EVALUE 6.30e-01; NT HIT: AB007925.1, EVALUE 1.70e+00; SWISSPROT HIT: O14683, EVALUE 4.60e+00
cttggctctggtgacattgatggggagacagtcatgatctttagcagctgtggcagtagtaggccaaacagaggcccctctttggaggtccagtccagcagcatcagtgctggtttggagactgaattg

SEQ ID NO: 26025 - DNA, 186 bp, Homo sapiens
  MAP TO AC006349.3; EXPRESSED IN PLACENTA, SIGNAL = 0.48; SWISSPROT HIT: P32497, EVALUE 1.90e+00; NT HIT: AF209976.1, EVALUE 7.00e-04; EST_HUMAN HIT: BG335052.1, EVALUE 4.00e-03
gtgtaacagccccttcctcatcctcatcctcatcctgcaaggccatgttttcagatttcttaaatggatttaacagtgcagaaagtttctgatcgctgatggctggctctggaagccaggccttctggaaccatgcagtaggcacggggtaggctgtgtggtctcccaagaacacatctccgtcct

SEQ ID NO: 26026 - DNA, 211 bp, Homo sapiens
  MAP TO AC018735.5; EXPRESSED IN PLACENTA, SIGNAL = 0.47; EST_HUMAN HIT: BI562507.1, EVALUE 1.00e-106; SWISSPROT HIT: P34263, EVALUE 3.20e+00
ctgcaaaaggtgacaggaagctttttctctaaaagtagctcttgacaaatagagcagatatcctctgaatcaatttccttctgtttaatgtacccatcttcttcaacatgttcattttcgtcatttgttcctggttggggagtttgaactcgatgtatcccccgaagcaagtcacttatctctctttctccaagacccagttgtaaagcag

SEQ ID NO: 26027 - DNA, 167 bp, Homo sapiens
  MAP TO AL137178.3; EXPRESSED IN PLACENTA, SIGNAL = 0.51; SWISSPROT HIT: P97594, EVALUE 1.90e+00; NT HIT: AE007526.1, EVALUE 3.70e-02; EST_HUMAN HIT: BF218081.1, EVALUE 8.50e-01
atcaatatctgtgtgacatccgtatttttagttataacatacatgcctgtatttattattctccaagataaagagttttgtcataaaccttctcacataatttctaggttcagatctccagaagtgttccaaggtaaaaatttaggagaggaatccctaggtggtag

SEQ ID NO: 26028 - DNA, 113 bp, Homo sapiens
  MAP TO AC011636.3; EXPRESSED IN PLACENTA, SIGNAL = 0.33
ctccaggttccagggctgatgacagtaaaagaaagcagcactgatctgggtgcggagtctggcaccaggttgtcttcattggatttggagttgaacttgcttggatttcctcc

SEQ ID NO: 26029 - DNA, 257 bp, Homo sapiens
  MAP TO AC012661.4; EXPRESSED IN PLACENTA, SIGNAL = 0.39; EST_HUMAN HIT: AA584531.1, EVALUE 6.00e-12; SWISSPROT HIT: P08547, EVALUE 3.00e-21; NT HIT: AY028079.1, EVALUE 1.00e-103
aaatacaattagtcaaagagatgaacgatccctacaaggaaaactacaaaacactgatgaaagaaattgtacatgacacaaatgagaaaaacatcccatgctcatggattggaagaattatgatcattaaaatgactctactgcccaaagcaatctacatattaaatgcaattcctaccaaaatgccaatgttattttttataaaattagaaaaaaaaaacactaaaattcacatggaaccacaaaaagagcctgaa

SEQ ID NO: 26030 - DNA, 212 bp, Homo sapiens
  MAP TO CHR22_89.0; EXPRESSED IN PLACENTA, SIGNAL = 0.31; NT HIT: gi14743565, EVALUE 2.00e-07; EST_HUMAN HIT: H55134.1, EVALUE 9.00e-94; SWISSPROT HIT: Q01397, EVALUE 1.40e-01
attttaagataagtatatttaactacagatttatcttacaacaacaagaagaagaaagaataaaggctgaagagttgtatgaaaaagatacagaagagttaaaaataatggaagagcaatataggacacaaactgaagtgaaaaaacaatctaaactgactctcaaatcattggaagtggaattgaagactgtaagaagtaactcaaatcag

SEQ ID NO: 26031 - DNA, 75 bp, Homo sapiens
  MAP TO AC013816.3; EXPRESSED IN PLACENTA, SIGNAL = 0.36; EST_HUMAN HIT: AI948966.1, EVALUE 5.00e+00; NT HIT: gi14757100, EVALUE 2.20e-01
ttatgcagtcttaaatgtaattacaccaagttttagttcatctaggtgtctcactatatcttcatgagaatccaa

SEQ ID NO: 26032 - DNA, 572 bp, Homo sapiens
  MAP TO AC005324.1; EXPRESSED IN PLACENTA, SIGNAL = 1.6; SWISSPROT HIT: Q16763, EVALUE 1.00e-106; EST_HUMAN HIT: BG771609.1, EVALUE 0.00e+00; NT HIT: gi14771489, EVALUE 0.00e+00
atgaactccaacgtggagaaactgcccccgcacatcatccgcctggtgtacaaggaggtgacgacactgaccgcagacccacccgatggcatcaaggtctttcccaacgaggaggacctcaccgacctccaggtcaccatcgagggccctgaagggaccccatatgctggaggtctgttccgcatgaaactcctgctggggaaggacttccctgcctccccacccaagggctacttcctgaccaagatcttccacccgaacgtgggcgccaatggcgagatctgcgtcaacgtgctcaagagggactggacggctgagctgggcatccgacacgtactgctgaccatcaggtgcctgctgatccaccctaaccccgagtctgcactcaacgaggaggcgggccgcctgctcttggagaactccgaggagtatgcggctcgggcccgtctgctcacagagatccacgggggcgccggcgggcccagcggcagggccgaagccgggcgggccctggccagtggcactgcagcttcctccaccgaccctggggccccagggggcctgggaggggc

SEQ ID NO: 26033 - DNA, 1040 bp, Homo sapiens
  MAP TO AC005630.1; EXPRESSED IN PLACENTA, SIGNAL = 2.4; NT HIT: gi16161055, EVALUE 2.00e-97; EST_HUMAN HIT: BF828725.1, EVALUE 0.00e+00; SWISSPROT HIT: Q08379, EVALUE 6.00e-10
ctgaacccctggccccagagcccccagcagggccatctaaggtagagcagctacaagatgagaccaaccacctaaggaaggagctagagagtgtgggaagacagctccaggctgaggtggaaaacaatcagatgttgagtctcctgaacaggagacaggaggagaggctacgtgaacaggaggagaggctacatgaacaggaggagaggcaacgtgaacaggaggataggctacatgaacaggaggagaggctacgtgaacatgaggagaggctgtgtgaacaggaggagaggctatgtgaacaggaggagaggctacgtgaacaggaggagaggctacatgaacaggaggagaggctacgtgaacaggaggagaggctgtgtgaacaggaggagaggctacgtgaacatgaggagaggctgtgtgaacaggaggagaggctacgtgaacaggaggagaggctgtgtgaacaggaggagaggctacgtgaacaggaggagaggctgtgtgaacaggaggagaggctacgtgaacaggaggagaggctgtgtgaacaggagaagctgccagggcaggagaggctgctggaagaggtggagaagctgttagaacaggagaggcggcaggaggagcaggagaggctgctggagagggagaggctgctggaagaggtggagaagctgttagaacaggagaggcagcaggaggagcaggagaggctgctggagagggagaggctgctggaagaggtggagaagctgttagaacaggagaggcggcaggaggagcaggagaggctgctggagagggagaggctgctggacgaggtggaggagctcctggacgaggtggaggagctcctggagcaggagaggcttcggcaacaggatgagaggctgtggcagcaggagactctgcaggagctggagaggctgcgggagctggagaggctgcgggagctggagaggatgctggagctggggtgggaagccctgtacgagcagcgggccgagccacgcagcggcttcgaggagctggtg

SEQ ID NO: 26034 - DNA, 672 bp, Homo sapiens
  MAP TO AC011446.2; EXPRESSED IN PLACENTA, SIGNAL = 1.4; SWISSPROT HIT: P17950, EVALUE 7.00e-53; NT HIT: gi14763546, EVALUE 0.00e+00; EST_HUMAN HIT: BG760207.1, EVALUE 0.00e+00
atggaagtgcagaaagaggcacagcgcatcatgaccctgtcggtgtggaagatgtatcactcccgcatgcagcgcggtggcctgcggctgcaccggagtctgcagctgtcgctggtcatgcgcagcgcccgggagctctacctctcggccaaggtggaggccctcgagcccgaggtgtcgttgccggccgccctcccctctgaccctcgcctgcacccgccccgagaagccgagtccacggccgagacagcgacccccgacggtgagcacccgtttccggagccaatggacacgcaggaggcgccgacagccgaggagacctccgcctgctgtgccccgcgccccgccaaagtcagccgcaaacgacgcagcagcagcctgagcgacggcggggacgctggactggtcccgagcaagaaagcccgtctggaagaaaaggaagaagaggagggagcgtcatccgaagtcgccgatcgcctgcagccccctccggcgcaagcggagggcgcctttcccaacctggcccgcgtcctgcagaggcgcttctccggcctcctgaactgcagccccgcggcccctccgacggcgccgcccgcgtgcgaggcaaagcccgcttgccgcccggcggacagcatgctcaacgtgctcgtgcgggccgtggtggccttctga

SEQ ID NO: 26035 - DNA, 572 bp, Homo sapiens
  MAP TO Z81365.1; EXPRESSED IN PLACENTA, SIGNAL =  11; EST_HUMAN HIT: BI546700.1, EVALUE 0.00e+00; NT HIT: gi14763922, EVALUE 0.00e+00; SWISSPROT HIT: P50241, EVALUE 3.70e-01
ctggacggtctcagcctggcgtcgcgcttgccgtccaccacggagggcacacagctggtgagctcggtccagtcggcgtgcaacccgcagctccagcccgtggagaacctggagaagagccaggtttcccgcttacccggccggtggcaagtgcatttcttctgacccacgcggcactcgcacggctgctccagctggatgttacgcaccaagtggcggccgaaagtggtgcccccggtcttctggatgtgcaggaacacgatcaggtcatcgcccttgatgtcgaagtctaccttgcgcaggaggtcgccgcgggtgaaattgtagcggggcacgaacctggcggagctctcatcctccgagcggtacgggtccggcaccggggagctgaacgcctgcaggcggaggagctggcattctgtgccggggcacacgtattggaggacgatcacggcaaataggaagagcatcaccaaagctagcagcagcttgttggatttctcatccatgttcccgacgctgggggaaacccaagctcgttacgtcaatcccgcagctcagcccgcgctcgt

SEQ ID NO: 26036 - DNA, 563 bp, Homo sapiens
  MAP TO AL031709.10; EXPRESSED IN PLACENTA, SIGNAL = 1.7; NT HIT: AB018277.1, EVALUE 1.00e-63; EST_HUMAN HIT: BI771405.1, EVALUE 2.00e-63; SWISSPROT HIT: P13677, EVALUE 3.20e-02
atgaggtggccccacgggcagtcaggtctccaagtgccagcgctgaccaccagcacccaggggcccctcctgatgcgcttccccctgcagaggctgaaggaggagctgcggctgcacaaatgttccacccgcgagtgcatcgagcagttctacctggacaagctcaaacaggtagggaggcgccagggacagggtgctgcctccgaggctcccagagcccagctgcgctcacccgcctttccgcagaggaccctggagcagaaccggtttggacgcctgagcgtccgttgccattacgaggcggctgagcagcggctggccgtggaggtgctgcacgccgcggacctgctccccctggacgccaacggtgagttgcagcggggacgggtcgggtggtggtgggatgggggcaggggggctcacgactgtgctcctgcaggcttaagtgacccctttgtgatcgtggagctgggcccaccgcatctctttccactggtccgcagccagaggacccaggtgaagacccggacgctgcaccctgtatacgacgaactcttctactt

SEQ ID NO: 26037 - DNA, 222 bp, Homo sapiens
  MAP TO CHR14.3; EXPRESSED IN LUNG, SIGNAL = 1.2; EXPRESSED IN PLACENTA, SIGNAL = 1.1; SWISSPROT HIT: O43236, EVALUE 4.10e+00; NT HIT: AF111168.2, EVALUE 1.00e-122; EST_HUMAN HIT: BG479051.1, EVALUE 1.20e+00
tttcctgagacaaattcttgccataggctttgctgacaaaatctgttaattgcaactttgggcaagatgctgtgtctttcccacagtcttcaaagtgcacggagagaaagagttcactcagaagctgcagcacttgggagtgggccatgtttcttgctgtgcatatgtttagggccgcatagaacactccctccaaccacttgatattgaggattattcccc

SEQ ID NO: 26038 - DNA, 140 bp, Homo sapiens
  MAP TO CHR14.3; EXPRESSED IN LUNG, SIGNAL =   1; EXPRESSED IN PLACENTA, SIGNAL = 1.1; NT HIT: Y18740.1, EVALUE 3.00e-02; SWISSPROT HIT: P12384, EVALUE 2.60e+00
ctgctgtgatgcccccttgcccatcttcctcctggagaacttgtgcaaagagctctatccatcccacatccaggagaacccaattcgcattttcacaaagacacttctctgcctgacctggttctccgttttggaccatt

SEQ ID NO: 26039 - DNA, 127 bp, Homo sapiens
  MAP TO CHR14.3; EXPRESSED IN PLACENTA, SIGNAL = 0.9; EXPRESSED IN BONE MARROW, SIGNAL =   1; NT HIT: AE008387.1, EVALUE 1.70e+00; SWISSPROT HIT: P24665, EVALUE 1.20e+00
tcaacaggcagtgcctttgttattattatcaaggtcgtcaatgcaatgtaggtgagactgtctctttcttgaccacagcccatatcctccttcaaaactgtgtcgttcaaggtttcccttgaagcca

SEQ ID NO: 26040 - DNA, 198 bp, Homo sapiens
  MAP TO CHR18.3; EXPRESSED IN PLACENTA, SIGNAL = 1.5; EXPRESSED IN HEART, SIGNAL = 2.4; EXPRESSED IN BONE MARROW, SIGNAL = 1.7; EXPRESSED IN FETAL LIVER, SIGNAL = 2.8; SWISSPROT HIT: P46934, EVALUE 2.00e-11; EST_HUMAN HIT: BI862468.1, EVALUE 1.00e-107; NT HIT: AB071179.1, EVALUE 1.00e-107
ggtgccaaggactcacccgtacgtcgggctgtgaaagacaccctttccaacccacagtccccacagccatcaccttacaactcccccaaaccacaacacaaagtcacacagagcttcttgccacccggctgggaaatgaggatagcgccaaacggccggcccttcttcattgatcataacacaaagactacaacctgg

SEQ ID NO: 26041 - DNA, 253 bp, Homo sapiens
  MAP TO CHR18.3; EXPRESSED IN PLACENTA, SIGNAL = 1.2; EXPRESSED IN BONE MARROW, SIGNAL = 1.2; SWISSPROT HIT: P48868, EVALUE 1.10e+00; NT HIT: gi14861872, EVALUE 5.90e-02
tgtacaatgggattttcatccagtaccagttttgatggcaagctgggaaagcacgggtgtttggaggctaaggctcccattctttcatatgcagaaaatgagcaatgtctcctgtttcctggcacccatcaccattcccctcctagcactgaaggaactgatcggcatgatcactttgcattttggctcgtatctctcatccttgctgaggccagtcaccctccaagtctctcaccatttggctttgctcttt

SEQ ID NO: 26042 - DNA, 144 bp, Homo sapiens
  MAP TO CHR19.3; EXPRESSED IN PLACENTA, SIGNAL =   1; EXPRESSED IN BONE MARROW, SIGNAL = 1.4; SWISSPROT HIT: P31266, EVALUE 3.40e+00
ctgagagccctcggggtcttgaggtgcagcagccactgggcagtcggcctcgggattctcagcctttgtccattgaacaaacacgatcccagtccagagccacagagcaacttcgcgctcggccaccgccaaagaggcacagcc

SEQ ID NO: 26043 - DNA, 60 bp, Homo sapiens
  MAP TO CHR16.3; EXPRESSED IN PLACENTA, SIGNAL = 1.2; NT HIT: gi14757146, EVALUE 6.50e-01; EST_HUMAN HIT: BE840780.1, EVALUE 2.40e-01
gaaaccatctccaggctagaacaagtgcctgaaatagagaagggtgaggtcactgcctaa

SEQ ID NO: 26044 - DNA, 101 bp, Homo sapiens
  MAP TO CHR14.3; EXPRESSED IN PLACENTA, SIGNAL =   1; EXPRESSED IN LUNG, SIGNAL = 1.1; EXPRESSED IN BONE MARROW, SIGNAL = 0.85; NT HIT: gi16120353, EVALUE 3.20e-01; EST_HUMAN HIT: AW978679.1, EVALUE 1.20e-01; SWISSPROT HIT: P19137, EVALUE 4.70e+00
gaagcagctaccatgcagatgactgcatgtttatttccctttcctacatttgtcagcttttgaccacaattttctcccagaacacaggcatggggggctgg

SEQ ID NO: 26045 - DNA, 110 bp, Homo sapiens
  MAP TO CHR14.3; EXPRESSED IN FETAL LIVER, SIGNAL = 1.9; EXPRESSED IN PLACENTA, SIGNAL =   1; EXPRESSED IN HEART, SIGNAL = 2.1; EST_HUMAN HIT: BG674433.1, EVALUE 3.00e-55; SWISSPROT HIT: O62829, EVALUE 2.00e-14; NT HIT: gi10337594, EVALUE 2.00e-55
gaaatcataaagaagcagggggaaggcgtccccgacttagtccatgtgatgcgcacattagcgagtgagaacatccccagcctcccaccagggggtgaattggcaagcaa

SEQ ID NO: 26046 - DNA, 180 bp, Homo sapiens
  MAP TO CHR18.3; EXPRESSED IN BONE MARROW, SIGNAL = 1.8; EXPRESSED IN PLACENTA, SIGNAL = 1.6; SWISSPROT HIT: P26637, EVALUE 1.90e+00; NT HIT: AF116676.1, EVALUE 2.50e+00
cagcttatggctgcaggccacaggcttcatgggcagtgagctcaatgtccctaacagccaactttgtagcaacttaggagatgactgccacagcctgttaaaggagatgtgggccgtgcccatcagcaaccattttctgcggatgtttgctgcttactttcgccgtgttagagaaacaaa

SEQ ID NO: 26047 - DNA, 146 bp, Homo sapiens
  MAP TO CHR18.3; EXPRESSED IN PLACENTA, SIGNAL = 0.95; EXPRESSED IN BONE MARROW, SIGNAL = 1.6; EXPRESSED IN LUNG, SIGNAL = 1.3; EXPRESSED IN FETAL LIVER, SIGNAL = 1.3; SWISSPROT HIT: Q05192, EVALUE 4.50e+00; NT HIT: AF377330.2, EVALUE 5.00e-01; EST_HUMAN HIT: BG008661.1, EVALUE 7.30e-01
tcatcctctcctttaaaattgaactgcaaggccagctgatgaaacctttcatgtggttggctgtgtctggcagctcagcaagcacctactgtgtggaggccctgtcctgggctcctgatgagcaacactgcttcatggaagaggca

SEQ ID NO: 26048 - DNA, 133 bp, Homo sapiens
  MAP TO CHR14.3; EXPRESSED IN PLACENTA, SIGNAL = 0.89; SWISSPROT HIT: P48181, EVALUE 7.80e+00; EST_HUMAN HIT: BE206269.1, EVALUE 2.00e-68; NT HIT: AY029472.1, EVALUE 2.90e-02
aaatgggaagaatttgatgaaaactatgcatctcttgaaaaggacctggaaattcttatatctacattgccctctgtgagtttggtggaagaaacagaggaaagattagtggaaaggatttcattttaccagg

SEQ ID NO: 26049 - DNA, 133 bp, Homo sapiens
  MAP TO CHR18.3; EXPRESSED IN PLACENTA, SIGNAL = 1.1; EXPRESSED IN BONE MARROW, SIGNAL = 1.1; NT HIT: X83972.1, EVALUE 4.50e-01
tggagaagaatgattcagaagagtgcatccaattctggaacagactcaaggatgttattgtgtatcaactggtgatttcaatgctcttttccttgctgcaagaaaaaaaatgcgttggaacttgggaagtatg

SEQ ID NO: 26050 - DNA, 189 bp, Homo sapiens
  MAP TO CHR18.3; EXPRESSED IN PLACENTA, SIGNAL = 1.5; EXPRESSED IN HEART, SIGNAL =  15; EXPRESSED IN FETAL LIVER, SIGNAL =  16; SWISSPROT HIT: O35501, EVALUE 6.00e-18; NT HIT: gi16158329, EVALUE 3.00e-71; EST_HUMAN HIT: BG206037.1, EVALUE 6.00e-76
tactgtttctcctccttttgatcttccttttgttccccagtgccagaatttccagagccttcttgctcagatgccatctttttgtatgccatttcgaagagcttcagtgatgcctgctgaagagaggatgctgtttgtccaatgttttctcccgtttcgctgtcttttctatccagaagccccttcatt

SEQ ID NO: 26051 - DNA, 185 bp, Homo sapiens
  MAP TO CHR16.3; EXPRESSED IN PLACENTA, SIGNAL = 0.96; EXPRESSED IN LUNG, SIGNAL = 2.1; SWISSPROT HIT: Q14894, EVALUE 5.00e-30; NT HIT: AF039395.1, EVALUE 1.00e-100; EST_HUMAN HIT: BG706739.1, EVALUE 2.00e-97
ccattgatgtgagcccctggcttcacccattcaccaaacaaaatgggctctgttgccagggtgactgtgatgatcacatctgcacctgccacagcctcctggaccgaagaacagacccgtacctctccttgcactgtgtctgcaaacttctctgcattttctttggtgcggttccatatcctcac

SEQ ID NO: 26052 - DNA, 119 bp, Homo sapiens
  MAP TO CHR18.3; EXPRESSED IN PLACENTA, SIGNAL = 0.93; EXPRESSED IN BONE MARROW, SIGNAL = 0.98; EST_HUMAN HIT: BG987926.1, EVALUE 2.30e+00; SWISSPROT HIT: P50852, EVALUE 6.90e-01; NT HIT: gi16195826, EVALUE 6.10e+00
aaggggagcaagaaggcgggcattaaaagccaggctgagaaacaaaatgagccccaaagggatgaaaatgacactatggggcagaggaatgacgtggagcagtcgaagcaatggaacct

SEQ ID NO: 26053 - DNA, 259 bp, Homo sapiens
  MAP TO CHR18.3; EXPRESSED IN PLACENTA, SIGNAL = 1.4; EXPRESSED IN BONE MARROW, SIGNAL = 1.8; SWISSPROT HIT: Q09225, EVALUE 3.00e-03; EST_HUMAN HIT: AI223289.1, EVALUE 9.00e-76
gaaaagttcacagacttaggcacagaatgcaatgggagcatcgatgggatgatgggcatcttcactggcccagagacaggctgtggcttcatgcatcagtgcttgttccctccaggtctggtgaaccgtgtgctttcttgggacatctggagtttcctgtccagcatcagttatgctcgctacttggtgcatccgattctgatcatcctttacaatggccttcaggaaacacttattcaccacactgacaccaacatgg

SEQ ID NO: 26054 - DNA, 455 bp, Homo sapiens
  MAP TO CHR19.3; EXPRESSED IN PLACENTA, SIGNAL =   1; EXPRESSED IN HEART, SIGNAL = 2.1; EXPRESSED IN LUNG, SIGNAL =   1; EXPRESSED IN BONE MARROW, SIGNAL =   1; SWISSPROT HIT: P11087, EVALUE 7.00e-02; NT HIT: gi15304432, EVALUE 0.00e+00; EST_HUMAN HIT: AI190034.1, EVALUE 0.00e+00
taaaagttcaaagttttaatccaaatttagacagtgttgagaaaaccaaactttggccatagaaaccattcccctcccgggcccgcaatggggaccagaccacgccccctgatgccctgagtggtcccagatctccggcggtacctccagaccacgtcctcgcgctccgattggctgccgcttttgggcggattagaagctggattgtagcagagtgactcgcagaggccatgccccctcgtcttgtggcaggaccggaggggcgatcccggcatcccacgcgggcccccagggggtgggacctcctccacgcccactccctcggcgagagaaccccgtggaacccgaattagccaccgggggagatctggggggaggggtctcctggcgcgtggggtccgaaggaggcagcggcacaccgggaagagggtctccctgggagtccaaatttccac

SEQ ID NO: 26055 - DNA, 174 bp, Homo sapiens
  MAP TO CHR18.3; EXPRESSED IN PLACENTA, SIGNAL = 0.82; EXPRESSED IN FETAL LIVER, SIGNAL =   1; EST_HUMAN HIT: AI827773.1, EVALUE 2.00e-91; SWISSPROT HIT: P52291, EVALUE 7.50e+00; NT HIT: gi14764270, EVALUE 5.00e-91
taaagtcctggtctgaagggtgatatctatgaagaaggaacccaaacctttcccctggatcttgcccagaacgacggtcagagtcttcatactctcatggatgacttccaaattcacagggtcatacagtccatacaccagcaggtcgaggacaattttcttatactttctcac

SEQ ID NO: 26056 - DNA, 180 bp, Homo sapiens
  MAP TO CHR14.3; EXPRESSED IN PLACENTA, SIGNAL = 1.1; EXPRESSED IN LUNG, SIGNAL = 1.5; NT HIT: X60008.1, EVALUE 6.30e-01; EST_HUMAN HIT: BG655877.1, EVALUE 8.00e-97; SWISSPROT HIT: P51184, EVALUE 9.70e+00
tccttttatactttctgtacatatgtggcttggattgtcttccgacgtcaacacttgacagagattgaagaagaagtagggagactctttcgtaccaatatgttcaacattcctcgcaggaggcgtgaagatgaggaatcaggaggggaaaagaaacgcatgacttttgttcagttcagg

SEQ ID NO: 26057 - DNA, 156 bp, Homo sapiens
  MAP TO CHR16.3; EXPRESSED IN PLACENTA, SIGNAL = 1.5; EXPRESSED IN HEART, SIGNAL = 2.4; EXPRESSED IN LUNG, SIGNAL = 3.3; EXPRESSED IN FETAL LIVER, SIGNAL = 2.1; EST_HUMAN HIT: BI914426.1, EVALUE 1.00e-82; SWISSPROT HIT: Q13084, EVALUE 2.00e-04; NT HIT: gi14777207, EVALUE 4.00e-82
ccttgaggatgtaaaagtcgagcccataagcctcatcgatgaggtccagggtccgcatggtcacagtcactgtgaacttcttgtccaggatctcactgtagaactctcgctcaaacagctgtggcttccacactttcttcagcctcttggagagct

SEQ ID NO: 26058 - DNA, 93 bp, Homo sapiens
  MAP TO CHR14.3; EXPRESSED IN PLACENTA, SIGNAL = 1.4; EXPRESSED IN BONE MARROW, SIGNAL = 1.3; EST_HUMAN HIT: AW582210.1, EVALUE 4.30e-01; NT HIT: AY017475.1, EVALUE 2.90e-01
ctcatgaggccaacacagtacttcaaaaccaaacacttaggaatttcttctcaaccatcattgctgcagccccagggaaaatcaagacagctg

SEQ ID NO: 26059 - DNA, 272 bp, Homo sapiens
  MAP TO CHR14.3; EXPRESSED IN PLACENTA, SIGNAL = 0.85; NT HIT: AF227258.1, EVALUE 5.00e-15; SWISSPROT HIT: P51760, EVALUE 1.30e+00
gctgaggaccaccttgctgcggttgaccgctgctggccgggacctgcgggtcgcggaggaggcggcgccgctctcggagaccgcaaggcgcgggcagaaggcgggatggcggcagcgcctctccatgcaccagcgcccccagatgcaccgactgcaagggcatttccactgcgtcggccctgccagcccccgccgcgcccagcctcgcgtccaagtgggacacagacagctccacacagccggtgcaccggtgccggagaaacccaagaggg

SEQ ID NO: 26060 - DNA, 215 bp, Homo sapiens
  MAP TO CHR16.3; EXPRESSED IN LUNG, SIGNAL = 1.3; EXPRESSED IN PLACENTA, SIGNAL = 1.9; EST_HUMAN HIT: AI016695.1, EVALUE 1.00e-117; NT HIT: gi11967982, EVALUE 1.00e-118; SWISSPROT HIT: O15165, EVALUE 8.80e-02
gggggaccgccgactggtttggagtgagcaaggacagtgacagcacccagaaatggcagcgcaagagcatccgtcactgcagccagcgctacgggaagctgaagccccaggtcctccgggagctggacctgcccagccaggacaacgtgtcgctgaccagcaccgagacgccacccccactctacgtggggccatgccagctgggcatgcagaag

SEQ ID NO: 26061 - DNA, 268 bp, Homo sapiens
  MAP TO CHR14.3; EXPRESSED IN PLACENTA, SIGNAL = 1.1; EXPRESSED IN BONE MARROW, SIGNAL = 1.7; SWISSPROT HIT: P17475, EVALUE 1.00e-16; NT HIT: gi13386037, EVALUE 1.00e-06; EST_HUMAN HIT: AA458648.1, EVALUE 4.00e-53
ctgcgtgacagtaatgttttccatctggagaaagtgtccacctgcaatcccttctccaagtgcttcagcttgccctcatcaggaaggatgaagatggctgtgatatttttctggtagggtatttccaggatggtgcaagagagcttatcgtcatagccaacttggtatatgccactacggaacatcatgggcaccttgactgaactgtttttctccagaaagaaatcttcctctttagttacatttggatcaaactcatgtttccacc

SEQ ID NO: 26062 - DNA, 217 bp, Homo sapiens
  MAP TO CHR14.3; EXPRESSED IN PLACENTA, SIGNAL = 1.3; EST_HUMAN HIT: BG190041.1, EVALUE 1.10e+00; SWISSPROT HIT: Q03380, EVALUE 6.60e+00; NT HIT: AF335470.1, EVALUE 2.00e-01
tcctggggatggctaccctgcttcaccaggagtcccacatctgatgcccaagtatccacaggccactcatccacattcttctgctccacctgctgtaacagccaactaacctgctgcagcgccttcatctttcctacactggtggaagggcgaggattaaagtgtatcaccgttgttttgatctggctactatggtcctgcctgccttcctttggat

SEQ ID NO: 26063 - DNA, 186 bp, Homo sapiens
  MAP TO CHR18.3; EXPRESSED IN LUNG, SIGNAL = 1.6; EXPRESSED IN PLACENTA, SIGNAL =   1; SWISSPROT HIT: P28208, EVALUE 6.50e-01; NT HIT: AF349465.1, EVALUE 4.20e-02; EST_HUMAN HIT: BF773113.1, EVALUE 9.60e-01
tcacttggtaaagctgtcacaatctttgaggggcggttcctcatttggttttcttatggaatccctgttgtaaagccccttttcaatgatgtcctgaatgatttggcaaagagccactcccacgtgtcttctttgaggacaaataagccttaggtttatgtgggtcataggtgaagtttttgtctt

SEQ ID NO: 26064 - DNA, 147 bp, Homo sapiens
  MAP TO CHR14.3; EXPRESSED IN PLACENTA, SIGNAL = 1.4; EXPRESSED IN FETAL LIVER, SIGNAL = 1.6; EXPRESSED IN LUNG, SIGNAL = 1.4; EST_HUMAN HIT: AW003278.1, EVALUE 3.00e-77; SWISSPROT HIT: P49676, EVALUE 7.70e+00
aacgtgctggtgtccgagcagttcatgaaaacgttggacggagtgtatgccgttcacccgcagctggacgtggtattcaaggcagtacaaggcctctctcccaagaaaaccatcttcttgttgacaaaccccatgaaactgatccag

SEQ ID NO: 26065 - DNA, 186 bp, Homo sapiens
  MAP TO CHR14.3; EXPRESSED IN FETAL LIVER, SIGNAL = 1.2; EXPRESSED IN PLACENTA, SIGNAL = 0.9; EST_HUMAN HIT: AU129530.1, EVALUE 1.00e-100; SWISSPROT HIT: Q9UKF5, EVALUE 9.70e+00
gttagcctggcaaggaagataaagacatttgcaaccaagatggtaatcactagtgaaaatgatgaagacagaggaggtcaagaaaaagaaagtaaagaggagagtgtcttggcaatgctggggattatcgggaccattctgaacctgattgtgatcatatttgtctacatatacaccaccctgtga

SEQ ID NO: 26066 - DNA, 114 bp, Homo sapiens
  MAP TO CHR16.3; EXPRESSED IN FETAL LIVER, SIGNAL = 1.1; EXPRESSED IN PLACENTA, SIGNAL = 0.86; SWISSPROT HIT: P23975, EVALUE 2.00e-14; EST_HUMAN HIT: BE260823.1, EVALUE 9.00e-43; NT HIT: X91126.1, EVALUE 8.00e-58
gagctggcctagtgttcatcctgtatccagaggccatttctaccctgtctggatctacattctgggctgttgtgtttttcgtcatgctcctggcgctgggccttgacagctcag

SEQ ID NO: 26067 - DNA, 173 bp, Homo sapiens
  MAP TO CHR14.3; EXPRESSED IN BONE MARROW, SIGNAL = 1.5; EXPRESSED IN PLACENTA, SIGNAL = 1.1; NT HIT: gi14748718, EVALUE 9.40e+00
tgctgtatctgtataacagagagaataagaggctctgcttgccatggaactgtcatggccagaggcttgcaaaagagctaaccctcaggaggcccctcagagccaaatggctttctcaaaacttcaccctcatgatccagcagtccagacaggcagccataaacagcaccttg

SEQ ID NO: 26068 - DNA, 135 bp, Homo sapiens
  MAP TO CHR18.3; EXPRESSED IN PLACENTA, SIGNAL = 1.4; EXPRESSED IN LUNG, SIGNAL = 1.6; NT HIT: gi14760602, EVALUE 3.00e-70; EST_HUMAN HIT: BI553264.1, EVALUE 4.00e-70
ctgtaaaggagcggcgcctggcgttgagctcgttggccacacggacctcggtgcacagcttcagcatcagcagcatggtcaggatcatgatggcgctctgccacagcagcggggactcaaagcgccttccaaacc

SEQ ID NO: 26069 - DNA, 199 bp, Homo sapiens
  MAP TO CHR16.3; EXPRESSED IN HEART, SIGNAL = 1.9; EXPRESSED IN FETAL LIVER, SIGNAL = 0.93; EXPRESSED IN PLACENTA, SIGNAL = 0.93; EST_HUMAN HIT: AL530843.1, EVALUE 1.00e-103; SWISSPROT HIT: P57078, EVALUE 4.00e-07; NT HIT: AJ307662.1, EVALUE 7.00e-01
gagagagttagatttgaataagaagaatggtggtggctggaccccgctgatgtatgcctcctacattggccacgacacaatcgtgcacctgctgcttgaggcgggggtgagtgtgaatgtgccgaccccagaagggcagactccactgatgctggcctccagctgtggcaacgagagcatcgcctactttcttctccag

SEQ ID NO: 26070 - DNA, 367 bp, Homo sapiens
  MAP TO CHR19.3; EXPRESSED IN FETAL LIVER, SIGNAL = 1.1; EXPRESSED IN PLACENTA, SIGNAL = 1e+02; EST_HUMAN HIT: BG572553.1, EVALUE 0.00e+00; SWISSPROT HIT: P11465, EVALUE 5.00e-68; NT HIT: gi16163276, EVALUE 0.00e+00
gcatcacttttaaacttctggaacctgcccaccactgcccaagtcacgattgaagcccagccaccaaaagtttccgaggggaaggatgttcttctacttgtccacaatttgccccagaatcttactggctacatctggtacaaagggcaaatcagggacctctaccattacattacatcatatgtagtagacggtcaaataattatatatgggcctgcatatagtggacgagaaacagcatattccaatgcatccctgctgatccagaatgtcacccgggaggacgcaggatcctacaccttacacatcataaagcgaggtgatgggactagaggagtaactggatatttcaccttcaccttatacc

SEQ ID NO: 26071 - DNA, 93 bp, Homo sapiens
  MAP TO CHR18.3; EXPRESSED IN FETAL LIVER, SIGNAL = 0.91; EXPRESSED IN BONE MARROW, SIGNAL = 1.3; EXPRESSED IN PLACENTA, SIGNAL = 0.82; SWISSPROT HIT: P34808, EVALUE 8.00e-04; NT HIT: gi14760346, EVALUE 2.00e-45; EST_HUMAN HIT: BE701881.1, EVALUE 3.00e-45
ccagaagctgtgcctctctgactcatcaccgactccagctcgtccaggaagatcgtggatggggcgtggtagcgggcaagctcaaataacacc

SEQ ID NO: 26072 - DNA, 307 bp, Homo sapiens
  MAP TO CHR19.3; EXPRESSED IN PLACENTA, SIGNAL = 2.3; EXPRESSED IN LUNG, SIGNAL = 3.9; EXPRESSED IN BONE MARROW, SIGNAL = 3.2; EST_HUMAN HIT: AU118410.1, EVALUE 0.00e+00; SWISSPROT HIT: Q9Y6R0, EVALUE 5.00e-35; NT HIT: gi14787027, EVALUE 0.00e+00
cctgtgcccttcacctggaagtcagtgcggcgctgcagcgtggatggcagctcattcagccgtaggctcagctgccgtttgaaaggcgagttcttctggctgagtgctgggaacccacggaaggagccctggcgaaccagctgctccaggggtgcatggcgccgggggatggcggccgcagtggtgcctgcagccacaggggtgcctgcctcacccttctcaccaggggatgtggtggctggtgtcggggacacgtgcccaggctgggcagggccaggagccacagtgggggcagctgctgcctctg

SEQ ID NO: 26073 - DNA, 236 bp, Homo sapiens
  MAP TO CHR14.3; EXPRESSED IN PLACENTA, SIGNAL = 0.9; EXPRESSED IN LUNG, SIGNAL = 1.3; SWISSPROT HIT: O15945, EVALUE 4.30e-01
gggcatctccctgtgcaacaggccccaggcccaggctgcagggacagcagagccaggctgctcccacccaccccaaagccctgctcatgcagctgccgccagcccggatcccgctagggggcaccatgagctgcggctgcggacgaggggctgcttttccccaggcgctgtgggcttggagagaaaccctgggcaggaagggtcctctctttccagtcctggagccaggccacctg

SEQ ID NO: 26074 - DNA, 197 bp, Homo sapiens
  MAP TO CHR19.3; EXPRESSED IN LUNG, SIGNAL = 1.2; EXPRESSED IN PLACENTA, SIGNAL = 1.2; NT HIT: gi14767206, EVALUE 1.00e-107; SWISSPROT HIT: Q04499, EVALUE 3.00e-06; EST_HUMAN HIT: BI766014.1, EVALUE 1.00e-107
ccactcttggcagcagagtccggctcctcctcagtgggcactgccagcagtggtcggaggctgagggtccgcagctgctgcacgcagcccttcacctcctctgctgtctcaccagccacaaactgcccatagacggatgctcggagaaatgcgcctgagagccgggagcccaggagtcgccgagaccaggcctggag

SEQ ID NO: 26075 - DNA, 383 bp, Homo sapiens
  MAP TO CHR19.3; EXPRESSED IN PLACENTA, SIGNAL = 3.8; EXPRESSED IN HEART, SIGNAL = 2.6; EST_HUMAN HIT: AI184919.1, EVALUE 0.00e+00; NT HIT: gi13654959, EVALUE 0.00e+00; SWISSPROT HIT: P53680, EVALUE 7.00e-11
ggtttacacggtcgtggacgagatgttcctggctggcgaaatccgagagaccagccagacgaaggtgctgaaacagctgctgatgctacagtccctggagtgagggcaggcgagccccaccccggccccggcccctcctggactcgcctgctcgcttccccttcccaggcccgtggccaacccagcagtccttccctcagctgcctaggaggaagggacccagctgggtctgggccacaagggaggagactgcaccccactgcctctgggccctggctgtgggcagaggccaccgtgtgtgtcccgagtaaccgtgccgttgtcgtgtgatgccataagcgtctgtgcgtggagtccccaataaacctgtggtcctgcctggc

SEQ ID NO: 26076 - DNA, 193 bp, Homo sapiens
  MAP TO CHR16.3; EXPRESSED IN PLACENTA, SIGNAL = 2.3; EXPRESSED IN LUNG, SIGNAL = 3.5; NT HIT: gi13787207, EVALUE 1.00e-104; SWISSPROT HIT: Q61655, EVALUE 7.00e-32; EST_HUMAN HIT: BG422542.1, EVALUE 1.00e-104
ctaaaatgctcctggattctgttcaggatgttcatgctgtgcttgctgtccaccatgttcactgccaggcccctcttgccaaagcggcccgtgcgcccgatccggtgcaggtaggtctcattgtcaggattcccgtccttgtccacgggaagatcaaagttgatgacgacagacacttgttcaacatcaatgc

SEQ ID NO: 26077 - DNA, 307 bp, Homo sapiens
  MAP TO CHR19.3; EXPRESSED IN BONE MARROW, SIGNAL = 1.2; EXPRESSED IN PLACENTA, SIGNAL = 0.99; EXPRESSED IN LUNG, SIGNAL = 1.9; EST_HUMAN HIT: BI831722.1, EVALUE 1.10e-01; SWISSPROT HIT: P29400, EVALUE 1.60e-01; NT HIT: AF285761.1, EVALUE 5.00e-03
atggaccagtacagccttggagacgagggtgccctcccatcagaaatgcacctcccttcattttcagagagccaagggctcaactgcagcgacaccctcaaccgggatttgggtcccaacacgcgaggctttctttatgctggcctgagtggtctggacccggaccccagcctcccaacgcctgacatgtccagcgaggtgctggaggacaacttagacaccttgtccctgtactccgggaaggacagtgattctgtgaagctgctggaggagtacgcagattcggagtctcaggcatccttacaag

SEQ ID NO: 26078 - DNA, 195 bp, Homo sapiens
  MAP TO CHR19.3; EXPRESSED IN BONE MARROW, SIGNAL = 1.2; EXPRESSED IN PLACENTA, SIGNAL = 0.82; SWISSPROT HIT: Q17704, EVALUE 7.30e+00; EST_HUMAN HIT: BI828523.1, EVALUE 1.00e-98; NT HIT: AF241268.1, EVALUE 9.00e-99
ggactgagacagccattttggccacgaagggctgcatcccggaaggggaggaggccataacaattgtccagcactcttcacctcccggcctgatcgtgacctcctacagtaactactgtgaggattccttctgtaatgacaaagacagcctgtctcagttttgggagttcagtgagaccacaggtaccctggaag

SEQ ID NO: 26079 - DNA, 168 bp, Homo sapiens
  MAP TO CHR16.3; EXPRESSED IN PLACENTA, SIGNAL = 1.1; EXPRESSED IN FETAL LIVER, SIGNAL = 1.3; EXPRESSED IN BONE MARROW, SIGNAL = 1.3; SWISSPROT HIT: P38196, EVALUE 3.30e+00; EST_HUMAN HIT: BE871019.1, EVALUE 2.20e-01
tgaatgataatcaaagagaaaaataccacaatcctgacgccacgatagaaaaagaaaagaagggcagatgctcaaaattattgatcatggttttcatccagcaattttttcacaggaacaactctacatacatgaatccaacccagaagcagcagaactttatttaat

SEQ ID NO: 26080 - DNA, 146 bp, Homo sapiens
  MAP TO CHR14.3; EXPRESSED IN PLACENTA, SIGNAL = 7.5; SWISSPROT HIT: P02598, EVALUE 9.00e-22; NT HIT: U12022.1, EVALUE 8.00e-77; EST_HUMAN HIT: BI550454.1, EVALUE 5.00e-76
agaattcaaggaagccttctccctatttgataaagatggcgatggcaccatcacaacaaaggaacttggaactgtcatgaggtcactgggtcagaacccaacagaagctgaattgcaggatatgatcaatgaagtggatgctgatg

SEQ ID NO: 26081 - DNA, 84 bp, Homo sapiens
  MAP TO CHR19.3; EXPRESSED IN PLACENTA, SIGNAL = 7.2; EXPRESSED IN FETAL LIVER, SIGNAL = 0.97; SWISSPROT HIT: O53426, EVALUE 9.40e-01; NT HIT: gi15305407, EVALUE 4.00e-40; EST_HUMAN HIT: AI806831.1, EVALUE 6.00e-40
ctgagcgccgccgccctgcgctccccgcggcccgagcggtaattgtgcagagccccctggatgtcctctcggatcagctccgcc

SEQ ID NO: 26082 - DNA, 110 bp, Homo sapiens
  MAP TO CHR19.3; EXPRESSED IN LUNG, SIGNAL = 2.7; EXPRESSED IN PLACENTA, SIGNAL = 5.3; SWISSPROT HIT: P31159, EVALUE 5.30e-01; NT HIT: AJ007789.1, EVALUE 1.40e+00
ctgcctgcgatcgaccaggtccccatgcatacacagtcacccacaaagcatccacctctactccaagcaaacaccaacccacagcaatccaaggaaaccagagcatggcc

SEQ ID NO: 26083 - DNA, 206 bp, Homo sapiens
  MAP TO CHR14.3; EXPRESSED IN PLACENTA, SIGNAL = 1.1; SWISSPROT HIT: P33573, EVALUE 3.20e+00; EST_HUMAN HIT: AW854891.1, EVALUE 1.00e-112
gtggactcaggtgaaccaagccattgcagaccagttgcagaaggcccagagtctgctccagctctggaaggcctatagcaatgctcatggtgaagctgccgcaaggctgaagcagcaggaagcaaagtttcaacagctcgcaaacatcagcatgtctggaaacaacctggcagagatcctgcccccagccctgcaggacataaagg

SEQ ID NO: 26084 - DNA, 148 bp, Homo sapiens
  MAP TO CHR18.3; EXPRESSED IN PLACENTA, SIGNAL = 1.1; SWISSPROT HIT: Q64198, EVALUE 2.00e+00; NT HIT: X16849.1, EVALUE 5.00e-01
atggggaccacgagttgcggaagcaacagcaccaggtggagcctacggcaagtccccagggatccctcatccctgcagaacactttgagagaccaattcctagcaatcaagctgatagagctggggccacagtcattcggtttacatg

SEQ ID NO: 26085 - DNA, 85 bp, Homo sapiens
  MAP TO CHR18.3; EXPRESSED IN BONE MARROW, SIGNAL = 0.99; EXPRESSED IN FETAL LIVER, SIGNAL = 1.2; EXPRESSED IN PLACENTA, SIGNAL =   1; NT HIT: X84162.1, EVALUE 1.00e+00; EST_HUMAN HIT: BG331099.1, EVALUE 1.50e+00
cacacatttgccaaaactaaacaatagctgagagtatcatcgccactatcaccgtcgtcatcatcgtcattggtccatagggagc

SEQ ID NO: 26086 - DNA, 107 bp, Homo sapiens
  MAP TO CHR14.3; EXPRESSED IN PLACENTA, SIGNAL = 0.86; EST_HUMAN HIT: BI258192.1, EVALUE 2.00e-53; SWISSPROT HIT: O27036, EVALUE 1.40e-01; NT HIT: gi14748497, EVALUE 1.00e-53
gcatcttggtgccattccccctgagagtggggattttcaggagatggtatgccaggcctgcatgaaacgttgttcttttttgtgggcttatgctgcacaattggcag

SEQ ID NO: 26087 - DNA, 285 bp, Homo sapiens
  MAP TO CHR14.3; EXPRESSED IN LUNG, SIGNAL =   1; EXPRESSED IN PLACENTA, SIGNAL = 1.1; NT HIT: X74568.1, EVALUE 2.60e-01; SWISSPROT HIT: P55947, EVALUE 2.80e-01; EST_HUMAN HIT: AA447242.1, EVALUE 0.00e+00
actatatgtcggaaaccaaagacctccactgatcgacacagcttgagcctcgatgacatcagactttaccagaaagacttcctgcgcattgcaggtctgtgtcaggacactgctcagagttacacctttggatgtggccatgaactggatgaggaaggcctctattgcaacagttgcttggcccagcagtgcatcaacatccaagatgcttttccagtcaaaagaaccagcaaatacttttctctggatctcactcatgatgaagttccagagtttgttgtgtaa

SEQ ID NO: 26088 - DNA, 209 bp, Homo sapiens
  MAP TO CHR16.3; EXPRESSED IN PLACENTA, SIGNAL = 0.92; SWISSPROT HIT: Q14146, EVALUE 4.80e-01; NT HIT: gi4557528, EVALUE 1.90e-01; EST_HUMAN HIT: BE181417.1, EVALUE 2.80e-01
tgcgtgggaactgataagatgggggttgtgtccacttcacttgtatgggatgtcggtgctttgaaaaaattctatcatcaaagagtaggtttcttagttctgcaaatctggcacctggagatggcattttgaatcggacgacctttttagtaagggtcacttgctgttggatcatcgaagggggtgctgagtcttcatttttgttcatc

SEQ ID NO: 26089 - DNA, 144 bp, Homo sapiens
  MAP TO CHR14.3; EXPRESSED IN PLACENTA, SIGNAL = 1.5; EST_HUMAN HIT: BG718759.1, EVALUE 2.00e-75; SWISSPROT HIT: P35749, EVALUE 1.20e+00; NT HIT: AF195139.1, EVALUE 1.00e-75
aaagcagtctcaagcctgccgcagggagaagatggcggtcgccgtgagaactttgcaggaacagctggaaaaggccaaagagagtcttaagaacgtggatgagaacattcgcaagctcaccgggcgggatccgaatgacgtgag

SEQ ID NO: 26090 - DNA, 181 bp, Homo sapiens
  MAP TO CHR19.3; EXPRESSED IN BONE MARROW, SIGNAL = 0.81; EXPRESSED IN PLACENTA, SIGNAL = 0.85; SWISSPROT HIT: P14061, EVALUE 2.00e-10; NT HIT: gi14756560, EVALUE 1.00e-97; EST_HUMAN HIT: BE389836.1, EVALUE 2.00e-97
gtgaataatgctggaatgggcctggtggggcccctggaggggctcagccttgctgccatgcagaatgtctttgacaccaactttttcggagctgtccgtctcgtcaaagctgtgcttccaggcatgaagaggaggcggcagggccacatcgtggtgatcagcagtgtcatgggcctgcagg

SEQ ID NO: 26091 - DNA, 137 bp, Homo sapiens
  MAP TO CHR16.3; EXPRESSED IN PLACENTA, SIGNAL = 1.1; SWISSPROT HIT: O27880, EVALUE 7.70e+00; NT HIT: AL163202.2, EVALUE 4.60e-01; EST_HUMAN HIT: AW374091.1, EVALUE 1.70e-01
tccctcctccggtggttctgtcaagcagggacacagggacggaggggccttggtcattttggtcctggctgttgaagcccccatgaggctgacctgagaggccaaagttggacaccacgattgccacaaaggccata

SEQ ID NO: 26092 - DNA, 140 bp, Homo sapiens
  MAP TO CHR14.3; EXPRESSED IN PLACENTA, SIGNAL = 0.86; SWISSPROT HIT: P50245, EVALUE 2.60e+00
caaaaacaatgcaactgagcggcatcagagattacagagatatggccctggcaaaggcccaccagcagggctcttgggttccctctgaagcaaagaaaggcagccctctgcttgctggggaagacggctttcaaaggatg

SEQ ID NO: 26093 - DNA, 178 bp, Homo sapiens
  MAP TO CHR19.3; EXPRESSED IN PLACENTA, SIGNAL = 2.4; NT HIT: gi4507622, EVALUE 8.00e-96; EST_HUMAN HIT: BE892854.1, EVALUE 1.00e-95; SWISSPROT HIT: P19429, EVALUE 8.00e-27
ccttctcggtgtcctccttcttcacctgcttgaggtgggcccgcaggtccagggactccttagcccgggcccccagcagcgcctgcatcatggcatctgcagagatcctcactctccgcagggtgggccgcttaaacttgcctcgaaggtcaaagatcttctgagtcagatctgcaat

SEQ ID NO: 26094 - DNA, 191 bp, Homo sapiens
  MAP TO CHR14.3; EXPRESSED IN PLACENTA, SIGNAL = 0.94; NT HIT: gi11432623, EVALUE 1.70e-01; SWISSPROT HIT: Q9Z7R0, EVALUE 2.50e+00
tcactggtattgacaggtctcttcctgcttgaccagcactctgcttatgctggcacaggagctgccctgaatacgttcagagtgactgtgggcattctttcctctggggtgcatgtctaaggtcatactcgcattcttggaggtgggcttcccttcaccttcaaccactactgtgtctccttgatgataag

SEQ ID NO: 26095 - DNA, 140 bp, Homo sapiens
  MAP TO CHR18.3; EXPRESSED IN PLACENTA, SIGNAL = 0.95; EXPRESSED IN BONE MARROW, SIGNAL = 0.64; SWISSPROT HIT: P27177, EVALUE 1.20e+00; NT HIT: gi14780698, EVALUE 4.70e-01
gtattaaagaggagtcctgggtcagcagctctgttttgatgtggcaattattgacgctctgctgctctttcccggaaggtagagggcaagccaaagggaaggagttggggggccagcagttgatgccttgagcacagatc

SEQ ID NO: 26096 - DNA, 185 bp, Homo sapiens
  MAP TO CHR14.3; EXPRESSED IN LUNG, SIGNAL =   1; EXPRESSED IN BONE MARROW, SIGNAL = 0.83; EXPRESSED IN PLACENTA, SIGNAL =   1; SWISSPROT HIT: Q9W734, EVALUE 7.40e+00; EST_HUMAN HIT: BG540113.1, EVALUE 1.00e-95; NT HIT: AB023215.1, EVALUE 1.00e-100
gatcgtgctatctaaacaagcatcattcaggaatagccaaaacacaaaaagagggagaagatgcttctttatatagcaaacggtacaaccaaagtatggttacagctgaacttcagcggctagctgagaagcaggcagcgagacagtattctccatccagccacatcaacctcctcacccaacag

SEQ ID NO: 26097 - DNA, 115 bp, Homo sapiens
  MAP TO CHR18.3; EXPRESSED IN HEART, SIGNAL = 1.9; EXPRESSED IN FETAL LIVER, SIGNAL = 1.6; EXPRESSED IN BONE MARROW, SIGNAL = 1.7; EXPRESSED IN PLACENTA, SIGNAL = 1.4; SWISSPROT HIT: P13941, EVALUE 1.80e-01; EST_HUMAN HIT: AI143757.1, EVALUE 3.00e-58
ccggggtcgaggctgggccggctctccgggagcatcagggatccggttggagagaggctcatacggcggtcccaggggccacctcgagggggttgaccggagctgggtctgggag

SEQ ID NO: 26098 - DNA, 75 bp, Homo sapiens
  MAP TO CHR16.3; EXPRESSED IN PLACENTA, SIGNAL = 0.96; EST_HUMAN HIT: BF475760.1, EVALUE 3.20e-01; NT HIT: AB011399.1, EVALUE 8.80e-01
ttaatgatcgttttggtgcaagccagcgctcttttccacctcccaggtcctcacaattaaaggcctttgcctgcc

SEQ ID NO: 26099 - DNA, 238 bp, Homo sapiens
  MAP TO CHR14.3; EXPRESSED IN PLACENTA, SIGNAL = 1.2; SWISSPROT HIT: Q50597, EVALUE 3.70e+00; NT HIT: AB022053.1, EVALUE 8.60e-01
aggaatccactggttatgagcgcagctcagcacagcgacatttctcagctcgttgatgtcccttcctcggtgcgtgctgagtcgttcctgtgtgccgaggccggtgcggggtgctggggcccagtcccctgggttcacagcccaggctgtgacagaggtgggttctaaagactcccgagctggtgtgcagtctcttcttacacccttgtccagatggccgcggggcccatcctgcgcc

SEQ ID NO: 26100 - DNA, 197 bp, Homo sapiens
  MAP TO CHR14.3; EXPRESSED IN BONE MARROW, SIGNAL =   1; EXPRESSED IN PLACENTA, SIGNAL = 0.85; EST_HUMAN HIT: U69185.1, EVALUE 1.00e-107; NT HIT: AJ250280.1, EVALUE 9.00e-62; SWISSPROT HIT: Q02280, EVALUE 1.00e-22
ccgtttcctcagattgcaagtaagagtgagattccttgagaaggagtttgcaaaagctgtataaaagtccaggactttgagcaaggcttcccgcttgatgatgtgtaggtcacagtacgtcagtgcccggacgttcgcacatgcatgggcaagggtggtttccttccagaagatgtctccaaatacatcacccttcc

SEQ ID NO: 26101 - DNA, 133 bp, Homo sapiens
  MAP TO CHR16.3; EXPRESSED IN BONE MARROW, SIGNAL = 1.2; EXPRESSED IN PLACENTA, SIGNAL = 0.85; NT HIT: gi16164460, EVALUE 4.00e-69; EST_HUMAN HIT: BF528541.1, EVALUE 1.70e-01
ctgggccgagggtgtgagttccttactccggcaggtcacctctctcagcacctcggccagctcctgcaccctctgcacgtcctccaagccggtggtgactgcagacagtgatcccagcacatgctctctgacc

SEQ ID NO: 26102 - DNA, 107 bp, Homo sapiens
  MAP TO CHR14.3; EXPRESSED IN PLACENTA, SIGNAL =   1; NT HIT: gi13470324, EVALUE 8.70e-02; SWISSPROT HIT: O26368, EVALUE 2.40e-01
tggccatggtccttcctgatgacctcatgcttgcaacagtcacagaaaggagacaacttgattatttcctggattttcatctcctgaagatcaaaaaagcagccctt

SEQ ID NO: 26103 - DNA, 77 bp, Homo sapiens
  MAP TO CHR18.3; EXPRESSED IN BONE MARROW, SIGNAL = 0.88; EXPRESSED IN PLACENTA, SIGNAL = 0.89; NT HIT: AF007223.1, EVALUE 2.30e-01; EST_HUMAN HIT: BF850131.1, EVALUE 1.30e+00
ttaaatctcctgtttttcatctacacagaagatgttgtgtttagccaccagatggcgaaagaggatatttacttttg

SEQ ID NO: 26104 - DNA, 172 bp, Homo sapiens
  MAP TO CHR19.3; EXPRESSED IN PLACENTA, SIGNAL = 0.87; EXPRESSED IN HEART, SIGNAL = 2.2; EXPRESSED IN LUNG, SIGNAL = 2.2; NT HIT: AF361486.1, EVALUE 3.00e-92; SWISSPROT HIT: Q03603, EVALUE 8.60e-01; EST_HUMAN HIT: BE005912.1, EVALUE 2.00e-07
attgatgaagaggctatccctgtccaggacatagaagcccagttgggtgacaccatgggtcagctgactcagctcccagtaaagctgctgtatgtccagcccggggcccacagggtcagggtggtaggtgcaggtggtgtccacaccagtggctgccccatccttctcaggc

SEQ ID NO: 26105 - DNA, 414 bp, Homo sapiens
  MAP TO CHR16.3; EXPRESSED IN PLACENTA, SIGNAL = 3.5; EXPRESSED IN LUNG, SIGNAL = 5.1; EXPRESSED IN BONE MARROW, SIGNAL =  16; SWISSPROT HIT: O95125, EVALUE 6.00e-36; NT HIT: gi14779656, EVALUE 0.00e+00; EST_HUMAN HIT: BG479965.1, EVALUE 0.00e+00
atggccactgtccctggcctccagcccctgccaaccttggagcaggacctggaacaggaagagatcctgattgtgaaggtggaggaggacttctgcttggaagaggagccctccgtggagacggaggaccccagccctgagactttccgccagctcttccggctcttctgctaccaggaggtggctgggccccgggaggccctgagccgcctctgggagctgtgctgccgctggctgcggccggagctgcgcaccaaggagcagatcctggagctgctggtgctggagcagttcctgactgtgctgccgggggagatccaggctcgggtacgcgagcagcagccggagagcggtgaggaggccgtggtccttgtggaagggctgcagcggaagcccaggaaacacaggcagcgg

SEQ ID NO: 26106 - DNA, 178 bp, Homo sapiens
  MAP TO CHR18.3; EXPRESSED IN PLACENTA, SIGNAL = 1.1; EXPRESSED IN FETAL LIVER, SIGNAL = 1.1; EXPRESSED IN BONE MARROW, SIGNAL = 1.1; SWISSPROT HIT: P98161, EVALUE 2.20e-01; NT HIT: X87579.1, EVALUE 4.00e-02; EST_HUMAN HIT: BF245033.1, EVALUE 5.90e-02
ctcatgtggagctctggagagggcgaggcccctgaggttctgtggggccactatgttgtctgcccacagctctgggctctccacaggccctgcacctcggggccacatgtcctcatcctgccttgcagtcagggactggaaactctctcggattaacatcaagttcaatgccaaattc

SEQ ID NO: 26107 - DNA, 268 bp, Homo sapiens
  MAP TO CHR19.3; EXPRESSED IN FETAL LIVER, SIGNAL = 0.95; EXPRESSED IN PLACENTA, SIGNAL = 0.99; SWISSPROT HIT: P20916, EVALUE 8.00e-07; NT HIT: AF193441.1, EVALUE 0.00e+00; EST_HUMAN HIT: BI906741.1, EVALUE 1.00e-110
cctgtgtactcctgttgcagggagaggttcagggaaacgtgctgggaacccagagagttctgagctcgacaggtgaattccccttcatcccccaggtgcacttgcagctccagtaccagagggtttgagggctgtgaggggtacagggtcagactcctccaggtccagctcagcctggcagggggattgctgtcaacagcacagaccaagcgcagagactggccctctaggactgaaagagatgagctgttccccagagctgtggatg

SEQ ID NO: 26108 - DNA, 182 bp, Homo sapiens
  MAP TO CHR18.3; EXPRESSED IN FETAL LIVER, SIGNAL = 1.1; EXPRESSED IN BONE MARROW, SIGNAL =   1; EXPRESSED IN PLACENTA, SIGNAL = 0.9; NT HIT: gi14759309, EVALUE 4.00e-82; EST_HUMAN HIT: AA767895.1, EVALUE 1.00e-83
atgcaccttaaaacaagaaaatgaagaaaaaacaaatgttaatatgctgcacaaaaaaaatcgagaagaattagaaaggaaagagaaacaatataagaaagaagttgaagcaaaacaacttgaaccaactgttcaatcactagagatgaaaccaaagactgcaagaaatactccaaatcagg

SEQ ID NO: 26109 - DNA, 122 bp, Homo sapiens
  MAP TO CHR18.3; EXPRESSED IN PLACENTA, SIGNAL = 0.95; EXPRESSED IN FETAL LIVER, SIGNAL = 1.9; EST_HUMAN HIT: BF242199.1, EVALUE 5.90e-01; NT HIT: U75446.1, EVALUE 1.60e+00
atgagacctaacagtggatatccacggaggacagaaataaggaaagctgagaaatcaggttttgaactcagtttccaagtgagctatgatctaacaccatgccaccagcagcgagtgggaaa

SEQ ID NO: 26110 - DNA, 256 bp, Homo sapiens
  MAP TO CHR18.3; EXPRESSED IN PLACENTA, SIGNAL = 2.6; EXPRESSED IN HEART, SIGNAL = 2.4; EXPRESSED IN FETAL LIVER, SIGNAL = 2.9; SWISSPROT HIT: Q13636, EVALUE 5.00e-10; NT HIT: AF183421.1, EVALUE 1.00e-128; EST_HUMAN HIT: AA630331.1, EVALUE 0.00e+00
ccttggcctcctttttgttgcaggccgccagatcccacccttggacccccatgaaaatggaaacaatggaacaatcaaagttgagaagccaaccatgcaagccagccgccggtgctgttgacccaagggccgtggtccacggtacttgaagaagccagagcccacatcctgtgcactgctgaaggaccctacgctcggtggcctggcacctcactttgagaagagtgagcacactggctttgcatcctggaagacc

SEQ ID NO: 26111 - DNA, 199 bp, Homo sapiens
  MAP TO CHR18.3; EXPRESSED IN PLACENTA, SIGNAL = 0.82; NT HIT: gi14765948, EVALUE 1.00e-108; EST_HUMAN HIT: AU140596.1, EVALUE 1.00e-105; SWISSPROT HIT: P09114, EVALUE 2.20e-01
cttatgttgttggtagagtaatttctgtatgcagtcttcctgcatcagctgaaaagctgctttacacaagtggtccatgaggaagaggataggttgttctcggtaccagagatgctggcttatgagagcctgaacccagaactccaacacagcaacggggcccacttcattgggctgagtgcttacagatatgtgtgcc

SEQ ID NO: 26112 - DNA, 206 bp, Homo sapiens
  MAP TO CHR16.3; EXPRESSED IN PLACENTA, SIGNAL = 1.2; EXPRESSED IN FETAL LIVER, SIGNAL = 1.7; EST_HUMAN HIT: AU137474.1, EVALUE 1.00e-112; SWISSPROT HIT: P14943, EVALUE 6.00e-29; NT HIT: gi7262375, EVALUE 1.00e-112
ggccaggactcagccagtcccatccggaccacacacacggggcaggtgctggggagtcttgtccatgtgaagggcgccaatgccggggtccaaaccttcctgggaattccatttgccaagccacctctaggtccgctgcgatttgcaccccctgagccccctgaatcttggagtggtgtgagggatggaaccacccatccggccat

SEQ ID NO: 26113 - DNA, 157 bp, Homo sapiens
  MAP TO CHR18.3; EXPRESSED IN FETAL LIVER, SIGNAL = 1.2; EXPRESSED IN PLACENTA, SIGNAL = 0.83; EST_HUMAN HIT: R62753.1, EVALUE 2.00e-01; NT HIT: AB058699.1, EVALUE 1.40e-01
aaatggagagagaaaaattacagcacgccaaagagaacttattcaagaagacctgtccatgaaacacaattcaagatgggtaacacagaacaaagagcctcaaatagcattaacgacatttgttgagctgcaaaaggaagtaaaaggtcaagaaagg

SEQ ID NO: 26114 - DNA, 125 bp, Homo sapiens
  MAP TO CHR16.3; EXPRESSED IN PLACENTA, SIGNAL = 0.94; EXPRESSED IN BONE MARROW, SIGNAL = 0.74; EST_HUMAN HIT: BG031387.1, EVALUE 6.10e-01; NT HIT: AF321562.1, EVALUE 1.00e-01
gagaaataagcaccttactgcgtcctttaccctgaaaacccaccttggagagtctcttggcacggccaacccaagttggtccagccctgagcaactggagaaagaagcagatttagcttcagaag

SEQ ID NO: 26115 - DNA, 175 bp, Homo sapiens
  MAP TO CHR18.3; EXPRESSED IN PLACENTA, SIGNAL = 1.4; SWISSPROT HIT: O08715, EVALUE 2.50e+00; EST_HUMAN HIT: AL558190.1, EVALUE 3.00e-93; NT HIT: gi15304054, EVALUE 2.00e-93
cctttcatcatagagtgtttttgtgatacctcctcccggaatgcggatacaaaactcggaatcatctatttcaggaatgcaccggcttttttccatttcttcccagttaaggctctttattttattttgaacacttttttgcatggaaggtgtaagtaggtaccggaagggagta

SEQ ID NO: 26116 - DNA, 241 bp, Homo sapiens
  MAP TO CHR14.3; EXPRESSED IN PLACENTA, SIGNAL = 1.4; EXPRESSED IN FETAL LIVER, SIGNAL = 4.2; EXPRESSED IN LUNG, SIGNAL = 2.8; EXPRESSED IN BONE MARROW, SIGNAL = 1.8; SWISSPROT HIT: P54554, EVALUE 6.00e-12; NT HIT: gi16190404, EVALUE 0.00e+00; EST_HUMAN HIT: BF575655.1, EVALUE 0.00e+00
cccggagagcatgcttgctagcacagtatccaatggaaagaggtacagatatgatacccaggatgctattcacagtaacaatctttccttgcttcctctcgatcatgtgaggcagaacacattttgtcaaggacaccgtccctaagtagttaagctctattagctttctgtagacatccaagctggtatccatgcacagagaacgctgggacattccaccattgttgaccagaatgtcgat

SEQ ID NO: 26117 - DNA, 173 bp, Homo sapiens
  MAP TO CHR16.3; EXPRESSED IN PLACENTA, SIGNAL = 1.2; EXPRESSED IN LUNG, SIGNAL = 1.2; EXPRESSED IN BONE MARROW, SIGNAL = 1.1; SWISSPROT HIT: Q9NR09, EVALUE 2.50e+00; EST_HUMAN HIT: AW173030.1, EVALUE 1.00e-52; NT HIT: AF267747.1, EVALUE 6.00e-01
ctcagggcccgagggatgcatcactgagggagccacgactggtctctgggcctgacggtaaaccagggctgttaagtgttgcccaggtggccagcaagacaaataaggtgaggcgactggggtctacatcttgcattcctgtggccaaacggtcccttggaaggctggaaggc

SEQ ID NO: 26118 - DNA, 195 bp, Homo sapiens
  MAP TO CHR14.3; EXPRESSED IN PLACENTA, SIGNAL =   1; NT HIT: AF310674.1, EVALUE 2.70e+00; SWISSPROT HIT: P04734, EVALUE 4.90e-01; EST_HUMAN HIT: BE281157.1, EVALUE 6.50e-02
catcacaatcgccggtggaaatatcgggagtgttgcagaatctgtgtgccaagtgcactgactctcacaagaggctgcacgcggggctgtaagggtggctctggatgtgcctttggccaccagccttttcctctcaggggacagcgaggtgagggcagcctctagagaacaaagggcaaactgccctgcttccat

SEQ ID NO: 26119 - DNA, 212 bp, Homo sapiens
  MAP TO CHR19.3; EXPRESSED IN BONE MARROW, SIGNAL = 0.77; EXPRESSED IN HEART, SIGNAL = 1.6; EXPRESSED IN FETAL LIVER, SIGNAL = 1.6; EXPRESSED IN PLACENTA, SIGNAL = 1.8; NT HIT: gi16178937, EVALUE 8.00e-10; SWISSPROT HIT: P13889, EVALUE 1.90e+00; EST_HUMAN HIT: AW276240.1, EVALUE 9.00e-20
aggaggtgccccgcagaggaggcggtagccgtggtccctgtaaaccaggccttgctgacaaatgtcagacgccaagaacagaagaacggagagcttcagccaaatggaggaactgctggagcggctgagggtgaagctgcccaaactcctcaaagtggagcagcaaagcaaacaccagagaaggacaagaaaaatgaaagtcaaagaaaatt

SEQ ID NO: 26120 - DNA, 471 bp, Homo sapiens
  MAP TO CHR16.3; EXPRESSED IN PLACENTA, SIGNAL = 1.1; EXPRESSED IN FETAL LIVER, SIGNAL = 3.3; EXPRESSED IN BONE MARROW, SIGNAL =   2; NT HIT: gi15318913, EVALUE 0.00e+00; EST_HUMAN HIT: BE396070.1, EVALUE 0.00e+00
gtgactactgtgaagactggccagaggcacagaggatctcagcctcgctcctggacagccggtcctacgagacgctcgtggatttcgataaccacctggatgacattcggaatgactggacaaacccagagatcaataaagctgtcctacacttgtgctaggcaggcaccgctgtgactgggctccgggcctttccactacgttgaagaagaaaacctatttttaaatgtaaataaaatatcttgtagcctgtgtggaaagctgaccgttttaagaagtggcatgtgccttgaaagggggcagaatgttcagtcggtcgtgtttttaacacagagtctctagaagaggtgcagacatcccgtctgactgtccctgtggactctctcagttgtatgttgctataatcctccaaatcaaagctctttctgcttgtgcaagattgttcctattaaacagttttaactaaccttt

SEQ ID NO: 26121 - DNA, 111 bp, Homo sapiens
  MAP TO CHR18.3; EXPRESSED IN FETAL LIVER, SIGNAL = 1.7; EXPRESSED IN BONE MARROW, SIGNAL = 0.9; EXPRESSED IN PLACENTA, SIGNAL = 1.1; SWISSPROT HIT: Q99747, EVALUE 2.00e-14; NT HIT: gi14763395, EVALUE 5.00e-56; EST_HUMAN HIT: AA737428.1, EVALUE 7.00e-56
gagatgcagaaactaccagaggccgttcagctaattgagaaggccagcatgatgtatctagaaaacggcaccccagacacagcagccatggctttggagcgagctggaaag

SEQ ID NO: 26122 - DNA, 104 bp, Homo sapiens
  MAP TO CHR16.3; EXPRESSED IN PLACENTA, SIGNAL = 0.87; EXPRESSED IN BONE MARROW, SIGNAL = 0.8; EST_HUMAN HIT: BI198230.1, EVALUE 4.90e-01; NT HIT: U50993.1, EVALUE 3.30e-01
tgtgctcttgttgatgccattgccccaaagaagaccaacctctccttcttgcccatataagttggctctaatttcaatgctgctgaaaacctctcctcttccat

SEQ ID NO: 26123 - DNA, 153 bp, Homo sapiens
  MAP TO CHR14.3; EXPRESSED IN PLACENTA, SIGNAL = 0.86; NT HIT: gi14778960, EVALUE 2.10e+00; EST_HUMAN HIT: BI713710.1, EVALUE 4.00e-24; SWISSPROT HIT: P07962, EVALUE 5.80e+00
tcatcctgtagcgacggtggtattgactgttccccagaggacaaggagtgtgttcttatgtaagtcatagttgacattcttgtttttgattgggtagtttgcctgttcattgatgttcatagtactatagaaggtagataaatggccacatac

SEQ ID NO: 26124 - DNA, 96 bp, Homo sapiens
  MAP TO CHR16.3; EXPRESSED IN PLACENTA, SIGNAL = 1.1; NT HIT: gi13242472, EVALUE 1.20e+00
attccactcaatgagcatacgccctggggagcgtgggagatgggagatctgtccctcagtcagacgacttccatgaacttctttgagtggaagcat

SEQ ID NO: 26125 - DNA, 106 bp, Homo sapiens
  MAP TO CHR18.3; EXPRESSED IN BONE MARROW, SIGNAL = 0.94; EXPRESSED IN PLACENTA, SIGNAL =   1; EST_HUMAN HIT: BI765099.1, EVALUE 3.20e-02; SWISSPROT HIT: P17056, EVALUE 6.10e+00; NT HIT: gi11422684, EVALUE 1.30e+00
tcttttgaataccacctcccctttggactccacgggaatttggacaataattgtgatgggtttggcaggggcttgggggttgggctgctcatatattatgaaaagc

SEQ ID NO: 26126 - DNA, 195 bp, Homo sapiens
  MAP TO CHR16.3; EXPRESSED IN PLACENTA, SIGNAL = 0.94; SWISSPROT HIT: Q99677, EVALUE 5.70e-02
cttgatgccctgaaagtttcccttccagccctgttttaagatagcataaacacacaatgacaatttgattttaaaattccatgtctcatataaactgtggcaaacctgtgctatagatgacaacaatataatccagccaccacagcaaacagatgcactagtcctgagtatattttggaaattggaaatgagcat

SEQ ID NO: 26127 - DNA, 103 bp, Homo sapiens
  MAP TO CHR18.3; EXPRESSED IN PLACENTA, SIGNAL = 1.2; NT HIT: gi14762320, EVALUE 2.00e-51; EST_HUMAN HIT: BI767347.1, EVALUE 4.00e-51
gatcccggctactcaacagaaatgaaggaggaatctgtaaagaaacaccagtatccagatggtgaagtttggaagaaactccttcctgctcaagaaaattaag

SEQ ID NO: 26128 - DNA, 251 bp, Homo sapiens
  MAP TO CHR16.3; EXPRESSED IN PLACENTA, SIGNAL = 1.8; EST_HUMAN HIT: BE903079.1, EVALUE 0.00e+00; SWISSPROT HIT: P23762, EVALUE 2.00e-03; NT HIT: gi14778133, EVALUE 0.00e+00
ggggaagctgctcgctgatctggccaggcgcctgggcctccactatgtggtctacagcggcctggagaacatcaagaagctgacggcagggagattggccgccgcgcactttgacggcaaaggggaggtggaggaatatttccgggacattggcgttcccatgaccagtgtgcggctgccctgctattttgagaacctcctctcccacttcttgccccagaaagccccagacggaaagagctacttgctga

SEQ ID NO: 26129 - DNA, 218 bp, Homo sapiens
  MAP TO CHR14.3; EXPRESSED IN LUNG, SIGNAL = 1.6; EXPRESSED IN BONE MARROW, SIGNAL =   1; EXPRESSED IN PLACENTA, SIGNAL = 1.1; EST_HUMAN HIT: BF337375.1, EVALUE 7.30e-02; SWISSPROT HIT: P09762, EVALUE 5.20e+00
ctgagcactcccggggcttgggctctggtccctgctaatcctcagagccgatgaaaactggtcataggataaagaagcagccaaatctgcagcaggcagagaggggaggcaggaactggagaggacgcgagtggtgggcggcaggggtggtgtgcagggtgatgtccaccaagcagagagggttccttgtttcccagagccgaacacaggaaaatcag

SEQ ID NO: 26130 - DNA, 179 bp, Homo sapiens
  MAP TO CHR16.3; EXPRESSED IN FETAL LIVER, SIGNAL = 0.84; EXPRESSED IN PLACENTA, SIGNAL = 1.3; EST_HUMAN HIT: AW369274.1, EVALUE 3.00e-96; NT HIT: gi14775392, EVALUE 2.00e-96; SWISSPROT HIT: Q14694, EVALUE 4.00e-17
aacttacgatttccaacggccccaaaaaccactcggtcaatgaagaagagcaggaagaacaaggtgaaggaagcgaggatgaatgggaacaagtgggcccccggaacaagacttccgtcacccgccaggcggattttgttcagactccaatcaccggcatttttggtggacacatcagg

SEQ ID NO: 26131 - DNA, 157 bp, Homo sapiens
  MAP TO CHR19.3; EXPRESSED IN PLACENTA, SIGNAL = 0.92; SWISSPROT HIT: Q9Y3A6, EVALUE 4.40e+00; NT HIT: gi16160096, EVALUE 8.40e+00; EST_HUMAN HIT: BG030980.1, EVALUE 3.10e+00
atgtcacacagcgggtacacggggagccggggtttaaaggagtgttttcatgaccctaatcccctggccgctgacctccaggctcagagcctgactcatgtagaatatgccaggcccttagtggctgtgggctggctttgtgcccagaaccagggac

SEQ ID NO: 26132 - DNA, 195 bp, Homo sapiens
  MAP TO CHR16.3; EXPRESSED IN HEART, SIGNAL = 4.2; EXPRESSED IN FETAL LIVER, SIGNAL =  16; EXPRESSED IN PLACENTA, SIGNAL = 3.3; SWISSPROT HIT: Q9Y618, EVALUE 5.90e-02; EST_HUMAN HIT: AW961688.1, EVALUE 1.00e-103; NT HIT: AF129082.1, EVALUE 1.70e-01
acgatcctacacctgccacctccgatggatccactgcctctgtgcctgcctgtactgctgatgctccagtggataactcagcatcccagcctaggcccaatgccactgaagatggaccttccccctggggacccaggagtcctaccactcagctgtccccaggagtgcccagaccctcattcttatccaggacct

SEQ ID NO: 26133 - DNA, 104 bp, Homo sapiens
  MAP TO CHR18.3; EXPRESSED IN PLACENTA, SIGNAL = 1.1; EXPRESSED IN FETAL LIVER, SIGNAL = 1.3; EXPRESSED IN LUNG, SIGNAL = 1.2; EXPRESSED IN BONE MARROW, SIGNAL = 1.3; NT HIT: AF297877.1, EVALUE 3.30e-01; EST_HUMAN HIT: T66273.1, EVALUE 1.90e+00
tgggcttttggagtttgccaagaaatctgaagtcagtatgaacttcgtttctagcatcatcattattaaaacttcacctacgattaactgtgataaggtacaag

SEQ ID NO: 26134 - DNA, 140 bp, Homo sapiens
  MAP TO CHR16.3; EXPRESSED IN PLACENTA, SIGNAL =   1; EXPRESSED IN FETAL LIVER, SIGNAL = 1.3; NT HIT: gi7656972, EVALUE 1.90e+00; EST_HUMAN HIT: BI752847.1, EVALUE 4.00e-73; SWISSPROT HIT: P53706, EVALUE 5.90e+00
ctctcccggaagtacttgatggcctcagggtctatgaaggtcggctcttcccggtagccctgctcaaagaccttgcgcttgtgccggaactcaatgaccgtcttggtgtaggagttgagcgtggtgacagaggctgccat

SEQ ID NO: 26135 - DNA, 138 bp, Homo sapiens
  MAP TO CHR14.3; EXPRESSED IN PLACENTA, SIGNAL = 1.1; SWISSPROT HIT: P71613, EVALUE 2.60e+00; EST_HUMAN HIT: BG741512.1, EVALUE 6.90e-01
aagggaaggaggagccgtcggagcttggggctaaggactctcaagaagacccaccggcccaggatgctgcagccacccacggccataaggcaggggcggggccccctcgctgctggacctcctcctcggaggatctcg

SEQ ID NO: 26136 - DNA, 150 bp, Homo sapiens
  MAP TO CHR18.3; EXPRESSED IN FETAL LIVER, SIGNAL = 1.4; EXPRESSED IN BONE MARROW, SIGNAL = 1.4; EXPRESSED IN PLACENTA, SIGNAL = 0.97; EXPRESSED IN LUNG, SIGNAL = 0.99; SWISSPROT HIT: P22706, EVALUE 1.20e+00
aggagcggcacatccatcagcaaatcgggctctgacattatttcagcttcctgcctttctcccccaatccacttcatcctgttaaaagcaccttcttgagacacagttgacataattttggctttaatattctctcttgtgaatttactc

SEQ ID NO: 26137 - DNA, 214 bp, Homo sapiens
  MAP TO CHR14.3; EXPRESSED IN PLACENTA, SIGNAL = 1.4; EXPRESSED IN HEART, SIGNAL = 2.6; EXPRESSED IN FETAL LIVER, SIGNAL = 1.7; EST_HUMAN HIT: W22201.1, EVALUE 1.00e-116; NT HIT: gi15300984, EVALUE 1.00e-116; SWISSPROT HIT: Q9JHU4, EVALUE 4.00e-36
gtaaaccggagcactgctcttctgaagagcttgtctgctgaacgtgaacgatgggaaaaaacaagtgaaactttcaaaaaccagatgtccaccattgctggggactgtctcttgtcagctgcgttcattgcctacgcgggttactttgaccagcagatgcgtcagaacttgttcactacctggtcccatcacctacagcaagccaacatccagg

SEQ ID NO: 26138 - DNA, 289 bp, Homo sapiens
  MAP TO CHR18.3; EXPRESSED IN LUNG, SIGNAL = 1.3; EXPRESSED IN FETAL LIVER, SIGNAL = 1.4; EXPRESSED IN PLACENTA, SIGNAL = 0.94; EST_HUMAN HIT: BG685891.1, EVALUE 6.00e-03; SWISSPROT HIT: Q02308, EVALUE 4.90e-01
ctgccgctcacctgtgtacacctccagagaaactgagggttttaagtgccaaggttccccaggtggcctctcatgcctatttctctggtgcttgtccatgccttgagtttccagggcagatagagctgccacatcctctcctgtgggcttcttcagtagtgcaggtctctgctccacctctggcagggtctctcctccagcaggcagcaggtcccccacctctccctttggtttctggtgtcctgctgtgggccagacaagccattttctctttccttctctctcctgt

SEQ ID NO: 26139 - DNA, 187 bp, Homo sapiens
  MAP TO CHR18.3; EXPRESSED IN PLACENTA, SIGNAL = 0.86; EXPRESSED IN BONE MARROW, SIGNAL = 0.81; NT HIT: gi14761458, EVALUE 1.00e-100; SWISSPROT HIT: Q02487, EVALUE 2.00e-30; EST_HUMAN HIT: BE000097.1, EVALUE 6.00e-73
cttaactacacaaagaactccttcattggttttggcatctgttacaattttaaaattgccattttcattgccctttaaaatggtataattagctctccagttagcagtattcactaagtccttatcctcaacagtaactcgtaagatttccacatcaactgtattttcttccactgatgtcacatac

SEQ ID NO: 26140 - DNA, 141 bp, Homo sapiens
  MAP TO CHR14.3; EXPRESSED IN PLACENTA, SIGNAL = 0.89; NT HIT: AL163207.2, EVALUE 1.90e+00; SWISSPROT HIT: P78008, EVALUE 5.90e+00; EST_HUMAN HIT: BG105577.1, EVALUE 1.10e-02
tgaatgtcatggaactgaaagaaattgataaaaatttcagtttccatgtagcagaaaatatcactaaaatcttgaaatttcatgaagttattgtggacagttgtaaatatgatcatagaacaacaaagcaagagctaattt

SEQ ID NO: 26141 - DNA, 174 bp, Homo sapiens
  MAP TO CHR19.3; EXPRESSED IN BONE MARROW, SIGNAL = 0.87; EXPRESSED IN PLACENTA, SIGNAL = 0.89; EST_HUMAN HIT: BG708686.1, EVALUE 3.00e-93; NT HIT: gi4507336, EVALUE 3.00e-92; SWISSPROT HIT: O00445, EVALUE 1.00e-28
ccttgtctatgtaactctggcccagccccttcacttcctgaaggtggacctgggcttgggcctggctcttcttgcctgtccgcctccgacagctcttccggtagagacagaaacagcagctgaagatgaggaggcctgagaccagcacgatggtggccagggcccaggggggca

SEQ ID NO: 26142 - DNA, 214 bp, Homo sapiens
  MAP TO CHR14.3; EXPRESSED IN BONE MARROW, SIGNAL = 1.1; EXPRESSED IN PLACENTA, SIGNAL = 0.9; NT HIT: X94328.1, EVALUE 1.90e-01; SWISSPROT HIT: O95377, EVALUE 4.80e+00; EST_HUMAN HIT: H84258.1, EVALUE 7.10e-02
ctccctattgcctgtaattccactattgggtcaattctatttggattaataagcatcgctcattcattattgtcatctgctaaaacacagattcctgaaaggactaacaatttgattagcaacaatttagtggaattggtttatgatgtattcagccagtgtgagtgcctactcactaggaagtcagatacaatagaaacaagaacttgtcaag

SEQ ID NO: 26143 - DNA, 82 bp, Homo sapiens
  MAP TO CHR14.3; EXPRESSED IN BONE MARROW, SIGNAL = 0.66; EXPRESSED IN PLACENTA, SIGNAL = 0.91; NT HIT: AJ276674.1, EVALUE 3.00e-04
taattatctgttttctgcattccattgtttgtgttgagaagccacatgacagtctcctttgaaggtaattcaaaccttttcc

SEQ ID NO: 26144 - DNA, 252 bp, Homo sapiens
  MAP TO CHR14.3; EXPRESSED IN PLACENTA, SIGNAL = 1.2; NT HIT: gi14786385, EVALUE 1.50e-02; SWISSPROT HIT: P36710, EVALUE 2.40e+00
catgccaagtggattctagggggaggtgcaaggaccttcaaggagctactgggagcatcttggcagctgaccttgtctacatcagtgctttctacaacatcatcatgacagatggcacttacattgccattctcactggccatcattggctcaagaccagtaaaatcaccaagattctccagcatgttaatatgttggtacaacatggccacactggtaaatttcttttgactgatgagacacaactttatt

SEQ ID NO: 26145 - DNA, 242 bp, Homo sapiens
  MAP TO CHR14.3; EXPRESSED IN PLACENTA, SIGNAL = 1.1; EXPRESSED IN BONE MARROW, SIGNAL = 0.7; NT HIT: gi14750575, EVALUE 8.00e-63; SWISSPROT HIT: P18131, EVALUE 2.30e+00; EST_HUMAN HIT: BE176500.1, EVALUE 1.00e-62
ctgatgctattgtagcatttattagcaagatcattagggaaatgtaaaaatgcaacaccctttctttcacattaacatctgaaaagaaaaaacaaaaaccactctaagtgtccaaatattggaaaaaaagaagcaagcggaggtcccgaattcttgtaaaaactgctgaacaaactcttcagtttctcttaagaagagtcaccaggataggcagtttctcaacatttgtgcttcatggcaag

SEQ ID NO: 26146 - DNA, 177 bp, Homo sapiens
  MAP TO CHR14.3; EXPRESSED IN FETAL LIVER, SIGNAL = 1.2; EXPRESSED IN PLACENTA, SIGNAL = 0.97; EXPRESSED IN LUNG, SIGNAL = 1.2; SWISSPROT HIT: P28081, EVALUE 2.50e+00; NT HIT: J03764.1, EVALUE 1.60e-01
acctctcacactcctgtgtaggaagatgggacttggataaaaagtttttactcccaatggcccaatgcacaaaccagaggaaagagagagaaaattgttctgtgttctggtcattgggtaatgcatctgaaatccagttcaaagtgtcatacttacggtaattgggtttctcctttt

SEQ ID NO: 26147 - DNA, 105 bp, Homo sapiens
  MAP TO CHR14.3; EXPRESSED IN LUNG, SIGNAL = 1.6; EXPRESSED IN PLACENTA, SIGNAL = 0.95; SWISSPROT HIT: P05844, EVALUE 1.20e+00
ctgcagaaaaggctgggctcccagacttcagagtccttgggtgtgtgcaggcacagcccgcagtggcaggccacagatgccttcgtggaggatgccagagcctgc

SEQ ID NO: 26148 - DNA, 105 bp, Homo sapiens
  MAP TO CHR18.3; EXPRESSED IN PLACENTA, SIGNAL = 0.9; SWISSPROT HIT: O14834, EVALUE 3.00e-15; EST_HUMAN HIT: BI963007.1, EVALUE 2.00e-52; NT HIT: gi14760605, EVALUE 2.00e-52
cctgaagaaaaacatgacagtacatggatcgtataactcatacattttgttgaagtcaggcacttctgtaatatccacaagataaataactgcaaaatttttaac

SEQ ID NO: 26149 - DNA, 141 bp, Homo sapiens
  MAP TO CHR14.3; EXPRESSED IN PLACENTA, SIGNAL = 0.93; NT HIT: U04955.1, EVALUE 4.80e-01; SWISSPROT HIT: P43854, EVALUE 2.00e+00; EST_HUMAN HIT: AW511273.1, EVALUE 1.80e-01
cgatgcaattacccagttggcgataaaaagcactgtgctctggctggtctccagtaagtccaactgtaacactgatgagggactggtcacctctgagaaggacaaggagtccactcctatcaattcctctatttccttcat

SEQ ID NO: 26150 - DNA, 176 bp, Homo sapiens
  MAP TO CHR14.3; EXPRESSED IN PLACENTA, SIGNAL = 0.85; NT HIT: AJ250754.1, EVALUE 6.10e-01; SWISSPROT HIT: P23090, EVALUE 7.40e+00
tgaaaactaacagtgaaggtaatgatttcttacatgaacaaacaaaactggatttatacactgccctgttaccagaggtaggacctaaattaagggggaatcttgaagttgtgtggttccagttctgccttgttcttactatcgactactggttggtgtcttcacatactgataag

SEQ ID NO: 26151 - DNA, 130 bp, Homo sapiens
  MAP TO CHR18.3; EXPRESSED IN HEART, SIGNAL = 1.5; EXPRESSED IN FETAL LIVER, SIGNAL = 0.97; EXPRESSED IN PLACENTA, SIGNAL = 0.92; SWISSPROT HIT: Q9U6A1, EVALUE 4.60e+00; EST_HUMAN HIT: AI936828.1, EVALUE 2.50e+00; NT HIT: AL161563.2, EVALUE 1.70e+00
caagtgcgagtcaacaggaattttccggaaagcatcagattattttgaatcttgcagatgccagccccacataagccaacgttaatccatcctgctttatccatctgcccttcatcctctgggatgagat

SEQ ID NO: 26152 - DNA, 82 bp, Homo sapiens
  MAP TO CHR16.3; EXPRESSED IN BONE MARROW, SIGNAL = 0.61; EXPRESSED IN PLACENTA, SIGNAL = 1.2; EST_HUMAN HIT: BG323963.1, EVALUE 3.60e-01; NT HIT: AJ251835.1, EVALUE 2.50e-01
atggcacattttgatggcttggtctcggtgtgtacattaccagctcgtgtcaagaatgtggcagttgttcagtgcctgctgg

SEQ ID NO: 26153 - DNA, 159 bp, Homo sapiens
  MAP TO CHR16.3; EXPRESSED IN PLACENTA, SIGNAL = 1.1; EXPRESSED IN LUNG, SIGNAL = 1.9; SWISSPROT HIT: Q9YHZ7, EVALUE 2.60e+00; NT HIT: AE000689.1, EVALUE 1.40e-01
ttctttctgaaaatggttggccaactgaggcgtttctgggtattccatcaggccagttacaaggaacccaatttgcccaagggatggaggatcatgggagattccttgggagatgaagagatgaagacccctggagtatccgatgagctttgcatccat

SEQ ID NO: 26154 - DNA, 142 bp, Homo sapiens
  MAP TO CHR19.3; EXPRESSED IN PLACENTA, SIGNAL = 1.1; EXPRESSED IN LUNG, SIGNAL =   1; SWISSPROT HIT: Q60875, EVALUE 5.90e+00; NT HIT: gi14770438, EVALUE 4.80e-01; EST_HUMAN HIT: AA428098.1, EVALUE 3.00e-74
ttcccttgaccaatcttactgagaatggcctgatgtgccccgcctgcactgcgagcttcagggacaaatgcatggggcccatgacccactgtactggaaaggaaaaccactgcgtctccttatctggacacgtgcaggctgg

SEQ ID NO: 26155 - DNA, 315 bp, Homo sapiens
  MAP TO CHR19.3; EXPRESSED IN HEART, SIGNAL =  93; EXPRESSED IN FETAL LIVER, SIGNAL = 1.3e+02; EXPRESSED IN BONE MARROW, SIGNAL =  33; EXPRESSED IN PLACENTA, SIGNAL =  17; EST_HUMAN HIT: BF816964.1, EVALUE 1.00e-117; SWISSPROT HIT: P12970, EVALUE 5.00e-46; NT HIT: X06705.1, EVALUE 1.00e-115
cttccccttgataatgcagtaagggactccccttttatgacacagggcaggcaagaagacaaccagcttgatgggatccacatcatgcgcaatcaccaccagctgaactttctttttctccaccaaggtggtgacagtgttaattcctgctcgaaggacacgtggtctcttaataaggatgtcccctttgtcagcagctttcttctcggcccgggccaacagcctctgcttctcctcttgctttgtctctggtctgtacttgtaggctagcttaagcagctgagtagctgtttggtggtccaggccctgggtgaa

SEQ ID NO: 26156 - DNA, 123 bp, Homo sapiens
  MAP TO CHR16.3; EXPRESSED IN PLACENTA, SIGNAL = 1.4; SWISSPROT HIT: P55089, EVALUE 3.10e-01; NT HIT: gi11431277, EVALUE 1.00e-62; EST_HUMAN HIT: BE061171.1, EVALUE 2.00e-07
tccctgagcagagggacctgcacacagagactccctcctgggctcctggcaccatggccccactgaagatgctggccctggtcaccctcctcctgggggcttctctgcagcacatccacgcag

SEQ ID NO: 26157 - DNA, 247 bp, Homo sapiens
  MAP TO CHR14.3; EXPRESSED IN PLACENTA, SIGNAL = 0.9; EXPRESSED IN BONE MARROW, SIGNAL = 1.6; SWISSPROT HIT: O35276, EVALUE 2.10e-01; NT HIT: AF164794.1, EVALUE 8.90e-01; EST_HUMAN HIT: BI055098.1, EVALUE 1.30e+00
gtcaactatttacatgggaaggaaaaacataccccgcaactacaacctgatgtcagtaccaagagcagtatgcaaacgactattacgggcgctcagaagcatcacaatggaagggaagttgcagctgcctatacccacacccacatcttgtctacctgcctgctgcgtcacagcctggctgcattactgggctcacttcagttccaagaaagcttccagaaatcatggcaggcacacctgcagtgag

SEQ ID NO: 26158 - DNA, 260 bp, Homo sapiens
  MAP TO CHR19.3; EXPRESSED IN LUNG, SIGNAL = 3.8; EXPRESSED IN BONE MARROW, SIGNAL = 9.3; EXPRESSED IN PLACENTA, SIGNAL = 3.7; SWISSPROT HIT: P25118, EVALUE 2.00e+00; NT HIT: gi7019370, EVALUE 0.00e+00; EST_HUMAN HIT: BI916109.1, EVALUE 0.00e+00
ggaccatggcagccgtgggctttgaggagttctcagcgccgccaggctcagagttggcgttgcctcccctatttggtggccacatcctggagagcgagctggagacggaagtggagtttgtgtcaggtggtctgggcggctcagggctccgggagcgagatgaagaggaagaggcagcccggggtcggcggcggcgccagcgggaattaaatcgcagaaagtaccaggcactaggtcggcgctgccgggagatcgagcag

SEQ ID NO: 26159 - DNA, 380 bp, Homo sapiens
  MAP TO CHR19.3; EXPRESSED IN PLACENTA, SIGNAL = 1.2; EXPRESSED IN FETAL LIVER, SIGNAL = 1.2; EXPRESSED IN BONE MARROW, SIGNAL =   1; EST_HUMAN HIT: AI655137.1, EVALUE 0.00e+00; NT HIT: AF298547.1, EVALUE 0.00e+00
atttgtgaatgctctcacctttatttctctcaatatacccgtgatacagatatttcatatgtaacaaagataaggatgtgtgcaggtataaaacagaggcagaatcatggctaaaacatctagcccagcaatgaactcattatccctgaggggtaggggccggggaggagaggagtcacaggcagttcaccaacacctggaaaatcgatgacttcatggagaatgaatgactcggggggattcagatcatgaagtcatgagaagaaggcctttctgcccagggatgatgtttctcagtatcaataatcagttgtgggtttttttcttctatttcttccagcagcttattgagttcatcattaaagtcatcgattttcaac

SEQ ID NO: 26160 - DNA, 250 bp, Homo sapiens
  MAP TO CHR16.3; EXPRESSED IN PLACENTA, SIGNAL = 1.1; EST_HUMAN HIT: BI599802.1, EVALUE 1.00e-126; SWISSPROT HIT: O00506, EVALUE 5.60e-02; NT HIT: gi14779287, EVALUE 0.00e+00
tattgggctgttgagcgggggccgaccgacggccaggagtttcttttctgcgcttgtgcgttttctgttcggtttccttcccgctagcggggccacgagggttgctaggcaacagcccctgggtgacttggtcttagggtcctgtccggcttggggctgatgaaaggagctgtccgcgcccgggctcttccgagaagtggttgctgacagccacaaagtgaaagggagtgaggcggcgtggacgagtaag

SEQ ID NO: 26161 - DNA, 108 bp, Homo sapiens
  MAP TO CHR16.3; EXPRESSED IN PLACENTA, SIGNAL = 1.1; EXPRESSED IN BONE MARROW, SIGNAL = 1.1; EXPRESSED IN FETAL LIVER, SIGNAL = 2.9; EXPRESSED IN LUNG, SIGNAL =   1; SWISSPROT HIT: Q62625, EVALUE 1.00e-13; EST_HUMAN HIT: BI599270.1, EVALUE 4.00e-54; NT HIT: gi13699866, EVALUE 3.00e-54
ggtgataatagaacgatacaagggtgagaagcagcttcctgttctggataaaacaaagttccttgtacctgaccatgtcaacatgagtgagctcatcaagataattag

SEQ ID NO: 26162 - DNA, 138 bp, Homo sapiens
  MAP TO CHR16.3; EXPRESSED IN PLACENTA, SIGNAL = 1.2; EXPRESSED IN LUNG, SIGNAL = 1.1; NT HIT: X15215.1, EVALUE 1.80e+00; SWISSPROT HIT: Q10568, EVALUE 2.60e+00
ttcctggctcaacccagcctgtgctaactgataacccctctgaagaattttctgaagttgaattgcaaaggtctccgtaggggtcttgcctgcttcaataaaagcgtcttctagttttgttatttctgccaggtacat

SEQ ID NO: 26163 - DNA, 98 bp, Homo sapiens
  MAP TO CHR19.3; EXPRESSED IN PLACENTA, SIGNAL = 1.6; EXPRESSED IN HEART, SIGNAL = 1.9; EXPRESSED IN FETAL LIVER, SIGNAL = 2.4
catcgcagctcttgttcatgtccttgaattgatctctgcattgcttctcactcaagatgatggcagccatgtacctctgattgttcgtgtagatgacc

SEQ ID NO: 26164 - DNA, 226 bp, Homo sapiens
  MAP TO CHR19.3; EXPRESSED IN HEART, SIGNAL =   4; EXPRESSED IN FETAL LIVER, SIGNAL = 3.8; EXPRESSED IN PLACENTA, SIGNAL = 3.3; NT HIT: gi13489053, EVALUE 1.00e-118; SWISSPROT HIT: P36507, EVALUE 3.00e-30; EST_HUMAN HIT: BE548107.1, EVALUE 1.00e-118
tcaggccgtaccgctgacggggcgcccggggggcctcggccgaggcgagatgctgtgaggctctccttcttccccgtcgaccacgggccggccaaagatggcctccagctctttggcgtcgggcggggggatggggtaccttccgacggccagctccaccagggacaggcccatgctccagatgtccgactgcaccgagtaatgtgtgccctgcaaccgctccggc

SEQ ID NO: 26165 - DNA, 175 bp, Homo sapiens; identical to SEQ ID NO: 25517
  MAP TO CHR14.3; EXPRESSED IN PLACENTA, SIGNAL = 0.91; EXPRESSED IN LUNG, SIGNAL = 1.4; NT HIT: D89784.1, EVALUE 1.50e-01; SWISSPROT HIT: P46939, EVALUE 6.60e-01; EST_HUMAN HIT: BF376527.1, EVALUE 7.00e-57

SEQ ID NO: 26166 - DNA, 144 bp, Homo sapiens
  MAP TO CHR18.3; EXPRESSED IN PLACENTA, SIGNAL = 1.7; SWISSPROT HIT: P03585, EVALUE 8.90e-01; EST_HUMAN HIT: BF945575.1, EVALUE 1.00e-67; NT HIT: X17369.1, EVALUE 7.00e-71
ccaaatcctggtctctggccttcggccccctgcaagagaagaccacggagctcaacctccacccgcggtgctgggcacgctgcttgagccactgggagctgccaccagggccccggggaagggcccaggccccggactggactg

SEQ ID NO: 26167 - DNA, 153 bp, Homo sapiens
  MAP TO CHR16.3; EXPRESSED IN PLACENTA, SIGNAL =   1; SWISSPROT HIT: Q9Y493, EVALUE 6.70e-01; EST_HUMAN HIT: BI835866.1, EVALUE 1.00e-39; NT HIT: AJ251835.1, EVALUE 1.30e-01
gtgtcagctcgcaactgcttttcctctttggccctcagattctccccattctatatgaagctggaagctccccaagccatcactggcagcttgggcagaagctggagggccttctgagacaggtgggcgaggtctgccgccaggacatccagg

SEQ ID NO: 26168 - DNA, 367 bp, Homo sapiens
  MAP TO CHR19.3; EXPRESSED IN PLACENTA, SIGNAL =  82; EST_HUMAN HIT: AL549827.1, EVALUE 0.00e+00; SWISSPROT HIT: P11464, EVALUE 5.00e-57; NT HIT: gi14765248, EVALUE 0.00e+00
gcatcacttttaaacttctggaacctgcccaccactgcccaagtcacgattgaagccgagccaaccaaagtttccgaggggaaggatgttcttctacttgtccacaatttgccccagaatcttaccggctacatctggtacaaagggcaaatgagggacctctaccattacattacatcatatgtagtagacggtgaaataattatatatgggcctgcatatagtggacgagaaacagcatattccaatgcatccctgctgatccagaatgtcacccgggaggacgcaggatcctacaccttacacatcataaagggagatgatgggactagaggagtaactggacgtttcaccttcaccttacacc

SEQ ID NO: 26169 - DNA, 328 bp, Homo sapiens
  MAP TO CHR14.3; EXPRESSED IN BONE MARROW, SIGNAL = 1.9; EXPRESSED IN PLACENTA, SIGNAL = 0.99; SWISSPROT HIT: Q92692, EVALUE 1.10e+00; EST_HUMAN HIT: BF934344.1, EVALUE 4.50e-01; NT HIT: X53297.1, EVALUE 7.70e-02
ttacatcttttttcttgtggggagtgattcttttgtacaatatatttcagtaaatactgcttttcttttgcaaagagatgagacagatgcaagattactgtcaatttttcctgtcttctctccacccctccttcttttctggggggtgggaggagaccaagtggggaccgtttcaatatttgtcctgggagagagggtggtagtgggcaaacctgtggtcaattgcctgcaaggagtcactgtggtacttggttttattttaatgaagccagaatcaatatgctcaattccagtgagaattataaacagtgtgtcgttcagaattcct

SEQ ID NO: 26170 - DNA, 160 bp, Homo sapiens
  MAP TO CHR14.3; EXPRESSED IN PLACENTA, SIGNAL = 1.1; NT HIT: AF119875.1, EVALUE 5.50e-01; SWISSPROT HIT: P11993, EVALUE 1.50e+00; EST_HUMAN HIT: AL559896.1, EVALUE 8.10e-01
atggaatcagctcagggctgctggctcggctcacacacccacctactgaggcgtcagcgttccacagcacaccagagcaggaccatttcagtaacgactcagaagacgtcaggacaattctgactgaacacagaattctccctgaaattgctatatgcag

SEQ ID NO: 26171 - DNA, 120 bp, Homo sapiens
  MAP TO CHR14.3; EXPRESSED IN LUNG, SIGNAL = 1.5; EXPRESSED IN FETAL LIVER, SIGNAL = 0.85; EXPRESSED IN PLACENTA, SIGNAL =   1; EST_HUMAN HIT: BG613859.1, EVALUE 5.80e-01; NT HIT: Y08501.1, EVALUE 1.00e-01
gatggtagaatattaggtatttacaaggtccagctttgtgaagaccaaaaaactggtccaagagatagggaaacagctgaagaggttgatggtctatatgtcgatcaagctgaagtcaag

SEQ ID NO: 26172 - DNA, 184 bp, Homo sapiens
  MAP TO CHR14.3; EXPRESSED IN FETAL LIVER, SIGNAL = 1.1; EXPRESSED IN PLACENTA, SIGNAL = 1.7; NT HIT: gi15300602, EVALUE 2.00e-99; SWISSPROT HIT: Q92870, EVALUE 1.10e+00
atgccctgctggacatgcccttcctttgactccctggggagatgccctctgacttctgagagcagctggaccacccattctgaagacaccagcagtcctagctttggatgttcgtatacagatctgcagctcatcaatgctgaggagcagacgagtggccaggcttctggggctgactcaactg

SEQ ID NO: 26173 - DNA, 171 bp, Homo sapiens
  MAP TO CHR14.3; EXPRESSED IN PLACENTA, SIGNAL = 0.87; NT HIT: AF179713.1, EVALUE 3.80e-02; SWISSPROT HIT: P25235, EVALUE 5.70e+00; EST_HUMAN HIT: AW957566.1, EVALUE 5.60e-02
gaatggatattgagcacctcacaccatctattgatagagaactttacagtttacagagtggttttatagcaattgtcttatttctggtgacttctgaggcttctatcatgataataaagatattcataaaaataatgtggatgttcagatgcccggtccatatggtggact

SEQ ID NO: 26174 - DNA, 124 bp, Homo sapiens
  MAP TO CHR19.3; EXPRESSED IN PLACENTA, SIGNAL = 1.2; EXPRESSED IN LUNG, SIGNAL = 1.5; EXPRESSED IN FETAL LIVER, SIGNAL = 1.1; EXPRESSED IN BONE MARROW, SIGNAL = 1.3; SWISSPROT HIT: Q9VD51, EVALUE 6.00e+00; EST_HUMAN HIT: BI766244.1, EVALUE 2.00e-59; NT HIT: Z75113.1, EVALUE 1.00e-01
atccaggagtgggagacgcggatctttacccacagtaagaatgtcaggtccccgggattcatcctggatcagaaggtcaagatcaggcgaaggatcaggatcctagaaaaccagttggacaggg

SEQ ID NO: 26175 - DNA, 322 bp, Homo sapiens
  MAP TO CHR14.3; EXPRESSED IN PLACENTA, SIGNAL = 0.86; EXPRESSED IN BONE MARROW, SIGNAL = 1.1; EST_HUMAN HIT: BI758394.1, EVALUE 1.70e+00; NT HIT: AB026906.1, EVALUE 3.00e-01; SWISSPROT HIT: P27551, EVALUE 5.90e-01
atggtgagagggcaggatcccgaaggggccccaaaccgtacctctcagtgtgcgcctccttcaggcgatttcccaccccatccccgtcttctctgccattcaaaggggcaagggtgtgtaggagaggaggtagggagattcctctctcccgaggatccctggcagaggggcctggcactgcaggggtgcatgcgagaagtgggtgcacgtccgcagagcttgggtgggcagcaacgagagggcttgggtgggcgagaagagaaggcatgggctgcttgcactcattttattccaaccccacagaatgcggctcaaccacgag

SEQ ID NO: 26176 - DNA, 100 bp, Homo sapiens
  MAP TO CHR18.3; EXPRESSED IN PLACENTA, SIGNAL = 1.2; EXPRESSED IN BONE MARROW, SIGNAL = 1.1; EST_HUMAN HIT: BG399979.1, EVALUE 3.00e-02; NT HIT: Y08924.1, EVALUE 2.00e-02
ctgcatgaagaaaaacaacttctgaaattgccattgtagaaaataatgtaaccatttcttcagactggcttttgtttctttttttctctctgatgttttt

SEQ ID NO: 26177 - DNA, 179 bp, Homo sapiens
  MAP TO CHR18.3; EXPRESSED IN PLACENTA, SIGNAL = 1.1; EXPRESSED IN LUNG, SIGNAL = 1.2; EST_HUMAN HIT: H18030.1, EVALUE 9.20e-01; NT HIT: Z74289.1, EVALUE 6.30e-01; SWISSPROT HIT: Q10043, EVALUE 2.20e-01
caggaaagatcagagatgacctcacagatgtgggtgtccttcccacagtggagagaatagaatcgatgggcacggaagatgtatccaaggagaaatgacacaatgaggggctcggtgtcaaatcggaaggaacgccaacacacagtgacaagtggaaaagagaaatcacccaaggagcg

SEQ ID NO: 26178 - DNA, 121 bp, Homo sapiens
  MAP TO CHR14.3; EXPRESSED IN PLACENTA, SIGNAL = 3.1; EXPRESSED IN BONE MARROW, SIGNAL = 4.1; EXPRESSED IN FETAL LIVER, SIGNAL = 2.8; SWISSPROT HIT: P34661, EVALUE 6.00e+00; NT HIT: AE001348.1, EVALUE 4.00e-01; EST_HUMAN HIT: BE094939.1, EVALUE 2.30e+00
atgagaaatccagattccacacccttcaacgtggtacttcatctgggtcctgaagtagtgaaaggacctgcagtagtagcctcggatggccgaatgattcagtccagtggcccagagacag

SEQ ID NO: 26179 - DNA, 109 bp, Homo sapiens
  MAP TO CHR16.3; EXPRESSED IN PLACENTA, SIGNAL = 0.82; NT HIT: gi6677990, EVALUE 5.50e+00; EST_HUMAN HIT: BE006369.1, EVALUE 1.30e-01; SWISSPROT HIT: P32634, EVALUE 4.60e+00
ctcctggggcctgcagagggtctgcattgagctgcgaggaagatttagggacctgggcatgcctggatttcaggggatagtccttgggctgatgggccccagaagacat

SEQ ID NO: 26180 - DNA, 115 bp, Homo sapiens
  MAP TO CHR18.3; EXPRESSED IN PLACENTA, SIGNAL = 0.96; NT HIT: AF159051.1, EVALUE 3.80e-01; EST_HUMAN HIT: AW378556.1, EVALUE 8.60e+00
ttactggttatggacaagatctgttggtccacaacagcatgctaaagatgagcaagccagacaaagggaaacaggtttgctgtcacccgtacagcagcaagtgggaagcttccag

SEQ ID NO: 26181 - DNA, 153 bp, Homo sapiens
  MAP TO CHR14.3; EXPRESSED IN PLACENTA, SIGNAL =   1; EXPRESSED IN LUNG, SIGNAL = 1.3; NT HIT: Z68155.2, EVALUE 8.20e+00; EST_HUMAN HIT: BG203226.1, EVALUE 4.90e-02; SWISSPROT HIT: O12934, EVALUE 4.40e+00
actcccacagccctgaagagggagcagaatgagcctcattttccacattccgctgctttgaagtgctctgccaagagacattcagcaggagagcccaggaatggcactctcaacagccaggctgcagaggggcttgggctgtctctcctgcag

SEQ ID NO: 26182 - DNA, 375 bp, Homo sapiens
  MAP TO CHR19.3; EXPRESSED IN FETAL LIVER, SIGNAL = 4.9; EXPRESSED IN PLACENTA, SIGNAL = 1.4; SWISSPROT HIT: P36776, EVALUE 6.00e-27; NT HIT: gi16163818, EVALUE 0.00e+00; EST_HUMAN HIT: AI377406.1, EVALUE 0.00e+00
ggccaagcgcgcaggggtgacgtgcatcgtcctgccagccgagaacaagaaggacttctacgacctggcagccttcatcaccgagggcctggaggtgcacttcgtggaacactaccgggagatcttcgacatcgccttcccggacgagcaggcagaggcgctggccgtggaacggtgacggccaccccgggactgcaggcggcggatgtcaggccctgtctgggccagaactgagcgctgtggggagcgcgcccggacctggcagtggagccaccgagcgagcagctcggtccagtgacccagatcccagggacctcagtcggcttaatcagagtgtggcatagaagctatttaatgattaaagtcatttgcagt

SEQ ID NO: 26183 - DNA, 172 bp, Homo sapiens
  MAP TO CHR14.3; EXPRESSED IN HEART, SIGNAL = 3.6; EXPRESSED IN FETAL LIVER, SIGNAL = 3.6; EXPRESSED IN PLACENTA, SIGNAL = 1.3; NT HIT: AY052369.1, EVALUE 3.00e-92; EST_HUMAN HIT: BE614251.1, EVALUE 2.00e-91; SWISSPROT HIT: Q60996, EVALUE 5.00e-28
ggtggtgatggcacttctcaaatactggccaaagactcacagtccaaaagaagtaatgttcttaaacgaattagaagagattttagatgtcattgaaccatcagaatttgtgaagatcatggaacccctcttccggcagttggccaaatgtgtctccagcccacacttccag

SEQ ID NO: 26184 - DNA, 132 bp, Homo sapiens
  MAP TO CHR14.3; EXPRESSED IN PLACENTA, SIGNAL = 0.88; SWISSPROT HIT: P53274, EVALUE 2.00e+00; NT HIT: gi11434308, EVALUE 6.00e-68; EST_HUMAN HIT: BG701924.1, EVALUE 2.00e-68
gccgggctctacccagagcaagaccctgatggctgcggtgtttctggtaacgctttatgaatactcgccgcttttctacatcgcggtggtctttacctgcttcatcgtgaccaccggcctggtattgggatg

SEQ ID NO: 26185 - DNA, 332 bp, Homo sapiens
  MAP TO CHR14.3; EXPRESSED IN PLACENTA, SIGNAL = 1.1; EXPRESSED IN FETAL LIVER, SIGNAL = 1.3; EXPRESSED IN LUNG, SIGNAL =   1; SWISSPROT HIT: P01743, EVALUE 1.00e-34; NT HIT: Z27509.1, EVALUE 0.00e+00; EST_HUMAN HIT: AL554583.1, EVALUE 2.00e-99
gtacctactcccaggtgcagctggtgcagtctggccatgaggtgaagcagcctggggcctcagtgaaggtctcctgcaaggcttctggttacagtttcaccacctatggtatgaattgggtgccacaggcccctggacaagggcttgagtggatgggatggttcaacacctacactgggaacccaacatatgcccagggcttcacaggacggtttgtcttctccatggacacctctgccagcacagcatacctgcagatcagcagcctaaaggctgaggacatggccatgtattactgtgcgagatacaccatgtggaaacccacatcctga

SEQ ID NO: 26186 - DNA, 172 bp, Homo sapiens
  MAP TO CHR14.3; EXPRESSED IN PLACENTA, SIGNAL = 0.9; NT HIT: AF110465.1, EVALUE 3.00e-92; EST_HUMAN HIT: AW404913.1, EVALUE 4.00e-89; SWISSPROT HIT: O95988, EVALUE 9.00e-30
gtatgaacccagcatcacagtgcacttgtggcagatggcagtgcatacccgggagctactctcctccggccagatgcccttctcccagctgcccgccgtgtggcagctctaccccgggaggaagtaccgagcagcggattccagtttctgggaaatagcagaccatggccag

SEQ ID NO: 26187 - DNA, 203 bp, Homo sapiens
  MAP TO CHR16.3; EXPRESSED IN PLACENTA, SIGNAL = 0.86; EXPRESSED IN LUNG, SIGNAL =   1; EST_HUMAN HIT: AW972517.1, EVALUE 1.10e+00; NT HIT: U53875.1, EVALUE 4.60e-02; SWISSPROT HIT: Q04538, EVALUE 1.30e-01
cttggcctgagcgtgtaattcattcacagtgggggcccagggcctggcatggcattgcctctccctcaatttctctggggatgcgtgctcttttaggcctggttttgatatcactccactgttatccacaaaagcaccaaacttattttgtttcttaggctctgatgagcctcttcttatcaatgcctcttctgtgtctactg

SEQ ID NO: 26188 - DNA, 161 bp, Homo sapiens
  MAP TO CHR19.3; EXPRESSED IN PLACENTA, SIGNAL = 0.84; EXPRESSED IN LUNG, SIGNAL =   1; EXPRESSED IN FETAL LIVER, SIGNAL = 0.77; NT HIT: gi15303543, EVALUE 1.00e-85; SWISSPROT HIT: Q14324, EVALUE 8.00e-27; EST_HUMAN HIT: AA102252.1, EVALUE 1.00e-73
ctgtcttgaggatgcgggccgtgttcttggagacaccaggtgagtcactgagcccacagatgttctcggtgtaaactcggaaatagtattcattgcccacgataaggtcggacacagtacagctagtgtgcctgttacgttcatagacgttgaaccactcc

SEQ ID NO: 26189 - DNA, 127 bp, Homo sapiens
  MAP TO CHR14.3; EXPRESSED IN PLACENTA, SIGNAL = 0.85; NT HIT: AB009372.1, EVALUE 2.00e-27; SWISSPROT HIT: P18840, EVALUE 9.00e-12; EST_HUMAN HIT: BF732351.1, EVALUE 3.00e-46
aggcactacgagcagtaccacggctttgtggtcatccacggcaccgacaccatggcctttgctgcctcgatgctgtccttcatgctggagaacctgcagaagactgtcatcctcactggggcccagg

SEQ ID NO: 26190 - DNA, 170 bp, Homo sapiens
  MAP TO CHR14.3; EXPRESSED IN PLACENTA, SIGNAL = 1.2; SWISSPROT HIT: P10330, EVALUE 5.00e-01; EST_HUMAN HIT: AL582993.1, EVALUE 8.70e-01; NT HIT: gi14750332, EVALUE 5.90e-01
tggcagaggacatgctgtgcacacctctccatgctcatcctttctgtcatgggactgagaggattccaggggatgatgtgagccaggatcagatacttcatgtatctatccatctttactttattcttgcctttaaaggttaccggactcctatgagtcaggacctatgg

SEQ ID NO: 26191 - DNA, 156 bp, Homo sapiens
  MAP TO CHR14.3; EXPRESSED IN PLACENTA, SIGNAL = 0.88; EST_HUMAN HIT: AA228028.1, EVALUE 7.90e-01; NT HIT: AB015592.1, EVALUE 1.40e-01; SWISSPROT HIT: P38050, EVALUE 4.40e+00
aagggcttgcctgagcaccaagcgttaacagctatctcactctactgcagacatgacccagcccaaatcaggaaactggataaaaaacatggaaacaatgctgttgcagtatggaaattaaacgaaactggaaacaaatcgaataagagtttctaa

SEQ ID NO: 26192 - DNA, 181 bp, Homo sapiens
  MAP TO CHR14.3; EXPRESSED IN PLACENTA, SIGNAL = 0.89; SWISSPROT HIT: P31629, EVALUE 1.30e-01; EST_HUMAN HIT: BE856570.1, EVALUE 2.40e-01; NT HIT: AF327904.1, EVALUE 1.60e-01
gctgccttttcctctcctcttttggctcttctccctggggctcagagccgggactatccattaagatcagatgcgtgtaatcatgatcaatttcctgcaagtgtagaagggctgggcacttgcgatgttgggcctcacattttttattctgtttcctcgggtggtgtttttctatctgtaa

SEQ ID NO: 26193 - DNA, 108 bp, Homo sapiens
  MAP TO CHR14.3; EXPRESSED IN PLACENTA, SIGNAL = 1.1; EXPRESSED IN FETAL LIVER, SIGNAL = 1.7; NT HIT: AL113125.1, EVALUE 3.50e-01; EST_HUMAN HIT: BI917134.1, EVALUE 4.00e-54; SWISSPROT HIT: P20723, EVALUE 1.20e+00
tgcaaacggttagagcaggagcttcatcatgtgaaagagcagaaccagacttcagcaaacaacatgagacatctgactgctgaaaacaatcaagaacgtgctctgaag

SEQ ID NO: 26194 - DNA, 205 bp, Homo sapiens
  MAP TO CHR18.3; EXPRESSED IN PLACENTA, SIGNAL = 0.88; EXPRESSED IN LUNG, SIGNAL = 1.5; SWISSPROT HIT: P10569, EVALUE 3.90e-01
tgctttcttgccaatggcggcggtggcagaggcagagaattctccagctgggccgtttggactggcgcacggccccacgctgggccagctgcaggtgttccagatggccagcctggagcctgctcagctccacagccagcctttgtttatggcctactgtcctcaccatccccgtcaaatgcacatcgagtgccctgccacacct

SEQ ID NO: 26195 - DNA, 282 bp, Homo sapiens
  MAP TO CHR14.3; EXPRESSED IN PLACENTA, SIGNAL = 0.85; SWISSPROT HIT: P40361, EVALUE 7.00e+00; NT HIT: AB036666.1, EVALUE 6.60e-02; EST_HUMAN HIT: AA776049.1, EVALUE 1.50e+00
gaggaaaggaagtgacaagtacagaagaaataaaaggtgttcattgggcttcatggacatgtgtttcaggccttgaagtaaatggaatttggcccaagtattcagatatcaacgatataaattcagtagatggaaattatattggccaagttttagttacagctgatgactatggaattataaaattattccgatatccatgtttaagaaaaggtaccttttctttcaaaatattaagtaacctctctctcacagaagactttcgtgttcttgcagaaaatt

SEQ ID NO: 26196 - DNA, 137 bp, Homo sapiens
  MAP TO CHR16.3; EXPRESSED IN PLACENTA, SIGNAL = 1.1; NT HIT: AE000424.1, EVALUE 1.20e-01; EST_HUMAN HIT: BE565732.1, EVALUE 1.70e-01; SWISSPROT HIT: Q92989, EVALUE 2.00e+00
ttcatctacctgagctcctgatccttttcccccaactatccttctgctaggctcctgggcaccatactctgcttgtctgcgcttctgttgtagagctaagtgggtggagatgaagatgctgctgttccactgtgggt

SEQ ID NO: 26197 - DNA, 143 bp, Homo sapiens
  MAP TO CHR18.3; EXPRESSED IN PLACENTA, SIGNAL = 1.1; NT HIT: AJ002487.1, EVALUE 4.80e-01; SWISSPROT HIT: P32960, EVALUE 5.90e+00
tcttcttgacatcactttggccaataatggcgtcaattttagtttacttccatgtaaatatgtttgggtgattttcaaagaacagatacaatgtgaagctataaaccagattcatgtttatctgtcacaagaaaacttggact

SEQ ID NO: 26198 - DNA, 194 bp, Homo sapiens
  MAP TO CHR16.3; EXPRESSED IN PLACENTA, SIGNAL = 0.95; SWISSPROT HIT: Q01844, EVALUE 1.10e+00; EST_HUMAN HIT: AI683198.1, EVALUE 2.60e-01
gtagatgctgtaggaatggaaagggagacccaggagaaccaggaaggggaagctgttcctagagagcgcatccgtggagcggatgcagacagaggaacctggggaaaacgacctcttgtcattggagccggacagtcccacctgaaggtcagctcaggtcttcaggagctctcagtgtgtgattctgaccacca

SEQ ID NO: 26199 - DNA, 230 bp, Homo sapiens
  MAP TO CHR14.3; EXPRESSED IN PLACENTA, SIGNAL = 0.95; SWISSPROT HIT: P97832, EVALUE 1.60e+00
tgcgaggccaggccgctgggggcctccggcagggacagtccgcagaaggaggaaggcagatggcagaagcggcagtgctgtccggtagggaaggccccgacgtccgcccttccccagaccgtgggctcccctcgcttccaggggtggaggagagaagagctggagaaacgtgccacgactcaaacaaatttacttccgtggtggattctgatttttttgaacaaaatgag

SEQ ID NO: 26200 - DNA, 127 bp, Homo sapiens
  MAP TO CHR16.3; EXPRESSED IN PLACENTA, SIGNAL = 1.5; SWISSPROT HIT: Q9Y6J3, EVALUE 4.00e-01; EST_HUMAN HIT: BI825630.1, EVALUE 1.00e-32
ctgcagcacaatggctggcattggtgagtaataggagccagacgggtctgtgttgggcccatgctcccggccccactcagctacctccccatccagtgcattctgcagccactgagacacacttgcc

SEQ ID NO: 26201 - DNA, 137 bp, Homo sapiens
  MAP TO CHR16.3; EXPRESSED IN PLACENTA, SIGNAL = 1.1; NT HIT: gi14721574, EVALUE 1.80e+00; EST_HUMAN HIT: BG765203.1, EVALUE 6.80e-01; SWISSPROT HIT: P32670, EVALUE 5.90e+00
aaaatgcaatgaggtcattgccaatttcaaaaacaactaccttacaacccattcgggtttcactctggaactaaccaccagcagacaccagactgacctgggtctgctcaggaacatacggcctgcctctccatagg

SEQ ID NO: 26202 - DNA, 136 bp, Homo sapiens
  MAP TO CHR19.3; EXPRESSED IN PLACENTA, SIGNAL = 3.2; NT HIT: gi14767174, EVALUE 7.00e-71; EST_HUMAN HIT: AL541877.1, EVALUE 1.00e-70; SWISSPROT HIT: O43914, EVALUE 2.00e-19
gattgcagttgctctacggtgagcccgggcgtgctggcagggatcgtgatgggagacctggtgctgacagtgctcattgccctggccgtgtacttcctgggccggctggtccctcgggggcgaggggctgcggagg

SEQ ID NO: 26203 - DNA, 179 bp, Homo sapiens
  MAP TO CHR18.3; EXPRESSED IN PLACENTA, SIGNAL = 1.2; SWISSPROT HIT: Q06712, EVALUE 1.90e+00; NT HIT: gi7710146, EVALUE 2.00e-96; EST_HUMAN HIT: AW503335.1, EVALUE 3.00e-96
cctgatgtcttcatctgtgacaataaaagctttgcagaggggttgagatgtgttaagccaaacagcagggttcttttccacagcagcggagacttgccctgtgattggcgcagagcttgtgtgcaaagcactggcaacagcagataaaagggtctcatcattgctacctggaccaactc

SEQ ID NO: 26204 - DNA, 144 bp, Homo sapiens
  MAP TO CHR19.3; EXPRESSED IN PLACENTA, SIGNAL = 0.84; NT HIT: gi13632544, EVALUE 5.00e-75; EST_HUMAN HIT: AL519373.1, EVALUE 7.00e-75; SWISSPROT HIT: Q9NXH9, EVALUE 3.00e-11
ctcacagatctcccccacggccgctgtgcgaggttggtctcctgaggccaggttttcactctctttcagttcaaccttttcctcctcttgctctgacaagtccacgaccactttttgcgtgtccttctctcctggaaccttgac

SEQ ID NO: 26205 - DNA, 159 bp, Homo sapiens
  MAP TO CHR16.3; EXPRESSED IN PLACENTA, SIGNAL = 0.87; SWISSPROT HIT: O88566, EVALUE 6.70e-01; EST_HUMAN HIT: BG988023.1, EVALUE 2.00e-01
agctatttcccaagattcactgaattcagacattggcaacttcctggcaggagctgcctctggtaggaggagggaagctgccacggccaagcagacttgctgcgactttcctcttctcccaaagttctcccaaaccctcaggggcaagcagagtgtatg

SEQ ID NO: 26206 - DNA, 176 bp, Homo sapiens
  MAP TO CHR16.3; EXPRESSED IN PLACENTA, SIGNAL = 4.9; SWISSPROT HIT: P28808, EVALUE 3.30e+00; EST_HUMAN HIT: AW957012.1, EVALUE 2.30e-01
cagttggatggagaaaaggtaatggggacctcataatagtcgtggagggacaactgggatttatttccatagggaaggcagagactgtttgccagggaaccaaggcctttcaaagttgaggacacttcccggtgccgtgcggtgtaaatcacagtgcaaactatgcgattatcccc

SEQ ID NO: 26207 - DNA, 215 bp, Homo sapiens
  MAP TO CHR14.3; EXPRESSED IN PLACENTA, SIGNAL = 2.2; EXPRESSED IN ADULT LIVER, SIGNAL = 1.5; EXPRESSED IN BRAIN, SIGNAL = 1.6; SWISSPROT HIT: P53781, EVALUE 7.60e-01; NT HIT: gi14750914, EVALUE 1.00e-116; EST_HUMAN HIT: AV646693.1, EVALUE 1.00e-117
acctggttgagggcgacctccaacatgacggacagggccaggtggctgtggaagaggggcacacagtcggtgaggcacaggcattctccagaccgcggcgctggcgccaaaaacagcccgttgactgcggcgtgtgggtaccgggcagcatgcaggcacatcttcacgtaggccagggccgagatctccacctcccccatggcgagcgaggcctg

SEQ ID NO: 26208 - DNA, 246 bp, Homo sapiens
  MAP TO CHR19.3; EXPRESSED IN LUNG, SIGNAL = 2.9; EXPRESSED IN PLACENTA, SIGNAL = 1.6; EXPRESSED IN FETAL LIVER, SIGNAL = 1.7; EST_HUMAN HIT: BI963972.1, EVALUE 0.00e+00; SWISSPROT HIT: P53197, EVALUE 6.00e-21; NT HIT: gi14765137, EVALUE 0.00e+00
accagctcgttggcgtgcttggaccaggccagattgcacacttgggagcccgtgtcgatacactgcagtggttgtcctgtcagcgtgttccagaagcggatacagcggtcagctgtgccgccccccgaggccagcagcccgtgctgatgtggggaccaggcgatggccttcacggccgccaggtgctccgtgtactgctgcacggggctcaggctcgagtgattccagaccagcagctgggggaca

SEQ ID NO: 26209 - DNA, 443 bp, Homo sapiens
  MAP TO CHR1.3; EXPRESSED IN PLACENTA, SIGNAL = 0.48; EXPRESSED IN ADULT LIVER, SIGNAL = 1.4; EST_HUMAN HIT: AL519147.1, EVALUE 0.00e+00; SWISSPROT HIT: Q49901, EVALUE 1.00e-17; NT HIT: gi7710153, EVALUE 0.00e+00
cccaccaatttcttcacctcctggcacacagtgtatgctaattctttggcttttgctgatccaatttgtaaaaccttctctaaatggtccttgtccagcttcagtttttcaatttcacgcttaattggggcaaacttctcaatcacagcatctgccacggccagcttgtagcgagcagtgttcatgcccgcgctgcggcgcaccacttcctccacggagagccccgtcaccgcggcatgcaccgccactatgttggacacgccagcgcggccagccgggtcataggtgacctccgaggtgaagtctgtcacagccttgcggaatttctgcactatctcctctgggctgtctgttattcggacggtggccagtttgtcagggtctgatttcgacattttggcagaaggatcacgtagggattttaccttcttcatggatgctag

SEQ ID NO: 26210 - DNA, 104 bp, Homo sapiens
  MAP TO CHRX.3; EXPRESSED IN BRAIN, SIGNAL = 1.4; EXPRESSED IN LUNG, SIGNAL = 1.5; EXPRESSED IN HEART, SIGNAL = 0.88; EXPRESSED IN PLACENTA, SIGNAL = 0.89; EST_HUMAN HIT: BI090025.1, EVALUE 3.00e-39; SWISSPROT HIT: P46100, EVALUE 2.00e-16; NT HIT: gi14757747, EVALUE 2.00e-39
ggtgttcagtttatgtgggattgctgctgtgagtctgtgaaaaaaacaaagaaatctccaggttcaggatgcattcttgcccactgtatgggccttggtaagac

SEQ ID NO: 26211 - DNA, 191 bp, Homo sapiens
  MAP TO CHR6.3; EXPRESSED IN LUNG, SIGNAL = 2.1; EXPRESSED IN PLACENTA, SIGNAL = 1.7; EXPRESSED IN FETAL LIVER, SIGNAL = 3.1; EXPRESSED IN BRAIN, SIGNAL = 1.8; SWISSPROT HIT: Q9UPE1, EVALUE 8.00e-21; NT HIT: gi15834623, EVALUE 1.00e-103; EST_HUMAN HIT: AL522974.1, EVALUE 3.00e-99
ggcttaggagttaagccaagggtgccggagacactcggcggcagtggctctcttctcagggatcagctccaacatgggcagtaagaaatctgtgaagccagctgcctcttcctgcgaccactcatacttctccactagaacctcaaaaaggccccaaggtttcagcttcgtgatatgtttcaggtcacctg

SEQ ID NO: 26212 - DNA, 121 bp, Homo sapiens
  MAP TO CHR11.3; EXPRESSED IN HEART, SIGNAL = 0.7; EXPRESSED IN PLACENTA, SIGNAL = 0.64; EXPRESSED IN ADULT LIVER, SIGNAL = 0.46; EXPRESSED IN BRAIN, SIGNAL = 0.68; EST_HUMAN HIT: AV662219.1, EVALUE 2.30e+00; SWISSPROT HIT: Q9H346, EVALUE 1.00e-11; NT HIT: AF121979.1, EVALUE 1.00e-04
gtgggatattatggccaaaacgatgtgtcaagaatgaaaaaaatgctggtgtaaaaaaggctaagataacaccaatatgagaaccacaggtgttgagagctttgagtcgagcttcccagga

SEQ ID NO: 26213 - DNA, 435 bp, Homo sapiens
  MAP TO CHR1.3; EXPRESSED IN PLACENTA, SIGNAL = 1.5; EXPRESSED IN HEART, SIGNAL = 1.4; EXPRESSED IN BRAIN, SIGNAL = 1.3; EST_HUMAN HIT: BI762866.1, EVALUE 0.00e+00; SWISSPROT HIT: P54868, EVALUE 5.00e-82; NT HIT: gi5031750, EVALUE 0.00e+00
accatcccaggaactggactccatccagttggcagcattgaagagggaggcagtaccaccgtagcaggcattggtggtatctatgccctcaatatcagtattgcctgaatcctggaagagttccatgagcactgttttgacagctttggacttgtcaatgatggtctcagtgcctacttccagcctgcccacagagtcccatgggagctgtatgcgctccatcagccgttgcaccaccgtcaggcacagggagttgatgtcctcttggactgagcagaagcccatacgggtctggcccaagcccactgtatactttcctgcttccacattgttatacttctccaggtcagtttggtccacatattgggctgggaagtagacctccagggccaggatgcccacgtcctttggccaagtatctgttttggccagggg

SEQ ID NO: 26214 - DNA, 189 bp, Homo sapiens
  MAP TO CHRX.3; EXPRESSED IN HEART, SIGNAL = 2.2; EXPRESSED IN PLACENTA, SIGNAL = 3.8; EXPRESSED IN FETAL LIVER, SIGNAL = 3.5; EXPRESSED IN BRAIN, SIGNAL = 2.5; NT HIT: AJ010395.1, EVALUE 1.00e-100; EST_HUMAN HIT: BI195213.1, EVALUE 3.00e-99; SWISSPROT HIT: O60832, EVALUE 2.00e-31
acctgcactctgttgtgacttcaccaagcgagtggctcgttctatgcacacgattaaacaaccagtcaccttgggatccagcgtaccactgtgccctgtcttctccacccgaagtatccgtcgaatccaggctaccacctcatgggaagaggggttagagggcttgtcaagattaatgaaacctgtcct

SEQ ID NO: 26215 - DNA, 105 bp, Homo sapiens
  MAP TO CHR19.3; EXPRESSED IN FETAL LIVER, SIGNAL = 5.5; EXPRESSED IN BRAIN, SIGNAL = 2.8; EXPRESSED IN LUNG, SIGNAL = 4.9; EXPRESSED IN PLACENTA, SIGNAL = 2.3; EST_HUMAN HIT: AI564883.1, EVALUE 2.00e-52; SWISSPROT HIT: P02461, EVALUE 1.20e+00; NT HIT: gi4759155, EVALUE 2.00e-52
ccctgaaggtaagtccccccttgggggccttcttggagccgtgtgtgagtgagtggtcgccacacagcattgtacccagagtctgtccccagacattgcacctgg

SEQ ID NO: 26216 - DNA, 217 bp, Homo sapiens
  MAP TO CHR11.3; EXPRESSED IN LUNG, SIGNAL =  14; EXPRESSED IN PLACENTA, SIGNAL = 1.1; EXPRESSED IN FETAL LIVER, SIGNAL =  11; EST_HUMAN HIT: AL541888.1, EVALUE 1.00e-113; SWISSPROT HIT: P19120, EVALUE 6.00e-35; NT HIT: Y00371.1, EVALUE 1.00e-119
caccttcccaaggtaggcttctgcaatttccttcatctttgtcagaaccatagaagacacctcctctggatagaagcttttggtctctcccttgtattctacttggaccttgggcctgccagcatcattcaccaccataaagggccaatgtttcatatcagactggacaacagcatcatcaaatctgcgtccaatcagacgtttggcatctgtaaaa

SEQ ID NO: 26217 - DNA, 188 bp, Homo sapiens
  MAP TO CHR6.3; EXPRESSED IN LUNG, SIGNAL = 4.1; EXPRESSED IN HEART, SIGNAL = 3.8; EXPRESSED IN PLACENTA, SIGNAL = 1.8; EXPRESSED IN ADULT LIVER, SIGNAL = 3.4; EXPRESSED IN BRAIN, SIGNAL = 5.1; EST_HUMAN HIT: BE886996.1, EVALUE 1.00e-83; SWISSPROT HIT: P38679, EVALUE 6.00e-16; NT HIT: gi13643039, EVALUE 7.00e-84
ataccttgctgtccaaaagaaggttgtctggtttgatgtctctgtggatgaatccaagttggtgaatagagtctatggctaatactgtttctgctatataaaactgagtctcctcttctgtcagagtgtcttttttcatcaacaaggtcatcatgtcccctggaaacaagaagatacaaagccaccac

SEQ ID NO: 26218 - DNA, 161 bp, Homo sapiens
  MAP TO CHRX.3; EXPRESSED IN PLACENTA, SIGNAL = 1.5; EXPRESSED IN FETAL LIVER, SIGNAL = 2.4; EST_HUMAN HIT: BI760475.1, EVALUE 4.00e-80; SWISSPROT HIT: P41565, EVALUE 2.00e-15; NT HIT: U52111.2, EVALUE 1.00e-85
actcactgtttcaaacaccgcgtacacatggccatagttggccccagccacaaggcctgggcccccgaccagtcccgcgcagacattgttgacgatgttgccatagagattgggcatcaccatgacatcaaactgctggggccgggacaccagctgcggga

SEQ ID NO: 26219 - DNA, 162 bp, Homo sapiens
  MAP TO CHR6.3; EXPRESSED IN LUNG, SIGNAL = 1.4; EXPRESSED IN PLACENTA, SIGNAL = 0.99; EXPRESSED IN ADULT LIVER, SIGNAL =   1; EXPRESSED IN FETAL LIVER, SIGNAL = 1.1; EST_HUMAN HIT: AW517240.1, EVALUE 6.00e-85; SWISSPROT HIT: Q28653, EVALUE 3.00e-20; NT HIT: AB000635.1, EVALUE 5.00e-69
agctcctagacctatttgacagtgaggatcctcgagagcgggacttcctcaagaccattttgcatcgcatctatggcaagtttttggggctccgggcttatatccgtaggcagatcaaccacatcttctacaggtgaggccaggagcccaggcttaggagca

SEQ ID NO: 26220 - DNA, 174 bp, Homo sapiens
  MAP TO CHR3.3; EXPRESSED IN PLACENTA, SIGNAL = 2.1; EXPRESSED IN HEART, SIGNAL = 2.3; EXPRESSED IN FETAL LIVER, SIGNAL = 8.3; EXPRESSED IN BRAIN, SIGNAL = 3.7; EST_HUMAN HIT: AL531784.1, EVALUE 3.00e-87; SWISSPROT HIT: Q14624, EVALUE 2.00e-24; NT HIT: U42016.1, EVALUE 1.00e-88
cacctacatggagaagttggtgatgaaggctttcttgggcagctccatctggaaggtggcctcctgcacagtattggccctattgaccactcggctggtgacgaccgtgtgggcaaatcgggatgagaccctggagtccacggtgaggctgtagatgtcgatgccattctggac

SEQ ID NO: 26221 - DNA, 164 bp, Homo sapiens
  MAP TO CHR19.3; EXPRESSED IN ADULT LIVER, SIGNAL = 0.52; EXPRESSED IN LUNG, SIGNAL = 0.83; EXPRESSED IN HEART, SIGNAL = 0.78; EXPRESSED IN PLACENTA, SIGNAL = 0.53; EST_HUMAN HIT: BG831814.1, EVALUE 1.00e-79; SWISSPROT HIT: Q9Y463, EVALUE 2.00e-22; NT HIT: gi5922000, EVALUE 1.00e-79
acaggtggtgaaagcctatgatcatcagacccaggagcttgtggccatcaagatcatcaagaacaaaaaggctttcctgaaccaggcccagattgagctgcggctgctggagctgatgaaccagcatgacacggagatgaagtactatataggtgaggcctggg

SEQ ID NO: 26222 - DNA, 188 bp, Homo sapiens
  MAP TO CHR1.3; EXPRESSED IN BRAIN, SIGNAL = 8.5; EXPRESSED IN FETAL LIVER, SIGNAL =  11; EXPRESSED IN LUNG, SIGNAL =  13; EXPRESSED IN PLACENTA, SIGNAL = 4.7; SWISSPROT HIT: P56752, EVALUE 3.30e+00; NT HIT: M84326.1, EVALUE 1.00e-102; EST_HUMAN HIT: R76559.1, EVALUE 1.00e-101
attttgataaacactgaagctggagctgttaaatttatcttggggaaacctcagaactggtctatttggtgtcgtggaacctcttactgctttcaatacacgattagtaatcaactgttttgtatacttgttttcagttttcatttcgacaaacaagcactgtaattatagctattagaataaaatct

SEQ ID NO: 26223 - DNA, 115 bp, Homo sapiens
  MAP TO CHR4.3; EXPRESSED IN LUNG, SIGNAL = 1.2; EXPRESSED IN HEART, SIGNAL = 0.99; EXPRESSED IN BRAIN, SIGNAL = 1.2; EXPRESSED IN PLACENTA, SIGNAL = 0.68; EST_HUMAN HIT: AV690649.1, EVALUE 1.00e-51; SWISSPROT HIT: P28332, EVALUE 1.00e-14; NT HIT: M84403.1, EVALUE 5.00e-56
tttttacctttatgcgaacttcctttgcctttggtggggccacttctacctcttcaatagaaaatggtgcaccaggcttccagagtatggctgctttgcatctgatgacctggga

SEQ ID NO: 26224 - DNA, 155 bp, Homo sapiens
  MAP TO CHR1.3; EXPRESSED IN PLACENTA, SIGNAL = 1.7; EXPRESSED IN HEART, SIGNAL = 2.3; EXPRESSED IN FETAL LIVER, SIGNAL = 1.2; EXPRESSED IN ADULT LIVER, SIGNAL =   2; EST_HUMAN HIT: BE184218.1, EVALUE 3.00e-77; SWISSPROT HIT: P35321, EVALUE 7.00e-28; NT HIT: gi10835235, EVALUE 2.00e-77
tacttctgcttggtcttctgctgggctggtgctggagtgaccgttgaagggcagggctcaggcaccttgggctggcagggctctggaaccttgggctggcagggctcaggcactttggggtggcagggctcaggcaccttggggtggcagggctc

SEQ ID NO: 26225 - DNA, 162 bp, Homo sapiens
  MAP TO CHR11.3; EXPRESSED IN LUNG, SIGNAL = 0.78; EXPRESSED IN PLACENTA, SIGNAL = 0.71; EXPRESSED IN BRAIN, SIGNAL = 0.77; EST_HUMAN HIT: BI912709.1, EVALUE 9.00e-81; SWISSPROT HIT: P49847, EVALUE 3.40e+00; NT HIT: gi14773497, EVALUE 6.00e-81
gcagccacctctgacagctgtctcagcacagcctttggggatgttggtagccagggccagctccaccaggttcacctctcgatcctcaggaaagtagagttcaccctccctggcggggcgcatgggcagtgcctcctgtgatccgtaaccacacacagcctg

SEQ ID NO: 26226 - DNA, 249 bp, Homo sapiens
  MAP TO CHR14.3; EXPRESSED IN HEART, SIGNAL = 0.64; EXPRESSED IN PLACENTA, SIGNAL = 0.63; EXPRESSED IN BRAIN, SIGNAL = 0.78; EXPRESSED IN LUNG, SIGNAL = 0.79; EST_HUMAN HIT: AW896052.1, EVALUE 2.00e-39; SWISSPROT HIT: Q9UHC1, EVALUE 2.00e-43; NT HIT: gi14784561, EVALUE 0.00e+00
ttttgttgggcaattgaccagattctttacttaaagtgctggctaaatctttgatgtctggagtttcaactgaatgacgtgttctatttccaaatgtttcttgggcacgtgtgggaccaggtctaacataatttttaaatgaatgttctgtttcagttgatttagttttttcattttgtactacatgagttataaagccagtggaacataatttaactcgcccataactaaaaacatttcttcttccac

SEQ ID NO: 26227 - DNA, 209 bp, Homo sapiens
  MAP TO CHR12.3; EXPRESSED IN BRAIN, SIGNAL = 0.91; EXPRESSED IN LUNG, SIGNAL = 0.7; EXPRESSED IN HEART, SIGNAL =   1; EXPRESSED IN PLACENTA, SIGNAL = 0.76; NT HIT: gi9966838, EVALUE 1.00e-114; EST_HUMAN HIT: BE502961.1, EVALUE 1.00e-112; SWISSPROT HIT: P35346, EVALUE 3.00e-07
atggagccatatgcttggcggaattggcggttcatggctgcatagagcacagggttgatgcaaccattgagccaggtgaggttggcagcaagcatgtggaccacccggggagcctggactctggcatccagaatgttgagcagcaagaaggggatgtagctcagggcaaagcagaggaacacagcaaaacacattcgagtcaccttccc

SEQ ID NO: 26228 - DNA, 151 bp, Homo sapiens
  MAP TO CHR9.3; EXPRESSED IN BRAIN, SIGNAL = 2.3; EXPRESSED IN LUNG, SIGNAL = 2.7; EXPRESSED IN HEART, SIGNAL = 2.6; EXPRESSED IN PLACENTA, SIGNAL = 1.8; NT HIT: M96264.1, EVALUE 9.00e-80; EST_HUMAN HIT: AW365282.1, EVALUE 1.00e-79; SWISSPROT HIT: P07902, EVALUE 2.00e-21
tcaccacccagtaaggtcatgtgcttccacccctggtcggatgtaacgctgccactcatgtcggtccctgagatccgggctgttgttgatgcatgggcctcagtcacagaggagctgggtgcccagtacccttgggtgcaggtttgtgagg

SEQ ID NO: 26229 - DNA, 155 bp, Homo sapiens
  MAP TO CHR13.3; EXPRESSED IN PLACENTA, SIGNAL = 3.7; EXPRESSED IN LUNG, SIGNAL =  28; EXPRESSED IN HEART, SIGNAL =  13; EST_HUMAN HIT: AA582448.1, EVALUE 8.00e-78; SWISSPROT HIT: P23821, EVALUE 3.00e-22; NT HIT: gi14753571, EVALUE 4.00e-82
accttgtgttccacattgttctgctgtgctttgtccaaatgaacctttatgagccggctgccatctagtttcacgcggattctcttgcccacaatttcgcttgggaagaccaagtcctcaaggatggcatcgtgcacagctgtcagagtatggct

SEQ ID NO: 26230 - DNA, 196 bp, Homo sapiens
  MAP TO CHR1.3; EXPRESSED IN LUNG, SIGNAL = 0.71; EXPRESSED IN PLACENTA, SIGNAL = 0.64; EXPRESSED IN ADULT LIVER, SIGNAL = 0.43; NT HIT: gi15299242, EVALUE 1.00e-104; SWISSPROT HIT: Q9UBY9, EVALUE 3.00e-29; EST_HUMAN HIT: BI838389.1, EVALUE 1.00e-104
ggagaggcactcagattttgatctccgtccggaaggtctgctggacgtgttctgtatgcgggtgacgccgtgcccggatagtgaggctgccgtcctcccgcagagccgaggtcaccgacgtcgggtccacgtcctccggcagctggcacttgtgagcgaaggtgttcatgacagtgccgtcagccgccagctgggg

SEQ ID NO: 26231 - DNA, 373 bp, Homo sapiens
  MAP TO CHR6.3; EXPRESSED IN PLACENTA, SIGNAL = 1.6; EXPRESSED IN LUNG, SIGNAL = 1.1; EXPRESSED IN HEART, SIGNAL = 1.9; EXPRESSED IN ADULT LIVER, SIGNAL = 1.9; EXPRESSED IN FETAL LIVER, SIGNAL = 0.66; SWISSPROT HIT: Q15776, EVALUE 1.00e-65; EST_HUMAN HIT: BF946748.1, EVALUE 0.00e+00; NT HIT: gi13645061, EVALUE 0.00e+00
cttcagccccatccccaccagaccagactcctgaagaggatcttgtaatcgtcaaggtagaggaggatcatggttgggaccaggaatctagtctgcatgaaagtaaccctcttggccaagaagtgttccgcctgcgcttcaggcagttacgctaccaggagacactaggaccccgagaagctctgatccaactacgggccctttgccatcagtggctgaggccagatttgaacaccaaggaacagatcctggagctgctggtgctggagcagttcttgaccatcctacctgaggagctccagacactggttaaggaacatcagctagagaacggagaggaggtggtgaccctattagaggatttggaaaggca

SEQ ID NO: 26232 - DNA, 120 bp, Homo sapiens
  MAP TO CHR9.3; EXPRESSED IN BRAIN, SIGNAL = 0.59; EXPRESSED IN PLACENTA, SIGNAL = 0.51; EST_HUMAN HIT: BF802363.1, EVALUE 3.70e-02; NT HIT: AF090189.1, EVALUE 2.00e-61
aagctgaaactcctgggataaaggaatcctgggagccagcatgtaggatgtgtccatcttcatgctccgtcttcaccttgcactggcactcctccaccagcatcaccaccttgatcacgg

SEQ ID NO: 26233 - DNA, 128 bp, Homo sapiens
  MAP TO CHR19.3; EXPRESSED IN HEART, SIGNAL = 0.95; EXPRESSED IN PLACENTA, SIGNAL = 0.74; EXPRESSED IN ADULT LIVER, SIGNAL = 1.3; NT HIT: gi15303997, EVALUE 9.00e-64; SWISSPROT HIT: Q15973, EVALUE 3.00e-14; EST_HUMAN HIT: BG697763.1, EVALUE 3.00e-61
agagagaaatcctatgaatgtcaacaatgtggtaaagccttcactcattcccgttttcttcaaggacatgaaaaaactcatactggagagaacccgtatgaatgtaaggaatgtgggaaagcatttgc

SEQ ID NO: 26234 - DNA, 203 bp, Homo sapiens
  MAP TO CHR3.3; EXPRESSED IN LUNG, SIGNAL = 2.4; EXPRESSED IN HEART, SIGNAL = 2.1; EXPRESSED IN PLACENTA, SIGNAL = 2.2; EXPRESSED IN FETAL LIVER, SIGNAL =  18; EXPRESSED IN BRAIN, SIGNAL = 2.4; NT HIT: gi10092578, EVALUE 1.00e-103; SWISSPROT HIT: Q06033, EVALUE 6.00e-33; EST_HUMAN HIT: T68764.1, EVALUE 9.00e-63
cagggcttctatgaggaggtggccaacccactgctgacgggtgtggagatggagtaccccgagaacgctatcctggacctcacccagaacacttaccagcacttctacgatggctctgagatcgtggtggccgggcgcctggtggacgaggacatgaacagctttaaggcagatgtgaagggccatggggtgagtggggacag

SEQ ID NO: 26235 - DNA, 170 bp, Homo sapiens
  MAP TO CHR19.3; EXPRESSED IN PLACENTA, SIGNAL = 4.1; EXPRESSED IN HEART, SIGNAL = 2.4; EXPRESSED IN FETAL LIVER, SIGNAL = 2.2; EXPRESSED IN ADULT LIVER, SIGNAL = 2.4; EXPRESSED IN BRAIN, SIGNAL = 3.6; SWISSPROT HIT: P35585, EVALUE 5.00e-26; EST_HUMAN HIT: BI918755.1, EVALUE 4.00e-86; NT HIT: gi16162867, EVALUE 3.00e-86
tgcaggccaaaagccagttcaagcggcggtcaacagccaacaacgtggagatccacattcccgtgcccaatgatgccgactcacccaagttcaagacgacggtggggagcgttaagtgggtccccgagaacagcgagatcgtgtggtccatcaagtccttcccggtgagc

SEQ ID NO: 26236 - DNA, 140 bp, Homo sapiens
  MAP TO CHR1.3; EXPRESSED IN FETAL LIVER, SIGNAL =   2; EXPRESSED IN ADULT LIVER, SIGNAL = 2.2; EXPRESSED IN BRAIN, SIGNAL = 2.3; EXPRESSED IN PLACENTA, SIGNAL = 2.3; EXPRESSED IN LUNG, SIGNAL = 2.2; EXPRESSED IN HEART, SIGNAL = 2.2; SWISSPROT HIT: Q04657, EVALUE 2.60e+00; EST_HUMAN HIT: AA677535.1, EVALUE 9.00e-62; NT HIT: gi13645243, EVALUE 1.00e-60
acctgggtaccagcccaggggcctcggtctgcaaggtctgtagtccctgctggatctgcagcaatgcctgcatggctcggggattggtaaggatggagagtgactctgggttctgcatctggtgggaaataagcagagaa

SEQ ID NO: 26237 - DNA, 152 bp, Homo sapiens
  MAP TO CHR6.3; EXPRESSED IN FETAL LIVER, SIGNAL =   1; EXPRESSED IN ADULT LIVER, SIGNAL = 0.67; EXPRESSED IN LUNG, SIGNAL = 0.83; EXPRESSED IN PLACENTA, SIGNAL = 0.61; SWISSPROT HIT: Q9Y5X1, EVALUE 1.00e-20; EST_HUMAN HIT: BE389426.1, EVALUE 5.00e-70; NT HIT: gi7706705, EVALUE 3.00e-70
ccttctcatctcggaaatttaggaactgctggaaaacttcactttctgagattactggatggcgacacatcctggtcatccaggcctgaagtctctccatgcgcattttgataaattcctcttcaaagcggcctgcaagcgacacaccaaga

SEQ ID NO: 26238 - DNA, 164 bp, Homo sapiens
  MAP TO CHR6.3; EXPRESSED IN LUNG, SIGNAL = 0.89; EXPRESSED IN HEART, SIGNAL = 1.5; EXPRESSED IN PLACENTA, SIGNAL =   1; SWISSPROT HIT: Q9UK97, EVALUE 3.00e-27; EST_HUMAN HIT: AV702030.1, EVALUE 6.00e-82; NT HIT: gi14758087, EVALUE 2.00e-80
cagaaaccacttgactataaatacagatattttcgtcgtgtccctgtacaagaagcagatcagagttttcatgtggggctacagctatgttccagtggtcaccagaggttcaacaaactcatctggatacatcattcttgtcacattacttacaagtaggtgaa

SEQ ID NO: 26239 - DNA, 174 bp, Homo sapiens
  MAP TO CHR2.3; EXPRESSED IN LUNG, SIGNAL = 4.3; EXPRESSED IN HEART, SIGNAL = 3.2; EXPRESSED IN PLACENTA, SIGNAL = 3.6; EXPRESSED IN ADULT LIVER, SIGNAL = 3.5; EXPRESSED IN BRAIN, SIGNAL =   5; EST_HUMAN HIT: AL042637.1, EVALUE 2.00e-75; NT HIT: Z46361.1, EVALUE 4.00e-79; SWISSPROT HIT: P52789, EVALUE 5.00e-10
gactgcgtggccactcaccggatctgacaaattgtgtccacacgctccgccagcctgtgcgcagccaccctggccggcgtgcttgcagcgcatcaaggagaacaaaggcgaggagcggctgcgctctactattggggtcgacggttccgtctacaagaaacacccccagtgagt

SEQ ID NO: 26240 - DNA, 248 bp, Homo sapiens
  MAP TO CHR2.3; EXPRESSED IN LUNG, SIGNAL = 1.2; EXPRESSED IN PLACENTA, SIGNAL = 1.6; EXPRESSED IN HEART, SIGNAL = 2.3; EXPRESSED IN ADULT LIVER, SIGNAL =   2; EST_HUMAN HIT: W00468.1, EVALUE 1.00e-116; NT HIT: AF202118.1, EVALUE 0.00e+00; SWISSPROT HIT: Q01822, EVALUE 2.00e-36
tgtctttacgttgcaggcaaactcgccgagtatggggccgctagcccctccagcgcgatccgcacgaatttcagcaccaagcaactgacagaactggaaaaagagtttcatttcaataagtacttaactcgagcccggcgcatcgagatagccaactgcttgcacctgaatgacacgcaagtcaaaatctggttccagaaccgcaggatgaaacagaagaaaagggaacgagaagggcttctggccac

SEQ ID NO: 26241 - DNA, 279 bp, Homo sapiens
  MAP TO CHR9.3; EXPRESSED IN HEART, SIGNAL =   1; EXPRESSED IN PLACENTA, SIGNAL = 0.91; EXPRESSED IN FETAL LIVER, SIGNAL = 0.54; NT HIT: gi7657366, EVALUE 0.00e+00; SWISSPROT HIT: Q15427, EVALUE 6.10e-01; EST_HUMAN HIT: AW007187.1, EVALUE 0.00e+00
tgcagagggctgtagccttttccatttcgtgttgtcgttttccggacaagcagaggttgctggcaattggagccggtggcttcaggcgggggatgggtgcaggacaggggagaggagagccggggcctcccgggtcaagggcagccggctgtgtgtggatgcggaagaaggctgggtggacgcacggggttggtgtcagggctgaggtggcctcatggcacagaaggaggtgagtggttcccaggcatctggaagacacaaggaggcaagatgggttaa

SEQ ID NO: 26242 - DNA, 252 bp, Homo sapiens
  MAP TO CHR6.3; EXPRESSED IN ADULT LIVER, SIGNAL = 1.3; EXPRESSED IN BRAIN, SIGNAL = 1.8; EXPRESSED IN HEART, SIGNAL = 1.8; EXPRESSED IN PLACENTA, SIGNAL = 1.1; EST_HUMAN HIT: BI752149.1, EVALUE 1.00e-110; SWISSPROT HIT: Q14738, EVALUE 3.00e-33; NT HIT: gi13631976, EVALUE 1.00e-110
acctgactgctggggcccccacagattcgccaacccaggagcgggaggagctgtttatccagaagctacgccagtgctgtgtcctctttgacttcgtgtcagacccactcagtgacctcaaattcaaggaggtgaagcgggcaggactcaacgagatggtggagtacatcacccatagccgtgatgttgtcactgaggccatttaccctgaggctgtcaccatggtgggcacagggaaaggacacagggggg

SEQ ID NO: 26243 - DNA, 175 bp, Homo sapiens
  MAP TO CHR1.3; EXPRESSED IN LUNG, SIGNAL = 1.3; EXPRESSED IN HEART, SIGNAL = 1.2; EXPRESSED IN PLACENTA, SIGNAL = 1.2; EXPRESSED IN BRAIN, SIGNAL = 1.3; EXPRESSED IN FETAL LIVER, SIGNAL = 1.5; EXPRESSED IN ADULT LIVER, SIGNAL = 1.5; EST_HUMAN HIT: BG675152.1, EVALUE 7.00e-94; NT HIT: gi14746117, EVALUE 5.00e-94; SWISSPROT HIT: Q15543, EVALUE 4.00e-26
gtgtcaagatccataatttgcttcatcaaatgcttttctagctcgtttcaattcttcattcatagtaagcaagtctttaaccctggcaaacttccttgggtcctttcgaatcaagaagacgatatcttcaacttgtactcgaccttgtcttccaattgacattgccttgtgagtc

SEQ ID NO: 26244 - DNA, 266 bp, Homo sapiens
  MAP TO CHR19.3; EXPRESSED IN PLACENTA, SIGNAL = 2.6; EXPRESSED IN FETAL LIVER, SIGNAL =   2; EXPRESSED IN ADULT LIVER, SIGNAL = 2.3; EXPRESSED IN BRAIN, SIGNAL = 2.6; EXPRESSED IN HEART, SIGNAL = 2.6; EST_HUMAN HIT: M86093.1, EVALUE 1.00e-106; NT HIT: gi14759506, EVALUE 3.00e-50; SWISSPROT HIT: Q92973, EVALUE 3.00e-18
caggtgcacgtccctcaggaacatcagggacaacgaggagaaggactcagccttccgcggcatctgcatgatgatcggtgtcaacccggggggcgttgtgcaggttggggcagctgggctctgagggcaggcgcgggcgctgggctcgggcggcccctcacctgggatccgtcacgtttcaggactttattttcttctgcgatgctgtagcctcctgggtgagcccgaaggatgaccttcgggacatgttttataaggtgaggctc

SEQ ID NO: 26245 - DNA, 197 bp, Homo sapiens
  MAP TO CHR1.3; EXPRESSED IN HEART, SIGNAL = 0.66; EXPRESSED IN PLACENTA, SIGNAL = 1.1; EXPRESSED IN ADULT LIVER, SIGNAL = 0.91; EXPRESSED IN BRAIN, SIGNAL = 0.94; SWISSPROT HIT: P48507, EVALUE 9.00e-32; NT HIT: gi13626331, EVALUE 1.00e-107; EST_HUMAN HIT: BE702295.1, EVALUE 1.00e-107
acctgtgcccactgatacagctgttccaactgtgttttgtctagatcagaggtacctatggcaacaatctttttgctctgaactaagttttctaattcctcccagtaaggctgtaaatgctccaaggaaagattaactccatcttcaataggaggtgaagcaatgatcacagaatccagctgtgcaactccaaggac

SEQ ID NO: 26246 - DNA, 122 bp, Homo sapiens
  MAP TO CHR10.3; EXPRESSED IN HEART, SIGNAL = 0.66; EXPRESSED IN ADULT LIVER, SIGNAL = 0.46; EXPRESSED IN PLACENTA, SIGNAL = 0.46; EST_HUMAN HIT: BI909303.1, EVALUE 3.00e-61; NT HIT: gi9506856, EVALUE 2.00e-61
tagagtccttaaatgcactggaagaccaagatttagatgctctcatggcagatctggtagcagacataagtgaggctgagcagaggacaatccaggcacagaaagagtccttgcagaatcaa

SEQ ID NO: 26247 - DNA, 151 bp, Homo sapiens
  MAP TO CHR20.3; EXPRESSED IN LUNG, SIGNAL = 0.68; EXPRESSED IN PLACENTA, SIGNAL = 0.76; EXPRESSED IN HEART, SIGNAL = 1.2; EXPRESSED IN BRAIN, SIGNAL = 0.58; NT HIT: M33772.1, EVALUE 9.00e-80; SWISSPROT HIT: P02587, EVALUE 4.00e-12; EST_HUMAN HIT: BF670535.1, EVALUE 1.00e-76
ctcaccgtcctcatccacctcctcgatgatggcgtccagctcctccttggtgggtgtctggcccagcatcctcatcaccgtgcccaactccttgacgctgatgtccccaccaccatcagcatcaaacatgtcaaaggcagccttgaactct

SEQ ID NO: 26248 - DNA, 163 bp, Homo sapiens
  MAP TO CHRX.3; EXPRESSED IN PLACENTA, SIGNAL = 0.57; EXPRESSED IN LUNG, SIGNAL = 0.76; EXPRESSED IN HEART, SIGNAL =   1; EXPRESSED IN FETAL LIVER, SIGNAL = 0.58; EXPRESSED IN ADULT LIVER, SIGNAL = 1.1; SWISSPROT HIT: P46223, EVALUE 1.10e+00; EST_HUMAN HIT: BF029426.1, EVALUE 1.00e-82; NT HIT: gi14764711, EVALUE 6.00e-81
cagatttgatgaaaaagaaaatgtgtccaactgcatccagttgaaaacttcagttattaagggtattaagaatcaattgatagagcaatttccaggtattgaaccatggcttaatcaaatcatgcctaagaaagatcctgtcaaaatagtccgatggtaagtc

SEQ ID NO: 26249 - DNA, 143 bp, Homo sapiens
  MAP TO CHR1.3; EXPRESSED IN HEART, SIGNAL = 1.2; EXPRESSED IN PLACENTA, SIGNAL =   1; EXPRESSED IN ADULT LIVER, SIGNAL = 1.1; EXPRESSED IN BRAIN, SIGNAL = 0.83; EST_HUMAN HIT: AW516066.1, EVALUE 7.00e-75; SWISSPROT HIT: P53611, EVALUE 5.00e-21; NT HIT: gi14725830, EVALUE 2.00e-74
aggtggatccttttcataccttatttggaattgctggattgtcacttttgggagaagaacagattaaacctgttaatcctgtcttttgcatgcctgaagaagtgcttcagagagtgaatgttcagcctgagctagtgagctag

SEQ ID NO: 26250 - DNA, 172 bp, Homo sapiens
  MAP TO CHR11.3; EXPRESSED IN ADULT LIVER, SIGNAL = 0.49; EXPRESSED IN BRAIN, SIGNAL = 0.62; EXPRESSED IN PLACENTA, SIGNAL = 0.54; EXPRESSED IN LUNG, SIGNAL = 0.54; EST_HUMAN HIT: AL544165.1, EVALUE 2.00e-85; SWISSPROT HIT: P39429, EVALUE 2.00e-04; NT HIT: gi4759253, EVALUE 1.00e-85
ttagtacatgcctctttatcttcaaatgccattgatgcagcacagttgtcacaagaaacctgtctccttggacaatccttcagaatgtgaatattaatatggaatttttggaagggacgctggcattggggacaatccataagagcaaactcacaatgtgcttgatgatcct

SEQ ID NO: 26251 - DNA, 105 bp, Homo sapiens
  MAP TO CHR14.3; EXPRESSED IN LUNG, SIGNAL = 1.2; EXPRESSED IN PLACENTA, SIGNAL = 0.94; EXPRESSED IN HEART, SIGNAL = 0.75; NT HIT: gi14749902, EVALUE 2.00e-52; EST_HUMAN HIT: AW804240.1, EVALUE 2.00e-52
aataaaaacacagtaaaaggtttaaaacattaaggaacatttttcaggtataaattttataaatacaaaacaaattcacaaattactctcaatactaaataaata

SEQ ID NO: 26252 - DNA, 179 bp, Homo sapiens
  MAP TO CHR12.3; EXPRESSED IN LUNG, SIGNAL = 0.7; EXPRESSED IN PLACENTA, SIGNAL = 0.66; EXPRESSED IN ADULT LIVER, SIGNAL = 0.71; EXPRESSED IN BRAIN, SIGNAL = 0.73; NT HIT: gi16163898, EVALUE 5.00e-88; SWISSPROT HIT: O35594, EVALUE 4.00e-23; EST_HUMAN HIT: BI861909.1, EVALUE 7.00e-88
  unsure 23
  unsure 24
gatagaaacttcgggaaaaacannaaagttatacgagaaagtcatggtccaaatatgaaacaagcaaaaatgtggcgtgatttggaacaattaatggaatgtaagaaacagtgctttctgaaacaacaaagccaaacttccattggtcaggtaattcaggagggtggggaggaccggct

SEQ ID NO: 26253 - DNA, 126 bp, Homo sapiens
  MAP TO CHR4.3; EXPRESSED IN PLACENTA, SIGNAL = 0.57; EXPRESSED IN LUNG, SIGNAL = 0.64; EXPRESSED IN BRAIN, SIGNAL = 0.73; SWISSPROT HIT: Q39313, EVALUE 7.80e+00; NT HIT: gi4758009, EVALUE 2.00e-52
tccattcccagcagcacatcatacctcactgaacaaactgtgacatcacagccaaagtatgaacaaaaaaacttgtgccccggaaaagtgaacagaacactactgtgttgtaaacaaaaggaaaaa

SEQ ID NO: 26254 - DNA, 137 bp, Homo sapiens
  MAP TO CHR19.3; EXPRESSED IN LUNG, SIGNAL = 0.99; EXPRESSED IN HEART, SIGNAL = 0.67; EXPRESSED IN PLACENTA, SIGNAL = 0.62; EXPRESSED IN ADULT LIVER, SIGNAL = 0.69; NT HIT: gi15303195, EVALUE 2.00e-55; EST_HUMAN HIT: BE734178.1, EVALUE 3.00e-55; SWISSPROT HIT: P32447, EVALUE 2.00e-04
ggggtccccgcacaggcccagcctcaccgtccgccagggcttcactgcactcgaagctgatctcgaaccggaaggggctgtggaaagggctcgggttctccaggaccgccacgttcagcaccgacaccttggccatc

SEQ ID NO: 26255 - DNA, 329 bp, Homo sapiens
  MAP TO CHR12.3; EXPRESSED IN PLACENTA, SIGNAL = 2.9; EXPRESSED IN HEART, SIGNAL = 3.3; EXPRESSED IN ADULT LIVER, SIGNAL = 3.3; EXPRESSED IN BRAIN, SIGNAL = 2.7; NT HIT: gi15304081, EVALUE 0.00e+00; EST_HUMAN HIT: BF056880.1, EVALUE 0.00e+00; SWISSPROT HIT: O00744, EVALUE 1.00e-38
ggagcttccctggaatccaagaaatcccgagagaacttctctccaaagtccatgtcatggttacagccaccccattcccatgtgtcctgggggccagggctggggcttgagccagggccagggctgggcagagagtgggggaaactcttgcctcgggacagtgcctgcagctgcagcagtttggccctcagccgatcctgctcaccactgcccttccagccacagccacagctcaccagcttgcccaggctgcaggccgtggctactgcgtgcatgaccccagcagccagcatggagaaggaaaaagcactttctcggaaacctgggga

SEQ ID NO: 26256 - DNA, 213 bp, Homo sapiens
  MAP TO CHR2.3; EXPRESSED IN PLACENTA, SIGNAL = 1.8; EXPRESSED IN BRAIN, SIGNAL = 2.5; EXPRESSED IN ADULT LIVER, SIGNAL = 3.2; SWISSPROT HIT: Q13459, EVALUE 8.00e-23; NT HIT: gi4758749, EVALUE 1.00e-114; EST_HUMAN HIT: AI597946.1, EVALUE 1.00e-116
acctgcagccttttcggccctctcggcccgcaggcgtccggcctcccgaagcactgccatggcccggatagcagcccggagcacggcccagcggaacacggccacggggtccatgccgatgagctcccgcacgtaggagctgtcactgccccgcagcagggccacgatgtctggccgcatgtagtccatgttcttctcccggaagtcctggtg

SEQ ID NO: 26257 - DNA, 199 bp, Homo sapiens
  MAP TO CHR10.3; EXPRESSED IN LUNG, SIGNAL = 0.49; EXPRESSED IN PLACENTA, SIGNAL = 0.65; EXPRESSED IN ADULT LIVER, SIGNAL = 0.73; NT HIT: gi13699823, EVALUE 1.00e-108; EST_HUMAN HIT: AU127456.1, EVALUE 1.00e-106; SWISSPROT HIT: P52732, EVALUE 1.00e-31
tgcttaacacagttgaagaaactacaaaagatgtatctggtctccattccaaactggatcgtaagaaggcagttgaccaacacaatgcagaagctcaggatatttttggcaaaaacctgaatagtctgtttaataatatggaagaattaattaaggatggcagctcaaagcaaaaggccatgctagaagtacataagac

SEQ ID NO: 26258 - DNA, 198 bp, Homo sapiens
  MAP TO CHR9.3; EXPRESSED IN FETAL LIVER, SIGNAL = 2.3; EXPRESSED IN ADULT LIVER, SIGNAL = 2.6; EXPRESSED IN BRAIN, SIGNAL = 6.2; EXPRESSED IN HEART, SIGNAL = 3.4; EXPRESSED IN PLACENTA, SIGNAL =   3; NT HIT: gi14740814, EVALUE 6.00e-97; EST_HUMAN HIT: BI837489.1, EVALUE 9.00e-97; SWISSPROT HIT: Q57142, EVALUE 1.90e+00
agctgcgctaccttgttgccgagaatggggacatagccgtcagtgatgctccacttcttgaggttgacaggtcggcggctacggccccgcagggagccgtaatggaagacctcattggcactgttggagctgtagaggatgaggatggtgatgagggcaaagaggatcacgaacactgctgaccgctgctcctggaga

SEQ ID NO: 26259 - DNA, 239 bp, Homo sapiens
  MAP TO CHR14.3; EXPRESSED IN LUNG, SIGNAL = 1.1; EXPRESSED IN HEART, SIGNAL = 0.91; EXPRESSED IN PLACENTA, SIGNAL = 1.4; EXPRESSED IN BRAIN, SIGNAL = 0.8; EXPRESSED IN FETAL LIVER, SIGNAL = 1.2; EXPRESSED IN ADULT LIVER, SIGNAL = 0.73; NT HIT: gi14747688, EVALUE 0.00e+00; EST_HUMAN HIT: AU121125.1, EVALUE 0.00e+00; SWISSPROT HIT: Q15436, EVALUE 5.00e-40
cctgcagttgtttggcagacaaatcttttgttcctctgaagacatagctttttgaaatgccttcacatccaagttcatgaacctgaaccattctcccaaaagtaataagtccaaccaaagctgtaggtggtaaaagacttaatgacatctgcatggattctttcagggcttgtaaatcttcatcttccatgcaagtatcaaccacatagaggaatatcaaaggcatctgaggaccacgc

SEQ ID NO: 26260 - DNA, 388 bp, Homo sapiens
  MAP TO CHR2.3; EXPRESSED IN PLACENTA, SIGNAL = 1.6; EXPRESSED IN LUNG, SIGNAL = 2.2; EXPRESSED IN HEART, SIGNAL = 1.2; EXPRESSED IN ADULT LIVER, SIGNAL = 1.4; EXPRESSED IN FETAL LIVER, SIGNAL = 1.2; EXPRESSED IN BRAIN, SIGNAL = 1.6; EST_HUMAN HIT: AL531903.1, EVALUE 0.00e+00; SWISSPROT HIT: P55920, EVALUE 2.00e-71; NT HIT: gi16160019, EVALUE 0.00e+00
aagaactccttgctgaccaggccatgcatagccaggatcttgaggaatccatggcgaaaattttggccgatgaaggcgtagatgatggggttgaggcagctatggagaaatcccagaatctcagtggcatccagggcccggccgatgttgttgcggcgctcacagctctcctggatcacctgggtcctcatgagggtgtctgccagcaggaccaggttgtagggcagccagcaaagcaggaagatgaggacgacagcaaagatgaccctcatggctcggtgcttctgccccatgtgggccttaaacagtgtacgcagggtgaatccatagcagaacagcatgacaaacagcggcacgatgaagccaaaggtgtgaggcaggatccgca

SEQ ID NO: 26261 - DNA, 314 bp, Homo sapiens
  MAP TO CHR1.3; EXPRESSED IN HEART, SIGNAL = 1.1; EXPRESSED IN PLACENTA, SIGNAL = 1.1; EXPRESSED IN FETAL LIVER, SIGNAL = 1.1; EXPRESSED IN BRAIN, SIGNAL = 1.5; EXPRESSED IN LUNG, SIGNAL = 1.5; NT HIT: L77729.1, EVALUE 0.00e+00; EST_HUMAN HIT: BI822569.1, EVALUE 0.00e+00; SWISSPROT HIT: P33765, EVALUE 1.00e-52
tacctgacggtaagcttgacccgcaagtatcggtccacagcgatggccagcaaggacatgatggaggcgtgggtaaagataagcagtaggcaagtcataaaaaggcagctgtagaagtggattgtgatgcccaggctgacaacaatggccaaaggcatgaccagcaccccaacagcaatgtcagccagggctagagagacaatgaaatagaaggtggtggtctgcaggctggggttcagcttgaccacgcagatgaccagcacgttgcccactatggcgcagagtccaatgaaaatttccatggtgatgtaggt

SEQ ID NO: 26262 - DNA, 122 bp, Homo sapiens
  MAP TO CHR12.3; EXPRESSED IN BRAIN, SIGNAL = 4.3; EXPRESSED IN HEART, SIGNAL = 1.7; EXPRESSED IN PLACENTA, SIGNAL = 2.5; NT HIT: gi14763418, EVALUE 1.00e-62; EST_HUMAN HIT: BF807697.1, EVALUE 2.00e-62
gacacagtcttagaaacattacagaataaaaaagcccagacatcttcagtcctttggtgattaaatgcacattagcaaatctatgtcttgtcctgattcactgtcataaagcatgagcagag

SEQ ID NO: 26263 - DNA, 146 bp, Homo sapiens
  MAP TO CHR5.3; EXPRESSED IN LUNG, SIGNAL =   5; EXPRESSED IN HEART, SIGNAL = 5.1; EXPRESSED IN PLACENTA, SIGNAL = 4.6; EXPRESSED IN ADULT LIVER, SIGNAL = 5.6; EXPRESSED IN FETAL LIVER, SIGNAL = 3.5; EXPRESSED IN BRAIN, SIGNAL = 6.3; NT HIT: gi4503536, EVALUE 2.00e-53; EST_HUMAN HIT: BF964052.1, EVALUE 2.00e-69; SWISSPROT HIT: Q05319, EVALUE 8.80e-01
ccaagctcctgactcttacctcagtcccaaccccttgacaggcaccaggatcatctacgaccgaaagttcctgctggagtgcaagaactcacccattgcccggacacccccctgctgcctccctcagattcccggggtcacaactc

SEQ ID NO: 26264 - DNA, 126 bp, Homo sapiens
  MAP TO CHR5.3; EXPRESSED IN FETAL LIVER, SIGNAL = 2.1; EXPRESSED IN ADULT LIVER, SIGNAL =   2; EXPRESSED IN BRAIN, SIGNAL = 2.2; EXPRESSED IN PLACENTA, SIGNAL = 1.7; EXPRESSED IN LUNG, SIGNAL = 1.9; EXPRESSED IN HEART, SIGNAL = 2.1; EST_HUMAN HIT: BI918265.1, EVALUE 7.00e-53; NT HIT: gi14734137, EVALUE 1.00e-53; SWISSPROT HIT: P28818, EVALUE 2.00e-08
tcatctcttgcagactgactgcatgaaggccgaatgctttgagtccttgtcggccatggagctggcagaacagatcaccctcctggaccatgtcattttcagaagcattccctacgagtgagtgcc

SEQ ID NO: 26265 - DNA, 167 bp, Homo sapiens
  MAP TO CHR17.3; EXPRESSED IN LUNG, SIGNAL = 1.5; EXPRESSED IN HEART, SIGNAL = 3.1; EXPRESSED IN ADULT LIVER, SIGNAL = 2.4; EXPRESSED IN PLACENTA, SIGNAL = 2.2; NT HIT: gi14774791, EVALUE 3.00e-86; SWISSPROT HIT: Q9UL17, EVALUE 2.00e-26; EST_HUMAN HIT: AA333545.1, EVALUE 5.50e-02
ctcacctcggcattctggtaggcagtcacggcaatgaactgggtttcttggaaagtaaagatatgcgtgttggaagcgttgcaggctgcctctggctctccgtcgttcacctcaacgatatgcagccggggctggtacttatggagggactggagcacaatcatctg

SEQ ID NO: 26266 - DNA, 133 bp, Homo sapiens
  MAP TO CHR5.3; EXPRESSED IN PLACENTA, SIGNAL = 1.1; EXPRESSED IN BRAIN, SIGNAL = 0.81; EXPRESSED IN ADULT LIVER, SIGNAL = 0.97; EST_HUMAN HIT: AW589890.1, EVALUE 9.00e-62; NT HIT: AF270645.1, EVALUE 4.00e-69; SWISSPROT HIT: P28300, EVALUE 2.00e-18
caaataacacttacggtgaaattgtgcagcctgaggcatacgcatgatgtcctgtgtagcgaatgtcacagcgcacaacattgttggtatagtcagattcaggaaccaggtagctggggtttacactgacctg

SEQ ID NO: 26267 - DNA, 169 bp, Homo sapiens
  MAP TO CHR17.3; EXPRESSED IN LUNG, SIGNAL = 0.89; EXPRESSED IN PLACENTA, SIGNAL = 1.1; EXPRESSED IN FETAL LIVER, SIGNAL = 0.6; EXPRESSED IN BRAIN, SIGNAL = 0.81; EST_HUMAN HIT: AV752912.1, EVALUE 3.00e-90; NT HIT: L38932.1, EVALUE 1.00e-76; SWISSPROT HIT: Q14457, EVALUE 5.00e-25
acctgtagggaagacaaaaacgtgtctcgcctttctcaacctcttctttgaactgctgcacacagtccaggaaagccaccattgcatggtcaaacttgttgtcccagaaaaaccgcaaccccccagaacagtataacggcagctcctgcccaagaagagaaaactggct

SEQ ID NO: 26268 - DNA, 194 bp, Homo sapiens
  MAP TO CHR11.3; EXPRESSED IN ADULT LIVER, SIGNAL = 1.3; EXPRESSED IN BRAIN, SIGNAL = 1.5; EXPRESSED IN PLACENTA, SIGNAL = 1.6; EXPRESSED IN HEART, SIGNAL = 1.6; SWISSPROT HIT: P10033, EVALUE 7.30e+00; EST_HUMAN HIT: BI824239.1, EVALUE 9.00e-66; NT HIT: AF081250.1, EVALUE 1.00e-73
caattaccgtaatggaagctttgaagttttccagttctttctcagtgttctcctctgtcaggttgcgttccctttcagcctggttaattctagattccagagtgtagctgtcatttctaaaggccaaggacagttgcacaaacacgttctgttgggaacaagggtgtgagagaggtgctgggaggagttactgc

SEQ ID NO: 26269 - DNA, 291 bp, Homo sapiens
  MAP TO CHR1.3; EXPRESSED IN PLACENTA, SIGNAL = 0.66; EXPRESSED IN BRAIN, SIGNAL = 0.58; EXPRESSED IN FETAL LIVER, SIGNAL = 1.1; EXPRESSED IN ADULT LIVER, SIGNAL = 0.63; NT HIT: M73255.1, EVALUE 0.00e+00; EST_HUMAN HIT: BE875778.1, EVALUE 0.00e+00; SWISSPROT HIT: P19320, EVALUE 5.00e-46
cctttcagtatcacccaagaatacagttatttctgtgaatccatccacaaagctgcaagaaggtggctctgtgaccatgacctgttccagcgagggtctaccagctccagagattttctggagtaagaaattagataatgggaatctacagcacctttctggaaatgcaactctcaccttaattgctatgaggatggaagattctggaatttatgtgtgtgaaggagttaatttgattgggaaaaacagaaaagaggtggaattaattgttcaaggtgagtagaatgtgaa

SEQ ID NO: 26270 - DNA, 113 bp, Homo sapiens
  MAP TO CHR11.3; EXPRESSED IN LUNG, SIGNAL = 2.3; EXPRESSED IN PLACENTA, SIGNAL =   2; EXPRESSED IN HEART, SIGNAL = 2.3; EXPRESSED IN ADULT LIVER, SIGNAL = 2.5; EXPRESSED IN BRAIN, SIGNAL = 2.9; NT HIT: L49431.1, EVALUE 3.00e-57; EST_HUMAN HIT: AA702174.1, EVALUE 4.00e-57; SWISSPROT HIT: Q13490, EVALUE 3.00e-15
tgaactgtttgtttcaccaggtctctattaaagcccatttccaaggcagatttaaccacaggtgtattcatcatgacagcatcttctgaagaactttctccaggtccaaaatg

SEQ ID NO: 26271 - DNA, 105 bp, Homo sapiens
  MAP TO CHR16.3; EXPRESSED IN FETAL LIVER, SIGNAL = 0.46; EXPRESSED IN ADULT LIVER, SIGNAL = 1.5; EXPRESSED IN BRAIN, SIGNAL = 1.7; EXPRESSED IN LUNG, SIGNAL = 1.5; EXPRESSED IN PLACENTA, SIGNAL = 1.2; NT HIT: gi7661761, EVALUE 2.00e-52; EST_HUMAN HIT: AI690260.1, EVALUE 2.00e-52; SWISSPROT HIT: P47973, EVALUE 1.20e+00
tccttcatgtaagtccaaacttctctttcctcaggactatgagcaaaggaacagtttccaacatattgacattttttcccagaagcaatatggttgcacagctgt

SEQ ID NO: 26272 - DNA, 163 bp, Homo sapiens
  MAP TO CHR3.3; EXPRESSED IN PLACENTA, SIGNAL = 0.61; EXPRESSED IN BRAIN, SIGNAL = 0.4; NT HIT: gi15297285, EVALUE 5.00e-72; EST_HUMAN HIT: BI829953.1, EVALUE 8.00e-72; SWISSPROT HIT: Q01344, EVALUE 5.00e-22
acacttacgtcatcttcttttggagcgttaattttcacttgatattctagattaacattcctttgctcttgatcaggatttggtttccattgtaaaagaacttgagccaaaacagtaactttaatggtgaaattgacaggtgggagaagtgaaactgttgatt

SEQ ID NO: 26273 - DNA, 145 bp, Homo sapiens
  MAP TO CHR9.3; EXPRESSED IN PLACENTA, SIGNAL = 1.4; EXPRESSED IN HEART, SIGNAL = 1.2; EXPRESSED IN BRAIN, SIGNAL = 1.6; NT HIT: AF095143.1, EVALUE 8.00e-74; SWISSPROT HIT: P25772, EVALUE 8.90e-01; EST_HUMAN HIT: BG007394.1, EVALUE 4.00e-67
ccttacatcatggggtaggtgtcctggtgggaatgaagccagcagggcacaggtttcccaaagacgttcctcagagtgacctgggacccaaaggccacctccagtggctgaccctgagtgatccgagctagtcctccctgagaca

SEQ ID NO: 26274 - DNA, 201 bp, Homo sapiens
  MAP TO CHR22.3; EXPRESSED IN PLACENTA, SIGNAL = 0.74; EXPRESSED IN ADULT LIVER, SIGNAL = 0.65; EXPRESSED IN FETAL LIVER, SIGNAL = 0.8; EXPRESSED IN LUNG, SIGNAL = 1.1; EXPRESSED IN HEART, SIGNAL = 0.62; NT HIT: AJ007378.1, EVALUE 1.00e-91; EST_HUMAN HIT: H72018.1, EVALUE 1.00e-52; SWISSPROT HIT: P19440, EVALUE 2.00e-22
ccactcaccagccgcctggatgtccttcacaatctgggccatgaggctgccgttgtagaaggcctgggcaccctcgatggccagcatctcataggtgtcagccagccgcggcagggtcagtctctccccctcccgaagcacctttctatcccggcagaacacctcaccggggcagagggggctcatgtgaggcagcaggtg

SEQ ID NO: 26275 - DNA, 154 bp, Homo sapiens
  MAP TO CHR17.3; EXPRESSED IN HEART, SIGNAL = 1.3; EXPRESSED IN PLACENTA, SIGNAL = 0.92; EXPRESSED IN BRAIN, SIGNAL = 1.4; EXPRESSED IN ADULT LIVER, SIGNAL = 1.4; SWISSPROT HIT: Q9UF02, EVALUE 8.00e-23; NT HIT: AF142621.1, EVALUE 1.00e-81; EST_HUMAN HIT: AI650714.1, EVALUE 5.00e-05
ccaggcctctctctcgtggtgggcctggtgctctacatctccagcatcaacgatgagatgctcaacaggaccaaggatgcagagacctacttcaactacaagtatgggtggtcgtttgccttcgccgccatctccttccttttaacggaggtaa

SEQ ID NO: 26276 - DNA, 205 bp, Homo sapiens
  MAP TO CHR3.3; EXPRESSED IN PLACENTA, SIGNAL = 0.52; EXPRESSED IN FETAL LIVER, SIGNAL = 4.9; EXPRESSED IN ADULT LIVER, SIGNAL = 8.3; EXPRESSED IN BRAIN, SIGNAL = 0.53; NT HIT: D45036.1, EVALUE 1.00e-109; EST_HUMAN HIT: BF921039.1, EVALUE 1.00e-106; SWISSPROT HIT: P00450, EVALUE 6.00e-35
cttacctgtctcccatttgcatgtaaacttcctttcttgcatattttcattggcccaataagcccagtgaatatatctttagtgggttccacagcagaataatacatcttagctagacacacaggatctgcattagtgggtcctacttctttggggacagtccattcataggtgaatgtttctgtgggtgccacatgggaggctg

SEQ ID NO: 26277 - DNA, 152 bp, Homo sapiens
  MAP TO CHR15.3; EXPRESSED IN ADULT LIVER, SIGNAL = 0.79; EXPRESSED IN FETAL LIVER, SIGNAL = 0.56; EXPRESSED IN PLACENTA, SIGNAL = 0.75; SWISSPROT HIT: Q13972, EVALUE 3.00e-19; NT HIT: L26584.1, EVALUE 4.00e-60; EST_HUMAN HIT: BF850777.1, EVALUE 6.00e-60
accatcctcatcttggagaagttgaccaggccgtcttccgtgtaattgggcgtcccctcctcgatgaaggccaggtcggtgaggtacatccccaggtaagggacacagggtgggtcacaacttggaagcaaacggcattaacacaagttttt

SEQ ID NO: 26278 - DNA, 187 bp, Homo sapiens
  MAP TO CHR3.3; EXPRESSED IN PLACENTA, SIGNAL = 1.6; EXPRESSED IN LUNG, SIGNAL = 7.1; EXPRESSED IN FETAL LIVER, SIGNAL =   5; EXPRESSED IN ADULT LIVER, SIGNAL = 2.7; SWISSPROT HIT: P10630, EVALUE 9.00e-28; NT HIT: gi14735111, EVALUE 6.00e-97; EST_HUMAN HIT: BG504593.1, EVALUE 2.00e-91
tacttacaaaggtatcttctgtttaacatatcaaacactctcccgggtgtaccaacaacaatatgtggtgcttcagcctgcagtttttgcatttcatttcgaacatttgttccaccaatgcaggcatgacaagtggctcccatatagtctccaagtgccagaattaccttttggatctaaaacccaa

SEQ ID NO: 26279 - DNA, 127 bp, Homo sapiens
  MAP TO CHR17.3; EXPRESSED IN BRAIN, SIGNAL =   1; EXPRESSED IN HEART, SIGNAL = 1.6; EXPRESSED IN PLACENTA, SIGNAL = 1.3; SWISSPROT HIT: P34896, EVALUE 5.00e-16; NT HIT: gi16165561, EVALUE 9.00e-58; EST_HUMAN HIT: AI738883.1, EVALUE 1.00e-57
tcttgtaggtgacagaagcgctctgcggcccagtggactgcggctggggaccccagcactgacgtcccgtggacttttggaaaaagacttccaaaaagtagcccactttattcacagaggtaaggat

SEQ ID NO: 26280 - DNA, 156 bp, Homo sapiens
  MAP TO CHR22.3; EXPRESSED IN FETAL LIVER, SIGNAL = 2.8; EXPRESSED IN ADULT LIVER, SIGNAL = 2.6; EXPRESSED IN PLACENTA, SIGNAL = 0.96; SWISSPROT HIT: Q06879, EVALUE 5.80e+00; NT HIT: gi16191418, EVALUE 7.00e-59; EST_HUMAN HIT: BF958855.1, EVALUE 1.00e-58
tacctgctgggatggtcccccaactcctgggacggggcctgctaatccaccaggagcctggggaattggtacaccagctgatactcctctaccagctgccctaacaactccagggcctcctgcagctccagcaagtggtacccgagcaatgccagt

SEQ ID NO: 26281 - DNA, 130 bp, Homo sapiens
  MAP TO CHR1.3; EXPRESSED IN BRAIN, SIGNAL = 3.3; EXPRESSED IN LUNG, SIGNAL = 4.2; EXPRESSED IN PLACENTA, SIGNAL = 2.9; NT HIT: M37435.1, EVALUE 4.00e-60; EST_HUMAN HIT: BI868377.1, EVALUE 4.00e-67
gtgggagaacctcctgggccgccagccagagccggtctttaggctgtgttgttcgcccaggtttctgcatcttgcactttgacattcccaagagggaagggactagtgggagagagcaagggaggggagg

SEQ ID NO: 26282 - DNA, 249 bp, Homo sapiens
  MAP TO CHR16.3; EXPRESSED IN BRAIN, SIGNAL = 1.9; EXPRESSED IN LUNG, SIGNAL = 1.9; EXPRESSED IN PLACENTA, SIGNAL =   1; SWISSPROT HIT: P34110, EVALUE 9.00e-11; NT HIT: gi15318057, EVALUE 0.00e+00; EST_HUMAN HIT: BI093817.1, EVALUE 0.00e+00
accttacctcctccccatttttgtccgtgtttctgccagaccagaagagatgtgcacaggtgctcacagctcggccctgatcaggtttctttagaagtttggatgcagcaagggcacactgagtcctcagaggttcgtgattctcttcactgaagcacttcatcctttcaaaagtgccaatgatcaaggtgatggcagctagctgtgctttggaatcgctgatttcatcttcatacagagaaaatgcct

SEQ ID NO: 26283 - DNA, 144 bp, Homo sapiens
  MAP TO CHR6.3; EXPRESSED IN LUNG, SIGNAL = 0.86; EXPRESSED IN PLACENTA, SIGNAL = 0.52; EXPRESSED IN BRAIN, SIGNAL = 0.44; SWISSPROT HIT: O00716, EVALUE 9.00e-22; NT HIT: D38550.1, EVALUE 5.00e-72; EST_HUMAN HIT: BI254739.1, EVALUE 7.00e-72
tagagcctacaaatacatttggcaagtacccaagggcccattgaggtttacttatgtccagaagagactgaaacacacagtccaatgaaaacaaacaaccaagaccacaatgggaatatccctaaacccgcttccaaaggtaaa

SEQ ID NO: 26284 - DNA, 248 bp, Homo sapiens
  MAP TO CHR2.3; EXPRESSED IN BRAIN, SIGNAL = 0.28; EXPRESSED IN LUNG, SIGNAL = 1.4; EXPRESSED IN PLACENTA, SIGNAL = 0.47; EXPRESSED IN ADULT LIVER, SIGNAL = 0.39; NT HIT: gi4506810, EVALUE 0.00e+00; EST_HUMAN HIT: BG724147.1, EVALUE 8.40e-02; SWISSPROT HIT: Q01118, EVALUE 6.00e-39
tgttaaagaagatatttctgaccataccctttctgaattgagcaacacccaagattttctcaaagataaggaaaaaagcagtggcacagagaaaaacgctactgaaaatgagagccaatcacttatccccagtcctagtgtctcagaaactgtaccaattgcttcaggagaatctgatatagaaaatctggataataaggagattcagagtaagtctggtgatggaggcagcaaagaggtaagatgtt

SEQ ID NO: 26285 - DNA, 120 bp, Homo sapiens
  MAP TO CHR18.3; EXPRESSED IN LUNG, SIGNAL = 0.76; EXPRESSED IN PLACENTA, SIGNAL = 1.4; EXPRESSED IN HEART, SIGNAL = 1.1; EXPRESSED IN ADULT LIVER, SIGNAL = 0.99; NT HIT: gi13646672, EVALUE 2.00e-61; EST_HUMAN HIT: H74208.1, EVALUE 1.00e-57
ccatctggatttttaactgaatgaatctcatgggtttaaccaaacatgcatgtaatcctgaataccatgaattaaatgcggaattgcccagggacgaggaaaccttcaagaaacaaggtc

SEQ ID NO: 26286 - DNA, 187 bp, Homo sapiens
  MAP TO CHR13.3; EXPRESSED IN PLACENTA, SIGNAL = 0.75; EXPRESSED IN LUNG, SIGNAL = 0.85; EXPRESSED IN HEART, SIGNAL = 0.63; EXPRESSED IN BRAIN, SIGNAL = 0.39; SWISSPROT HIT: P28715, EVALUE 2.00e-30; NT HIT: AF255433.1, EVALUE 1.00e-101; EST_HUMAN HIT: AI702437.1, EVALUE 3.00e-96
cccagatattagcatttggttaaaccaagcacttaaaggagtccgggatcgccatgggaactcaatagaaaatcctcatcttctcactttgtttcatcggctctgcaaactcttattttttcgaattcgtcctatttttgtgtttgatggggatgctccactattgaagaaacagactttggtaagt

SEQ ID NO: 26287 - DNA, 139 bp, Homo sapiens
  MAP TO CHR1.3; EXPRESSED IN FETAL LIVER, SIGNAL = 0.66; EXPRESSED IN ADULT LIVER, SIGNAL = 1.6; EXPRESSED IN LUNG, SIGNAL = 0.9; EXPRESSED IN HEART, SIGNAL = 1.8; EXPRESSED IN PLACENTA, SIGNAL = 1.1; NT HIT: gi7706271, EVALUE 2.00e-55; EST_HUMAN HIT: AW178029.1, EVALUE 4.00e-70; SWISSPROT HIT: P32469, EVALUE 1.00e-09
tcctttgttgcattacctgtaaaccacagcagcctacagcattcattatggaggcattgtgaataactctataaggaattcccagctttgttgctcttagaacaagatcactgtgtgttgtggccctgtagtgagaaaa

SEQ ID NO: 26288 - DNA, 196 bp, Homo sapiens
  MAP TO CHR3.3; EXPRESSED IN FETAL LIVER, SIGNAL = 3.4; EXPRESSED IN ADULT LIVER, SIGNAL = 4.4; EXPRESSED IN BRAIN, SIGNAL =   4; EXPRESSED IN HEART, SIGNAL = 3.1; EXPRESSED IN PLACENTA, SIGNAL = 6.3; NT HIT: gi15297768, EVALUE 1.00e-103; EST_HUMAN HIT: BG468714.1, EVALUE 1.00e-103; SWISSPROT HIT: Q05655, EVALUE 6.00e-34
caccttctccaggatgtccttggactccttggtgatccagcggggataatgtggcgtgtccacacggatggactcgaagagttcatcctcatcatcaccatggaagggggactggccaatgagcatctcgtacagaaggaccccgaaagaccaccagtccacagagaatgtgtacttcaggccctgtaggatctgg

SEQ ID NO: 26289 - DNA, 279 bp, Homo sapiens
  MAP TO CHR16.3; EXPRESSED IN HEART, SIGNAL = 6.7; EXPRESSED IN FETAL LIVER, SIGNAL = 3.6; EXPRESSED IN BRAIN, SIGNAL = 7.7; EXPRESSED IN ADULT LIVER, SIGNAL = 4.9; EXPRESSED IN LUNG, SIGNAL =   6; EXPRESSED IN PLACENTA, SIGNAL = 3.8; NT HIT: gi15315836, EVALUE 0.00e+00; EST_HUMAN HIT: BI907862.1, EVALUE 0.00e+00; SWISSPROT HIT: O75324, EVALUE 3.00e-32
agcactgaccatgtctattatggaccacagccccaccacgggcgtggtcacagtcatcgtcatcctcattgccatcgcggccctgggggccttgatcctgggctgctggtgctacctgcggctgcagcgcatcagccagtcagaggacgaggagagcatcgtgggggatggggagaccaaggaacccttcctgctggtgcagtattcggccaagggaccgtgcgtggagagaaaggccaagctgatgactcccaacggcccggaagtccacggctgagc

SEQ ID NO: 26290 - DNA, 130 bp, Homo sapiens
  MAP TO CHR5.3; EXPRESSED IN FETAL LIVER, SIGNAL = 1.1; EXPRESSED IN ADULT LIVER, SIGNAL = 1.1; EXPRESSED IN HEART, SIGNAL = 0.73; EXPRESSED IN PLACENTA, SIGNAL = 0.82; SWISSPROT HIT: P20700, EVALUE 1.00e-16; NT HIT: L37742.1, EVALUE 3.00e-67; EST_HUMAN HIT: BF339185.1, EVALUE 9.00e-65
tggcggaaataagggatcaaatgcagcaacagctgaatgactatgaacagcttcttgatgtaaagttagccctggacatggaaatcagtgcttacaggaaactcttagaaggcgaagaagagaggtaagg

SEQ ID NO: 26291 - DNA, 231 bp, Homo sapiens
  MAP TO CHR17.3; EXPRESSED IN LUNG, SIGNAL = 1.2; EXPRESSED IN PLACENTA, SIGNAL = 0.81; EXPRESSED IN HEART, SIGNAL = 1.3; EXPRESSED IN FETAL LIVER, SIGNAL = 1.1; EXPRESSED IN ADULT LIVER, SIGNAL = 1.1; EST_HUMAN HIT: BE409167.1, EVALUE 2.00e-85; SWISSPROT HIT: P08514, EVALUE 1.00e-35; NT HIT: M33320.1, EVALUE 1.00e-127
catctggcccacaggaggcatgatctgctggtgggcgctccactgtatatggagagccgggcagaccgaaaactggccgaagtggggcgtgtgtatttgttcctgcagccgcgaggcccccacgcgctgggtgcccccagcctcctgctgactggcacacagctctatgggcgattcggctctgccatcgcacccctgggcgacctcgaccgggatggctacaatggtgag

SEQ ID NO: 26292 - DNA, 189 bp, Homo sapiens
  MAP TO CHR2.3; EXPRESSED IN ADULT LIVER, SIGNAL = 1.1; EXPRESSED IN PLACENTA, SIGNAL = 4.3; SWISSPROT HIT: P14895, EVALUE 2.90e-01; EST_HUMAN HIT: BI252199.1, EVALUE 5.00e-95; NT HIT: AF227166.1, EVALUE 1.00e-101
tcacacctgacatcgaggcaggagacgacttcatggccacaggacttggtccgaaggggcaagaagttggagccatcccaggctgtgaggtagcagggagggggctggcgcaggcgcttgtggggaatttgcactgtgaagagtcgcaggccagcaggctggtctggaacctgcccaaacctgggggcc

SEQ ID NO: 26293 - DNA, 296 bp, Homo sapiens
  MAP TO CHR19.3; EXPRESSED IN FETAL LIVER, SIGNAL = 2.5; EXPRESSED IN ADULT LIVER, SIGNAL = 1.8; EXPRESSED IN BRAIN, SIGNAL = 1.5; EXPRESSED IN PLACENTA, SIGNAL = 1.5; EXPRESSED IN HEART, SIGNAL = 1.7; SWISSPROT HIT: Q14773, EVALUE 2.00e-51; EST_HUMAN HIT: BE314619.1, EVALUE 0.00e+00; NT HIT: X93093.1, EVALUE 0.00e+00
cttgccttagaaccgccccacagcgtgattttggagcctccggtcttaaagggcaggaaatacactttgcgctgccacgtgacgcaggtgttcccggtgggctacttggtggtgaccctgaggcatggaagccgggtcatctattccgaaagcctggagcgcttcaccggcctggatctggccaacgtgaccttgacctacgagtttgctgctggaccccgcgacttctggcagcccgtgatctgccacgcgcgcctcaatctcgacggcctggtggtccgcaacagctcggcacc

SEQ ID NO: 26294 - DNA, 212 bp, Homo sapiens
  MAP TO CHR17.3; EXPRESSED IN PLACENTA, SIGNAL = 2.4; EXPRESSED IN FETAL LIVER, SIGNAL = 1.5; EXPRESSED IN ADULT LIVER, SIGNAL = 1.2; SWISSPROT HIT: P12526, EVALUE 3.70e+00; EST_HUMAN HIT: BF026518.1, EVALUE 1.00e-95; NT HIT: gi14772631, EVALUE 1.00e-95
actctaaccaggcctggccctctcctgtgtcttgcagaacttcagcgagagggaagcatcgagactctgagtaacagctcaggctccaccagcggcagcataccaagaaactttgatggctaccgatctccgctgcccaccaatgagagccagcccctcagcctcttcccgactggcttcccgtaggtaccagcaacctgcttctgactggc

SEQ ID NO: 26295 - DNA, 133 bp, Homo sapiens
  MAP TO CHR17.3; EXPRESSED IN LUNG, SIGNAL =  19; EXPRESSED IN PLACENTA, SIGNAL = 2.3; SWISSPROT HIT: P23131, EVALUE 3.00e-18; NT HIT: gi15309255, EVALUE 6.00e-68; EST_HUMAN HIT: BI759863.1, EVALUE 2.00e-68
cccttttttctgagctctggtttgcctttcttgactgtggccatcaccatgtcacccacaccagcagcgggaagtctgttcagccgtcccttgatccccttcacggagatgatatacaggtttttggctccta

SEQ ID NO: 26296 - DNA, 133 bp, Homo sapiens
  MAP TO CHR2.3; EXPRESSED IN LUNG, SIGNAL = 2.1; EXPRESSED IN HEART, SIGNAL = 1.4; EXPRESSED IN FETAL LIVER, SIGNAL =   2; EXPRESSED IN ADULT LIVER, SIGNAL = 2.2; EXPRESSED IN PLACENTA, SIGNAL = 1.6; SWISSPROT HIT: P13995, EVALUE 7.00e-14; EST_HUMAN HIT: BF035694.1, EVALUE 5.00e-54; NT HIT: X16396.1, EVALUE 3.00e-54
cagcctgcctgtcttgtttctatgtaggagtcagacaaaaagctgggtatatcactccagttcctggaggtgttggccccatgacagtggcaatgctaatgaagaataccattattgctgcaaaaaaggtgct

SEQ ID NO: 26297 - DNA, 168 bp, Homo sapiens
  MAP TO CHR5.3; EXPRESSED IN PLACENTA, SIGNAL =  10; EXPRESSED IN HEART, SIGNAL = 5.1; NT HIT: M25745.1, EVALUE 3.00e-86; SWISSPROT HIT: P09486, EVALUE 1.00e-25; EST_HUMAN HIT: BF769998.1, EVALUE 6.00e-79
acactcactctgcttgatgccgaagcagccggcccactcatccagggcgatgtacttgtcattgtccaggtcacaggtctcgaaaaagcgggtggtgcaatgctccatggggatgaggggagcacgcagtggagccagctcggtgtgggagaggtacctgcagggaag

SEQ ID NO: 26298 - DNA, 154 bp, Homo sapiens
  MAP TO CHR3.3; EXPRESSED IN LUNG, SIGNAL = 5.2; EXPRESSED IN HEART, SIGNAL = 4.3; EXPRESSED IN PLACENTA, SIGNAL = 3.2; EXPRESSED IN FETAL LIVER, SIGNAL = 4.3; EXPRESSED IN BRAIN, SIGNAL = 3.4; SWISSPROT HIT: Q10005, EVALUE 4.00e-13; EST_HUMAN HIT: AL553030.1, EVALUE 8.00e-75; NT HIT: AB028859.1, EVALUE 5.00e-75
taggtagttagaaacaaacctgtggcaaggcaggctcctggcaaacggaagtgcaattgtcggcaagagatgcggaccacccagctgggccctgggcgcttccaaatgacccaggaggtggtctgcgacgaatgccctaatgtcaagtaagtga

SEQ ID NO: 26299 - DNA, 137 bp, Homo sapiens
  MAP TO CHR21.3; EXPRESSED IN LUNG, SIGNAL = 1.4; EXPRESSED IN HEART, SIGNAL = 1.5; EXPRESSED IN PLACENTA, SIGNAL = 1.3; EXPRESSED IN FETAL LIVER, SIGNAL = 1.7; EXPRESSED IN ADULT LIVER, SIGNAL = 1.2; EXPRESSED IN BRAIN, SIGNAL = 1.4; SWISSPROT HIT: Q13112, EVALUE 5.00e-20; EST_HUMAN HIT: BE792667.1, EVALUE 3.00e-68; NT HIT: gi4885104, EVALUE 2.00e-68
gctgtcaaaagccccttgccggggccttcggaggagaagaccctgcagcccagtagtcaaaacacaaaagcccacccatcccggagggtcactctgaacacactgcaagcctggagcaagacaacaccccggtaaga

SEQ ID NO: 26300 - DNA, 186 bp, Homo sapiens
  MAP TO CHR1.3; EXPRESSED IN ADULT LIVER, SIGNAL = 0.67; EXPRESSED IN LUNG, SIGNAL = 0.43; EXPRESSED IN PLACENTA, SIGNAL = 0.5; EXPRESSED IN HEART, SIGNAL = 1.3; SWISSPROT HIT: P39877, EVALUE 5.00e-12; EST_HUMAN HIT: AI349447.1, EVALUE 4.00e-34; NT HIT: gi13632632, EVALUE 7.00e-78
ggtgtcacctggggacatgggctatcttccaggtgtgcctgctgtgcaaggaggcttgctggacctaaaatcaatgatcgagaaggtgacagggaagaacgccctgacaaactacggcttctacggctgttactgcggctggggcggccgaggaacccccaaggatggcaccgattggtgagctga

SEQ ID NO: 26301 - DNA, 233 bp, Homo sapiens
  MAP TO CHR17.3; EXPRESSED IN PLACENTA, SIGNAL = 0.94; EXPRESSED IN FETAL LIVER, SIGNAL = 0.95; EXPRESSED IN BRAIN, SIGNAL = 0.87; EXPRESSED IN LUNG, SIGNAL = 1.7; SWISSPROT HIT: P06394, EVALUE 7.00e-12; EST_HUMAN HIT: AI150703.1, EVALUE 1.00e-120; NT HIT: AF227759.1, EVALUE 2.00e-87
acctacccatcatctcctcctataaggagacagtaggtctcaatttctttttccaggtggagcttgatgtccaggagctgctcatactccagcttctggccctcggtctcggttctgacctggtgcagctgctcctccagggccccgatctgagcctggatctgcgccagctgcgcacagtagttgctctcggtctctgtcaaggagcactccagggagtgtttctgtcagga

SEQ ID NO: 26302 - DNA, 174 bp, Homo sapiens
  MAP TO CHR17.3; EXPRESSED IN HEART, SIGNAL = 0.98; EXPRESSED IN PLACENTA, SIGNAL = 1.3; EXPRESSED IN LUNG, SIGNAL = 1.3; EXPRESSED IN BRAIN, SIGNAL = 1.1; EXPRESSED IN FETAL LIVER, SIGNAL = 1.8; SWISSPROT HIT: P23342, EVALUE 5.00e-05; EST_HUMAN HIT: AL532100.1, EVALUE 2.00e-91; NT HIT: gi14773850, EVALUE 1.00e-91
cagctaggaggcatagtgcgtgacggagagaaggtggtggagataaacccagggctactggtcacggtgaaaaccacctccaggagctaccaagctaagagcttggtcatcacagcaggtccttggaccaaccagctcctccgtcccctgggcattgagatgcctctccaggta

SEQ ID NO: 26303 - DNA, 134 bp, Homo sapiens
  MAP TO CHR17.3; EXPRESSED IN FETAL LIVER, SIGNAL = 1.1; EXPRESSED IN BRAIN, SIGNAL = 0.96; EXPRESSED IN ADULT LIVER, SIGNAL =   1; EXPRESSED IN PLACENTA, SIGNAL = 1.1; EXPRESSED IN HEART, SIGNAL = 1.1; SWISSPROT HIT: Q41578, EVALUE 3.00e-01; EST_HUMAN HIT: BG762537.1, EVALUE 2.00e-69; NT HIT: gi7661657, EVALUE 2.00e-68
acctttgcccagccctgaggtggcgcctgtgatcaccaccacagcattccgcaggtaggccttcccgcgcacccactgcagcagccggaagaggccgaagacgcccaggcagccgaacagcaggggcaggatgg

SEQ ID NO: 26304 - DNA, 140 bp, Homo sapiens
  MAP TO CHR2.3; EXPRESSED IN LUNG, SIGNAL = 1.2; EXPRESSED IN HEART, SIGNAL = 1.1; EXPRESSED IN PLACENTA, SIGNAL = 0.76; EXPRESSED IN BRAIN, SIGNAL = 1.3; SWISSPROT HIT: Q06141, EVALUE 2.00e-20; EST_HUMAN HIT: AA377393.1, EVALUE 7.00e-72; NT HIT: L15533.1, EVALUE 3.00e-73
cacctgtgtggggtcatggagcccaatccagacgtatgagtagctgttaccaatgctcttcaccagggaggacacgaaggatccctcagccccactgagcacagacaccaggtttccagagggccgcttctggcaggcca

SEQ ID NO: 26305 - DNA, 330 bp, Homo sapiens
  MAP TO CHR5.3; EXPRESSED IN BRAIN, SIGNAL = 1.2; EXPRESSED IN LUNG, SIGNAL = 0.58; EXPRESSED IN HEART, SIGNAL = 0.51; EXPRESSED IN PLACENTA, SIGNAL = 0.58; EST_HUMAN HIT: BF089693.1, EVALUE 1.00e-106; NT HIT: gi14728137, EVALUE 0.00e+00; SWISSPROT HIT: Q9Y5I3, EVALUE 5.00e-47
cgctggtggatgtcaacgtgtacctgatcatcgccatctgcgcggtgtccagcctgctggtgctcacactgctgctgtacacggcgctgcggtgctcagtgccgcccactgagggtgcgtatgtgccgggcaagcccactctggtgtgctccagcgcgttggggagctggtcgaactcacagcagaggcggcagagggtgtgctctagcgagggcccacccaagaccgacctcatggccttcagcccaggcctatctccaagtcttaacacgtcagaaagaaatgaacaaccagaagcaaatttggatctttctggtaatgtaagtccaa

SEQ ID NO: 26306 - DNA, 395 bp, Homo sapiens
  MAP TO CHR19.3; EXPRESSED IN PLACENTA, SIGNAL = 0.99; EXPRESSED IN LUNG, SIGNAL = 2.3; EXPRESSED IN BRAIN, SIGNAL =   1; SWISSPROT HIT: P25090, EVALUE 4.00e-65; EST_HUMAN HIT: BI912536.1, EVALUE 0.00e+00; NT HIT: gi14754910, EVALUE 0.00e+00
acctttgtcctcggggtcctgggcaatgggcttgtgatctgggtggctggattccggatgacacgcacagtcaccaccatctgttacctgaacctggccctggctgacttttctttcacggccacattaccattcctcattgtctccatggccatgggagaaaaatggccttttggctggttcctgtgtaagttaattcacatcgtggtggacatcaacctctttggaagtgtcttcttgattggtttcattgcactggaccgctgcatttgtgtcctgcatccagtctgggcccagaaccaccgcactgtgagtctggccatgaaggtgatcgtcggaccttggattcttgctctagtccttaccttgccagttttcctctttttgactacagt

SEQ ID NO: 26307 - DNA, 140 bp, Homo sapiens
  MAP TO CHR19.3; EXPRESSED IN PLACENTA, SIGNAL = 1.1; EXPRESSED IN LUNG, SIGNAL = 1.3; EXPRESSED IN ADULT LIVER, SIGNAL = 0.98; SWISSPROT HIT: P51693, EVALUE 3.00e-19; EST_HUMAN HIT: AW952824.1, EVALUE 7.00e-72; NT HIT: gi14767183, EVALUE 5.00e-72
ctcacctccaccacgccatggctgatagccccgtagggcttcttcctgcgcaggagcagcatggagaggacgatgagggagcctccgcccgctcccatgatcagcagacccgacacagcctcacgggacacccctgtccc

SEQ ID NO: 26308 - DNA, 325 bp, Homo sapiens
  MAP TO CHR1.3; EXPRESSED IN PLACENTA, SIGNAL =  58; EXPRESSED IN FETAL LIVER, SIGNAL =  79; NT HIT: gi14730903, EVALUE 0.00e+00; SWISSPROT HIT: P46791, EVALUE 3.00e-57; EST_HUMAN HIT: AV762215.1, EVALUE 0.00e+00
gctatcggagactacaatggccatgtcggtctgggtgttaagtgctccaaggaggtggccaccgccatccgtggggccatcatcctggccaagctctccattgtccccgtgcgcagaggctactgggggaacaagatcagcaagccccacaccgtcccttgcaaggtgacaggccgctgcggctctgtgctggtgcgtctcatccctgcacccaggagcactggcatcgtctccacacctgtgcccaagaagctgctcatgatggctggtatcgatgactgctacacctcagcccggggctgcactgccaccctgggcagctttg

SEQ ID NO: 26309 - DNA, 123 bp, Homo sapiens
  MAP TO CHR5.3; EXPRESSED IN ADULT LIVER, SIGNAL =   1; EXPRESSED IN LUNG, SIGNAL = 1.9; EXPRESSED IN PLACENTA, SIGNAL = 0.9; SWISSPROT HIT: P12544, EVALUE 2.00e-15; NT HIT: gi6996012, EVALUE 3.00e-54; EST_HUMAN HIT: AW804384.1, EVALUE 1.00e-60
tatgtttttcttccaacagctgacggaaaaagcaaaaattaacaaatatgtgactatccttcatctacctaaaaagggggatgatgtgaaaccaggaaccatgtgccaagttgcagggtgggg

SEQ ID NO: 26310 - DNA, 218 bp, Homo sapiens
  MAP TO CHR3.3; EXPRESSED IN LUNG, SIGNAL = 1.1; EXPRESSED IN PLACENTA, SIGNAL = 0.6; EXPRESSED IN FETAL LIVER, SIGNAL = 0.58; EXPRESSED IN BRAIN, SIGNAL = 0.41; EXPRESSED IN ADULT LIVER, SIGNAL = 0.67; SWISSPROT HIT: Q03112, EVALUE 4.00e-39; EST_HUMAN HIT: BG427944.1, EVALUE 1.00e-103; NT HIT: gi14727382, EVALUE 1.00e-119
ctttgcaaatcaggaaaaacttggtcacattccttacactcctggatcgtgtgtatctcttggagatcattctcgctttcgagtttttgctgaaagtcctcttcaaccattgaaaatgctgagtgaggagtactgcatggaaacttttggtgatctgctagttcagccttagattcaaagagctggtcacagtcttcgcagcgatattgccgttcttc

SEQ ID NO: 26311 - DNA, 314 bp, Homo sapiens
  MAP TO CHR10.3; EXPRESSED IN PLACENTA, SIGNAL = 0.98; EXPRESSED IN BRAIN, SIGNAL = 0.72; EXPRESSED IN ADULT LIVER, SIGNAL =   1; EXPRESSED IN LUNG, SIGNAL = 9.4; NT HIT: AJ243211.1, EVALUE 0.00e+00; SWISSPROT HIT: P30205, EVALUE 1.00e-38; EST_HUMAN HIT: BG954398.1, EVALUE 1.00e-129
gtttggccctgaggctggtgaatggaggtgacaggtgtcagggccgagtggaggtcctataccgaggctcctggggcaccgtgtgtgatgacagctgggacaccaatgatgccaatgtggtctgcaggcagctgggctgtggctgggccatgttggccccaggaaatgcccggtttggtcagggctcaggacccattgtcctggatgacgtgcgctgctcagggaatgagtcctacttgtggagctgcccccacaatggctggctctcccataactgtggccatagtgaagacgctggtgtcatctgctcaggt

SEQ ID NO: 26312 - DNA, 203 bp, Homo sapiens
  MAP TO CHR4.3; EXPRESSED IN FETAL LIVER, SIGNAL =  11; EXPRESSED IN LUNG, SIGNAL =  14; EXPRESSED IN PLACENTA, SIGNAL = 3.2; SWISSPROT HIT: P97351, EVALUE 2.00e-31; EST_HUMAN HIT: AA598669.1, EVALUE 1.00e-110; NT HIT: Z83334.1, EVALUE 1.00e-110
ctttgggtctcacctgccattttttgaccatggaacacattttgtcacgggtaagatccatgccatggaagttagtcaggcagtttttaccctgaacatcttcagtaatcagcttgaattttctaaatgcaacttcatcattctgcaaatcagcaagactcacttcaaacacacgacccttgagaccatcagatgcaatttct

SEQ ID NO: 26313 - DNA, 101 bp, Homo sapiens
  MAP TO CHR19.3; EXPRESSED IN PLACENTA, SIGNAL = 2.8; EXPRESSED IN ADULT LIVER, SIGNAL = 1.6; EXPRESSED IN FETAL LIVER, SIGNAL = 2.4; EXPRESSED IN BRAIN, SIGNAL = 5.4; SWISSPROT HIT: P49147, EVALUE 3.00e-06; EST_HUMAN HIT: BF887074.1, EVALUE 6.00e-50; NT HIT: gi4505850, EVALUE 4.00e-50
ctccacctggtggatgctggtttagccatcaacactcccttcccactcgtgctgcccccgacgcgggaggttcacctcatcctctccttcgacttcagtgc

SEQ ID NO: 26314 - DNA, 341 bp, Homo sapiens
  MAP TO CHR3.3; EXPRESSED IN HEART, SIGNAL = 1.2; EXPRESSED IN PLACENTA, SIGNAL = 1.2; SWISSPROT HIT: P32246, EVALUE 4.00e-53; EST_HUMAN HIT: AL552677.1, EVALUE 0.00e+00; NT HIT: gi14736624, EVALUE 0.00e+00
ggtgagtgaattcccattgggtcttggaaaagtataagcctggcatggaagccaagatggccagggcccaaatgatgatgctggtgatgacaccaaaagtgacggtccgtgcccgcaaggcaaacacggcgtggacgatggccaggtacctgtcaatcgtcagcaggatgatgaaaaagatctcgctgtacaagcctgtgtaataaaacccagagaggatcttacacatggcatcaccaaaaacccagtcatccttcaacttgtagtcgatccagaagggaagcgtgaacaggaagagcaggtcagaaatggccaggttcaggaggtagatgctggtcatg

SEQ ID NO: 26315 - DNA, 268 bp, Homo sapiens
  MAP TO CHR6.3; EXPRESSED IN LUNG, SIGNAL = 1.3; EXPRESSED IN FETAL LIVER, SIGNAL = 4.1; EXPRESSED IN ADULT LIVER, SIGNAL = 1.2; EXPRESSED IN BRAIN, SIGNAL = 1.3; EXPRESSED IN PLACENTA, SIGNAL = 0.92; SWISSPROT HIT: P02304, EVALUE 1.00e-44; EST_HUMAN HIT: AI525552.1, EVALUE 0.00e+00; NT HIT: gi15304969, EVALUE 0.00e+00
cttagccaccgaagccgtaaagagtgcgtccctgtcgcttcagcgcgtagaccacatccattgctgtcacggtcttgcgtttggcgtgctctgtgtaagtgacagcgtcacgaatcacgttctccaggaacaccttcagaacaccacgagtctcctcatagataaggccagaaattcgcttgacaccgccgcgacgagcaaggcgccggatagctggcttagtgatgccctggatgttatcgcgcaaaaccttgcgatgacgcttagc

SEQ ID NO: 26316 - DNA, 221 bp, Homo sapiens
  MAP TO CHR12.3; EXPRESSED IN PLACENTA, SIGNAL = 1.6; EXPRESSED IN BRAIN, SIGNAL = 1.3; SWISSPROT HIT: Q9UQQ2, EVALUE 8.00e-39; EST_HUMAN HIT: BE247142.1, EVALUE 1.00e-118; NT HIT: gi14767623, EVALUE 1.00e-119
caggtgcttctcctggggggctgctggacccggcctgccagaagacggaccatttcctgtcctgctacccctggttccacggccccatctccagagtgaaagcagctcagctggttcagctgcagggccctgatgctcatggagtgttcctggtgcggcagagcgagacgcggcgtggggaatacgtgctcactttcaactttcaggggatagccaaggta

SEQ ID NO: 26317 - DNA, 199 bp, Homo sapiens
  MAP TO CHR17.3; EXPRESSED IN PLACENTA, SIGNAL = 1.1; EXPRESSED IN HEART, SIGNAL = 1.3; EXPRESSED IN ADULT LIVER, SIGNAL = 1.5; EXPRESSED IN BRAIN, SIGNAL = 0.94; SWISSPROT HIT: P38570, EVALUE 2.00e-33; EST_HUMAN HIT: AV646111.1, EVALUE 1.70e-02; NT HIT: gi6007850, EVALUE 1.00e-108
agtgtccattgtagatatacacactgccgaagctggcaccatcatctgccccaaaaccttccaggggggccccgatggccacatctgtgagcttatcctgactgagatcccccatagccgccatggcaaagccaaagcgggcattggtgaacccggggtgcccactcagtatgcgtgccaaggagaaagaaccatcctg

SEQ ID NO: 26318 - DNA, 160 bp, Homo sapiens
  MAP TO CHR17.3; EXPRESSED IN FETAL LIVER, SIGNAL = 1.7; EXPRESSED IN ADULT LIVER, SIGNAL = 1.8; EXPRESSED IN LUNG, SIGNAL = 2.4; EXPRESSED IN HEART, SIGNAL = 2.2; EXPRESSED IN PLACENTA, SIGNAL = 2.2; SWISSPROT HIT: Q15027, EVALUE 9.00e-28; EST_HUMAN HIT: AL047399.1, EVALUE 6.00e-85; NT HIT: gi13632792, EVALUE 2.00e-84
gccaggggaagggagcctgggggagtcgggcacgtggtggcccaggtccagagtgtggatggcaatgcccagtgctgcgactgccgggagccagccccggagtgggccagcatcaaccttggtgtcaccctctgcattcagtgttccggcatccacaggt

SEQ ID NO: 26319 - DNA, 153 bp, Homo sapiens
  MAP TO CHR1.3; EXPRESSED IN PLACENTA, SIGNAL = 0.85; EXPRESSED IN FETAL LIVER, SIGNAL = 0.71; EXPRESSED IN BRAIN, SIGNAL = 1.3; EST_HUMAN HIT: BG168036.1, EVALUE 2.00e-78; NT HIT: gi4505916, EVALUE 1.00e-78; SWISSPROT HIT: Q01780, EVALUE 2.00e-22
ggctgaccttaacgatggctgggtctgtgaggctctcattgagaatgtacatgtcacttcgaagctcgagggtgtcaatgatgaagtcttccgtccgagtagaaatttgcatcaggcaggtcagtcccaggaagctcctgtaagagtggtgct

SEQ ID NO: 26320 - DNA, 159 bp, Homo sapiens
  MAP TO CHR12.3; EXPRESSED IN PLACENTA, SIGNAL = 1.4; EXPRESSED IN LUNG, SIGNAL = 1.1; EXPRESSED IN BRAIN, SIGNAL = 2.1; SWISSPROT HIT: Q10865, EVALUE 1.50e+00; EST_HUMAN HIT: BI006334.1, EVALUE 3.00e-77; NT HIT: U48363.1, EVALUE 2.00e-10
cagaactcttctgaactgagtggggagccagggcaaccagagctaagggagctgaagaggaaggggtccctttcagagttggagctatcatgggagaggctagagctaaggcagctggggagatgggaggccctattaggtttggtaggaaggttgggg

SEQ ID NO: 26321 - DNA, 224 bp, Homo sapiens
  MAP TO CHR4.3; EXPRESSED IN ADULT LIVER, SIGNAL = 0.57; EXPRESSED IN BRAIN, SIGNAL = 0.57; EXPRESSED IN HEART, SIGNAL = 0.51; EXPRESSED IN PLACENTA, SIGNAL = 0.57; SWISSPROT HIT: Q15797, EVALUE 2.00e-39; EST_HUMAN HIT: BF749403.1, EVALUE 1.00e-123; NT HIT: gi14730083, EVALUE 1.00e-123
gatgttcaggcggttgcttatgaggaaccaaaacactggtgctctattgtctactatgagctcaacaatcgtgtgggtgaagcgttccatgcctcctccacaagtgtgttggtggatggtttcactgatccttccaacaataagaaccgtttctgccttgggctgctctccaatgttaaccggaattccactattgaaaacaccaggcggcatattggaaaagg

SEQ ID NO: 26322 - DNA, 164 bp, Homo sapiens
  MAP TO CHR22.3; EXPRESSED IN LUNG, SIGNAL = 7.8; EXPRESSED IN PLACENTA, SIGNAL = 3.8; EXPRESSED IN HEART, SIGNAL = 4.9; EXPRESSED IN ADULT LIVER, SIGNAL = 4.9; EXPRESSED IN BRAIN, SIGNAL = 7.5; SWISSPROT HIT: P27703, EVALUE 6.00e-17; EST_HUMAN HIT: BF087972.1, EVALUE 7.00e-57; NT HIT: gi16167524, EVALUE 2.00e-56
cagccaggaacatgagctcttacctcgtcactcgggtcgtaatactgctccagatatgggtgggccagagcctgttctacttcaatcctcttgtgtgggttgaatgtcaacattttgtccaataagtccagagctataaagagaaaggttttgcagtagtgaga

SEQ ID NO: 26323 - DNA, 155 bp, Homo sapiens
  MAP TO CHR4.3; EXPRESSED IN ADULT LIVER, SIGNAL = 0.51; EXPRESSED IN PLACENTA, SIGNAL = 0.57; EXPRESSED IN BRAIN, SIGNAL = 0.47; SWISSPROT HIT: O60760, EVALUE 3.00e-21; EST_HUMAN HIT: AV731003.1, EVALUE 5.00e-82; NT HIT: AB008826.1, EVALUE 4.00e-82
acttacttgatttgatttcaggccagtcagcttgttctattctgtggtcttcatactgtatgtccaaataagcaaatatgtaacgaataatttctgctctccccctcatattaaaataagtgagtttgtagtttggcatggtgcaattctggaaa

SEQ ID NO: 26324 - DNA, 132 bp, Homo sapiens
  MAP TO CHR2.3; EXPRESSED IN HEART, SIGNAL = 7.5; EXPRESSED IN LUNG, SIGNAL = 5.9; EXPRESSED IN PLACENTA, SIGNAL = 5.1; EXPRESSED IN BRAIN, SIGNAL = 6.5; EXPRESSED IN FETAL LIVER, SIGNAL = 6.1; EXPRESSED IN ADULT LIVER, SIGNAL = 5.8; SWISSPROT HIT: P01495, EVALUE 6.90e-01; EST_HUMAN HIT: AL580043.1, EVALUE 4.00e-67; NT HIT: gi4508042, EVALUE 2.00e-68
acaaagtgcgggctttggggcccctgcatagacagagcgagggccatgtggggagggggcccctactgacctcccccaggcataggcacaccaacagcacatagacaggcagatgcccccagccagccagcc

SEQ ID NO: 26325 - DNA, 118 bp, Homo sapiens
  MAP TO CHR11.3; EXPRESSED IN FETAL LIVER, SIGNAL =  13; EXPRESSED IN ADULT LIVER, SIGNAL =   2; EXPRESSED IN BRAIN, SIGNAL = 1.3; EXPRESSED IN PLACENTA, SIGNAL = 1.6; EXPRESSED IN LUNG, SIGNAL = 1.8; EXPRESSED IN HEART, SIGNAL = 2.2; SWISSPROT HIT: Q10989, EVALUE 2.70e+00; EST_HUMAN HIT: AI220972.1, EVALUE 5.00e-60; NT HIT: gi16183864, EVALUE 3.00e-60
tgcctcaccttggggccttgatgactgccttgcctcctcagtatgtgggggcttcatctctttagagaagtccaagcaacagcctttgaatgtaaccaatcctactaataaaccagtt

SEQ ID NO: 26326 - DNA, 150 bp, Homo sapiens
  MAP TO CHR4.3; EXPRESSED IN PLACENTA, SIGNAL = 0.47; EXPRESSED IN ADULT LIVER, SIGNAL = 0.58; EXPRESSED IN BRAIN, SIGNAL = 0.81; SWISSPROT HIT: P48167, EVALUE 1.00e-23; EST_HUMAN HIT: AL538200.1, EVALUE 1.00e-73; NT HIT: gi15296495, EVALUE 2.00e-74
tagttggttacacaactgatgatttacgatttatctggcagtcaggagatcctgtgcaattagaaaaaattgccttgcctcaatttgatatcaaaaaggaagatattgaatatggtaactgtacaaaatactataaaggcacgggtaagt

SEQ ID NO: 26327 - DNA, 181 bp, Homo sapiens
  MAP TO CHR17.3; EXPRESSED IN LUNG, SIGNAL = 0.99; EXPRESSED IN HEART, SIGNAL =  29; EXPRESSED IN PLACENTA, SIGNAL = 1.6; EXPRESSED IN FETAL LIVER, SIGNAL = 7.9; EXPRESSED IN ADULT LIVER, SIGNAL = 1.4; EXPRESSED IN BRAIN, SIGNAL = 1.2; SWISSPROT HIT: P12829, EVALUE 5.00e-25; EST_HUMAN HIT: BI835446.1, EVALUE 1.00e-83; NT HIT: M37072.1, EVALUE 1.00e-97
ctggactttgagacgttcttgcccatcctgcagcacatttcccgcaacaaggagcagggcacctatgaggacttcgtggagggcctgcgtgtctttgacaaggagagcaatggcacggtcatgggtgctgagcttcggcacgtccttgccaccctgggtatgccagctgggcagagatgaa

SEQ ID NO: 26328 - DNA, 206 bp, Homo sapiens
  MAP TO CHR12.3; EXPRESSED IN LUNG, SIGNAL =   5; EXPRESSED IN PLACENTA, SIGNAL = 3.4; EXPRESSED IN FETAL LIVER, SIGNAL = 3.7; EXPRESSED IN ADULT LIVER, SIGNAL = 3.1; EXPRESSED IN BRAIN, SIGNAL = 3.3; SWISSPROT HIT: Q13438, EVALUE 2.00e-24; EST_HUMAN HIT: BF307247.1, EVALUE 9.00e-97; NT HIT: gi14758313, EVALUE 6.00e-97
cccagtccctttcaccttcagcaagcagggagcatctctcattgggctcaacaactcagggatcccaggcccttggtaagcaggtgtttcctcctccctttcacgctggaagtgaatagctccagctggcaggcgacactcatagcgctgtttgtacttagaggagacaatcaccacgtccgaagattggctctgggaaagaaggg

SEQ ID NO: 26329 - DNA, 338 bp, Homo sapiens
  MAP TO CHR1.3; EXPRESSED IN PLACENTA, SIGNAL = 0.9; EXPRESSED IN LUNG, SIGNAL = 0.81; EXPRESSED IN ADULT LIVER, SIGNAL = 0.88; EXPRESSED IN BRAIN, SIGNAL = 0.66; EST_HUMAN HIT: AU139019.1, EVALUE 0.00e+00; NT HIT: gi11422912, EVALUE 0.00e+00; SWISSPROT HIT: P26374, EVALUE 9.00e-60
aagtattctgaaaatgaacactgcctgaaagcttggtattcatcaggatgttgttcatactctaaacaaaatgtgagaaatttcattagcatcctcttttcaaccatggtgagttccttgctattaaagacatctgctctggaacaaggaacttgttctacctttccttcccgaaatgcaagaatcctagtgacatttttaaattctacataacgactaacatctgatttgattaaaagatcaattagcaatccttgagaatacagcagttttgacaccaaatcaatattaaacctcctgccttctttaactatttgagagtaagtaatcctatttct

SEQ ID NO: 26330 - DNA, 155 bp, Homo sapiens
  MAP TO CHR12.3; EXPRESSED IN LUNG, SIGNAL = 3.5; EXPRESSED IN HEART, SIGNAL = 3.8; EXPRESSED IN PLACENTA, SIGNAL = 3.5; EXPRESSED IN FETAL LIVER, SIGNAL = 4.7; EXPRESSED IN BRAIN, SIGNAL = 2.4; EXPRESSED IN ADULT LIVER, SIGNAL = 2.8; SWISSPROT HIT: Q12815, EVALUE 1.00e-13; EST_HUMAN HIT: BG393134.1, EVALUE 2.00e-72; NT HIT: gi13650598, EVALUE 1.00e-72
ctctctcccaccacagcgcatcggtatcctgcaacagctgttgagacaggaagtagaggggctggtagggggccagtgtgtccctcttaatggaggctcttctctggatatggttgaacttcagcccctgctgactgagatttctagaactctga

SEQ ID NO: 26331 - DNA, 116 bp, Homo sapiens
  MAP TO CHR6.3; EXPRESSED IN PLACENTA, SIGNAL = 0.7; EXPRESSED IN HEART, SIGNAL = 0.85; EXPRESSED IN BRAIN, SIGNAL = 0.44; EXPRESSED IN ADULT LIVER, SIGNAL = 0.71; EST_HUMAN HIT: BG823572.1, EVALUE 3.00e-12; NT HIT: gi11526405, EVALUE 5.00e-59; SWISSPROT HIT: O75715, EVALUE 3.00e-17
aatgcactccaggaggagctgaagccctatggtctagttgtgttgggctttccctgcaaccaatttggaaagcaagaaccaggagataacaaagagattcttcctgggctcaagta

SEQ ID NO: 26332 - DNA, 179 bp, Homo sapiens
  MAP TO CHR14.3; EXPRESSED IN PLACENTA, SIGNAL = 0.98; EXPRESSED IN FETAL LIVER, SIGNAL = 0.57; EXPRESSED IN ADULT LIVER, SIGNAL = 0.95; EXPRESSED IN BRAIN, SIGNAL = 1.3; NT HIT: L38556.1, EVALUE 2.00e-96; SWISSPROT HIT: P54803, EVALUE 6.00e-29; EST_HUMAN HIT: BE891013.1, EVALUE 7.00e-91
cctataatactgattgtgttggatgcatcggcagcccacgtaatgggtctctggttgagaacttggcgtagcgtgaagtgatgctcgccagggtcttcaatatttgtaaaatattcaaatacaccagtttgatcagcaaagtttggagcttcactaaaaaatgggtaatctgttcagaa

SEQ ID NO: 26333 - DNA, 116 bp, Homo sapiens
  MAP TO CHR4.3; EXPRESSED IN FETAL LIVER, SIGNAL = 0.62; EXPRESSED IN ADULT LIVER, SIGNAL = 0.94; EXPRESSED IN PLACENTA, SIGNAL = 0.86; EXPRESSED IN HEART, SIGNAL = 0.71; EST_HUMAN HIT: BG327840.1, EVALUE 7.00e-59; NT HIT: gi14721095, EVALUE 5.00e-59; SWISSPROT HIT: Q9Y4Y8, EVALUE 8.00e-17
aggggtcctggcttgcctggatggctacatgaatatagccctggagcagacagaagaatatgtaaatggacaactgaagaataagtatggggatgcatttatccgaggaaacaatg

SEQ ID NO: 26334 - DNA, 146 bp, Homo sapiens
  MAP TO CHR10.3; EXPRESSED IN PLACENTA, SIGNAL = 0.66; EXPRESSED IN LUNG, SIGNAL = 0.49; EXPRESSED IN HEART, SIGNAL = 0.86; EXPRESSED IN ADULT LIVER, SIGNAL = 0.55; EXPRESSED IN BRAIN, SIGNAL = 0.68; SWISSPROT HIT: P50391, EVALUE 6.00e-21; EST_HUMAN HIT: BG875680.1, EVALUE 3.00e-31; NT HIT: U35232.1, EVALUE 8.00e-77
acatgaggaagtcagagaaggccaggttggcgataagcaggttggtcacgttggctttctccttctgcctcacagtcacacacatcaggcagaggttacccaggacccccacgacagtctcaatgctgtaggaagtgacgatgaag

SEQ ID NO: 26335 - DNA, 132 bp, Homo sapiens
  MAP TO CHR20.3; EXPRESSED IN BRAIN, SIGNAL = 1.3; EXPRESSED IN HEART, SIGNAL = 0.54; EXPRESSED IN PLACENTA, SIGNAL = 1.5; NT HIT: AJ132258.1, EVALUE 6.00e-65; SWISSPROT HIT: O95793, EVALUE 2.00e-19; EST_HUMAN HIT: BF808023.1, EVALUE 6.00e-66
taccatatcatggcaggactccacatccttgccgataccatggctgatcagaggtggctgagaggagcaattgataagagatacaaattcgttcttgttgtttttggggaagtctttgtattcaacctaagg

SEQ ID NO: 26336 - DNA, 124 bp, Homo sapiens
  MAP TO CHR16.3; EXPRESSED IN LUNG, SIGNAL = 0.56; EXPRESSED IN PLACENTA, SIGNAL = 0.6; EXPRESSED IN HEART, SIGNAL = 0.66; EXPRESSED IN BRAIN, SIGNAL = 0.55; SWISSPROT HIT: P56473, EVALUE 7.00e-22; EST_HUMAN HIT: BG460788.1, EVALUE 3.00e-61; NT HIT: gi14776188, EVALUE 2.00e-61
tggcagtacccagcttgcggcagtagcagaaggcattgaagaagcggcagtagcacgtggcacatgggtcacagcaaggcacgtgctgtcccaggcaggactcatgcagccttacgcagcgacg

SEQ ID NO: 26337 - DNA, 178 bp, Homo sapiens
  MAP TO CHR19.3; EXPRESSED IN FETAL LIVER, SIGNAL = 0.59; EXPRESSED IN PLACENTA, SIGNAL = 0.48; EXPRESSED IN LUNG, SIGNAL = 0.47; EXPRESSED IN ADULT LIVER, SIGNAL = 8.6; EXPRESSED IN BRAIN, SIGNAL = 0.35; NT HIT: gi14572198, EVALUE 8.00e-96; SWISSPROT HIT: P20853, EVALUE 2.00e-10; EST_HUMAN HIT: AV650260.1, EVALUE 5.00e-64
tctatcattccactgccaccatgctggcctcagggctgcttctggtggccttgctggccagcctgactgtgatggtcttgatgtcagtctggcagcagaggaagagcagggggaagctgcctttgggacccaccccattgctctttattggaaactacctgcagctgaacacagagca

SEQ ID NO: 26338 - DNA, 168 bp, Homo sapiens
  MAP TO CHRX.3; EXPRESSED IN FETAL LIVER, SIGNAL = 0.62; EXPRESSED IN ADULT LIVER, SIGNAL = 1.6; EXPRESSED IN BRAIN, SIGNAL = 1.2; EXPRESSED IN LUNG, SIGNAL = 0.7; EXPRESSED IN HEART, SIGNAL = 1.5; EXPRESSED IN PLACENTA, SIGNAL = 1.2; NT HIT: gi14765683, EVALUE 4.00e-76; SWISSPROT HIT: O95239, EVALUE 2.00e-20; EST_HUMAN HIT: BE302429.1, EVALUE 6.00e-76
aggatgagaatttattacccgtatctcctggttcagtttggagacagtacgctctgtggattcctttagtttcagaagtttggactgctcattcagtttcttcttcagatcagcaatttgaccctccagctcctggagacgtttgcggcggcgctcactcaacctaaa

SEQ ID NO: 26339 - DNA, 237 bp, Homo sapiens
  MAP TO CHR2.3; EXPRESSED IN FETAL LIVER, SIGNAL = 0.39; EXPRESSED IN BRAIN, SIGNAL = 2.6; EXPRESSED IN HEART, SIGNAL = 0.65; EXPRESSED IN PLACENTA, SIGNAL = 0.74; NT HIT: gi4507974, EVALUE 0.00e+00; SWISSPROT HIT: Q14585, EVALUE 6.00e-45; EST_HUMAN HIT: AW949650.1, EVALUE 1.00e-130
ttcagaccttactcaacatcacagaattcatactggtgagaaaccctatgaatgtaaggaatgtgggaaggcctttggtagtggctcaaaacttatccaacaccagctaatccatactggtgaaagaccctatgaatgtaaagaatgtggaaagtcctttagtagtggttcagctcttaatcggcaccagagaatacacactggtgagaaaccctatgaatgtaaggagtgtgggaa

SEQ ID NO: 26340 - DNA, 243 bp, Homo sapiens
  MAP TO CHR2.3; EXPRESSED IN PLACENTA, SIGNAL = 3.3; EXPRESSED IN HEART, SIGNAL = 1.8; EXPRESSED IN BRAIN, SIGNAL = 0.47; NT HIT: AY016295.1, EVALUE 0.00e+00; SWISSPROT HIT: P02461, EVALUE 2.00e-36; EST_HUMAN HIT: AW629592.1, EVALUE 1.00e-121
attttataaccaattcccattcttttttgtgactattcaggagaatactgggttgaccctaaccaaggatgcaaattggatgctatcaaggtattctgtaatatggaaactggggaaacatgcataagtgccaatcctttgaatgttccacggaaacactggtggacagattctagtgctgagaagaaacacgtttggtttggagagtccatggatggtggttttcaggtaggaaaggatata

SEQ ID NO: 26341 - DNA, 189 bp, Homo sapiens
  MAP TO CHR22.3; EXPRESSED IN LUNG, SIGNAL = 0.54; EXPRESSED IN PLACENTA, SIGNAL = 0.75; EXPRESSED IN HEART, SIGNAL = 0.58; EXPRESSED IN BRAIN, SIGNAL = 0.74; NT HIT: gi14776799, EVALUE 1.00e-101; SWISSPROT HIT: P36151, EVALUE 1.90e-02; EST_HUMAN HIT: BG575174.1, EVALUE 1.00e-101
agcatagagcttccggatgggggcggcccagccccgcctctccgcctgtcgcctgatcaggtcctcggcatactggtaagtgaggatgctgggtttgcccatcaggccctcgtatctcagctccttgcccgtcactttctggtaaatggtttccaggcacagcagaaaggtgccatgtccaaacctgcc

SEQ ID NO: 26342 - DNA, 152 bp, Homo sapiens
  MAP TO CHR19.3; EXPRESSED IN LUNG, SIGNAL = 0.86; EXPRESSED IN HEART, SIGNAL =   1; EXPRESSED IN PLACENTA, SIGNAL = 1.3; EXPRESSED IN FETAL LIVER, SIGNAL =   1; EXPRESSED IN BRAIN, SIGNAL = 1.5; NT HIT: gi14762858, EVALUE 2.00e-59; SWISSPROT HIT: P56163, EVALUE 1.00e-18; EST_HUMAN HIT: BI668246.1, EVALUE 2.00e-75
ggcactcacgtcgttctcggaggttccgcacaggctgcaggatttgcactcgatgcactgccagcggtaggtccgcacggctgccgtcatgttcaccgtgaattgtaaacacgaggggtgtcctgggggccaaggggcaggggtgcagttag

SEQ ID NO: 26343 - DNA, 142 bp, Homo sapiens
  MAP TO CHR9.3; EXPRESSED IN LUNG, SIGNAL = 1.4; EXPRESSED IN HEART, SIGNAL = 0.87; EXPRESSED IN PLACENTA, SIGNAL = 1.2; EXPRESSED IN FETAL LIVER, SIGNAL = 3.2; EXPRESSED IN BRAIN, SIGNAL = 0.66; EST_HUMAN HIT: AL543179.1, EVALUE 3.00e-43; NT HIT: gi16160954, EVALUE 8.00e-46; SWISSPROT HIT: P07711, EVALUE 1.00e-16
cttcacaggagtcacgtagcctttctctctccaatccacagatttgcggatgtcatgaagcagaggttcctggagcactttccccttcctgtgcttctggttttgaaagccattcaccacctgcctgaattcttcactggtc

SEQ ID NO: 26344 - DNA, 399 bp, Homo sapiens
  MAP TO CHR12.3; EXPRESSED IN LUNG, SIGNAL = 1.7; EXPRESSED IN PLACENTA, SIGNAL = 1.2; EXPRESSED IN FETAL LIVER, SIGNAL = 1.9; EXPRESSED IN BRAIN, SIGNAL = 1.2; EST_HUMAN HIT: AU140331.1, EVALUE 0.00e+00; NT HIT: gi14767370, EVALUE 0.00e+00; SWISSPROT HIT: P29375, EVALUE 5.00e-63
gttctgtcaaacactgcagggcctctccttcaggcaaccgtacgggcaacttctgaagggataccaggagtgacagaatagtctctagcctgggccttcgagaccgcatacaaagagggcaaaggaattttacttctttagcttgccagctggatccttttttttgggaacttgatttaggaagaggaacacagctgttatggaaccagtctttgcagagctcacactgtagcataaacccactggctgtcttgcggcaaatgcaaaattttacttcttctatgcggtccaccattgtcatcttggctaggttggctgctctgagagaatgcatggcttcaatctctttttgctcccgttctttgaaaactgccacctgtacaagacaaacatttaatt

SEQ ID NO: 26345 - DNA, 232 bp, Homo sapiens
  MAP TO CHR18.3; EXPRESSED IN HEART, SIGNAL = 0.51; EXPRESSED IN PLACENTA, SIGNAL = 0.65; EXPRESSED IN LUNG, SIGNAL = 0.47; NT HIT: gi14763429, EVALUE 1.00e-128; SWISSPROT HIT: P47211, EVALUE 3.00e-36; EST_HUMAN HIT: BE258122.1, EVALUE 7.80e-02
tgacacttgaacacttgtttataggccttcctgaaattttcagagagaaatgcataaatgataggattcacggaggaattgctgtacgccaggcagtgggcggtgattctgaagaggaaggaagccggcgtcagcgggaaaactccaaactcagcccagagatggatgatgtggtgcggcagccaggagattccaaacaccacaaccaccaccagaactgtctgtgcagtct

SEQ ID NO: 26346 - DNA, 148 bp, Homo sapiens
  MAP TO CHR19.3; EXPRESSED IN LUNG, SIGNAL = 1.8; EXPRESSED IN HEART, SIGNAL = 1.6; EXPRESSED IN PLACENTA, SIGNAL = 1.6; EXPRESSED IN FETAL LIVER, SIGNAL = 1.2; EST_HUMAN HIT: AA622047.1, EVALUE 5.00e-73; NT HIT: gi16177785, EVALUE 3.00e-73; SWISSPROT HIT: O43765, EVALUE 5.00e-20
ccagcctggcgctctccagcctcaacaagcacgtggaggccgtggcttactacaagaaggctctggagctggaccccgacaacgagacatacaagtccaacctcaagatagcggagctgaagctgcgggaggcccccagccccgtgag

SEQ ID NO: 26347 - DNA, 156 bp, Homo sapiens
  MAP TO CHR1.3; EXPRESSED IN PLACENTA, SIGNAL = 0.75; EXPRESSED IN LUNG, SIGNAL = 0.74; EXPRESSED IN FETAL LIVER, SIGNAL = 0.79; EST_HUMAN HIT: BF244770.1, EVALUE 5.00e-45; NT HIT: gi4507712, EVALUE 4.00e-45; SWISSPROT HIT: Q99615, EVALUE 1.00e-13
gaattaaccataacccaattatagtagagtttagcttagtttttatattgttggggtttatccccaggggtcatgtgtacagttcgtatgctagcttgtaatttccttccttaaatgctttatttctgtcttctttctttgctttgagtgctttgg

SEQ ID NO: 26348 - DNA, 139 bp, Homo sapiens
  MAP TO CHR4.3; EXPRESSED IN ADULT LIVER, SIGNAL = 0.64; EXPRESSED IN HEART, SIGNAL = 0.89; EXPRESSED IN PLACENTA, SIGNAL = 0.83; EST_HUMAN HIT: AW341484.1, EVALUE 3.00e-68; NT HIT: AF195956.1, EVALUE 5.00e-35
cttaccttagctgcatgatatgtaccagcttcaagtaattcttttttagcttctttggcaagcaggttaaaccgacttaacattgcagccttacaaagccgacttgccattgacataccacttttaaatggggaactaa

SEQ ID NO: 26349 - DNA, 161 bp, Homo sapiens
  MAP TO CHR4.3; EXPRESSED IN PLACENTA, SIGNAL = 0.6; EXPRESSED IN ADULT LIVER, SIGNAL = 1.1; EXPRESSED IN BRAIN, SIGNAL = 0.8; NT HIT: gi10938004, EVALUE 2.00e-25; EST_HUMAN HIT: AL046789.1, EVALUE 3.00e-25
gaacatttacctgtaccacaagtgtttttctttcttcaactaaggaatcatctttttctttttccttctttctgttttgggattttttagataaagaaacatttctggcatctttctgtacttttaactgtagttcttgggaaaacctacataaaaatata

SEQ ID NO: 26350 - DNA, 337 bp, Homo sapiens
  MAP TO CHR12.3; EXPRESSED IN LUNG, SIGNAL = 0.9; EXPRESSED IN PLACENTA, SIGNAL = 0.88; EXPRESSED IN HEART, SIGNAL = 0.82; EXPRESSED IN ADULT LIVER, SIGNAL = 0.55; EST_HUMAN HIT: AA121882.1, EVALUE 1.00e-128; SWISSPROT HIT: P31908, EVALUE 1.50e+00; NT HIT: gi15306621, EVALUE 1.00e-107
catttgcatcacatgcacccaaggaaaaaatgtttacctggtggagccacggttaaccttttttccttgctgagccggtgcccttggatgaattcactcatggaaggggggcccttcagaagaaatgattctgtggaggtgggatcagggggaactcttaataaattctgtaggtaggaagcccctgaagtcctgggacggctctgatcacaaagggaaggtgaaaattgtcttgcaggagatccaagaaaaatacatataggaaacaaaaaagttttactttaattaccttttaacgcctcaccagtgacaacattatttatactggcatttaatt

SEQ ID NO: 26351 - DNA, 113 bp, Homo sapiens
  MAP TO CHR12.3; EXPRESSED IN PLACENTA, SIGNAL = 0.86; EXPRESSED IN LUNG, SIGNAL = 0.92; EST_HUMAN HIT: BG681658.1, EVALUE 6.00e-50; SWISSPROT HIT: Q14161, EVALUE 2.00e-13; NT HIT: gi16163903, EVALUE 4.00e-50
gagccacttgcctgatttcgtgttgatgagtactcaggattgaccggaagaaaggggacgaccgttgtctcggttaccagggcgctgtggttttgcgtggcaagccagactag

SEQ ID NO: 26352 - DNA, 181 bp, Homo sapiens
  MAP TO CHRX.3; EXPRESSED IN FETAL LIVER, SIGNAL = 1.1; EXPRESSED IN BRAIN, SIGNAL = 1.5; EXPRESSED IN PLACENTA, SIGNAL = 1.2; EXPRESSED IN LUNG, SIGNAL = 1.3; EST_HUMAN HIT: BG619429.1, EVALUE 2.00e-97; SWISSPROT HIT: P46100, EVALUE 1.00e-28; NT HIT: gi6274547, EVALUE 1.00e-97
aggtttctgaattagcaactgtgaaacgtcctcaggagagaagctacatgctgcagaggtggcaagaagatggtggtgttatgatcataggctatgagatgtatagaaatcttgctcaaggaaggaatgtgaagagtcggaaacttaaagaaatatttaacaaagctttggttgatccagg

SEQ ID NO: 26353 - DNA, 178 bp, Homo sapiens
  MAP TO CHR19.3; EXPRESSED IN LUNG, SIGNAL = 3.4; EXPRESSED IN HEART, SIGNAL = 3.9; EXPRESSED IN PLACENTA, SIGNAL = 3.8; EXPRESSED IN FETAL LIVER, SIGNAL = 4.2; EXPRESSED IN ADULT LIVER, SIGNAL = 3.7; EXPRESSED IN BRAIN, SIGNAL = 4.5; EST_HUMAN HIT: BI030546.1, EVALUE 5.00e-95; NT HIT: gi16163626, EVALUE 3.00e-92; SWISSPROT HIT: O00160, EVALUE 6.00e-27
ctcaccttgaagcggcggtcgtacttggtgaccgaatcggcgaagtccacccgctccctcttgcccaggaactgacgcagctcgggccgctcctccagccccaggtagtccccgacgaagttccgattgatgctgttgcgcctccgctccttcttgttcagcaggatgttggaagctg

SEQ ID NO: 26354 - DNA, 159 bp, Homo sapiens
  MAP TO CHR1.3; EXPRESSED IN LUNG, SIGNAL = 0.94; EXPRESSED IN PLACENTA, SIGNAL = 0.69; EXPRESSED IN BRAIN, SIGNAL = 0.77; EXPRESSED IN ADULT LIVER, SIGNAL = 0.85; EST_HUMAN HIT: BI760483.1, EVALUE 1.00e-58; NT HIT: gi14742797, EVALUE 1.00e-63; SWISSPROT HIT: P20800, EVALUE 1.00e-12
ccacctaccagggccttcgaaggcagaaggtggcacaggcggggtccctggcactggagcactgacagcgccttggcagggagcggcgccggcgtcttggcgggtttcccaggccgtaaggagctgtctgtctgtgggcgggcagccagcaaggtagtg

SEQ ID NO: 26355 - DNA, 301 bp, Homo sapiens
  MAP TO CHR1.3; EXPRESSED IN FETAL LIVER, SIGNAL = 2.4; EXPRESSED IN BRAIN, SIGNAL = 0.96; EXPRESSED IN LUNG, SIGNAL = 1.9; EXPRESSED IN HEART, SIGNAL = 1.6; EXPRESSED IN PLACENTA, SIGNAL = 1.5; NT HIT: X84819.1, EVALUE 0.00e+00; SWISSPROT HIT: P14543, EVALUE 4.00e-50; EST_HUMAN HIT: BI462795.1, EVALUE 7.00e-83
ctgctgggcccttggtagggggccacggattcccaagtgacaaccaccgcgctactaggctggaaagagatctccgggaaccctctgtggacacactctgctgctcgctgagtgatggagggggataagtcttctcgataataaaccttccccaggccatcggtcgtgtccaagtccgccaggaaaggggcgactgcaccgaatgttggtgggaagagcccgggatgggattctttggccgggggttcactcgtagcaatgatgccatttgtggtgacctgtacaaaaccaagtgtggtta

SEQ ID NO: 26356 - DNA, 217 bp, Homo sapiens
  MAP TO CHR5.3; EXPRESSED IN PLACENTA, SIGNAL = 0.71; EXPRESSED IN LUNG, SIGNAL =   1; EXPRESSED IN HEART, SIGNAL = 1.9; EXPRESSED IN BRAIN, SIGNAL =   1; EST_HUMAN HIT: H27672.1, EVALUE 1.00e-106; SWISSPROT HIT: P49744, EVALUE 9.00e-36; NT HIT: gi4507488, EVALUE 1.00e-108
acagggtacacagcttttaatggagttgacttcgaagggaccttccatgtgaatacccagacagatgatgactatgcaggctttatctttggctaccaagatagctccagcttctacgtggtcatgtggaagcagacggagcagacatattggcaagccaccccattccgagcagttgcagaacctggcattcagctcaaggtattggtggtttgaa

SEQ ID NO: 26357 - DNA, 163 bp, Homo sapiens
  MAP TO CHR4.3; EXPRESSED IN PLACENTA, SIGNAL = 0.67; EXPRESSED IN BRAIN, SIGNAL = 0.51; EST_HUMAN HIT: AW238724.1, EVALUE 2.00e-84; NT HIT: AF097454.1, EVALUE 7.00e-87; SWISSPROT HIT: O15516, EVALUE 5.00e-24
ttacctgcagcccctgaccatggaccatctgaagttgttcttgaatttttcttagttcttcttgttgccgatgaatatttgcttctatcatgcgtgtccgttgttccaattggtctttcagatgttgcatggctcctaattgagctgaaaactgaaactgaag

SEQ ID NO: 26358 - DNA, 204 bp, Homo sapiens
  MAP TO CHR17.3; EXPRESSED IN PLACENTA, SIGNAL = 1.3; EXPRESSED IN HEART, SIGNAL = 1.8; EXPRESSED IN BRAIN, SIGNAL = 1.2; EST_HUMAN HIT: BG680860.1, EVALUE 1.00e-108; NT HIT: AF112442.1, EVALUE 1.00e-111; SWISSPROT HIT: Q60559, EVALUE 1.10e+00
tctttaaggcttcaggcagcgcgcacaggctctggcagccgtctcaggcaggactgggcaccaagcttgcagccgaaggccttgccccaaactaccagcgtttctgcaagcagcttgaagggctgaccttgcagccgggtgagccaagggcactttgctgccaccgctgcattcccagagatcaagcagcccggtgccgtggcc

SEQ ID NO: 26359 - DNA, 135 bp, Homo sapiens
  MAP TO CHR1.3; EXPRESSED IN BRAIN, SIGNAL = 0.8; EXPRESSED IN HEART, SIGNAL = 0.6; EXPRESSED IN PLACENTA, SIGNAL = 0.57; NT HIT: gi4758449, EVALUE 2.00e-68; SWISSPROT HIT: P50150, EVALUE 6.00e-19; EST_HUMAN HIT: AI339945.1, EVALUE 2.00e-68
gttagagaatggtacaaaagaacttcttctcgcgaaaggggttttctgatgcaggcactggaatgatgagaggatcttcccgcacgtgagcttcacagtaggccaggaggtccgcggctgcctgggagacctgtg

SEQ ID NO: 26360 - DNA, 200 bp, Homo sapiens
  MAP TO CHR11.3; EXPRESSED IN BRAIN, SIGNAL =   3; EXPRESSED IN LUNG, SIGNAL = 1.6; EXPRESSED IN HEART, SIGNAL = 4.8; EXPRESSED IN PLACENTA, SIGNAL = 2.4; EST_HUMAN HIT: BF791123.1, EVALUE 4.00e-71; SWISSPROT HIT: Q08043, EVALUE 8.00e-29; NT HIT: gi4557240, EVALUE 4.00e-98
tgcaggaagtggggcggctggcagcagggctagctggctctctggaggagcagatggctgggctacggcagcaggagcagaacattatcaactacaagactaacattgaccggctggagggtgaccaccagctgctgcaggagagcctggtgttcgacaataagcacaccgtctacagcatggaggtgggatcacaccct

SEQ ID NO: 26361 - DNA, 134 bp, Homo sapiens
  MAP TO CHR22.3; EXPRESSED IN BRAIN, SIGNAL = 1.8; EXPRESSED IN LUNG, SIGNAL = 0.72; EXPRESSED IN PLACENTA, SIGNAL = 1.8; EXPRESSED IN HEART, SIGNAL = 0.96; EST_HUMAN HIT: BG397055.1, EVALUE 2.00e-69; SWISSPROT HIT: P46060, EVALUE 2.00e-18; NT HIT: gi4506410, EVALUE 1.00e-69
aaaagcttctgccaaggcagtggcgccatcattctccagacggtttctgccagccacaaagaccttcagggccagaggcttgccttgggcactggatttccggtgacattcggtcagagctgcagccaggatct

SEQ ID NO: 26362 - DNA, 129 bp, Homo sapiens
  MAP TO CHR1.3; EXPRESSED IN ADULT LIVER, SIGNAL = 0.46; EXPRESSED IN PLACENTA, SIGNAL = 0.47; SWISSPROT HIT: P51797, EVALUE 2.00e-18; NT HIT: AF009255.1, EVALUE 3.00e-54; EST_HUMAN HIT: BI459619.1, EVALUE 7.00e-50
cagaagatgtgaattcaagtatcaagacatttttttgtcccaatgatacctacaatgacatggccacactcttcttcaacccgcaggagtctgccatcctccagctcttccaccaggatggtgagtgtc

SEQ ID NO: 26363 - DNA, 187 bp, Homo sapiens
  MAP TO CHR15.3; EXPRESSED IN ADULT LIVER, SIGNAL = 0.67; EXPRESSED IN BRAIN, SIGNAL = 1.1; EXPRESSED IN HEART, SIGNAL = 0.7; EXPRESSED IN PLACENTA, SIGNAL = 1.1; EST_HUMAN HIT: AI922316.1, EVALUE 2.00e-91; SWISSPROT HIT: P26440, EVALUE 9.00e-28; NT HIT: AF191215.1, EVALUE 1.00e-101
ccactcacagttcagtatggcggctccggcctgggctacctggagcatgtgctggtgatggaggagatatcccgagcttccggagcagtggggctcagttacggtgcccactccaacctctgcatcaaccagcttgtacgcaatgggaatgaggcccagaaagagaagtatctcccgaaggtgagga

SEQ ID NO: 26364 - DNA, 196 bp, Homo sapiens
  MAP TO CHR19.3; EXPRESSED IN PLACENTA, SIGNAL = 1.7; EXPRESSED IN HEART, SIGNAL = 1.6; EXPRESSED IN ADULT LIVER, SIGNAL = 1.5; NT HIT: gi14786995, EVALUE 1.00e-106; EST_HUMAN HIT: BG656040.1, EVALUE 1.00e-106; SWISSPROT HIT: P06870, EVALUE 8.00e-33
tcccacaccctggcttcaacatgagcctcctggagaaccacacccgccaagcagacgaggactacagccacgacctcatgctgctccgcctgacagagcctgctgataccatcacagatgctgtgaaggtcgtggagttgcccaccgaggaacccgaagtggggagcacctgtttggcttccggctggggcagcat

SEQ ID NO: 26365 - DNA, 226 bp, Homo sapiens
  MAP TO CHR22.3; EXPRESSED IN ADULT LIVER, SIGNAL = 1.2; EXPRESSED IN LUNG, SIGNAL =   1; EXPRESSED IN PLACENTA, SIGNAL = 0.66; EST_HUMAN HIT: BG035553.1, EVALUE 1.00e-120; SWISSPROT HIT: P46662, EVALUE 4.00e-22; NT HIT: L27142.1, EVALUE 1.00e-124
ccagatgcggtctgaggagacagctgacctgttggctgaaaaggcccagatcaccgaggaggaggcaaaacttctggcccagaaggccgcagaggctgagcaggaaatgcagcgcatcaaggccacagcgattcgcacggaggaggagaagcgcctgatggagcagaaggtgctggaagccgaggtgctggcactgaagatggctgaggagtcagagaggaggtga

SEQ ID NO: 26366 - DNA, 306 bp, Homo sapiens
  MAP TO CHR2.3; EXPRESSED IN LUNG, SIGNAL = 0.58; EXPRESSED IN PLACENTA, SIGNAL = 0.63; EXPRESSED IN ADULT LIVER, SIGNAL = 0.94; EST_HUMAN HIT: BE297583.1, EVALUE 6.50e+00; SWISSPROT HIT: P07174, EVALUE 1.40e-01; NT HIT: AF130996.1, EVALUE 0.00e+00
gggaggcaggtggcacaacccccgcccactccagtatgtctgcacacaaggactccacagcatccagccgctcaatctgcaccagttttgtgagtagctcagggatgctgtagcctgccgtgctgatgcggtcaaagagttgcatgccgtctgtcatgcccccaatctcatccctcttcaggccgaagctctcggcgaggtggcgccacgttttcacaacagccttctcagagttgtacgtggagctgagcattcggctagtcttctcgaggcaatcaaatggcagctccgtggggctaagaccta

SEQ ID NO: 26367 - DNA, 222 bp, Homo sapiens
  MAP TO CHR17.3; EXPRESSED IN ADULT LIVER, SIGNAL = 0.59; EXPRESSED IN LUNG, SIGNAL = 2.9; EXPRESSED IN PLACENTA, SIGNAL = 1.3; SWISSPROT HIT: P31645, EVALUE 8.00e-25; NT HIT: X76761.1, EVALUE 1.00e-119
gcacgtacctctttaaatgtccctggagtgatgatcaaccgataagctatatatgtggggatgcaaatgaaagatgaggttcctatgcagtaacccaagatgatactccagtaaggataattatattggaaaagtcgtagttgtggcgggctcatcagaaaactgcaaatgatgaactaaaacagaaattccaagaaacattaaaaaccttaacaatatcca

SEQ ID NO: 26368 - DNA, 151 bp, Homo sapiens
  MAP TO CHR8.3; EXPRESSED IN PLACENTA, SIGNAL = 0.9; EXPRESSED IN LUNG, SIGNAL = 1.5; EXPRESSED IN HEART, SIGNAL = 0.73; SWISSPROT HIT: P50517, EVALUE 6.00e-23; NT HIT: gi4502310, EVALUE 9.00e-80; EST_HUMAN HIT: AU133550.1, EVALUE 1.00e-79
aggtttcagcagccagggaagaggtacctggtcgacgaggttttccaggttacatgtatacagatttagccacgatatatgaacgcgctgggcgagtggaagggagaaacggctcgattactcaaatccctattctaaccatgcctaatga

SEQ ID NO: 26369 - DNA, 148 bp, Homo sapiens
  MAP TO CHR16.3; EXPRESSED IN HEART, SIGNAL = 1.8; EXPRESSED IN PLACENTA, SIGNAL = 1.6; EXPRESSED IN FETAL LIVER, SIGNAL = 1.8; EXPRESSED IN ADULT LIVER, SIGNAL = 1.9; EXPRESSED IN BRAIN, SIGNAL = 2.1; NT HIT: gi16164946, EVALUE 5.00e-69; EST_HUMAN HIT: BI912998.1, EVALUE 3.00e-71; SWISSPROT HIT: P11269, EVALUE 1.20e+00
ctctgttcctagcagacaggctgctctcgctgacccttctggccttcgaaggcctaaacacagctgcctccaaggaccgctgcctggcctgcattgaggaaccctttttctccccgctgtggcctctgctgctggccctgtacaggta

SEQ ID NO: 26370 - DNA, 174 bp, Homo sapiens
  MAP TO CHR19.3; EXPRESSED IN LUNG, SIGNAL = 0.82; EXPRESSED IN PLACENTA, SIGNAL = 0.81; EXPRESSED IN ADULT LIVER, SIGNAL = 0.76; EXPRESSED IN BRAIN, SIGNAL = 0.66; EST_HUMAN HIT: BG749237.1, EVALUE 2.00e-91; SWISSPROT HIT: P28340, EVALUE 2.00e-18; NT HIT: gi15303523, EVALUE 1.00e-91
accggatctcaaagtcgacgttggcctcgtagggcgcgaagctgggcgtgcccaggcctgccacacggatgccctgttccaggagacggcgggccggggccacgaggcgcggcagcgccacggtgatgcgcaggaacggggaggggccgtgcccgtggtacccaaacatgcctg

SEQ ID NO: 26371 - DNA, 251 bp, Homo sapiens
  MAP TO CHR8.3; EXPRESSED IN PLACENTA, SIGNAL = 5.6; EXPRESSED IN LUNG, SIGNAL =   7; EXPRESSED IN ADULT LIVER, SIGNAL = 3.4; EXPRESSED IN BRAIN, SIGNAL = 5.4; NT HIT: AF050163.1, EVALUE 0.00e+00; EST_HUMAN HIT: AL539198.1, EVALUE 0.00e+00; SWISSPROT HIT: P49060, EVALUE 3.00e-43
cccagatgtggaccagctagtgaagtgctcccacgagcgctccattcatctcttcatcgactctctgttgaatgaagaaaatccaagtaaggcctacaggtgcagttccaaggaagcctttgagaaagggctctgcttgagttgtagaaagaaccgctgcaacaatctgggctatgagatcaataaagtcagagccaaaagaagcagcaaaatgtacctgaagactcgttctcagatgccctacaaaggta

SEQ ID NO: 26372 - DNA, 322 bp, Homo sapiens
  MAP TO CHR15.3; EXPRESSED IN FETAL LIVER, SIGNAL =  21; EXPRESSED IN BRAIN, SIGNAL =  23; EXPRESSED IN LUNG, SIGNAL =  46; EXPRESSED IN PLACENTA, SIGNAL =  18; SWISSPROT HIT: O15998, EVALUE 3.00e-59; NT HIT: gi14750554, EVALUE 0.00e+00; EST_HUMAN HIT: BG699191.1, EVALUE 0.00e+00
tacctgtggtacggccagaagcatacagggatagcactgcctggatggccacgtacatggcagggacattgaaggtctcaaacatgatctgagtcatcttctcccggttggccttggggttcagcggggcctctgtgagcagggtggggtgctcctcgggagccacacggagctcattgtagaaggtgtggtgccagatcttctccatgtcgtcccagttggtgatgataccatgctcgatgggatacttcagggtcaggatgcctctcttgctctgggcttcatcacctacgtaggagtccttctgacccatacccaccat

SEQ ID NO: 26373 - DNA, 183 bp, Homo sapiens
  MAP TO CHR1.3; EXPRESSED IN PLACENTA, SIGNAL = 2.1; EXPRESSED IN LUNG, SIGNAL = 2.7; EXPRESSED IN HEART, SIGNAL = 2.3; EXPRESSED IN BRAIN, SIGNAL = 2.6; NT HIT: gi5031924, EVALUE 3.00e-80
tgtcttacttggcctcagtgcataatcccacatcaccaccatcttcaaagaaagcacctccaccttcaggagcatctcaaaccatcaaatcaacaaccaaacgttcacccaaaccaccaaacaagaagaagactaagaaagttatagaatcagaggaaataacagaaggtaggaagatgacag

SEQ ID NO: 26374 - DNA, 178 bp, Homo sapiens
  MAP TO CHR3.3; EXPRESSED IN PLACENTA, SIGNAL = 2.2; EXPRESSED IN ADULT LIVER, SIGNAL = 0.83; EXPRESSED IN BRAIN, SIGNAL = 0.78; EST_HUMAN HIT: AA350763.1, EVALUE 6.00e-73; NT HIT: gi14730458, EVALUE 4.00e-73; SWISSPROT HIT: P25134, EVALUE 1.90e+00
gaactcaccaggatgtagaaggtgataaaaatggggctggaggtgatgcggatcttcgcccgagcagatggaagcttccagagcaggaagatgaggaagagcacattggggatgagcagcaagaggtcccagtaccggaccctggcggatgggcacaggagctggctcactggcgagg

SEQ ID NO: 26375 - DNA, 113 bp, Homo sapiens
  MAP TO CHR16.3; EXPRESSED IN LUNG, SIGNAL = 1.5; EXPRESSED IN HEART, SIGNAL = 1.4; EXPRESSED IN PLACENTA, SIGNAL = 1.3; EXPRESSED IN ADULT LIVER, SIGNAL = 1.4; EXPRESSED IN BRAIN, SIGNAL = 1.7; EST_HUMAN HIT: BF222068.1, EVALUE 4.00e-57; NT HIT: AF325423.1, EVALUE 3.00e-57; SWISSPROT HIT: P46934, EVALUE 1.60e-02
catggcagcgctgcgctacgcggggctggacgacacggacagtgaggacgagctgcctccgggctgggaggagagaaccaccaaggacggctgggtttactacgccaagtaag

SEQ ID NO: 26376 - DNA, 153 bp, Homo sapiens
  MAP TO CHR9.3; EXPRESSED IN HEART, SIGNAL =   1; EXPRESSED IN PLACENTA, SIGNAL =   1; EXPRESSED IN ADULT LIVER, SIGNAL = 1.2; EXPRESSED IN BRAIN, SIGNAL = 1.3; SWISSPROT HIT: Q9UKT8, EVALUE 2.00e-21; EST_HUMAN HIT: BI004154.1, EVALUE 2.00e-72; NT HIT: gi16161461, EVALUE 1.00e-72
tcttcctaccttggtgacccattccgtgtgcccggtgagtgtgttcaggcatgtcccagcagataaagcccatactttcacagtgaagtctgcagagccgctcaccaagatatccagttcatcattgtagtccacgctaaatactagtgcata

SEQ ID NO: 26377 - DNA, 171 bp, Homo sapiens
  MAP TO CHR3.3; EXPRESSED IN LUNG, SIGNAL = 2.3; EXPRESSED IN HEART, SIGNAL = 1.4; EXPRESSED IN PLACENTA, SIGNAL = 2.9; EXPRESSED IN ADULT LIVER, SIGNAL = 2.1; NT HIT: U36926.1, EVALUE 1.00e-91; SWISSPROT HIT: Q16850, EVALUE 6.00e-12; EST_HUMAN HIT: AU127089.1, EVALUE 5.00e-67
gcggtcagctggaccaggtggccggcagcgagacggaacaagtagaccaggctgagggtgaaggcgcaggcgatcagcagcatggacaagaggttgccgcctgccacctcctccatcgcctggcccagcacctacccacccgcctgtagcaagcccagcagcatcatcccg

SEQ ID NO: 26378 - DNA, 154 bp, Homo sapiens
  MAP TO CHR22.3; EXPRESSED IN LUNG, SIGNAL = 1.5; EXPRESSED IN HEART, SIGNAL =   2; EXPRESSED IN PLACENTA, SIGNAL = 1.9; EXPRESSED IN FETAL LIVER, SIGNAL = 1.8; EXPRESSED IN ADULT LIVER, SIGNAL = 1.8; EXPRESSED IN BRAIN, SIGNAL = 1.7; SWISSPROT HIT: O75419, EVALUE 1.00e-16; EST_HUMAN HIT: AA576429.1, EVALUE 3.00e-65; NT HIT: AF081535.1, EVALUE 3.00e-61
ctccatagacaaagaaccggcgctgcaaactgctgcccctggtgatggctgcccccctgagcatggagcatggcacagtgaccgtggtgggcatccccccagagaccgacagctcggacaggaagaagtgagcagcttccactcgtcctgggac

SEQ ID NO: 26379 - DNA, 172 bp, Homo sapiens
  MAP TO CHR2.3; EXPRESSED IN BRAIN, SIGNAL = 1.4; EXPRESSED IN PLACENTA, SIGNAL = 2.6; EXPRESSED IN HEART, SIGNAL = 1.9; EST_HUMAN HIT: AA778120.1, EVALUE 1.00e-73; NT HIT: gi5730111, EVALUE 1.00e-72; SWISSPROT HIT: O95183, EVALUE 7.00e-20
gcagccctgacctcgggcttggtgtccaggcaggaatagagttggagcggtgccagcagcaggcgaacgaggtgacggaaattatgcgtaacaacttcggcaaggtcctggagcgtggtgtgaagctggccgaactgcagcagcgttcagaccaactcctggatatggtgtg

SEQ ID NO: 26380 - DNA, 146 bp, Homo sapiens
  MAP TO CHR17.3; EXPRESSED IN PLACENTA, SIGNAL = 1.5; EXPRESSED IN ADULT LIVER, SIGNAL = 1.1; EXPRESSED IN BRAIN, SIGNAL = 1.1; SWISSPROT HIT: Q14847, EVALUE 6.00e-12; EST_HUMAN HIT: BE018985.1, EVALUE 1.00e-76; NT HIT: gi14769515, EVALUE 8.00e-77
aaataccatgaggagtttgagaagagccgcatgggccctagcgggggcgagggcatggagccagagcgtcgggattcacaggacggcagcagctaccggcggcccctggagcagcagcagcctcaccacatcccgaccagtgcccc

SEQ ID NO: 26381 - DNA, 189 bp, Homo sapiens
  MAP TO CHR16.3; EXPRESSED IN PLACENTA, SIGNAL = 1.8; EXPRESSED IN HEART, SIGNAL = 2.3; EXPRESSED IN FETAL LIVER, SIGNAL = 2.5; NT HIT: AF168791.1, EVALUE 1.00e-97; SWISSPROT HIT: O95255, EVALUE 4.00e-32
gtaccttggagacagccgaggagcccgaagatcccgccacgcagggctgcctgcgtctgctgcccacctactgcagggtcgtccgcccacaggctcagccagtagccccggcagaaggaggccacttgctggcagaggaagaggaagagtgcgtagaggcagagaggggtgcccacggcacgcaggtag

SEQ ID NO: 26382 - DNA, 170 bp, Homo sapiens
  MAP TO CHR5.3; EXPRESSED IN PLACENTA, SIGNAL = 0.99; EXPRESSED IN BRAIN, SIGNAL = 1.3; EXPRESSED IN ADULT LIVER, SIGNAL = 1.1; EST_HUMAN HIT: BG399034.1, EVALUE 7.00e-91; NT HIT: gi14722298, EVALUE 5.00e-91; SWISSPROT HIT: P17342, EVALUE 3.00e-27
ggagatggctcatggaagagaggagacaaacacgactttgaagctaagcaagcatactcgtccctccagacagtcactctactgaggacagtgaaacctgagtttgagaagttttccatggaggtgaaaagttcagttgagaaacaagggctcaatatggaggattacgt

SEQ ID NO: 26383 - DNA, 217 bp, Homo sapiens
  MAP TO CHR5.3; EXPRESSED IN LUNG, SIGNAL = 2.2; EXPRESSED IN HEART, SIGNAL = 1.3; EXPRESSED IN PLACENTA, SIGNAL = 1.3; EXPRESSED IN BRAIN, SIGNAL = 1.1; EXPRESSED IN FETAL LIVER, SIGNAL = 2.5; SWISSPROT HIT: Q14814, EVALUE 9.90e-01; NT HIT: gi16159871, EVALUE 1.00e-112; EST_HUMAN HIT: BE564167.1, EVALUE 1.00e-110
aggtaacttactctgttgctgaatcattgtattcagtgatggctgctggggtttggaaggctgcataccaggtagtaagttgtctaggctgatgtttacactggggtcagaccaagtagagggcaaggttttgctgactgatttctggaccatatctgtattctgattatagagaggattaggcttctgcagcactgtgctaacattttgcaaaggc

SEQ ID NO: 26384 - DNA, 171 bp, Homo sapiens
  MAP TO CHR12.3; EXPRESSED IN LUNG, SIGNAL = 0.6; EXPRESSED IN PLACENTA, SIGNAL = 0.56; EXPRESSED IN BRAIN, SIGNAL = 0.94; EST_HUMAN HIT: AL566513.1, EVALUE 2.00e-85; SWISSPROT HIT: P09613, EVALUE 6.60e-01; NT HIT: gi14784204, EVALUE 1.00e-85
ctcctagatgggggctgtgacgactatgcagagggccgagtttgcaaagttcgctttgatgctaacggagccacaggaccagggagccgggaccccgcccaggtgaagctgctgcctggaaggcacatgctcttccctcctcttgagagagtccactacttacaggtatgg

SEQ ID NO: 26385 - DNA, 157 bp, Homo sapiens
  MAP TO CHR11.3; EXPRESSED IN FETAL LIVER, SIGNAL = 0.66; EXPRESSED IN ADULT LIVER, SIGNAL = 0.96; EXPRESSED IN BRAIN, SIGNAL = 1.2; EXPRESSED IN LUNG, SIGNAL = 0.79; EXPRESSED IN PLACENTA, SIGNAL = 1.1; SWISSPROT HIT: Q60675, EVALUE 3.40e+00; NT HIT: gi14771415, EVALUE 2.00e-71; EST_HUMAN HIT: BG952000.1, EVALUE 3.00e-71
aggggatcgaagttttccttttgttctattgcaatctctttggacttctcaactggaggaggacgaggagccagcctgccctgagacactttcctctggtcattctgcttcctgtcagctagccctttggggacgttctgaaaaagacaaggtagag

SEQ ID NO: 26386 - DNA, 266 bp, Homo sapiens
  MAP TO CHR17.3; EXPRESSED IN BRAIN, SIGNAL = 0.83; EXPRESSED IN PLACENTA, SIGNAL = 0.59; EXPRESSED IN HEART, SIGNAL = 0.72; EST_HUMAN HIT: BG108394.1, EVALUE 1.00e-118; SWISSPROT HIT: O75106, EVALUE 1.00e-30; NT HIT: AB012942.1, EVALUE 0.00e+00
tcatttctatggtggtttggccagctcagcccttgtggtcaggtctgtgtcatctgtgggcaactatgactacatttgggactttgtgttgtacccaaatggggcacttgaagggcgggtccatgccacgggttatatcaacacagctttcctgaaagggggagaggagggcctcctctttgggaaccgtgtgggggaaagagtgctgggaacggtgcacacacatgccttccacttcaagctggacctggatgtggcaggtgagt

SEQ ID NO: 26387 - DNA, 183 bp, Homo sapiens
  MAP TO CHR1.3; EXPRESSED IN PLACENTA, SIGNAL = 0.9; EXPRESSED IN BRAIN, SIGNAL = 0.86; EST_HUMAN HIT: BE547351.1, EVALUE 1.00e-98; NT HIT: gi16158242, EVALUE 9.00e-99; SWISSPROT HIT: P18481, EVALUE 3.30e+00
gttaaaataattttggtaactgtctgagacgttttacatctaagaaggtgcctactgaattcatgctattcatctgctttagcgtttcagaaggttgcaaactttcaggaaaaattgtaatgtccccttcattttctttctcaggatgttgagtgaactctgctttcccggttcgaaggttca

SEQ ID NO: 26388 - DNA, 167 bp, Homo sapiens
  MAP TO CHR14.3; EXPRESSED IN LUNG, SIGNAL =   2; EXPRESSED IN PLACENTA, SIGNAL = 1.4; EXPRESSED IN ADULT LIVER, SIGNAL = 1.6; EXPRESSED IN BRAIN, SIGNAL = 1.2; SWISSPROT HIT: P10144, EVALUE 2.00e-25; EST_HUMAN HIT: BI836851.1, EVALUE 4.00e-77; NT HIT: J03072.1, EVALUE 7.00e-87
gctcctcaccttccccaacagtgagcagctgtcagcacgaagtcgtctcgtatcaggaagccaccgcacctcttcagagacttctgatcccagatcataagataagccatgtaggggcgggagtggggcttggcctcatgtcccccgatgatctcccctgaaggaaa

SEQ ID NO: 26389 - DNA, 159 bp, Homo sapiens
  MAP TO CHR1.3; EXPRESSED IN PLACENTA, SIGNAL =   1; EXPRESSED IN FETAL LIVER, SIGNAL = 2.7; EXPRESSED IN BRAIN, SIGNAL = 0.68; NT HIT: L25940.1, EVALUE 2.00e-84; SWISSPROT HIT: Q14739, EVALUE 1.00e-24; EST_HUMAN HIT: AW815460.1, EVALUE 9.00e-81
actcacgtttcagaacaataattagagaagccattggccaagacacttcatttggatgactgactaaataaaaggcttggaagctgtaaataaagggaacccacaccaagtctccaaaagccagcatgaatccaaatccatcgtggatgatgtccatgg

SEQ ID NO: 26390 - DNA, 137 bp, Homo sapiens
  MAP TO CHR5.3; EXPRESSED IN PLACENTA, SIGNAL =   3; EXPRESSED IN LUNG, SIGNAL = 1.5; EXPRESSED IN ADULT LIVER, SIGNAL = 3.3; EXPRESSED IN FETAL LIVER, SIGNAL = 2.9; EST_HUMAN HIT: AI357242.1, EVALUE 6.80e-01; SWISSPROT HIT: O14511, EVALUE 5.00e-20; NT HIT: AF119159.1, EVALUE 2.00e-71
tgcagaaaacagcggaagcagatgcacaaccacctccggcagaacatgtgcccggcccatcagaaccggagcttggccaatgggcccagccacccccggctggacccagaggagatccagatggcagatgtgagtgg

SEQ ID NO: 26391 - DNA, 128 bp, Homo sapiens
  MAP TO CHR19.3; EXPRESSED IN HEART, SIGNAL = 1.9; EXPRESSED IN PLACENTA, SIGNAL = 2.1; EXPRESSED IN FETAL LIVER, SIGNAL = 1.5; EXPRESSED IN ADULT LIVER, SIGNAL = 2.3; NT HIT: gi14766161, EVALUE 1.00e-62; EST_HUMAN HIT: AA535428.1, EVALUE 4.00e-08; SWISSPROT HIT: Q08493, EVALUE 2.00e-16
cctcaccttgttggaggccatctcccccaccgagtgccgggtctgcagcgtctccaactgatccaggcaccagtccagctcgtctagcgtctccaatgccagcttctgccccgtgtcctctgggagcc

SEQ ID NO: 26392 - DNA, 134 bp, Homo sapiens
  MAP TO CHR18.3; EXPRESSED IN PLACENTA, SIGNAL = 1.1; EXPRESSED IN ADULT LIVER, SIGNAL = 1.7; EXPRESSED IN BRAIN, SIGNAL = 1.7; SWISSPROT HIT: P51580, EVALUE 2.00e-18; NT HIT: gi14763712, EVALUE 1.00e-69; EST_HUMAN HIT: AV651022.1, EVALUE 6.00e-60
cttaaatgctttggttccaggaatttcggtgattggttcttctgagtaagatagattctgctctgtaaaaaattctcgtatcccaagttcactgatttccacaccaactacgctgtgtccccggtctgcaaacc

SEQ ID NO: 26393 - DNA, 123 bp, Homo sapiens
  MAP TO CHR19.3; EXPRESSED IN PLACENTA, SIGNAL =  39; NT HIT: gi15310413, EVALUE 6.00e-62; SWISSPROT HIT: P25112, EVALUE 3.00e-15; EST_HUMAN HIT: AA063589.1, EVALUE 5.00e-63
gtaggtgcgcgtggaattcatggacgacacgagccgatccatcatccgcaatgtaaaaggccccgtgcgcgagggcgacgtgctcacccttttggagtcagagcgagaagcccggaggttgcg

SEQ ID NO: 26394 - DNA, 123 bp, Homo sapiens
  MAP TO CHR21.3; EXPRESSED IN LUNG, SIGNAL = 2.2; EXPRESSED IN HEART, SIGNAL = 2.7; EXPRESSED IN PLACENTA, SIGNAL = 1.1; EXPRESSED IN FETAL LIVER, SIGNAL =   2; EXPRESSED IN BRAIN, SIGNAL = 2.5; NT HIT: AF082835.1, EVALUE 3.00e-39; SWISSPROT HIT: Q05086, EVALUE 7.00e-12; EST_HUMAN HIT: BF983952.1, EVALUE 2.00e-37
tttacagcatgccaaatgcttcacatatgtgatggccttcaacaatctctccttaagtttttctttgcctgaatattctggaagtaaaagcacattaaagcaagtaggagatgtaggtaacct

SEQ ID NO: 26395 - DNA, 423 bp, Homo sapiens
  MAP TO CHR18.3; EXPRESSED IN BRAIN, SIGNAL = 0.84; EXPRESSED IN PLACENTA, SIGNAL = 0.83; EXPRESSED IN LUNG, SIGNAL = 0.73; EXPRESSED IN HEART, SIGNAL = 0.79; EXPRESSED IN ADULT LIVER, SIGNAL = 0.82; SWISSPROT HIT: P48595, EVALUE 8.00e-74; NT HIT: gi11425214, EVALUE 0.00e+00; EST_HUMAN HIT: BE148535.1, EVALUE 0.00e+00
gcagctggaaaaggccatcacctatgagaagctgaatgagtggaccagtgcagacatgatggagttgtatgaagtgcagctacaccttcccaagttcaagctggaagacagttatgatctcaagtcaaccctgagcagtatggggatgagtgatgccttcagccaaagcaaagctgatttctcaggaatgtcttcagcaagaaacctatttttgtccaatgttttccataaggcttttgtggaaataaatgaacaaggtactgaagctgcagctggcagtgggagtgagatagatatacgaattagagtcccatccattgaattcaatgcaaatcacccattcctcttcttcatcaggcacaataaaaccaacaccattcttttttatggaagattatgctccccctaaatcctgcatatctc

SEQ ID NO: 26396 - DNA, 168 bp, Homo sapiens
  MAP TO CHR5.3; EXPRESSED IN ADULT LIVER, SIGNAL = 0.74; EXPRESSED IN PLACENTA, SIGNAL = 0.62; EST_HUMAN HIT: N66137.1, EVALUE 9.00e-75; SWISSPROT HIT: Q13094, EVALUE 2.00e-24; NT HIT: U20158.1, EVALUE 6.00e-72
tccttacctctttccctcggagtccagttcccaacaagtaaacttgactttccttctgataacggatctggatgttgtaaactttatctttgtacaacaccatgaggacatatggattggttgttgtttttttagagctgtctctgaccagaaatgtgccatcctaaa

SEQ ID NO: 26397 - DNA, 120 bp, Homo sapiens
  MAP TO CHR18.3; EXPRESSED IN PLACENTA, SIGNAL = 0.6; EXPRESSED IN FETAL LIVER, SIGNAL = 0.83; EXPRESSED IN BRAIN, SIGNAL = 0.42; EST_HUMAN HIT: BG718992.1, EVALUE 2.00e-03; NT HIT: AF120978.1, EVALUE 5.00e-16
aagagaagaaaaacattatttcgtggctgaaaagctgaaccagcaattcaggaaatggaattcgtatttagaaacataccacatacaaaatccgaagtgggtggtttacaaatgattaag

SEQ ID NO: 26398 - DNA, 117 bp, Homo sapiens
  MAP TO CHR12.3; EXPRESSED IN BRAIN, SIGNAL = 0.76; EXPRESSED IN PLACENTA, SIGNAL = 1.7; NT HIT: M19045.1, EVALUE 1.00e-59; SWISSPROT HIT: P79179, EVALUE 4.00e-19; EST_HUMAN HIT: BF899247.1, EVALUE 2.00e-59
acaggcattaactgctcctggggttttgccatcattacaccagtagcggctattgatctgaaatatcccataatcagtgcttctgtctccagcattgtagtttgtagctcgtgtgtt

SEQ ID NO: 26399 - DNA, 255 bp, Homo sapiens
  MAP TO CHR16.3; EXPRESSED IN PLACENTA, SIGNAL = 1.1; EXPRESSED IN ADULT LIVER, SIGNAL = 1.5; EXPRESSED IN HEART, SIGNAL = 1.6; EST_HUMAN HIT: AU118435.1, EVALUE 0.00e+00; SWISSPROT HIT: Q9NWB1, EVALUE 3.00e-44; NT HIT: gi8922072, EVALUE 0.00e+00
cagggtaatcaggaagcagccgctgcccctgacacaatggctcagccttacgcttcggcccagtttgctcccccgcagaacggtatccccgcggaatacacggcccctcatccccaccccgcgccagagtacacaggccagaccacggttcccgagcacacattaaacctgtaccctcccgcccagacgcactccgagcagagcccggcggacacgagcgctcagaccgtctctggcaccgccacagtaagtgga

SEQ ID NO: 26400 - DNA, 208 bp, Homo sapiens
  MAP TO CHR5.3; EXPRESSED IN PLACENTA, SIGNAL =   2; EXPRESSED IN LUNG, SIGNAL = 4.9; NT HIT: gi16157050, EVALUE 1.00e-109; SWISSPROT HIT: P31040, EVALUE 3.00e-36; EST_HUMAN HIT: R90772.1, EVALUE 1.00e-108
caccatcacctgccccttgtagttggtgggaatgccgcccatgttataatgcacggtggggaggacagggatcggctccttcgtgacgtccacgccagcgaagatcatggctgtctctgaaatgccaggcaggcgcgtggccagctgctctggaggtaggtggtgcagctgcaggtagacgtgatctttctcagggccacagcctctg

SEQ ID NO: 26401 - DNA, 143 bp, Homo sapiens
  MAP TO CHR3.3; EXPRESSED IN FETAL LIVER, SIGNAL = 1.9; EXPRESSED IN PLACENTA, SIGNAL = 0.91; EXPRESSED IN LUNG, SIGNAL = 2.5; EXPRESSED IN BRAIN, SIGNAL = 1.4; EST_HUMAN HIT: AA041324.1, EVALUE 1.00e-64; NT HIT: gi15294478, EVALUE 7.00e-65
tctcttttttaggaagctgttttaggttatgtgaaagagatgtttcctcatctctaaggcttaccagaagctctgatttgaagagaataaatggattttgcacaaaaccacaggaaagtcccggagctccatcccgtaagttt

SEQ ID NO: 26402 - DNA, 211 bp, Homo sapiens
  MAP TO CHRX.3; EXPRESSED IN PLACENTA, SIGNAL = 2.2; EXPRESSED IN HEART, SIGNAL = 5.6; EXPRESSED IN ADULT LIVER, SIGNAL = 3.9; EXPRESSED IN BRAIN, SIGNAL =   5; SWISSPROT HIT: Q9Y6K9, EVALUE 4.00e-34; EST_HUMAN HIT: BG335235.1, EVALUE 1.00e-113; NT HIT: AJ271718.1, EVALUE 1.00e-115
atccggcagagcaaccagattctgcgggagcgctgcgaggagcttctgcatttccaagccagccagagggaggagaaggagttcctcatgtgcaagttccaggaggccaggaaactggtggagagactcggcctggagaagctcgatctgaagaggcagaaggagcaggctctgcgggaggtggagcacctgaagagatgccagcaggtag

SEQ ID NO: 26403 - DNA, 154 bp, Homo sapiens
  MAP TO CHR4.3; EXPRESSED IN PLACENTA, SIGNAL = 0.73; EXPRESSED IN HEART, SIGNAL = 0.68; EXPRESSED IN ADULT LIVER, SIGNAL = 0.41; NT HIT: AF163864.1, EVALUE 1.00e-81; SWISSPROT HIT: P37840, EVALUE 4.00e-10; EST_HUMAN HIT: BG187531.1, EVALUE 2.00e-81
cagccataccttgcccaactggtcctttttgacaaagccagtggctgctgcaatgctccctgctccctccactgtcttctgggctactgctgtcacacccgtcaccactgctcctccaacatttgtcacttgctctttggtcttctcagccact

SEQ ID NO: 26404 - DNA, 159 bp, Homo sapiens
  MAP TO CHR6.3; EXPRESSED IN BRAIN, SIGNAL = 2.4; EXPRESSED IN PLACENTA, SIGNAL = 1.4; EXPRESSED IN LUNG, SIGNAL = 2.6; NT HIT: gi14758087, EVALUE 6.00e-81; SWISSPROT HIT: Q9UK97, EVALUE 9.00e-24; EST_HUMAN HIT: AA005034.1, EVALUE 1.00e-82
ctccagatgttccgagctcagtggatgtttgaacttgctccaggtgtaagctctagcaatttagaaaatcgaccttgcagagcagcaagaggctctctccagaaaacatcggcagataccaaaggaaaacaagaacaggcaaaagaagaaaagttaagt

SEQ ID NO: 26405 - DNA, 257 bp, Homo sapiens
  MAP TO CHR3.3; EXPRESSED IN PLACENTA, SIGNAL = 0.48; EST_HUMAN HIT: BE796411.1, EVALUE 0.00e+00; NT HIT: gi14733156, EVALUE 0.00e+00; SWISSPROT HIT: P43535, EVALUE 3.00e-19
tgagctcccgctccctccgtagcaaatcctctcgcacactgtcactctccagcacactctgcagggcaggagtgtcatctccagcaacctcttgctcaacgtgcagcagggaaatgtgggctggaacccgcagactccgggtggccagcatcttcagtaacgttgtcttccccaacccattccgccccaccagcccgtaacggcggccccatgccaggttcacatccgctccagccagcagtactctgcaggagtgg

SEQ ID NO: 26406 - DNA, 249 bp, Homo sapiens
  MAP TO CHR1.3; EXPRESSED IN ADULT LIVER, SIGNAL = 0.78; EXPRESSED IN PLACENTA, SIGNAL = 1.4; NT HIT: AF045186.1, EVALUE 0.00e+00; SWISSPROT HIT: O75381, EVALUE 4.00e-24; EST_HUMAN HIT: AL546821.1, EVALUE 0.00e+00
ctaggaggcagttccctccatccccatcagccccgaagatcccctcctggcagatcccagtcaagtcaccgtcaccctccagccctgcggccgtgaaccaccacagcagcagcgacatctcacctgtcagcaacgagtccacgtcgtcctcgcctgggaaggagggccacagccccgagggctccacggtcacctaccacttgctgggcccccaggaggaaggcgagggggtggtggacgtcaagggcc

SEQ ID NO: 26407 - DNA, 133 bp, Homo sapiens
  MAP TO CHR19.3; EXPRESSED IN LUNG, SIGNAL = 0.89; EXPRESSED IN PLACENTA, SIGNAL = 1.5; EXPRESSED IN HEART, SIGNAL = 1.9; EXPRESSED IN BRAIN, SIGNAL = 2.4; NT HIT: AF117647.1, EVALUE 2.00e-64; SWISSPROT HIT: Q9ULV8, EVALUE 6.00e-21; EST_HUMAN HIT: BE900379.1, EVALUE 4.00e-64
cctccagaaggtgtgggcgggggccttggtgagctggtacatgtgtccacagtactttcccccggggaagagtgcgtgcagctctgcgtgcatgtggctgaagatgatggccagcttggccacgtgtcgcctg

SEQ ID NO: 26408 - DNA, 139 bp, Homo sapiens
  MAP TO CHR9.3; EXPRESSED IN FETAL LIVER, SIGNAL =   1; EXPRESSED IN BRAIN, SIGNAL = 1.4; EXPRESSED IN HEART, SIGNAL = 1.4; EXPRESSED IN PLACENTA, SIGNAL = 1.4; EST_HUMAN HIT: BG819640.1, EVALUE 2.00e-56; NT HIT: gi14739649, EVALUE 7.00e-65; SWISSPROT HIT: Q15569, EVALUE 9.00e-18
cccccaggttcggcaccgacagtcagggcaagtcatggtgctgaagatgaacaagctccccagtaaccggggcaacacactacgggaagtgcagctgatgaaccggctcaggcaccccaacatcctaaggtgagcggcc

SEQ ID NO: 26409 - DNA, 199 bp, Homo sapiens
  MAP TO CHR15.3; EXPRESSED IN FETAL LIVER, SIGNAL = 0.97; EXPRESSED IN ADULT LIVER, SIGNAL = 0.86; EXPRESSED IN BRAIN, SIGNAL = 0.74; EXPRESSED IN PLACENTA, SIGNAL =   1; EXPRESSED IN LUNG, SIGNAL = 0.91; EXPRESSED IN HEART, SIGNAL =  80; SWISSPROT HIT: Q98972, EVALUE 5.00e-32; EST_HUMAN HIT: AA651688.1, EVALUE 1.00e-105; NT HIT: gi15300433, EVALUE 1.00e-106
ctcaccaatgaaggagggctggaagagtgtctcaggacagcggaagcgctcattgccaatagtgatgacttggccatcaggcagttcatagctcttctccagggaggaggaagaggcagctgtggccatctcattctcaaaatccagggcgacatagcacagcttctctttaatgtcacggacaatttcacgttcagct

SEQ ID NO: 26410 - DNA, 305 bp, Homo sapiens
  MAP TO CHR3.3; EXPRESSED IN LUNG, SIGNAL = 0.47; EXPRESSED IN HEART, SIGNAL = 0.97; EXPRESSED IN ADULT LIVER, SIGNAL = 0.7; EXPRESSED IN BRAIN, SIGNAL = 0.8; EXPRESSED IN PLACENTA, SIGNAL = 0.6; NT HIT: Y08456.1, EVALUE 0.00e+00; SWISSPROT HIT: P51685, EVALUE 1.00e-54; EST_HUMAN HIT: BE969659.1, EVALUE 4.10e-01
ggcatttgtcttcctaggtagttgaagatttggctgcaacttttctgaaatatttctgagaggtgtttcttgaacttctccccaacaaaagcatagataacagggttcacacagcagtgagtaaaggaaatgatttctgtgacatgggtggcataagtcagctgttggcttatgctacatccatccaagatgtgcatactgtgcaaggaagtgaggaaaagaaccacgttgaatgggacccagaaaagtaaagatgcaatgaccacaatgagcaccaacctgatggccttggtcttgttgtggtt

SEQ ID NO: 26411 - DNA, 112 bp, Homo sapiens
  MAP TO CHR16.3; EXPRESSED IN FETAL LIVER, SIGNAL = 0.48; EXPRESSED IN ADULT LIVER, SIGNAL = 0.7; EXPRESSED IN BRAIN, SIGNAL = 0.91; EXPRESSED IN PLACENTA, SIGNAL = 0.56; EST_HUMAN HIT: BE857538.1, EVALUE 4.00e-42; NT HIT: gi6912305, EVALUE 1.00e-56; SWISSPROT HIT: Q92179, EVALUE 6.00e-07
gtgcacgtgctggtgctgtcctcgtggcgctcgggctcatccttcttgggccagctcttcagccagcaccccgacgtcttctacctgatggagcccgcgtggcatgtgtgga

SEQ ID NO: 26412 - DNA, 188 bp, Homo sapiens
  MAP TO CHR11.3; EXPRESSED IN ADULT LIVER, SIGNAL = 2.1; EXPRESSED IN BRAIN, SIGNAL = 1.8; EXPRESSED IN HEART, SIGNAL = 2.6; EXPRESSED IN PLACENTA, SIGNAL = 1.5; NT HIT: gi14768566, EVALUE 1.00e-102; SWISSPROT HIT: Q13614, EVALUE 3.00e-32; EST_HUMAN HIT: BG507100.1, EVALUE 1.00e-101
cttaatatgttctagccaatgagtagattccaagttagacaaccagtgagtttcctcaatgttggggtacacaatctccttaagttttcgtaatgattctctcataacatgaatattgtggatatccaggaaaactagttcagcattttgataggcatcttcactttcataacctccaccctttgcct

SEQ ID NO: 26413 - DNA, 158 bp, Homo sapiens
  MAP TO CHR14.3; EXPRESSED IN LUNG, SIGNAL =   1; EXPRESSED IN HEART, SIGNAL = 1.2; EXPRESSED IN PLACENTA, SIGNAL = 0.93; EXPRESSED IN ADULT LIVER, SIGNAL =   1; EST_HUMAN HIT: BG762718.1, EVALUE 1.00e-79; NT HIT: J04990.1, EVALUE 6.00e-84; SWISSPROT HIT: P08311, EVALUE 1.00e-24
tcctcaccttccccagcaatgagctgctgtcagcacaaagtcttctcgcaccaggaaccctccacatctgctctgacctgctggactctggatctgaagatacgccatgtaggggcgggagtggggcctgctctcccggcctccgatgatctcccctg

SEQ ID NO: 26414 - DNA, 295 bp, Homo sapiens
  MAP TO CHR3.3; EXPRESSED IN PLACENTA, SIGNAL =   2; EXPRESSED IN HEART, SIGNAL = 1.2; NT HIT: AF124539.1, EVALUE 0.00e+00; SWISSPROT HIT: O15350, EVALUE 3.00e-16; EST_HUMAN HIT: BF834091.1, EVALUE 8.00e-98
ttgcacaggatctggcaagtctgaaaatccctgagcaatttcgacatgcgatctggaagggcatcctggaccaccggcagctccacgaattctcctccccttctcatctcctgcggaccccaagcagtgcctctacagtcagtgtgggctccagtgagacccggggtgagcgtgttattgatgctgtgcgattcaccctccgccagaccatctctttcccaccccgagatgagtggaatgacttcaactttgacatggatgctcgccgcaataagcaacagcgcatcaaagagga

SEQ ID NO: 26415 - DNA, 170 bp, Homo sapiens
  MAP TO CHR6.3; EXPRESSED IN FETAL LIVER, SIGNAL = 0.59; EXPRESSED IN PLACENTA, SIGNAL = 1.8; EXPRESSED IN LUNG, SIGNAL = 3.3; EXPRESSED IN HEART, SIGNAL = 2.7; NT HIT: U91328.1, EVALUE 5.00e-91; EST_HUMAN HIT: BF769296.1, EVALUE 1.40e-02
ggtggctcttaaaagagccgttgggttactagaagaaacttctaactgaatttactttttcttgggtgccgctttcttgggtttggcagtctttggcttcgtcaccctagccttggccgccttgggttttacagccttagctttagcagggcttttagctactttcttgg

SEQ ID NO: 26416 - DNA, 159 bp, Homo sapiens
  MAP TO CHRX.3; EXPRESSED IN HEART, SIGNAL = 1.1; EXPRESSED IN PLACENTA, SIGNAL = 1.2; EXPRESSED IN ADULT LIVER, SIGNAL = 1.1; EXPRESSED IN BRAIN, SIGNAL = 1.2; EST_HUMAN HIT: R51754.1, EVALUE 5.00e-76; NT HIT: gi4507320, EVALUE 4.00e-76; SWISSPROT HIT: P42393, EVALUE 8.70e-01
tgcagcgtgtgttgcaagtcttcttggaatcagctgcaggacctgtgccgcctggccaagctctcctgccctgccctcggtatctctaagaggaacctctatgactttgaagtcgagtacctgtgcgattacaagaagatccgcgtgagtctggggtga

SEQ ID NO: 26417 - DNA, 205 bp, Homo sapiens
  MAP TO CHR1.3; EXPRESSED IN LUNG, SIGNAL = 2.9; EXPRESSED IN PLACENTA, SIGNAL = 0.99; EXPRESSED IN HEART, SIGNAL = 1.9; EXPRESSED IN ADULT LIVER, SIGNAL = 4.8; EXPRESSED IN BRAIN, SIGNAL = 1.7; EST_HUMAN HIT: BE244583.1, EVALUE 1.70e-02; NT HIT: AF105980.1, EVALUE 1.00e-109; SWISSPROT HIT: P42898, EVALUE 4.00e-33
gcccctcacctggatgggaaagatcccggggacgatggggcaagtgatgcccatgtcggtgcatgccttcacaaagcggaagaatgtgtcagcctcaaagaaaagctgcgtgatgatgaaatcggctcccgcagacaccttctccttcaagtgcttcaggtcagcctcaaagctccttgcttcggggtggcctttggggtaacct

SEQ ID NO: 26418 - DNA, 179 bp, Homo sapiens
  MAP TO CHR6.3; EXPRESSED IN PLACENTA, SIGNAL = 0.53; EXPRESSED IN BRAIN, SIGNAL = 1.2; EXPRESSED IN LUNG, SIGNAL = 0.48; NT HIT: U65402.1, EVALUE 2.00e-96; SWISSPROT HIT: O00270, EVALUE 9.00e-09; EST_HUMAN HIT: AL531903.1, EVALUE 5.90e-02
gccaacagcaggtcagccagggccaggttgagcaggtagacagcgtacggcttccacaccctgacccggaacaggaaggtccacagcgccaccgcgttgcccagcagacccagcccacactccagccccagcaagacacccacagctgtggccaccacagtgctgggggctgagcagtt

SEQ ID NO: 26419 - DNA, 267 bp, Homo sapiens
  MAP TO CHR21.3; EXPRESSED IN PLACENTA, SIGNAL = 1.6; EXPRESSED IN LUNG, SIGNAL = 1.1; EXPRESSED IN HEART, SIGNAL = 1.1; EXPRESSED IN ADULT LIVER, SIGNAL =   1; EST_HUMAN HIT: AA326765.1, EVALUE 1.00e-56; NT HIT: gi15320009, EVALUE 1.00e-125; SWISSPROT HIT: Q13009, EVALUE 3.00e-37
catacctgggttgctggtgagaaaggcgagggggctctcgccaaggtcggcagggccgtccactcggtggggcgggctttccagcagctccactccttcctccagctcggggtaggtcctcaccaggaggcccagcgagggctgtgagaggaaatctttgagcatagaagagttcagggcgtcagcagcacgattattgatctcaagaatctcatctcctgctttcaggcctgccaacgcaagatggaaaatttttaatttcacaca

SEQ ID NO: 26420 - DNA, 206 bp, Homo sapiens
  MAP TO CHR2.3; EXPRESSED IN PLACENTA, SIGNAL = 1.6; EXPRESSED IN LUNG, SIGNAL = 2.2; EXPRESSED IN HEART, SIGNAL = 2.7; EXPRESSED IN FETAL LIVER, SIGNAL =  21; SWISSPROT HIT: Q9NSD9, EVALUE 3.00e-24; NT HIT: gi15296129, EVALUE 4.00e-89; EST_HUMAN HIT: AL046173.1, EVALUE 1.00e-110
cagagaccaatcttcacaaaaagggtccaacattgatttctagggaggagcagggcatggtcagctcaaatttggtgataacgtcaggatgaaggaccccaagcttcccgacgctttgacccctggcaaagatctctgcacatcgcccggggaagaaagcaggccctgaaaaagagaaagtaagagaaaaatcaatgtttcttctg

SEQ ID NO: 26421 - DNA, 152 bp, Homo sapiens
  MAP TO CHR6.3; EXPRESSED IN PLACENTA, SIGNAL = 0.86; EXPRESSED IN LUNG, SIGNAL = 1.6; EXPRESSED IN HEART, SIGNAL = 1.7; SWISSPROT HIT: P50174, EVALUE 6.00e-13; NT HIT: gi14755393, EVALUE 1.00e-78; EST_HUMAN HIT: AL537517.1, EVALUE 3.00e-77
cagctgaaaatgtagccaaaaaatggcaagtgagtagagaagatcaggacaaggttgcagttctgtcccagaacaggacagagaatgcacagaaagctggccattttgacaaagagattgtaccagttttggtgtcaactagaaaaggtgag

SEQ ID NO: 26422 - DNA, 147 bp, Homo sapiens
  MAP TO CHR14.3; EXPRESSED IN PLACENTA, SIGNAL =   2; EXPRESSED IN LUNG, SIGNAL = 2.7; EXPRESSED IN HEART, SIGNAL =   2; NT HIT: gi14784286, EVALUE 8.00e-71; EST_HUMAN HIT: BG769255.1, EVALUE 3.00e-71; SWISSPROT HIT: P05094, EVALUE 1.00e-20
ggtggggctcacctggatctcctcaatggtgtgcacaatgaaggtgtcctgcaggtcctccatggccccctccatccagttgttgaagggtgcagcccgcttggcatactccaagtacagctggtcaatggtctccagcagtttctc

SEQ ID NO: 26423 - DNA, 248 bp, Homo sapiens
  MAP TO CHR6.3; EXPRESSED IN LUNG, SIGNAL = 1.7; EXPRESSED IN HEART, SIGNAL = 2.4; EXPRESSED IN PLACENTA, SIGNAL = 1.7; EXPRESSED IN ADULT LIVER, SIGNAL = 2.3; NT HIT: gi5454143, EVALUE 0.00e+00; EST_HUMAN HIT: BF511005.1, EVALUE 0.00e+00; SWISSPROT HIT: P23398, EVALUE 3.00e-03
gccatcatcttcccatcttccagtctctttccattgcaagtcacaatctgggtctcagggattatacccgtcttagtctcgatcattgctttcacttgtgccactgagctggaccttcgcacctggaggaggtgcctctttgcctcatcacctgactccacaagaaacaagggcagctcctcatcactgggcttcaccactttcagggtaaggtggatggtcttctctttgtcaatgccataagatga

SEQ ID NO: 26424 - DNA, 141 bp, Homo sapiens
  MAP TO CHR19.3; EXPRESSED IN HEART, SIGNAL = 0.81; EXPRESSED IN BRAIN, SIGNAL = 0.56; EXPRESSED IN LUNG, SIGNAL = 0.69; EXPRESSED IN PLACENTA, SIGNAL = 0.46; EST_HUMAN HIT: AI826553.1, EVALUE 6.00e-63; SWISSPROT HIT: P98187, EVALUE 8.00e-19; NT HIT: gi14767726, EVALUE 4.00e-63
actcactcctgacaattgctgtcaaagctgaagatgcatttctgcagactgtccagggtcataaggctgatgtgctcaaacacatccagacaggtgctgccctccatggccaggcgttgccacttggcctggccagagaag

SEQ ID NO: 26425 - DNA, 165 bp, Homo sapiens
  MAP TO CHR14.3; EXPRESSED IN FETAL LIVER, SIGNAL = 0.82; EXPRESSED IN BRAIN, SIGNAL = 1.1; EXPRESSED IN PLACENTA, SIGNAL = 0.87; EXPRESSED IN HEART, SIGNAL = 0.55; NT HIT: gi15300777, EVALUE 1.00e-82; EST_HUMAN HIT: AA448043.1, EVALUE 9.00e-84; SWISSPROT HIT: Q9PQ33, EVALUE 1.00e-01
taggtatgcccaagaggacagagaacgaatgcacagaaatattgtcagccttgcacagaatctcctgaactttatgattggctctatcttggatttatggcaatgcttcctctggttttacattggttcttcattgaatggtactcggggaaaaagaggttagca

SEQ ID NO: 26426 - DNA, 117 bp, Homo sapiens
  MAP TO CHR6.3; EXPRESSED IN HEART, SIGNAL = 3.6; EXPRESSED IN PLACENTA, SIGNAL = 4.6; EXPRESSED IN BRAIN, SIGNAL = 2.1; EST_HUMAN HIT: AL567014.1, EVALUE 2.00e-59; SWISSPROT HIT: Q99808, EVALUE 1.00e-05; NT HIT: AF190884.1, EVALUE 1.00e-59
gtcacacaattgcccggaacaggaaggagaaaacagcccccagtgccagacccagacacaggaagaaggccatgatggctcctgcggtctctgcctcagctggcttcactttcctaa

SEQ ID NO: 26427 - DNA, 181 bp, Homo sapiens
  MAP TO CHR13.3; EXPRESSED IN ADULT LIVER, SIGNAL = 0.84; EXPRESSED IN PLACENTA, SIGNAL = 0.72; NT HIT: gi5729878, EVALUE 1.00e-97; EST_HUMAN HIT: BG532824.1, EVALUE 2.00e-97; SWISSPROT HIT: Q92598, EVALUE 4.00e-32
aggaattgaacaacacatgtgaacccgttgtaacacaaccgaaaccaaaaattgaatcacccaaactggaaagaactccaaatggcccaaatattgataaaaaggaagaagatttagaagacaaaaacaattttggtgctgaacctccacatcagaatggtgaatgttaccctaatgagaa

SEQ ID NO: 26428 - DNA, 222 bp, Homo sapiens
  MAP TO CHR2.3; EXPRESSED IN PLACENTA, SIGNAL = 0.52; EST_HUMAN HIT: BG258514.1, EVALUE 1.00e-118; SWISSPROT HIT: Q22516, EVALUE 3.60e-01; NT HIT: gi14734877, EVALUE 1.00e-118
ccttgggggtgggactactcaggttcctccaacctgggagagctgaagctcctgctggaggaagcagtcatgctgcggcgcctcaagtccgacgtcctttcccagctgcctgccaagcagcgcaagatagtggtgattgccccaggacggatcaatgccaggaccagagctgccctggatgctgcagccaaggaaatgaccaccaaggacaaaactgtgagt

SEQ ID NO: 26429 - DNA, 124 bp, Homo sapiens
  MAP TO CHR14.3; EXPRESSED IN PLACENTA, SIGNAL = 1.9; EXPRESSED IN ADULT LIVER, SIGNAL = 0.99; NT HIT: gi14784280, EVALUE 6.00e-62; EST_HUMAN HIT: BG771574.1, EVALUE 8.00e-62; SWISSPROT HIT: Q9Z1P2, EVALUE 2.00e-17
gcctcacctgagatgacctccagcagcagcatgagcttcaggccatcccggaagtcctcttcgatgttctcgatctgtgtccccgccttccggaggtgggagttacaccatgccgtgaatgtct

SEQ ID NO: 26430 - DNA, 193 bp, Homo sapiens
  MAP TO CHR6.3; EXPRESSED IN PLACENTA, SIGNAL = 2.6; EXPRESSED IN HEART, SIGNAL = 2.3; EXPRESSED IN ADULT LIVER, SIGNAL = 2.3; EXPRESSED IN BRAIN, SIGNAL = 3.2; EST_HUMAN HIT: AA223818.1, EVALUE 2.00e-85; SWISSPROT HIT: Q92833, EVALUE 1.00e-19; NT HIT: gi11863151, EVALUE 2.00e-96
caggttctcctgcgctgcccaacagcatggtgtattttggaagctctcaggatgaggaggaagtcgaggaggaagatgatgagacagaagacgtcaaaacagccaccaacaatgcttcatcttcatgccagtcgacccccaggaaaggaaaaacccacaaacatgttcacaacgggcatggtaggtccaccgt

SEQ ID NO: 26431 - DNA, 212 bp, Homo sapiens
  MAP TO CHR17.3; EXPRESSED IN PLACENTA, SIGNAL = 1.1; EXPRESSED IN FETAL LIVER, SIGNAL = 0.75; EXPRESSED IN ADULT LIVER, SIGNAL = 0.99; NT HIT: gi11426863, EVALUE 2.00e-97; EST_HUMAN HIT: BG034978.1, EVALUE 2.00e-97; SWISSPROT HIT: Q9UHJ6, EVALUE 4.00e-32
tttcaaaagccagaagatggttgcacagccgaagcccgtggccacactgagatgagacttcggctggggcagagaggccaggaattcgctgctacatcggccatcctgccacgtgaccaggtggctaacagctcggggctcgaacaccggggtaatccctccctctgtccattcacagcctggaacaaaagagatgaccaaaaatgaagaaa

SEQ ID NO: 26432 - DNA, 197 bp, Homo sapiens
  MAP TO CHR17.3; EXPRESSED IN BRAIN, SIGNAL = 0.43; EXPRESSED IN PLACENTA, SIGNAL = 0.54; NT HIT: gi7705900, EVALUE 1.00e-107; SWISSPROT HIT: Q9UKN7, EVALUE 3.00e-06; EST_HUMAN HIT: BF666540.1, EVALUE 4.10e+00
ggatcaaagtagggtacatcgtagggagtgtggtatgggaggtcatagggtgggtatggcgcgtcgtacggcgcatagggatccaggtagtagccataagggtgcgcctcgccctcgtacccatcgtggtagctgtaaggagacgagtaccccgacgggggcgcatatgggggttcgtaatcgtcgtagccgtagcc

SEQ ID NO: 26433 - DNA, 150 bp, Homo sapiens
  MAP TO CHR1.3; EXPRESSED IN LUNG, SIGNAL = 1.2; EXPRESSED IN PLACENTA, SIGNAL = 2.1; EXPRESSED IN HEART, SIGNAL = 1.7; EXPRESSED IN ADULT LIVER, SIGNAL = 2.1; EXPRESSED IN BRAIN, SIGNAL = 1.5; NT HIT: gi7710049, EVALUE 3.00e-79; SWISSPROT HIT: Q9UMX2, EVALUE 6.00e-23; EST_HUMAN HIT: AI215991.1, EVALUE 5.00e-79
aggtgccctgctgcgggccttcagctacatgggctttgaggtggtcagaccagatcaccctgccctccctcccttggacaatgtcatctttatggtgtatccccttgaaagggatgttggccacctgcccagtgagcctccttgaacatg

SEQ ID NO: 26434 - DNA, 142 bp, Homo sapiens
  MAP TO CHR1.3; EXPRESSED IN LUNG, SIGNAL = 2.5; EXPRESSED IN HEART, SIGNAL = 2.3; EXPRESSED IN PLACENTA, SIGNAL = 1.7; EXPRESSED IN ADULT LIVER, SIGNAL = 2.1; EXPRESSED IN BRAIN, SIGNAL = 1.9; NT HIT: gi16160976, EVALUE 5.00e-72; SWISSPROT HIT: Q15782, EVALUE 9.00e-09; EST_HUMAN HIT: BF915980.1, EVALUE 6.00e-20
ccagaccctgtggctggggcccccactctggtgtctgatgaggaggccagtgtgaaggagcgtccgtaggtaggcatgccaaggatcagcttgctggcaggggtccccttctgcagccactgttgcacagcagcatcctggt

SEQ ID NO: 26435 - DNA, 183 bp, Homo sapiens
  MAP TO CHR17.3; EXPRESSED IN BRAIN, SIGNAL = 1.2; EXPRESSED IN ADULT LIVER, SIGNAL = 1.7; EXPRESSED IN HEART, SIGNAL = 1.6; EXPRESSED IN PLACENTA, SIGNAL = 1.3; NT HIT: gi13653792, EVALUE 1.00e-63; SWISSPROT HIT: O43572, EVALUE 7.00e-20; EST_HUMAN HIT: BE886481.1, EVALUE 9.50e-01
ctctttccttggtcgttccctcaaattttcccttttgtccatgtgcaggcactttagtgagtttctgcgaagtcaccatttctgtaaataccagattgaagtgctgaccagtggaactgtttacctggctgacattctcttctgtgagtcagccctcttttatttctctgaggtaaagtctgc

SEQ ID NO: 26436 - DNA, 139 bp, Homo sapiens
  MAP TO CHR11.3; EXPRESSED IN PLACENTA, SIGNAL = 1.5; EXPRESSED IN HEART, SIGNAL = 1.6; EXPRESSED IN ADULT LIVER, SIGNAL = 1.7; EXPRESSED IN FETAL LIVER, SIGNAL =   1; EXPRESSED IN BRAIN, SIGNAL = 1.3; NT HIT: M29474.1, EVALUE 1.00e-72; SWISSPROT HIT: P15918, EVALUE 3.00e-21
tcagttctgccccagatgaaattcagcacccacatattaaattttcagaatggaaatttaagctgttccgggtgagatcctttgaaaagacacctgaagaagctcaaaaggaaaagaaggattcctttgaggggaaacc

SEQ ID NO: 26437 - DNA, 236 bp, Homo sapiens
  MAP TO CHR2.3; EXPRESSED IN BRAIN, SIGNAL = 7.3; EXPRESSED IN LUNG, SIGNAL =   7; EXPRESSED IN PLACENTA, SIGNAL = 5.2; EXPRESSED IN FETAL LIVER, SIGNAL = 7.7; NT HIT: AB017268.1, EVALUE 1.00e-130; SWISSPROT HIT: O60037, EVALUE 9.70e-01; EST_HUMAN HIT: AI859714.1, EVALUE 1.00e-130
ctcacttccagaagagcacattccagaaaagtagtcagcaagggcagaggcccagggacagcagtgggaagagcagggcgccttaggtgtggtgctccagcgcaccctgggccagtgctgccaggaagagctgccagcccttggccagtgacagtggtgcctcctgcagctcccgccacaggaatgggctgccaaggagcgtggctgccgggcttgtcaacaccagcagggcagca

SEQ ID NO: 26438 - DNA, 149 bp, Homo sapiens
  MAP TO CHRX.3; EXPRESSED IN HEART, SIGNAL = 9.5; EXPRESSED IN PLACENTA, SIGNAL = 7.5; EXPRESSED IN FETAL LIVER, SIGNAL = 8.1; EXPRESSED IN ADULT LIVER, SIGNAL = 7.9; EXPRESSED IN LUNG, SIGNAL =  12; SWISSPROT HIT: O60858, EVALUE 2.30e-01; EST_HUMAN HIT: BE676218.1, EVALUE 2.00e-78; NT HIT: AF267739.1, EVALUE 1.00e-78
gacatcagcaccctagaccagaagctgcgtctggtcacttccgacttccaccagctaatcttggcttttctccaagtctacgacgacgagctgggcgagtgctgccagcgcccaggccctgacctccacccgtgcggccccatcatcca

SEQ ID NO: 26439 - DNA, 214 bp, Homo sapiens
  MAP TO CHR11.3; EXPRESSED IN ADULT LIVER, SIGNAL = 0.41; EXPRESSED IN PLACENTA, SIGNAL = 0.5; NT HIT: gi14763664, EVALUE 1.00e-106; SWISSPROT HIT: P29775, EVALUE 7.00e-14; EST_HUMAN HIT: AI991109.1, EVALUE 1.00e-106
tgcttttcatcagacccgagagggactcacttatgggaattcatccgcgacatcctcttgaacccagacaagaacccaggattaataaaatgggaagaccgatctgagggcgtcttcaggttcttgaaatcagaggcagtggctcagctatggggtaaaaagaagaacaacagcagcatgacctatgaaaagctcagccgagctatgaggtgag

SEQ ID NO: 26440 - DNA, 156 bp, Homo sapiens
  MAP TO CHR16.3; EXPRESSED IN LUNG, SIGNAL = 0.52; EXPRESSED IN HEART, SIGNAL = 0.57; EXPRESSED IN PLACENTA, SIGNAL = 1.5; EXPRESSED IN FETAL LIVER, SIGNAL = 0.51; EXPRESSED IN BRAIN, SIGNAL = 1.1; NT HIT: AF163836.1, EVALUE 9.00e-80; SWISSPROT HIT: O94916, EVALUE 2.00e-22; EST_HUMAN HIT: BG285039.1, EVALUE 1.00e-79
agcaatgaaaactactggatgtaatttagataaggtaaatattatccctaatgccctgatgactccactcataccaagcagtatgattaagagtgaagatgttactccaatggaagtaacagcagaaaaaagatcttccactatttttaaggtaag

SEQ ID NO: 26441 - DNA, 158 bp, Homo sapiens
  MAP TO CHR16.3; EXPRESSED IN PLACENTA, SIGNAL = 1.3; EXPRESSED IN LUNG, SIGNAL = 1.7; EXPRESSED IN FETAL LIVER, SIGNAL = 1.5; EXPRESSED IN BRAIN, SIGNAL = 1.3; SWISSPROT HIT: O84481, EVALUE 4.40e+00; EST_HUMAN HIT: AL046800.1, EVALUE 3.00e-28; NT HIT: gi14774683, EVALUE 1.00e-75
aagttcctcaccgtccatcagactgacaaagaacaacagcccctcgtgagaccccatcttcagcaaacttccagaactgctcttcttccagttaaacatgtccagggctttctcatcaccgctcacagctgcctttgccaactgaaccaggtccctga

SEQ ID NO: 26442 - DNA, 156 bp, Homo sapiens
  MAP TO CHR1.3; EXPRESSED IN LUNG, SIGNAL =   1; EXPRESSED IN PLACENTA, SIGNAL = 1.4; EXPRESSED IN ADULT LIVER, SIGNAL = 0.64; EXPRESSED IN BRAIN, SIGNAL = 0.95; NT HIT: AF161391.1, EVALUE 5.00e-63; SWISSPROT HIT: P01232, EVALUE 2.00e+00; EST_HUMAN HIT: BF880304.1, EVALUE 3.00e-77
aaagtctcctgggagtaagggcctggtgcaccttgactccactctgcaggagtggcctggcgagcggcattagcctccatgacgttggagagctcgttgatgatcagctttaggatcttgaccagcaaaggaatgtttgtccagcgttctgggtct

SEQ ID NO: 26443 - DNA, 203 bp, Homo sapiens
  MAP TO CHR20.3; EXPRESSED IN LUNG, SIGNAL = 0.68; EXPRESSED IN PLACENTA, SIGNAL = 0.62; EXPRESSED IN ADULT LIVER, SIGNAL = 0.48; NT HIT: gi14772589, EVALUE 1.00e-101; SWISSPROT HIT: Q62936, EVALUE 3.00e-06; EST_HUMAN HIT: BG683190.1, EVALUE 1.00e-101
cagtgcttaccctccagcaccacctccttgcctgtcttcttgaggacctgcaccgcctcatcatgggtagcagaggacaagtcttccccattcacagacaggatggcatcccccacaaaaagggcctctgtctggtcagctgccaatcccttgaagatcttggaaatgagaataggcatcttgttctcccggccgcctgcaca

SEQ ID NO: 26444 - DNA, 219 bp, Homo sapiens
  MAP TO CHR3.3; EXPRESSED IN LUNG, SIGNAL = 0.9; EXPRESSED IN PLACENTA, SIGNAL = 0.66; EXPRESSED IN FETAL LIVER, SIGNAL = 0.64; EXPRESSED IN BRAIN, SIGNAL = 1.1; NT HIT: gi4507070, EVALUE 1.00e-101; SWISSPROT HIT: P32849, EVALUE 5.00e-03; EST_HUMAN HIT: BF223621.1, EVALUE 1.00e-101
tccataccttccaatagtggctctgccttcatttttcacagactgataaatctttctctcttcatctgaaagtgtaatgtgctgaataaatactttacgttctggtaactccaaaacaggttttcctttaattttgcttgtctttgttcttctaagtgtaatatttttaattagggactgtaaacgcctaatcagaataaaacaaataattatgtaact

SEQ ID NO: 26445 - DNA, 148 bp, Homo sapiens
  MAP TO CHR22.3; EXPRESSED IN PLACENTA, SIGNAL = 0.61; EXPRESSED IN BRAIN, SIGNAL = 0.62; NT HIT: gi11418049, EVALUE 5.00e-75; SWISSPROT HIT: Q9Y698, EVALUE 5.00e-20; EST_HUMAN HIT: BE670632.1, EVALUE 4.00e-24
ttacctgcagacacgaagaagatgccggcactcaggatgatgttgtgtcgagttttgtagaactcgctggctgcgatgcagaggccacccatgaaaagcagaatcacactcaggattgggaaaatgctggaggccctcacggcccctg

SEQ ID NO: 26446 - DNA, 410 bp, Homo sapiens
  MAP TO CHR19.3; EXPRESSED IN ADULT LIVER, SIGNAL = 1.2; EXPRESSED IN BRAIN, SIGNAL = 1.1; EXPRESSED IN LUNG, SIGNAL = 1.1; EXPRESSED IN PLACENTA, SIGNAL = 1.2; EXPRESSED IN HEART, SIGNAL = 1.2; NT HIT: gi16175145, EVALUE 0.00e+00; SWISSPROT HIT: P35789, EVALUE 9.00e-37; EST_HUMAN HIT: AW969266.1, EVALUE 0.00e+00
gaaggctttcccacattccgtacatttgtgtggttttattccagtgtgaatttgaatgtgaacattaaaggatgaggaatttctaaaggatcttccacattctttacattcaaaggacttctctcctttatgagtttttgcatgtgcagaaagttgagaaaaattagtgaaggatttcccacagttcttagtcttttcggatttctttccagtatgaactgctacacactgctttaagtgtgaggaagttgtgatggctctctcacattcctgaaattcacagagtttctctccaatgtggattcccatgtgattatcaaggcttgcaaaatacttaaagccttttccacattccttacatttgtagggttgtcttccattgagaatttcaagatgcacagcaaggcctg

SEQ ID NO: 26447 - DNA, 133 bp, Homo sapiens
  MAP TO CHRX.3; EXPRESSED IN ADULT LIVER, SIGNAL = 1.3; EXPRESSED IN PLACENTA, SIGNAL =   1; NT HIT: gi13651268, EVALUE 2.00e-68; SWISSPROT HIT: P51810, EVALUE 5.00e-20; EST_HUMAN HIT: BE276266.1, EVALUE 2.00e-68
ccctcagcagccgaggtggtcagtgattcccactggatctccttcctgggagactgaaaacccaggctgcatcctgtccagccgtagaaggccaaagacaagagaaatccctgggctggattcaggattccct

SEQ ID NO: 26448 - DNA, 104 bp, Homo sapiens
  MAP TO CHR12.3; EXPRESSED IN PLACENTA, SIGNAL = 1.1; EXPRESSED IN BRAIN, SIGNAL = 1.1; EXPRESSED IN FETAL LIVER, SIGNAL = 1.1; NT HIT: gi8922090, EVALUE 9.00e-45; EST_HUMAN HIT: BG715555.1, EVALUE 1.00e-44
ccttattgaaccattcagggcttttctttttagccaatgataatgttgtaataaatccagctagcgttcctgctgcagcaacagtaccaaggaaaattccacct

SEQ ID NO: 26449 - DNA, 109 bp, Homo sapiens
  MAP TO CHRX.3; EXPRESSED IN PLACENTA, SIGNAL = 3.4; EXPRESSED IN FETAL LIVER, SIGNAL = 5.8; EXPRESSED IN BRAIN, SIGNAL = 3.6; NT HIT: gi16161715, EVALUE 1.00e-47
gggtgggaaaggggttcccagttttcgggccatggccagtttccccagtagcactcagacagcagcaggaacagggtgggggctcctcttgaaacattggtggctacag

SEQ ID NO: 26450 - DNA, 161 bp, Homo sapiens
  MAP TO CHR19.3; EXPRESSED IN LUNG, SIGNAL = 4.6; EXPRESSED IN PLACENTA, SIGNAL = 1.6; EXPRESSED IN FETAL LIVER, SIGNAL = 9.3; EXPRESSED IN ADULT LIVER, SIGNAL =  19; SWISSPROT HIT: Q13011, EVALUE 1.00e-18; NT HIT: gi13630249, EVALUE 4.00e-82; EST_HUMAN HIT: AI744909.1, EVALUE 1.00e-82
ccttaccacgtagttgaggctctcggccaccgaatggtcgcgggaatacagcaggttgaccttggtgctctgcaccgccacggggctcttgctggaaatctcggccgccagcgctaaggcagcatccagcatgacctctttgtctgggaacacccggctgc

SEQ ID NO: 26451 - DNA, 126 bp, Homo sapiens
  MAP TO CHR9.3; EXPRESSED IN LUNG, SIGNAL = 1.4; EXPRESSED IN PLACENTA, SIGNAL = 1.4; EXPRESSED IN FETAL LIVER, SIGNAL = 1.6; EXPRESSED IN ADULT LIVER, SIGNAL = 1.5; EXPRESSED IN BRAIN, SIGNAL = 1.7; NT HIT: gi14735005, EVALUE 6.00e-65; EST_HUMAN HIT: BG036762.1, EVALUE 9.00e-65; SWISSPROT HIT: Q62276, EVALUE 1.00e-16
gccatggcccagcagagagccctgccccagagcaaggagacgctgctgcagtcctacaacaagcggctgaaggacgacattaagtccatcatggacaacttcaccgagatcatcaagaccgccaag

SEQ ID NO: 26452 - DNA, 101 bp, Homo sapiens
  MAP TO CHR3.3; EXPRESSED IN PLACENTA, SIGNAL = 2.3; EXPRESSED IN LUNG, SIGNAL = 0.99; EXPRESSED IN BRAIN, SIGNAL =   1; NT HIT: U16953.1, EVALUE 4.00e-50; EST_HUMAN HIT: AI792300.1, EVALUE 6.00e-50
attttgtggtagagctctggcagctggacctccactttctctctctggaaaagatggtactcagcttgttcacagaccggtgggatcatattgaactgtct

SEQ ID NO: 26453 - DNA, 271 bp, Homo sapiens
  MAP TO CHR1.3; EXPRESSED IN PLACENTA, SIGNAL = 1.1; EXPRESSED IN FETAL LIVER, SIGNAL = 1.7; EXPRESSED IN ADULT LIVER, SIGNAL = 0.94; EXPRESSED IN LUNG, SIGNAL = 4.2; NT HIT: gi8923027, EVALUE 1.00e-119; EST_HUMAN HIT: BG482966.1, EVALUE 0.00e+00; SWISSPROT HIT: P02675, EVALUE 3.00e-03
ggttctctctacagatggcctgtattttctccgcaccaagaatggtgttgtctaccagaccttctgtgacatgacttctgggggtggcggctggaccctggtggccagcgtgcacgagaatgacatgcgtgggaagtgcacggtgggtgatcgctggtccagtcagcagggcaacaaagcagactacccagagggggatggcaactgggccaactacaacacctttggatctgcagaggcggccacgagcgatgactacaaggttggtgcc

SEQ ID NO: 26454 - DNA, 311 bp, Homo sapiens
  MAP TO CHR1.3; EXPRESSED IN LUNG, SIGNAL =  41; EXPRESSED IN PLACENTA, SIGNAL =   4; EXPRESSED IN FETAL LIVER, SIGNAL = 6.4; NT HIT: AF307860.1, EVALUE 0.00e+00; EST_HUMAN HIT: BF858118.1, EVALUE 0.00e+00; SWISSPROT HIT: O00622, EVALUE 4.00e-53
tcttacagaagggcaagaaatgcagcaagaccaagaaatcccccgaaccagtcaggtttacttacgctggatgtttgagtgtgaagaaataccggcccaagtactgcggttcctgcgtggacggccgatgctgcacgccccagctgaccaggactgtgaagatgcggttccgctgcgaagatggggagacattttccaagaacgtcatgatgatccagtcctgcaaatgcaactacaactgcccgcatgccaatgaagcagcgtttcccttctacaggctgttcaatgacattcacaaatttagggactaa

SEQ ID NO: 26455 - DNA, 195 bp, Homo sapiens
  MAP TO CHR1.3; EXPRESSED IN LUNG, SIGNAL = 3.8; EXPRESSED IN HEART, SIGNAL = 1.7; EXPRESSED IN PLACENTA, SIGNAL = 1.6; EXPRESSED IN BRAIN, SIGNAL = 1.2; EXPRESSED IN ADULT LIVER, SIGNAL = 1.6; EST_HUMAN HIT: AU132331.1, EVALUE 1.00e-95; SWISSPROT HIT: P08289, EVALUE 5.00e-29; NT HIT: M24432.1, EVALUE 1.00e-103
ctcaccagcgtccttggcccagcgcaggatggaggtgacctcgttcccctgggtggtgttgcaccgggaacgctcagtggctgcgcttacccccacggtgccctcattggccttcaccccacacaggtaggcggtggcggtgccggcgctgtcagggacctgggcattggtgttgtacgtctgcaggtgggagag

SEQ ID NO: 26456 - DNA, 136 bp, Homo sapiens
  MAP TO CHR19.3; EXPRESSED IN FETAL LIVER, SIGNAL = 2.1; EXPRESSED IN ADULT LIVER, SIGNAL = 2.4; EXPRESSED IN BRAIN, SIGNAL = 1.8; EXPRESSED IN PLACENTA, SIGNAL = 1.5; EST_HUMAN HIT: BI914736.1, EVALUE 1.00e-67; SWISSPROT HIT: P36008, EVALUE 2.60e+00; NT HIT: gi13650691, EVALUE 7.00e-71
cagagacctccaggtggctccggtcggaggtggagaactggctcctagccaagtcaggctgtgaggtgaccttcaacggaactcgggccctggcgcatctgcaggccctgacccccagcatgggattgtacccacc

SEQ ID NO: 26457 - DNA, 108 bp, Homo sapiens
  MAP TO CHR19.3; EXPRESSED IN BRAIN, SIGNAL = 0.56; EXPRESSED IN ADULT LIVER, SIGNAL = 0.49; EXPRESSED IN PLACENTA, SIGNAL = 0.86; NT HIT: gi14764025, EVALUE 3.00e-54; EST_HUMAN HIT: BE272179.1, EVALUE 4.00e-54; SWISSPROT HIT: O60664, EVALUE 3.00e-13
gcggtggacgcgacccgcggtgctgtgcagagcggcgtggacaagacaaagtccgtagtgaccggcggcgtccaatcggtcatgggctcccgcttgggccagatggtg

SEQ ID NO: 26458 - DNA, 122 bp, Homo sapiens
  MAP TO CHR6.3; EXPRESSED IN LUNG, SIGNAL = 2.8; EXPRESSED IN PLACENTA, SIGNAL = 1.6; EXPRESSED IN HEART, SIGNAL = 1.7; EXPRESSED IN FETAL LIVER, SIGNAL = 1.6; EXPRESSED IN BRAIN, SIGNAL = 1.1; EST_HUMAN HIT: AI923541.1, EVALUE 2.00e-62; SWISSPROT HIT: P28065, EVALUE 3.00e-16; NT HIT: X66401.1, EVALUE 1.00e-62
ctctggccatgagccgggatggctcaagcgggggtgtcatctacctggtcactattacagctgccggtgtggaccatcgagtcatcttgggcaatgaactgccaaaattctatgatgagtga

SEQ ID NO: 26459 - DNA, 174 bp, Homo sapiens
  MAP TO CHR1.3; EXPRESSED IN PLACENTA, SIGNAL = 0.84; EXPRESSED IN FETAL LIVER, SIGNAL = 0.32; NT HIT: gi5032156, EVALUE 7.00e-90; EST_HUMAN HIT: BG777690.1, EVALUE 2.00e-78
agttacctcttttattttgaaatatgcctggcccttgattttggcagcaatggtaagaactttgttatcaaaaacaaactgaacaaaagcttttaaattagcccagaatatcagctgagtgttgcttaaagaagatataattttccacgccatgtcaaaagactctatgcagag

SEQ ID NO: 26460 - DNA, 191 bp, Homo sapiens
  MAP TO CHR1.3; EXPRESSED IN FETAL LIVER, SIGNAL = 1.1; EXPRESSED IN ADULT LIVER, SIGNAL = 0.71; EXPRESSED IN PLACENTA, SIGNAL = 0.7; SWISSPROT HIT: P06239, EVALUE 9.00e-30; NT HIT: X14053.1, EVALUE 1.00e-103; EST_HUMAN HIT: AL558447.1, EVALUE 5.00e-98
gcacccaccattctccatgtattcagtgatgatgtagatgggctcctgggtgaccacagcgtagagccgaaccagccgctggtgttgcagctgcttcatgaggttggcctcggccaggaaggcgtccggggacatgctgccctgcttcaggctcttcaccgccaccttcgtgtgcccgttgtagtaccctg

SEQ ID NO: 26461 - DNA, 109 bp, Homo sapiens
  MAP TO CHR2.3; EXPRESSED IN LUNG, SIGNAL =   1; EXPRESSED IN PLACENTA, SIGNAL = 0.56; EXPRESSED IN ADULT LIVER, SIGNAL = 0.91; EXPRESSED IN BRAIN, SIGNAL = 0.88; NT HIT: gi9506580, EVALUE 7.00e-55; EST_HUMAN HIT: AA330059.1, EVALUE 3.00e-39
agaagaagaacttatgaaactggctaaacaatttgataaaaatatggaagagctagatgtgattcaagagcaaaacaagaggaattatgattttacccagatgatttca

SEQ ID NO: 26462 - DNA, 114 bp, Homo sapiens
  MAP TO CHR16.3; EXPRESSED IN FETAL LIVER, SIGNAL = 1.2; EXPRESSED IN BRAIN, SIGNAL = 1.2; EXPRESSED IN LUNG, SIGNAL = 1.6; EXPRESSED IN PLACENTA, SIGNAL =   1; NT HIT: gi14776741, EVALUE 5.00e-56; EST_HUMAN HIT: BF951696.1, EVALUE 1.00e-57
tcacctctcacaacgaagcttcttcttccatccgggcttgggtcccggcttcttccgaattcttggttcttcagacttcttggcttctttgctttcactcttcttaccagagac

SEQ ID NO: 26463 - DNA, 188 bp, Homo sapiens
  MAP TO CHR6.3; EXPRESSED IN LUNG, SIGNAL =   1; EXPRESSED IN PLACENTA, SIGNAL = 0.86; EXPRESSED IN FETAL LIVER, SIGNAL = 1.2; EXPRESSED IN BRAIN, SIGNAL = 0.78; NT HIT: gi7661965, EVALUE 3.00e-95; SWISSPROT HIT: Q10337, EVALUE 1.90e-02; EST_HUMAN HIT: BG109368.1, EVALUE 5.00e-95
tggcctctcacctgatgcagccagtccagggacagaatggggattccccgccccagggcacacaggaacttgactgtccggcggatgcgatcagtgaccaggtgggaagcctctgccgctgaaccagccagacttccccccagtgccagcacagcccgctctccccgagcatccaccactcctgtgaa

SEQ ID NO: 26464 - DNA, 412 bp, Homo sapiens
  MAP TO CHR1.3; EXPRESSED IN LUNG, SIGNAL = 1.2; EXPRESSED IN PLACENTA, SIGNAL = 0.98; EXPRESSED IN BRAIN, SIGNAL = 0.62; NT HIT: X14732.1, EVALUE 0.00e+00; SWISSPROT HIT: P16106, EVALUE 1.00e-70; EST_HUMAN HIT: BG389013.1, EVALUE 1.00e-117
cctaggcccgctccccgcggatacggcgtgccagctggatgtccttaggcatgatggtgacccgtttggcatggatgacacacaggttggtgtcctcaaacagccccaccaggtaagactcgcacgcctcctgcagcgccatcacggccgagctctggaagcgcaggtcggtcttaaagtcctgagcgatctcgcgcatcagccgctggaagggcaacttgcggattagcagctcagtggacttctggtagcggcggatctcgcgaagcgccaccgtgccgggccggtagcggtgcggcttcttcacgccgccagtggcaggtgcgctcttgcgagccaccttggtggccagctgcttgcgcggcgccttgccacccgttgacttgcgcgcagtctgcttggttcgggccat

SEQ ID NO: 26465 - DNA, 103 bp, Homo sapiens
  MAP TO CHR2.3; EXPRESSED IN LUNG, SIGNAL = 0.3; EXPRESSED IN PLACENTA, SIGNAL = 0.52; EXPRESSED IN FETAL LIVER, SIGNAL = 0.34; NT HIT: gi15298088, EVALUE 2.00e-51; SWISSPROT HIT: P52757, EVALUE 1.00e-12; EST_HUMAN HIT: AL536381.1, EVALUE 4.00e-51
gccttggtttcaatatagagagtaatcaagccatcagtcaccagatcgtggatggactcaaagcgtttctccccaacaaagtgcttgccatcgtagtagagcc

SEQ ID NO: 26466 - DNA, 135 bp, Homo sapiens
  MAP TO CHR11.3; EXPRESSED IN PLACENTA, SIGNAL = 2.9; EXPRESSED IN BRAIN, SIGNAL = 1.3; EXPRESSED IN ADULT LIVER, SIGNAL = 0.44; SWISSPROT HIT: P43691, EVALUE 4.00e-01; EST_HUMAN HIT: AL582357.1, EVALUE 4.00e-61; NT HIT: AB012922.1, EVALUE 3.00e-70
cagtggcccaggcacccctgaaaccaaaaacacctcggggtaccaagacaccgatcaacagaaaccagctgtcccagaaccggggactggggggcattatggtgaaacgggcctatgagactgtgagttgacaga

SEQ ID NO: 26467 - DNA, 278 bp, Homo sapiens
  MAP TO CHR2.3; EXPRESSED IN LUNG, SIGNAL = 0.73; EXPRESSED IN PLACENTA, SIGNAL = 0.69; EXPRESSED IN FETAL LIVER, SIGNAL = 0.43; EXPRESSED IN BRAIN, SIGNAL = 0.7; SWISSPROT HIT: P07316, EVALUE 3.00e-50; NT HIT: gi14729969, EVALUE 0.00e+00; EST_HUMAN HIT: BF726411.1, EVALUE 0.00e+00
agcactctggcgcttacagaatgaagatctacgacagagatgaattgaggggacaaatgtcagagctcacagacgactgtatctctgttcaggaccgcttccacctcactgaaattcactccctcaatgtgctggagggcagctggatcctctatgagatgcccaactacagggggaggcagtatctgctgaggccgggggagtacaggaggtttcttgattggggggctccaaatgccaaagttggctctcttagacgagtcatggatttgtactga

SEQ ID NO: 26468 - DNA, 256 bp, Homo sapiens
  MAP TO CHR1.3; EXPRESSED IN HEART, SIGNAL = 0.75; EXPRESSED IN PLACENTA, SIGNAL = 1.9; SWISSPROT HIT: P40855, EVALUE 1.50e-02; NT HIT: Y09048.1, EVALUE 0.00e+00; EST_HUMAN HIT: BI559412.1, EVALUE 3.00e-57
aagagcactcaccaatgtgaggccaaggtaccctcccacattcccctctggcccataggggcctgcccaacctctgctcagggctgcatgcccatcccctccccatcccttaagggggtggaatttatactttggcagtgtctcctggcgatctcttctggggccccgaagcatcaggggccgtggtggtagaagggggtgctggggagggtttggctttatcgaaatcatcaagagcaccttcagagacaagaga

SEQ ID NO: 26469 - DNA, 119 bp, Homo sapiens
  MAP TO CHR19.3; EXPRESSED IN PLACENTA, SIGNAL = 1.9; EXPRESSED IN LUNG, SIGNAL = 1.1; SWISSPROT HIT: P12660, EVALUE 2.00e-12; NT HIT: S40022.1, EVALUE 1.00e-10; EST_HUMAN HIT: BG720747.1, EVALUE 1.00e-54
acatcacctaccttggaccccacgggctggaagccgggcaggctgctgactgtcacacgttggtcatccatgcggcggccctgggtactggccagcatgtccatgaggctgtccatctc

SEQ ID NO: 26470 - DNA, 177 bp, Homo sapiens
  MAP TO CHR4.3; EXPRESSED IN LUNG, SIGNAL = 0.4; EXPRESSED IN PLACENTA, SIGNAL = 1.1; EXPRESSED IN HEART, SIGNAL = 1.4; EXPRESSED IN FETAL LIVER, SIGNAL = 1.1; SWISSPROT HIT: P13730, EVALUE 5.80e-02; NT HIT: gi14725014, EVALUE 3.00e-95; EST_HUMAN HIT: AA297032.1, EVALUE 3.00e-31
agaccaggaagacagtgactccagcgaggaggacagctcgcacacactctcccactcaaaaagtgaatccagagaggagcaagcagacagtgaatccagtgaaagcctcaacttctcagaggaaagcccggagtcccctgaggatgagaacagctccagccaggagggcctccagtc

SEQ ID NO: 26471 - DNA, 109 bp, Homo sapiens
  MAP TO CHR3.3; EXPRESSED IN FETAL LIVER, SIGNAL = 1.9; EXPRESSED IN ADULT LIVER, SIGNAL = 4.1; EXPRESSED IN PLACENTA, SIGNAL = 2.8; EXPRESSED IN LUNG, SIGNAL = 2.7; NT HIT: X06980.1, EVALUE 7.00e-55; EST_HUMAN HIT: BG623772.1, EVALUE 6.00e-53
aaaatatggaacgcttcacgaatttgcgtgtcatccttgcgcaggggccatgctaatcttctctgtatcgttccaattttagtatatgtgctgccgaagcgagcacaaa

SEQ ID NO: 26472 - DNA, 334 bp, Homo sapiens
  MAP TO CHR1.3; EXPRESSED IN LUNG, SIGNAL = 0.64; EXPRESSED IN HEART, SIGNAL = 1.1; EXPRESSED IN PLACENTA, SIGNAL = 0.81; SWISSPROT HIT: Q28062, EVALUE 2.00e-52; NT HIT: gi15299146, EVALUE 0.00e+00; EST_HUMAN HIT: BF531009.1, EVALUE 0.00e+00
ctgcctgataacccagccttctcttctccacccaggagaactgttcctgggtgaccctccagagaagctgacattggaggaagcacgggcgtactgccaggagcggggtgcagagattgccaccacgggccaactgtatgcagcctgggatggtggcctggaccactgcagcccagggtggctagctgatggcagtgtgcgctaccccatcgtcacacccagccagcgctgtggtgggggcttgcctggtgtcaagactctcttcctcttccccaaccagactggcttccccaataagcacagccgcttcaacgtctactgcttccgaggtgag

SEQ ID NO: 26473 - DNA, 161 bp, Homo sapiens
  MAP TO CHR3.3; EXPRESSED IN PLACENTA, SIGNAL = 0.57; EXPRESSED IN BRAIN, SIGNAL = 0.4; NT HIT: gi16160809, EVALUE 6.00e-75; EST_HUMAN HIT: BE741378.1, EVALUE 5.00e-76; SWISSPROT HIT: P53671, EVALUE 1.50e+00
cttacctctctaaggaccagaacacagttcccaggtcctacacattgaggcagctcagcaattcttcctttgttaagatatggccctgagaagcaacggtggttgaagtatatctttggacagcaatattttccattaatcataactgggaaatgaagaaa

SEQ ID NO: 26474 - DNA, 115 bp, Homo sapiens
  MAP TO CHR6.3; EXPRESSED IN LUNG, SIGNAL = 0.58; EXPRESSED IN PLACENTA, SIGNAL =   1; EXPRESSED IN HEART, SIGNAL = 0.84; NT HIT: AJ302622.1, EVALUE 2.00e-58; SWISSPROT HIT: Q9GZK7, EVALUE 1.00e-16
tcacagtaaaactggtcaatgtggttggggccacagaacctcagctgggccaccagggccacaaccagtccatctaccacaaatccagagagccaggttgtgaccaccagcccca

SEQ ID NO: 26475 - DNA, 162 bp, Homo sapiens
  MAP TO CHR17.3; EXPRESSED IN HEART, SIGNAL = 2.2; EXPRESSED IN PLACENTA, SIGNAL = 2.2; NT HIT: gi8923130, EVALUE 5.00e-66; EST_HUMAN HIT: AI457755.1, EVALUE 7.00e-66; SWISSPROT HIT: P17412, EVALUE 2.00e+00
tttgtctttcttatctttaagcccctttaccctggtcctgtactgatcagtgaaggaaaccgtggttactgaggccctgttgaaaagtgcacgtcttgtccaataaatcacgctgcagttggtgtccatccctgagttgctggggtaagggtcctctccaaa

SEQ ID NO: 26476 - DNA, 364 bp, Homo sapiens
  MAP TO CHR1.3; EXPRESSED IN LUNG, SIGNAL = 0.91; EXPRESSED IN PLACENTA, SIGNAL = 1.1; SWISSPROT HIT: P08112, EVALUE 3.00e-39; EST_HUMAN HIT: AW104399.1, EVALUE 0.00e+00; NT HIT: M87843.1, EVALUE 0.00e+00
tttttaaaaaatgcactactgtgtgctgagcgcttttctgatcctgcatctggtcacggtcgcgctcagcctgtctacctgcagcacactcgatatggaccagttcatgcgcaagaggatcgaggcgatccgcgggcagatcctgagcaagctgaagctcaccagtcccccagaagactatcctgagcccgaggaagtccccccggaggtgatttccatctacaacagcaccagggacttgctccaggagaaggcgagccggagggcggccgcctgcgagcgcgagaggagcgacgaagagtactacgccaaggaggtttacaaaatagacatgccgcccttcttcccctccgaaagtaagtac

SEQ ID NO: 26477 - DNA, 127 bp, Homo sapiens
  MAP TO CHR11.3; EXPRESSED IN PLACENTA, SIGNAL = 2.7; EXPRESSED IN FETAL LIVER, SIGNAL = 2.1; EST_HUMAN HIT: BI836853.1, EVALUE 2.00e-65; NT HIT: U52427.1, EVALUE 2.00e-65; SWISSPROT HIT: P52433, EVALUE 3.00e-16
tttctccgcagatctccctagagcacgaaatcctgctgcacccgcgctacttcggccccaacttgctcaacacggtgaagcagaagctcttcaccgaggtggaggggacctgcacagggaagtgagt

SEQ ID NO: 26478 - DNA, 164 bp, Homo sapiens
  MAP TO CHR6.3; EXPRESSED IN HEART, SIGNAL = 1.4; EXPRESSED IN PLACENTA, SIGNAL = 1.7; EST_HUMAN HIT: AA130731.1, EVALUE 1.00e-18; NT HIT: gi11526405, EVALUE 2.00e-84; SWISSPROT HIT: O75715, EVALUE 2.00e-26
tcctgggaccctgtaaaggtccatgacatccgttggaactttgaaaagttcctggtggggcctgatggaatccctgtcatgcgctggtcccaccgggctacggtcagctcagtcaagacagacatcctggcgtacttgaagcaattcaaaaccaaataggaagg

SEQ ID NO: 26479 - DNA, 198 bp, Homo sapiens
  MAP TO CHR14.3; EXPRESSED IN PLACENTA, SIGNAL = 1.2; EST_HUMAN HIT: BG820251.1, EVALUE 1.00e-105; NT HIT: X15334.1, EVALUE 1.00e-107; SWISSPROT HIT: P12277, EVALUE 4.00e-34
ctcacctgtgcctcgcttctgaagtcgcagccgcttaagcacctccgagaacttctcatgcttgcccaggttgggcagcttgatatgcacacctgcccgcagcccggtgcccaggttggatgggcaggtgaggatgtagcccaggtgagggttccacatgaactcatagtccttagacttgaagagagtttcaatctg

SEQ ID NO: 26480 - DNA, 220 bp, Homo sapiens
  MAP TO CHR9.3; EXPRESSED IN PLACENTA, SIGNAL = 0.9; EXPRESSED IN FETAL LIVER, SIGNAL = 1.5; EXPRESSED IN ADULT LIVER, SIGNAL = 1.4; SWISSPROT HIT: Q9UKT8, EVALUE 2.00e-35; NT HIT: gi16161461, EVALUE 1.00e-107; EST_HUMAN HIT: BG288316.1, EVALUE 1.00e-107
ccgcccccgtgtgcccccgaaagtgctgggtcctggctccggaactccattcccagcaagccacagtgttgtcaaaggagcctgtcacaagcttctgttcatcaaacttcaccgctgcacaagtgtgggtctggatgccataaacgcactgccctgtgctcacatcccacagctttgcagacaagtcatctgacccttcaagagaaaaacagggaggtta

SEQ ID NO: 26481 - DNA, 173 bp, Homo sapiens
  MAP TO CHR10.3; EXPRESSED IN LUNG, SIGNAL = 0.72; EXPRESSED IN PLACENTA, SIGNAL = 0.72; SWISSPROT HIT: Q02218, EVALUE 2.00e-26; EST_HUMAN HIT: AL521693.1, EVALUE 3.00e-16; NT HIT: gi14735962, EVALUE 8.00e-93
cagattggattcaccacagacccccgaatggcccgctcctcaccatacccgaccgacgtggcccgggtggtcaatgcgcctatcttccatgtgaatgccgatgacccagaggctgtgatatatgtgtgcagtgtggcagccgaatggagaaacactttcaacaaagatgttgt

SEQ ID NO: 26482 - DNA, 184 bp, Homo sapiens
  MAP TO CHR6.3; EXPRESSED IN HEART, SIGNAL = 2.2; EXPRESSED IN PLACENTA, SIGNAL = 1.3; EXPRESSED IN FETAL LIVER, SIGNAL = 1.2; EXPRESSED IN LUNG, SIGNAL = 1.8; SWISSPROT HIT: O02812, EVALUE 1.00e-19; EST_HUMAN HIT: BF980616.1, EVALUE 2.00e-94; NT HIT: L35253.1, EVALUE 1.00e-94
agctgtcgacttgctggagaagatgcttgtattggactcagataagagaattacagcggcccaagcccttgcacatgcctactttgctcagtaccacgatcctgatgatgaaccagtggccgatccttatgatcagtcctttgaaagcagggacctccttatagatgagtggaaaagtaagtcc

SEQ ID NO: 26483 - DNA, 217 bp, Homo sapiens
  MAP TO CHR12.3; EXPRESSED IN PLACENTA, SIGNAL = 0.58; EXPRESSED IN HEART, SIGNAL = 1.3; NT HIT: gi13654556, EVALUE 4.00e-98; SWISSPROT HIT: P21695, EVALUE 4.00e-30; EST_HUMAN HIT: BI758943.1, EVALUE 6.00e-98
actttcctgtgctccccctcccaccaggggctcagccatcgccaagatcgtgggtggcaatgcagcccagctggcacagtttgacccacgggtgaccatgtgggtatttgaggaagacattggaggcaaaaagctgactgagatcatcaacacgcagcatgagaatgtcaaatacctgccagggcacaagttgcccccaaatgtggtgagccccaac

SEQ ID NO: 26484 - DNA, 459 bp, Homo sapiens
  MAP TO CHR10.3; EXPRESSED IN HEART, SIGNAL = 0.72; EXPRESSED IN PLACENTA, SIGNAL = 0.74; EXPRESSED IN ADULT LIVER, SIGNAL = 0.68; SWISSPROT HIT: P49191, EVALUE 2.00e-35; EST_HUMAN HIT: BG697590.1, EVALUE 0.00e+00; NT HIT: AF292387.1, EVALUE 0.00e+00
ctttgaccttgggcctgatgtaggtctggcagaagaagtgggcaaagaggatgaaataggtcatatacaagatgaaggaccagaataagtgttccatcgtggtgtggcatccctgatcctgcctccagatgtacgtgaggatgctgacgatggctcctacaaacatctgcaagatctgcaggctggtgatgagcatgggcagcatcttggggggcttcacgttggcagccttcagagtgtagtaggtgtacatgatggcatgaacaccaaagttcatggtgacgaaccagcctcctgcaggcactttgttcttgtatccaaagcttgtgtacacgagcactgtgctgtggtggtaccagtgaataaagatgagtggccgcttacgcaggatgatgaaggctgtgtctcctgggagatggagagtcatagttggcataccacccagtgctgggaccaccc

SEQ ID NO: 26485 - DNA, 209 bp, Homo sapiens
  MAP TO CHR1.3; EXPRESSED IN ADULT LIVER, SIGNAL = 1.7; EXPRESSED IN LUNG, SIGNAL = 8.5; EXPRESSED IN PLACENTA, SIGNAL = 1.2; EST_HUMAN HIT: BF931017.1, EVALUE 1.00e-112; NT HIT: AB007934.1, EVALUE 1.00e-112; SWISSPROT HIT: Q9UPN3, EVALUE 2.00e-05
agaactaacattgaacttagagagaaattcatcctaccagagggagcatcccagggaatgacccccttccgctcacggggtcgaaggtccaaaccatcttcccgggcagcttcccctactcgttccagctccagtgctagtcagagtaaccacagctgtacatccatgccatcttctccagccaccccagccagtggaaccaaggtatg

SEQ ID NO: 26486 - DNA, 173 bp, Homo sapiens
  MAP TO CHR11.3; EXPRESSED IN PLACENTA, SIGNAL = 0.69; SWISSPROT HIT: O60882, EVALUE 1.00e-28; EST_HUMAN HIT: BF977493.1, EVALUE 1.00e-03; NT HIT: gi13639687, EVALUE 2.00e-87
taccgtataatgcctggatccctttcacatcatctttggggaggtggaatccatagggattcttgtacttataagttgggtacatcagtgctgatgggtctgtggaatgggccaggcccagggcatggccaaattcatgagcagcaacggtaaacaaattaaaacctagacaa

SEQ ID NO: 26487 - DNA, 170 bp, Homo sapiens
  MAP TO CHR6.3; EXPRESSED IN PLACENTA, SIGNAL = 0.87; EXPRESSED IN BRAIN, SIGNAL = 1.2; NT HIT: U09564.1, EVALUE 1.00e-88; SWISSPROT HIT: Q9UPE1, EVALUE 2.00e-21; EST_HUMAN HIT: BI019988.1, EVALUE 2.00e-88
acctgcagatccggaaggcggaggagctccagatcgctgccattctgttgcttctgcagccagcctccgaatgtactgctcattcactgacaataagatgttctctggtttaatgtcagtgtggatgatacggcacttggtatgtaaataatcaagaccctgtaacacct

SEQ ID NO: 26488 - DNA, 197 bp, Homo sapiens
  MAP TO CHR19.1; EXPRESSED IN HEART, SIGNAL = 1.7; EXPRESSED IN ADULT LIVER, SIGNAL = 1.3; EXPRESSED IN LUNG, SIGNAL =   2; EST_HUMAN HIT: BG323925.1, EVALUE 1.00e-107; SWISSPROT HIT: Q9SLZ0, EVALUE 4.20e+00; NT HIT: gi14786885, EVALUE 1.00e-107
ggctcttcatcctcgtcgtcctcctgttcttcccggaaggtgaagctgcagtccaaggtggcggtgctgatccgcgagggtgtcagcagcaccaccccggccaaggatgccgcgtcagccggcctgggctccattggcgtcaaattcagccgtgaccgcgagagtcgctcccccttcctcaaacctgacgagcgggc

SEQ ID NO: 26489 - DNA, 229 bp, Homo sapiens
  MAP TO CHR19.1; EXPRESSED IN ADULT LIVER, SIGNAL = 1.4; EXPRESSED IN LUNG, SIGNAL = 0.85; EXPRESSED IN HEART, SIGNAL = 0.96; EST_HUMAN HIT: BE746922.1, EVALUE 3.00e-47; SWISSPROT HIT: P17024, EVALUE 4.00e-35; NT HIT: gi14760087, EVALUE 1.00e-126
catgaaagaactcacactggagagaaaccttatgaatgcaagcactgtggtaaagccttcaatcgttccagttcctttcactatcatgaaaggactcacactggagagaaaccctatgaatgtaagcagtgtagtaaagccttcatttcttccacttcctttcgatatcatgaaaggactcacactggagagaaaccgtatgagtgtaagcaatgtgggaaagccttca

SEQ ID NO: 26490 - DNA, 130 bp, Homo sapiens
  MAP TO CHR19.1; EXPRESSED IN LUNG, SIGNAL = 1.1; EXPRESSED IN HEART, SIGNAL =  13; EXPRESSED IN ADULT LIVER, SIGNAL =  11; SWISSPROT HIT: Q09254, EVALUE 1.00e-05; EST_HUMAN HIT: AI814909.1, EVALUE 6.00e-38; NT HIT: M18396.1, EVALUE 6.80e+00
ttgtacttgcactgctttggggcctcattgaagccctcacacagggacaggtcattctcagtggtcgaacagtccaggaactgcctgatcttgtaggtgcagagccccatctgtaggggctgggaggcag

SEQ ID NO: 26491 - DNA, 257 bp, Homo sapiens
  MAP TO CHR1.1; EXPRESSED IN ADULT LIVER, SIGNAL = 2.4; EXPRESSED IN LUNG, SIGNAL =  16; EST_HUMAN HIT: BG775466.1, EVALUE 1.00e-122; SWISSPROT HIT: P12947, EVALUE 2.00e-30; NT HIT: gi15812219, EVALUE 1.00e-105
cttattcctttggcccagacagctttgttgagcctgatatcaatgcgcgcatctggagttcccatctccttcatgccaaatttccgaagctctttgagtgcccgaggggcacacttcttgaagcccactccatggatgtgcttgtgaatgttgatggtgtattctcgggtcaccacctcgttgatggcagaacggcccttttattcttgccacccttctttgcgggagccattctgccgggtccaagttggaaagga

SEQ ID NO: 26492 - DNA, 312 bp, Homo sapiens
  MAP TO CHR9.1; EXPRESSED IN ADULT LIVER, SIGNAL =  10; EXPRESSED IN LUNG, SIGNAL = 2.3; EXPRESSED IN HEART, SIGNAL = 4.5; SWISSPROT HIT: P55072, EVALUE 4.00e-42; NT HIT: gi15298913, EVALUE 0.00e+00; EST_HUMAN HIT: AL564486.1, EVALUE 0.00e+00
tgcacctgccttggcaactggggacttgcgcaggttagccttgaggatggcaacacgggacttctcatcaggaagtgggatgtagatgagctgatcaagacggccaggtctgaggatggcaggatcaatgatgtcaggccggttggtagcgccaatgatgaacacatttttttttgtggacatgccatccatttctgtcaggatctggttgatgactcggtcagcagccccaccaccatctccaatgttacctccacgagccttggcaatcgaatccagctcatcaaagaatagcacacagggggcagcttg

SEQ ID NO: 26493 - DNA, 177 bp, Homo sapiens
  MAP TO CHR19.1; EXPRESSED IN ADULT LIVER, SIGNAL = 0.59; EXPRESSED IN LUNG, SIGNAL = 1.2; EST_HUMAN HIT: BF934121.1, EVALUE 5.00e-95; SWISSPROT HIT: O08550, EVALUE 1.30e-01; NT HIT: gi4506542, EVALUE 3.00e-95
aggctttttctggaactgttatagaaaaagaatttgtatcaccttccttaacaccacccccagccattgctcatcccgcactacccactattccagaacgaaaggaagttctgttggaagcatctgaagaaactggaaagagggtttcaaagtttaaagctgccagattgcaacaga

SEQ ID NO: 26494 - DNA, 180 bp, Homo sapiens
  MAP TO CHR7.1; EXPRESSED IN LUNG, SIGNAL = 0.58; EXPRESSED IN HEART, SIGNAL = 0.59; EXPRESSED IN ADULT LIVER, SIGNAL = 0.45; SWISSPROT HIT: P16056, EVALUE 1.00e-27; NT HIT: gi4557746, EVALUE 8.00e-90; EST_HUMAN HIT: AW418529.1, EVALUE 8.00e-97
ctgtaggctggatgaaaaattcacagtcaaggttgctgattttggtcttgccagagacatgtatgataaagaatactatagtgtacacaacaaaacaggtgcaaagctgccagtgaagtggatggctttggaaagtctgcaaactcaaaagtttaccaccaagtcagatgtggtaatgta

SEQ ID NO: 26495 - DNA, 131 bp, Homo sapiens
  MAP TO CHR14.1; EXPRESSED IN ADULT LIVER, SIGNAL = 2.7; EXPRESSED IN LUNG, SIGNAL = 1.1; EXPRESSED IN HEART, SIGNAL = 1.7; EST_HUMAN HIT: BE551364.1, EVALUE 9.00e-68; NT HIT: AF119863.1, EVALUE 5.00e-44; SWISSPROT HIT: Q50634, EVALUE 9.00e-01
tctctactcaaggggaggccccgggtccagagtctctgggtccagcctgtcccgtgggaataggtgcagggtgtccccgtggctgtggaggctgagagagacacagttgcagatgaaggccacctgctccc

SEQ ID NO: 26496 - DNA, 189 bp, Homo sapiens
  MAP TO CHR11.1; EXPRESSED IN HEART, SIGNAL = 1.5; EXPRESSED IN ADULT LIVER, SIGNAL = 0.92; EXPRESSED IN LUNG, SIGNAL = 2.5; EST_HUMAN HIT: AV743519.1, EVALUE 1.00e-100; SWISSPROT HIT: P12895, EVALUE 9.00e-07; NT HIT: X07913.1, EVALUE 3.00e-95
ggtatcgcttctcggccttttggctaagatcaagtgtagtatctgttcttatcagtttaatatctgatacgtcctctatccgaggacaatatattaaatggatttttggaaataggagatggaataggagcttgctccgtccactccacgcatcgacctggtattgcagtacttccaggaacggtgcac

SEQ ID NO: 26497 - DNA, 219 bp, Homo sapiens
  MAP TO CHR11.1; EXPRESSED IN HEART, SIGNAL =   1; EXPRESSED IN ADULT LIVER, SIGNAL = 1.9; SWISSPROT HIT: P16885, EVALUE 3.00e+00; NT HIT: gi14770479, EVALUE 1.00e-112; EST_HUMAN HIT: BI819162.1, EVALUE 1.00e-113
ctcctgtttgaaggtacaatcattggtttgatgggatggcgctgcttcaccagttcagaatggcaaagggcacagtgacatacaggagcaagtttctacagagtgatacatataaggccaacagtgctaaaaaccgaattgtgatctcagaatttggcacactggctctcccggatccatgcaagaatgtttttgaacgtttcatgtccaggtttgagc

SEQ ID NO: 26498 - DNA, 189 bp, Homo sapiens
  MAP TO CHR17.1; EXPRESSED IN ADULT LIVER, SIGNAL = 0.5; EXPRESSED IN LUNG, SIGNAL = 1.1; EST_HUMAN HIT: BG945851.1, EVALUE 7.00e-85; SWISSPROT HIT: Q23356, EVALUE 1.00e-17; NT HIT: gi14774517, EVALUE 5.00e-85
agtccccctccttctccccagatccagagccagatcacgccccatgccatcatcttcctccccaacaccgacggcatggagatgctgctgtgctacgaggacgagggtgtctacgtcaacacgtacgggcgcatcattaaggatgtggtgctgcagtggggggagatgcctacttctgtgggtgagtga

SEQ ID NO: 26499 - DNA, 190 bp, Homo sapiens
  MAP TO CHR4.1; EXPRESSED IN ADULT LIVER, SIGNAL = 1.7; EST_HUMAN HIT: BG166167.1, EVALUE 1.00e-77; SWISSPROT HIT: P40798, EVALUE 1.00e-09
gtagtccaaaatgtaggtttgaatacaaacgatctgaaacacctagtaggtactattgctattgtggaaaagtagaagatccacctttagatccgtggcttgtgcctcattcatgtggccaagtatgtgagcgtgaatttaaacctccttgtggccataaatgtttactcctctgtcatccaggtgagtt

SEQ ID NO: 26500 - DNA, 251 bp, Homo sapiens
  MAP TO AC068936.2; EXPRESSED IN LUNG, SIGNAL =   2; EXPRESSED IN HEART, SIGNAL = 1.4; EXPRESSED IN ADULT LIVER, SIGNAL = 0.87; SWISSPROT HIT: P34369, EVALUE 3.00e-40; NT HIT: AF092565.1, EVALUE 0.00e+00; EST_HUMAN HIT: AW163485.1, EVALUE 0.00e+00
ctcacagtgcctatggaaactggttcccaggcagcaagcctctcatacaacaggccatggccaagatcatgaaggcaaaccctgccctgtatgtgttacgtgaacggatccgcaaggggctacagctctattcatctgaacccactgagccttatttgtcttctcagaactatggtgagctcttctccaaccagattatctggtttgtggatgacaccaacgtctacagagtgactattcacaaggtgagt

SEQ ID NO: 26501 - DNA, 279 bp, Homo sapiens
  MAP TO CHR5.1; EXPRESSED IN LUNG, SIGNAL = 0.72; EXPRESSED IN HEART, SIGNAL = 0.89; EST_HUMAN HIT: BI599585.1, EVALUE 4.00e-44; NT HIT: gi14861872, EVALUE 0.00e+00; SWISSPROT HIT: Q9Y5I3, EVALUE 1.00e-11
ttacctggtgttgcactggatactgttggccactgctgatcaggccctcctggaccagcccgtagaatgccagcctcctctaggtgcacagagctgaataaacacacagacccagataacggttagatcataaattctttcccatctcttcttccaccctcagaaattgcttacaactatgaagccagggctgcagctaacacattctgctcatgcttgaactgaagcaattactgctgagcagtcaccctgcataaactgcagaagcattgctgactt

SEQ ID NO: 26502 - DNA, 234 bp, Homo sapiens
  MAP TO CHR6.1; EXPRESSED IN LUNG, SIGNAL =  53; EXPRESSED IN HEART, SIGNAL = 9.4; NT HIT: AJ315641.1, EVALUE 1.00e-129; EST_HUMAN HIT: BF338561.1, EVALUE 1.00e-125; SWISSPROT HIT: P30507, EVALUE 2.00e-42
tccttaccccatctcagggtgaggggcttgggcagaccctcatgctgcacatggcaggtgtatctctgctcctctccagaaggcaccaccacagccgcccacttctggaaggttccatcccctgcaggcctggtctccacgagctccgtgtcctgggtctggtcctccccatcccgctgccaggtcagtgtgatctccgcagggtagaagcccagggcccagcacctcagggtg

SEQ ID NO: 26503 - DNA, 157 bp, Homo sapiens
  MAP TO CHR19.1; EXPRESSED IN LUNG, SIGNAL = 0.72; EXPRESSED IN HEART, SIGNAL = 1.2; EST_HUMAN HIT: BE378295.1, EVALUE 6.00e-82; SWISSPROT HIT: P10227, EVALUE 5.90e-02
cagccctggcccgccgggaggaggagagcctggctgttcctgccaagcggcgccgggtcactgctgagatggaggggaagtacgtcatcaacatgcccaaaggcaccacaccccgcacccgcaagatcctggagcagcagcaggctgcaaaaggtac

SEQ ID NO: 26504 - DNA, 107 bp, Homo sapiens
  MAP TO CHR16.1; EXPRESSED IN HEART, SIGNAL = 4.4; EXPRESSED IN LUNG, SIGNAL =  17; SWISSPROT HIT: Q9Z313, EVALUE 2.00e-13; NT HIT: gi14776722, EVALUE 4.00e-53; EST_HUMAN HIT: BE301555.1, EVALUE 2.00e-53
acagaactgtctcccttcttgggggccgagggcttcctggggaagaggatgagtttggagcggtactccttcagccgctgcacgttggcctgcagggactccgtgga

SEQ ID NO: 26505 - DNA, 145 bp, Homo sapiens
  MAP TO CHR22.1; EXPRESSED IN HEART, SIGNAL = 0.53; NT HIT: AY028896.1, EVALUE 3.00e-73; EST_HUMAN HIT: BG717357.1, EVALUE 2.00e-53; SWISSPROT HIT: P53420, EVALUE 8.90e-01
ctcaccgaggatcatggagcagcgctgggcgggttcctggcccgtgagcagcgtgaagtgttcggggtagtagaactccagggcttccaggaaggcctcatagcccctcttgccacggcagcgcaagatgtccatcaggcgccct

SEQ ID NO: 26506 - DNA, 219 bp, Homo sapiens
  MAP TO CHR5.1; EXPRESSED IN LUNG, SIGNAL = 0.94; EXPRESSED IN HEART, SIGNAL = 1.1; SWISSPROT HIT: P07130, EVALUE 2.30e+00; NT HIT: AL163249.2, EVALUE 7.80e-01
agggcaaggatcatgtcttgggcttgctttgacttatttatgatgtgataccatctgctgagtgggtctttattacactagaaatgaatattattactcagatagatatcaatatacagagggaagctattagtctcagaaaccacattctccctcctcgggtgacctcatccaccaggccttgcatgggcatgactcataaatccacaacaccaaccc

SEQ ID NO: 26507 - DNA, 209 bp, Homo sapiens
  MAP TO CHR5.1; EXPRESSED IN HEART, SIGNAL = 0.48; SWISSPROT HIT: P36570, EVALUE 7.20e+00; EST_HUMAN HIT: BE786054.1, EVALUE 7.00e-02
gaactcaggcctccttttcaaggccaggatgaatgggaaatatgcaaatggccgcctcccaggagcggcaggggagggcctgctgctggcaggagggcatcactccacttgggtctgtcacatgaaagggtttgtattcctgccgctggccggctcctggccaggctggggctgttctcaccagaaaacaaaaatgtctttcagaccaa

SEQ ID NO: 26508 - DNA, 106 bp, Homo sapiens
  MAP TO CHR2.1; EXPRESSED IN HEART, SIGNAL = 0.56; NT HIT: AB051502.1, EVALUE 4.00e-44; EST_HUMAN HIT: BI831625.1, EVALUE 5.00e-44
cttaccctccatcgagaaaataatccacccatcttttatttgtagaaactgggcacaatgataaatatcatcaattgtccaaaggaattcacagctagaaataaag

SEQ ID NO: 26509 - DNA, 265 bp, Homo sapiens
  MAP TO CHR8.1; EXPRESSED IN HEART, SIGNAL = 0.64; EST_HUMAN HIT: AI798060.1, EVALUE 4.00e-87; NT HIT: AF285605.1, EVALUE 0.00e+00; SWISSPROT HIT: Q47377, EVALUE 4.70e+00
atttgcttgtggctcccccgcaaaataagtaaaatattgagagtacagaagattagaatgtgtgccctgggcagtacttgcaactgtggtcaacagcccagaaggagatggctgtacttcatatgatgttatcccttggtatgtctgggtaatggcattgccattgctgttgctgtactgataaacacaccaagcagagtatggatatgaagttccaaataaatgctcagaagaattatatgttgggttacatgcagactgtgga

SEQ ID NO: 26510 - DNA, 271 bp, Homo sapiens
  MAP TO CHR19.1; EXPRESSED IN LUNG, SIGNAL = 1.4; EXPRESSED IN HEART, SIGNAL = 0.6; EST_HUMAN HIT: BF793727.1, EVALUE 1.00e-116; SWISSPROT HIT: P55145, EVALUE 4.60e+00; NT HIT: gi16163471, EVALUE 1.00e-115
acttctcttcctcttcctgcccccagcaccacaccccactctggccggagcacgccaagcagctccccatcgctccggaaacggctgcagctcctgcccccaagccggcccccacctgagccagaaccaggcaccatggtggagaagggatcagatagctcctcagagaagggtggggtgcctgggacccccagcacccagagcctaggcagccggaacttcatccgcaacagcaaggttggtgcaagcccaggtggggtggggagagggc

SEQ ID NO: 26511 - DNA, 265 bp, Homo sapiens
  MAP TO CHR17.1; EXPRESSED IN LUNG, SIGNAL = 0.66; SWISSPROT HIT: P55786, EVALUE 4.00e-34; NT HIT: Y07701.1, EVALUE 1.00e-111; EST_HUMAN HIT: AL041645.2, EVALUE 1.00e-129
aagaatgtaattgaccggaaaccataccctgatgatgaaaatttagtggaagtgaagtttgcccgcacacctgttatgtctacatatctggtggcatttgttgtgggtgaatatgactttgtagaaacaaggtcaaaagatggtgtgtgtgtccgtgtttacactcctgttggcaaagcagagcaaggaaaatttgcgttagaggtaaatgtacttgaagaggattgttccaacagtccataactccaggttggggaatttacat

SEQ ID NO: 26512 - DNA, 119 bp, Homo sapiens
  MAP TO CHR19.1; EXPRESSED IN LUNG, SIGNAL = 0.69; NT HIT: gi14777865, EVALUE 2.00e-27; EST_HUMAN HIT: BE618565.1, EVALUE 1.00e-29; SWISSPROT HIT: Q95157, EVALUE 7.00e-12
tgcatgtacctggtcatggtcgtggggaacctgctcatcatcctggccatcagcatagactcccacctccacacccccatgtacttcttcctggccaacctgtccctggttgatttctg

SEQ ID NO: 26513 - DNA, 233 bp, Homo sapiens
  MAP TO CHR19.1; EXPRESSED IN LUNG, SIGNAL = 0.7; EST_HUMAN HIT: BE733025.1, EVALUE 1.00e-122; NT HIT: AF059302.1, EVALUE 1.00e-128; SWISSPROT HIT: P36776, EVALUE 9.00e-25
ccacaggtggaggagaagatcaagcagacccaccgtaagtacctgctgcaggagcagctaaagatcatcaagaaggagctgggcctggagaaggacgacaaggatgccatcgaggagaagttccgggagcgcctgaaggagctcgtggtccccaagcacgtcatggatgttgtggacgaggagctgagcaagctgggcctgctggacaaccactcctcggagttcaagtgagt

SEQ ID NO: 26514 - DNA, 192 bp, Homo sapiens
  MAP TO AC002107.1; EXPRESSED IN HEART, SIGNAL = 1.8; NT HIT: gi11429613, EVALUE 1.00e-104; SWISSPROT HIT: Q15526, EVALUE 1.00e-32; EST_HUMAN HIT: AL549808.1, EVALUE 1.00e-104
cccaggtcggtgcagtggaagggagtgaccacataggccccactctgagttgaggaggagatgaggccgccctcccgggcctcccggacagggtccaccatggtccggggcatcatatacagctccttggaatggtcaaagcaccccctgaccttcactggcctatactccagatttttcagttccattggg

SEQ ID NO: 26515 - DNA, 166 bp, Homo sapiens
  MAP TO AC004536.1; EXPRESSED IN HEART, SIGNAL = 6.6
ttattgttctgctgcttcttcctcttcctcctttatctctcctcctcttccttcttctttttcttccttctccatcttcttctccctctccttctcttcctcctcctccttcttcttccttttcttcctcttcttctttttttttttttttctgatgcctatttta

SEQ ID NO: 26516 - DNA, 130 bp, Homo sapiens
  MAP TO AC016603.5; EXPRESSED IN HEART, SIGNAL =   1; EST_HUMAN HIT: AL138392.1, EVALUE 4.00e-67; SWISSPROT HIT: Q01513, EVALUE 7.00e-03; NT HIT: AB033051.1, EVALUE 3.00e-67
ctctgggggcaactgctgtaagtaattatgatcagcagcaaaagttcttaagttagtaagctgcccaatagatgaaggcaaagcttcaacttcattgaaactacaatccagttcttctactgatattaac

SEQ ID NO: 26517 - DNA, 235 bp, Homo sapiens
  MAP TO AC003107.1; EXPRESSED IN HEART, SIGNAL =   1; SWISSPROT HIT: Q16342, EVALUE 2.40e-01; EST_HUMAN HIT: BG954630.1, EVALUE 7.90e-02
atggggccccggggcccttcctggcagacgtctgctcagccaggagacgtgtgggcgccccggctccctgcctcccgcccccaccgttgcctgcctttgtgaatgcagaaggaaagtatgttgtgaaggcagccgccctgccctgggcgggccgggctgtaggcccccagtctgcggaattcatcagggcggcaggggagggcagcttggcgacctctgcatcctcagcctgcct

SEQ ID NO: 26518 - DNA, 121 bp, Homo sapiens
  MAP TO AF020662.1; EXPRESSED IN HEART, SIGNAL = 1.2; NT HIT: AF128541.1, EVALUE 4.00e-01; EST_HUMAN HIT: BI829504.1, EVALUE 2.30e+00
caaaatctgagctgaaattaggatatccggatgctgagtgttaatgagcagcgtgtcggtgtttaacaaccggggccacaggccatcagtttcacaggactcatttgaataatgcttccaa

SEQ ID NO: 26519 - DNA, 121 bp, Homo sapiens
  MAP TO AC005101.2; EXPRESSED IN HEART, SIGNAL = 0.93; SWISSPROT HIT: P40164, EVALUE 1.60e+00; NT HIT: AY029472.1, EVALUE 1.00e-01
ggctgtgatgaaaatcaaatgtgatcaactctgtgaaaatattgtggaaaatataaggaattatgatgataatgtctggttggtcacttcagaatatagcacagaattgaaagggaattaa

SEQ ID NO: 26520 - DNA, 214 bp, Homo sapiens
  MAP TO AC005081.2; EXPRESSED IN HEART, SIGNAL = 0.93; NT HIT: gi15300233, EVALUE 1.00e-117; EST_HUMAN HIT: AA077633.1, EVALUE 1.00e-114; SWISSPROT HIT: O42184, EVALUE 3.00e-11
caggccactgcggctgggccgaccccccacggaggaggccacagagctgacggagctgatggaggaactgctgggactgtgggtcagtgctgacacacccatggccatacgcttggtcttcttggccttggctgggctggtagatgggaagccgatacggatcactttgtggatgggcgcgaagagaccaaacttgggtgggcactggaagtac

SEQ ID NO: 26521 - DNA, 82 bp, Homo sapiens
  MAP TO AF227509.1; EXPRESSED IN HEART, SIGNAL = 1.7; EST_HUMAN HIT: BF773088.1, EVALUE 1.40e+00; NT HIT: AL163209.2, EVALUE 2.00e-36
ctgtacaagcaaagttacagagattcctctccacattgtgttccaaactgccgccatcatccaactcttgaagcctgatatc

SEQ ID NO: 26522 - DNA, 132 bp, Homo sapiens
  MAP TO AC002050.5; EXPRESSED IN HEART, SIGNAL = 0.98; SWISSPROT HIT: P42568, EVALUE 3.00e-19; NT HIT: gi16162115, EVALUE 2.00e-68; EST_HUMAN HIT: AA421983.1, EVALUE 2.00e-68
tcaggatgttccagatgtttccaggtaactctgtagtttacggactgtggttttgtccagcgagcaaagatcaaaatcaaatgttgtgtttgtgatatgaaagtgtccagtttcttctataaggttcacgat

SEQ ID NO: 26523 - DNA, 129 bp, Homo sapiens
  MAP TO AC004494.1; EXPRESSED IN HEART, SIGNAL = 1.2; SWISSPROT HIT: P53313, EVALUE 7.80e+00; EST_HUMAN HIT: AA694067.1, EVALUE 1.00e-66
acacgtgacactgatattaaagtgctaatgagagggatctatttcttcttgtacgctaaaagagaaacagcagttcagatttcccatcagaagtccgaggactttgttcttgataactactaccaataa

SEQ ID NO: 26524 - DNA, 184 bp, Homo sapiens
  MAP TO AC010527.4; EXPRESSED IN HEART, SIGNAL =   2; SWISSPROT HIT: Q9YGK5, EVALUE 2.50e+00; NT HIT: D26471.1, EVALUE 3.00e-03
gtccctggaccgctctgctcctgtcttctacctgtgctggcaagacgagaggtgccagggtctcaatgccaatgtctctgggctctcggatccgaggccagggccaggtgcagaggcagcggtagcccgggacccggagaagctggagctgctgttcccatccagcagagccccgagcgagcag

SEQ ID NO: 26525 - DNA, 278 bp, Homo sapiens
  MAP TO CHR19.3; EXPRESSED IN HEART, SIGNAL = 4.7; EXPRESSED IN FETAL LIVER, SIGNAL = 2.5; NT HIT: D49738.1, EVALUE 1.00e-110; EST_HUMAN HIT: AA826128.1, EVALUE 1.00e-110; SWISSPROT HIT: Q99426, EVALUE 3.00e-16
tttctgggtttctagtgaatttaatgcatgagtctcaaaaatcaatggcaaaggaaaaaatgaataaaattaaaatggggtcaggagaaaagggccatgggcacacacaggaggggcagtcagtggctgagctaggagctgaagcaggggaattccttaggtgtcatatctcgtccaacccgtagtcctcctccgggaagtcccccaccgtcacgactgctggcttgacaaaggcgccatacttggcctggcattcgaagtagcgtttcccattcaca

SEQ ID NO: 26526 - DNA, 115 bp, Homo sapiens
  MAP TO CHR19.3; EXPRESSED IN HEART, SIGNAL = 8.4; EXPRESSED IN BONE MARROW, SIGNAL =  12; EXPRESSED IN FETAL LIVER, SIGNAL =  16; SWISSPROT HIT: P54726, EVALUE 3.00e-15; NT HIT: gi16176126, EVALUE 7.00e-46; EST_HUMAN HIT: BG033150.1, EVALUE 1.00e-45
tcactcgtcatcaaagttctgactcaggaggaagttggcagccaagttctcatttttttcacacgcgaaataggcctggatgaccaggctctctgggaagcccagggccttcaac

SEQ ID NO: 26527 - DNA, 284 bp, Homo sapiens
  MAP TO CHR16.3; EXPRESSED IN FETAL LIVER, SIGNAL = 2.7; EXPRESSED IN HEART, SIGNAL = 2.1; EXPRESSED IN BONE MARROW, SIGNAL = 1.6; SWISSPROT HIT: P43662, EVALUE 5.50e+00; NT HIT: gi14775319, EVALUE 0.00e+00; EST_HUMAN HIT: R17132.1, EVALUE 0.00e+00
cataacagtttcattagtttcaggtgcagaatcaagcaggtcatctagttcatctccaaggaccatatctccatcatctagaaaagcttctggcatagtgaagggcatctttcctccatttgccagcactgcagatggcagagcgctctcttccacttgtagtggcaaaatagaagttaagggcataacaggaactgaggccagctcacttccaacttcatgagaaaaactgggtgccggtaaagagacaacaggaactgcttcttgccttggagttaataaat

SEQ ID NO: 26528 - DNA, 334 bp, Homo sapiens
  MAP TO CHR19.3; EXPRESSED IN HEART, SIGNAL =  29; EXPRESSED IN LUNG, SIGNAL = 1.1; EST_HUMAN HIT: AU154323.1, EVALUE 0.00e+00; SWISSPROT HIT: O00268, EVALUE 1.60e-01; NT HIT: gi12741860, EVALUE 0.00e+00
taaaaaaacaggacccagtttactactgaagctgcagcgaggttacagaggcgtcttggggctcagtccctgagctccgggacgcccaactgggagtggggcctccactctcctacgtacagacacccccatagggaaacgctcacatgctgtcctgctgggacgctgcaggcctggccgttctgtggccgcatccgcgtccgggtccctgtgtcctggctgggcgagccggggagggggctgattcctgggagcggttcagcagcgagttctgaatgtcttccaggacttcacggaagagctcctctcgggacttcatgccgtccaggtagac

SEQ ID NO: 26529 - DNA, 117 bp, Homo sapiens
  MAP TO CHR16.3; EXPRESSED IN HEART, SIGNAL = 1.7; EXPRESSED IN FETAL LIVER, SIGNAL = 1.5; NT HIT: gi9910183, EVALUE 5.00e-59; EST_HUMAN HIT: BI834730.1, EVALUE 2.00e-59
catttttgtgacattccttaagcaagttaatcaagacgttgcattcttcagtgtgcaagtgtggagataagtcaggatgcatctttaggagatgaggatggatcacagcagtgcaac

SEQ ID NO: 26530 - DNA, 299 bp, Homo sapiens
  MAP TO CHR14.3; EXPRESSED IN HEART, SIGNAL = 2.9; EXPRESSED IN FETAL LIVER, SIGNAL = 2.9; EST_HUMAN HIT: BE170146.1, EVALUE 1.00e-105; SWISSPROT HIT: Q13268, EVALUE 8.00e-19; NT HIT: gi15300204, EVALUE 1.00e-61
gatcggcttcgccgtcgcccagcgtctggcccaagacggggcccacgtggtagtcagccgccggaagcagcagaatgtggaccaggcagtggccacgctgcagggggaggggctgagcatgacgggcactgtgtgccatgtggggaagatgaaggactgggagcggctggtggccacagtgagctgcagggaaatgggcacagagccaggaggtggaaaagggagccagcctgagcctccttccctgctttcctggacagcattggtgagatccaacgcagtgatgttaactaaaacat

SEQ ID NO: 26531 - DNA, 308 bp, Homo sapiens
  MAP TO CHR19.3; EXPRESSED IN FETAL LIVER, SIGNAL =  94; EXPRESSED IN BONE MARROW, SIGNAL =  36; EXPRESSED IN HEART, SIGNAL =  72; SWISSPROT HIT: P79103, EVALUE 4.00e-41; NT HIT: AB015610.1, EVALUE 1.00e-111; EST_HUMAN HIT: BF207657.1, EVALUE 1.00e-111
caccatacacaggttccagtgtcaatcttgatgaaatcagtaatcttgccagtctctaaatcaatctgaatggtatcattcaccttgataaggggatcagggtagcagatggcgtgagtatcaagagtcaccagatgagggattccttttgtgcccacaaagatttttctcagtttgcataacatgtacttggcctcctcaggtgtaatacgttgtacagcaaagtgacccttggtgtcacaggtcagttgggaattctctcccatcttgtcagtgttgatgacatccattaatccagcagggtaggt

SEQ ID NO: 26532 - DNA, 179 bp, Homo sapiens
  MAP TO CHR16.3; EXPRESSED IN HEART, SIGNAL =   9; SWISSPROT HIT: Q13061, EVALUE 3.30e+00; NT HIT: gi16164628, EVALUE 5.00e-94; EST_HUMAN HIT: BE000837.1, EVALUE 3.00e-96
tgcacacaaagaaaagagtttcttcctttcgaggaaataaaattgtcctgaaagacgtcattactctacggagacatgtggaaacaaaagttagagctaaaatccgtaagaggaaggtgacaacgaaaatcaaccatcatgacaaaatcaatggaaagaggaagaccgccagaaaacag

SEQ ID NO: 26533 - DNA, 146 bp, Homo sapiens
  MAP TO CHR16.3; EXPRESSED IN FETAL LIVER, SIGNAL =  13; EXPRESSED IN LUNG, SIGNAL = 3.5; EXPRESSED IN HEART, SIGNAL = 8.5; EST_HUMAN HIT: BF877113.1, EVALUE 5.00e-76; SWISSPROT HIT: O43026, EVALUE 7.70e+00; NT HIT: gi5902013, EVALUE 3.00e-76
gaattaaaattgtcctggaagacatctttactttatggagacaggtggaaaccaaagttcgagctaaaatccgtaagatgaaggtgacaacaaaagtcaaccgtcatgacaaaatcaatggaaagaggaagaccgccaaagaacag

SEQ ID NO: 26534 - DNA, 114 bp, Homo sapiens
  MAP TO CHR16.3; EXPRESSED IN HEART, SIGNAL = 4.9; EST_HUMAN HIT: W27031.1, EVALUE 3.00e-55; SWISSPROT HIT: Q28749, EVALUE 6.10e-02
tctgtgctcaagccctgcagagggagatggcagagagaaaggctgcctacaagcatcacagtcccatccctgttggtaaccgtgttgcgcaaaaacaccttcatccccacccag

SEQ ID NO: 26535 - DNA, 103 bp, Homo sapiens
  MAP TO CHR19.3; EXPRESSED IN HEART, SIGNAL =  10; EXPRESSED IN FETAL LIVER, SIGNAL =  11; NT HIT: gi14755992, EVALUE 2.00e-51; SWISSPROT HIT: P54920, EVALUE 1.00e-12; EST_HUMAN HIT: BG122523.1, EVALUE 4.00e-51
gtgaaggaatacgactccatctcccggctggaccagtggctcaccaccatgctgctgcgcatcaagaagaccatccagggcgatgaggaggacctgcgctaag

SEQ ID NO: 26536 - DNA, 171 bp, Homo sapiens
  MAP TO CHR18.3; EXPRESSED IN HEART, SIGNAL = 1.9; EXPRESSED IN LUNG, SIGNAL = 1.7; EXPRESSED IN BONE MARROW, SIGNAL = 1.7; EXPRESSED IN FETAL LIVER, SIGNAL =   2; SWISSPROT HIT: P21561, EVALUE 7.60e-02; NT HIT: gi15011977, EVALUE 1.50e-01; EST_HUMAN HIT: AW503122.1, EVALUE 1.40e-02
cgggcaacacgccttagcagggtctgcgcggccgggagaatgcagccacgcgccctgctctctggcctgccctccctcctgctcctgtgcggagctccggtgtggaaggtctcccttccttgggcgcatgcagcggtctccctccagtccttgtcctctcctgcgccctga

SEQ ID NO: 26537 - DNA, 409 bp, Homo sapiens
  MAP TO CHR19.3; EXPRESSED IN HEART, SIGNAL = 2.5; EXPRESSED IN FETAL LIVER, SIGNAL = 4.2; NT HIT: D84471.1, EVALUE 0.00e+00; EST_HUMAN HIT: AI676124.1, EVALUE 0.00e+00; SWISSPROT HIT: Q9Y285, EVALUE 8.00e-21
gcccaacgatgatcaaatatggcatcaacaatatccgggagctggtgggccacaaggtgaacctgcagatggtgtatgacagtcccctgtgccgcctggatgccgagccgaggccccctcccacacaggaggctgcgtgacatgggccactctaggacaggtcatcctccccgagtccctgctgctgcgctcctttgcatccctggccagtgaccttgtatttatgaggcctctgtgaggccagcccccaccttcctctttcccacctgtcccaggaccagaatcccagggacagaggactgggtagcaggttccttctgttgtcctgtgtggtgtgtctactgtgagggtgggccctgaggagacctgtgggccacctattgtctaataaagtgggcagttgccccca

SEQ ID NO: 26538 - DNA, 198 bp, Homo sapiens
  MAP TO CHR18.3; EXPRESSED IN HEART, SIGNAL =  54; EXPRESSED IN FETAL LIVER, SIGNAL = 9.6; SWISSPROT HIT: P29269, EVALUE 2.00e-21; NT HIT: gi14765857, EVALUE 1.00e-107; EST_HUMAN HIT: BG109150.1, EVALUE 1.00e-107
aggacttaaccaccaccatgtcgagcaaaagaacaaagaccaagaccaagaagcgccctcagcgtgcaacatccaatgtgtttgctatgtttgaccagtcacagattcaggagttcaaagaggccttcaacatgattgatcagaacagagatggtttcatcgacaaggaagatttgcatgatatgcttgcttcattgg

SEQ ID NO: 26539 - DNA, 171 bp, Homo sapiens
  MAP TO CHR14.3; EXPRESSED IN HEART, SIGNAL = 1.7; EST_HUMAN HIT: AA085071.1, EVALUE 2.20e-01; SWISSPROT HIT: P18480, EVALUE 5.70e+00; NT HIT: Y09085.1, EVALUE 2.30e+00
actttagatctaagagccacttccttagggatgttgtatttgcttcccaaagttgtgtcatttgcccttatggaaatatcttcttttacttccttcacaggattaatctcaattgataactgaacactcatccatgtgaccattagattaatgggtgtcccatccactaga

SEQ ID NO: 26540 - DNA, 182 bp, Homo sapiens
  MAP TO CHR16.3; EXPRESSED IN HEART, SIGNAL =   5; NT HIT: gi16164565, EVALUE 3.00e-98; EST_HUMAN HIT: AW951193.1, EVALUE 5.00e-98; SWISSPROT HIT: P17538, EVALUE 2.00e-30
ggtcttcaagaaccccaagttcagcattctgaccgtgaacaatgacatcaccctgctgaagctggccacacctgcccgcttctcccagacagtgtccgccgtgtgcctgcccagcgccgacgacgacttccccgcggggacactgtgtgccaccacaggctggggcaagaccaagtacaacg

SEQ ID NO: 26541 - DNA, 151 bp, Homo sapiens
  MAP TO CHR14.3; EXPRESSED IN HEART, SIGNAL =  69; EXPRESSED IN FETAL LIVER, SIGNAL = 1.5e+02; EXPRESSED IN BONE MARROW, SIGNAL =  59; NT HIT: gi4506648, EVALUE 2.00e-53; EST_HUMAN HIT: AL036824.1, EVALUE 1.00e-55; SWISSPROT HIT: P39023, EVALUE 2.00e-16
accaaacagcgggctctgcagaagactgaccttaagttcactgacaccacctccaagtttggccatggccgcttgcagaccatggaggagaagaaagcatccatgggacgactcaagaaagaccaaattgcaaaggaagaaagagcttaat

SEQ ID NO: 26542 - DNA, 209 bp, Homo sapiens
  MAP TO CHR19.3; EXPRESSED IN HEART, SIGNAL =  23; SWISSPROT HIT: Q13011, EVALUE 1.00e-34; NT HIT: AF030246.1, EVALUE 1.00e-114; EST_HUMAN HIT: BI116911.1, EVALUE 1.00e-113
cctccagaagaccttgttcatggcattcctcttgttgggccggttgagctggacatgcagaacatgtttctgcgcagacgtcacacgaagggactcatagctgtggtctggggcttcaccgagggctactccggaagcctcctcttgtgcagaggagccagtgaggcgaaggctaatactgagtcccgggtagttggagcctgtcagtc

SEQ ID NO: 26543 - DNA, 233 bp, Homo sapiens
  MAP TO CHR19.3; EXPRESSED IN FETAL LIVER, SIGNAL = 9.7; EXPRESSED IN HEART, SIGNAL = 5.2; EXPRESSED IN LUNG, SIGNAL =   1; NT HIT: gi4507754, EVALUE 1.00e-128; SWISSPROT HIT: O43914, EVALUE 4.00e-06; EST_HUMAN HIT: AI302882.1, EVALUE 1.00e-128
ggagctccagggtcagaggtcggatgtctacagcgacctcaacacacagaggccgtattacaaatgagcccgaatcatgacagtcagcaacatgatacctggatccagccattcctgaagcccaccctgcacctcattccaactcctaccgcgatacagacccacagagtgccatccctgagagaccagaccgctccccaatactctcctaaaataaacatgaagcacaaaaa

SEQ ID NO: 26544 - DNA, 77 bp, Homo sapiens
  MAP TO CHR19.3; EXPRESSED IN HEART, SIGNAL = 7.5; EXPRESSED IN FETAL LIVER, SIGNAL =  15; SWISSPROT HIT: Q07020, EVALUE 7.00e-08; NT HIT: gi14760401, EVALUE 6.00e-36; EST_HUMAN HIT: BG180895.1, EVALUE 8.00e-36
accctacgtccgctccaagggccggaagttcgagcgtgccagaggccgacgggccagccgaggctacaaaaactaac

SEQ ID NO: 26545 - DNA, 291 bp, Homo sapiens
  MAP TO CHR18.3; EXPRESSED IN HEART, SIGNAL = 3.7e+02; EXPRESSED IN FETAL LIVER, SIGNAL = 2e+02; NT HIT: D50604.1, EVALUE 0.00e+00; EST_HUMAN HIT: BG760024.1, EVALUE 1.00e-106; SWISSPROT HIT: P53506, EVALUE 2.00e-41
tagaagcatttgtggtggacgatggaggggctggactcgtcatactcctgcttgctgatccatatctgctgggaggtagacagcgaggccaggatggagctgccaatccacatggagtatttgcgctcagaaggagcaatgatcttgatcttcatcgtgcttggagccaggccggtgatctcctgcatcctgtcggcgatgccagggtacacggtggtgccgccagacagcactctgttgacgtaccggtctttgcagatgtccatgtcacacttcatgatggagttgaag

SEQ ID NO: 26546 - DNA, 202 bp, Homo sapiens
  MAP TO CHR14.3; EXPRESSED IN HEART, SIGNAL = 1.6; EXPRESSED IN LUNG, SIGNAL = 1.3; NT HIT: L12446.1, EVALUE 7.10e-01; SWISSPROT HIT: P32479, EVALUE 1.90e-02
gggaaatttggaaagtttaagaggtatgtggcccatagtacacatgtcacaaatgttcgctggacttatgatgacagcatgttggttaccctaggcggtacagatatgtctttaatggtgtggacaaatgagatggaaggctatcgagaaaaaaggccttgtgatagtgaagaatccgacattgattctgaagaagatgggg

SEQ ID NO: 26547 - DNA, 156 bp, Homo sapiens
  MAP TO CHR14.3; EXPRESSED IN HEART, SIGNAL = 1.8; EXPRESSED IN LUNG, SIGNAL =   1; NT HIT: AB043547.1, EVALUE 2.10e+00; EST_HUMAN HIT: BF917273.1, EVALUE 3.00e-71; SWISSPROT HIT: P22544, EVALUE 1.30e-01
aatcatgtgctggcactgacagcccaatcacctgatattgaacatttgaatgaagtgagcctcaagctcccacttagtgacgtagctgtgaagacgttacaaaatatgaaccggcaatggattcgggccacggccacggcactggagcgctgcagg

SEQ ID NO: 26548 - DNA, 149 bp, Homo sapiens
  MAP TO CHR18.3; EXPRESSED IN HEART, SIGNAL =  10; EXPRESSED IN LUNG, SIGNAL = 3.9; EXPRESSED IN FETAL LIVER, SIGNAL =  14; EST_HUMAN HIT: AU121805.1, EVALUE 3.00e-71; SWISSPROT HIT: Q40941, EVALUE 8.80e-01; NT HIT: gi16163432, EVALUE 1.00e-69
gaaataaaattggcctgaaagacgtcattactctatggagacatgtggaaacaaaagttagagctaaaatccgtaagaggaaggtgacaacgaaaatcaaccatcatgacaaaatcaatggaaagaggaagaccgccaaaaaccagtaa

SEQ ID NO: 26549 - DNA, 335 bp, Homo sapiens
  MAP TO CHR19.3; EXPRESSED IN HEART, SIGNAL = 4.6; EXPRESSED IN FETAL LIVER, SIGNAL = 6.5; EXPRESSED IN BONE MARROW, SIGNAL = 6.5; SWISSPROT HIT: P30957, EVALUE 2.50e+00; NT HIT: gi14760348, EVALUE 0.00e+00; EST_HUMAN HIT: BG323934.1, EVALUE 0.00e+00
gtcctaaaggggaagaagttgagtttgccggcatagccccggtcctctccatctctctcctcggcagcagcgggaggcagaggaaggcggcagaagatgaagagctttcccatccaggggtgacttttttaagaacccacctcttgtgctccccatcccgcctcctgccgggtttcagggggacagtggaggatccaggtcttggggagctcaggacttgggctgtttgtagttttttgccttttagacaagaaaaaaaaatctttccactctttagtttttgattctgatgactcgtttttcttctactctgtggccccaatttttataaagtg

SEQ ID NO: 26550 - DNA, 117 bp, Homo sapiens
  MAP TO CHR14.3; EXPRESSED IN HEART, SIGNAL = 1.5; EXPRESSED IN LUNG, SIGNAL = 1.3; SWISSPROT HIT: P47890, EVALUE 2.00e-05; EST_HUMAN HIT: BG202648.1, EVALUE 6.00e-41; NT HIT: gi16163994, EVALUE 3.00e-29
aatggtgtcgtggagtcagggatgtacgctgtggtcacccccatgctgaaccttttcatctacagcctgagaaacaggcacacacaaagtgccctgcggaggctgcgcacagaacag

SEQ ID NO: 26551 - DNA, 125 bp, Homo sapiens
  MAP TO CHR19.3; EXPRESSED IN HEART, SIGNAL = 5.5; NT HIT: gi15431298, EVALUE 2.00e-64; EST_HUMAN HIT: BI860113.1, EVALUE 3.00e-64; SWISSPROT HIT: Q07020, EVALUE 8.00e-17
gtatgtgcactgcgcgtgaccagccgggcccgcagccgcatcctcagggcagggggcaagatcctcactttcgaccagctggccctggactcccctaagggctgtggcactgtcctgctctccgg

SEQ ID NO: 26552 - DNA, 100 bp, Homo sapiens
  MAP TO CHR18.3; EXPRESSED IN HEART, SIGNAL = 1.7; SWISSPROT HIT: Q9Z987, EVALUE 3.60e+00
tgatatccctatcccagcggcagctgcaacctgctgtgtcccacgtgcagctaaagccatcctcatcttccctggaccacagccaatctaaaaagctatg

SEQ ID NO: 26553 - DNA, 231 bp, Homo sapiens
  MAP TO CHR18.3; EXPRESSED IN HEART, SIGNAL = 2.7; NT HIT: X52079.1, EVALUE 1.00e-126; SWISSPROT HIT: P15884, EVALUE 4.00e-37; EST_HUMAN HIT: BG058782.1, EVALUE 1.00e-126
cctcggacttgctgctccagactgaggatgacggccaccgcctggtggaggatcaggagcttggtctggggcttgtcactcttgaggtggagctgcaccatgcggccgagctctttgaaagcctcgttgatgtcacggacccgcagacgctctcgggcattgttggccatcctccgctccttctcacgctctgccttctgctctggtgtcaggtcctcatcgtcattattg

SEQ ID NO: 26554 - DNA, 206 bp, Homo sapiens
  MAP TO CHR16.3; EXPRESSED IN HEART, SIGNAL = 3.8; NT HIT: gi16164687, EVALUE 1.00e-112; EST_HUMAN HIT: AI139042.1, EVALUE 1.00e-111; SWISSPROT HIT: P55042, EVALUE 4.00e-34
ccatccaccgagacctcacgagagcgcaccaggtcgctcttgttgcccacgaggatgatgggcacatcatctgtttgccgtgcacgccgcagctggacccgcagttctgaggccttctcgaagctgcccttgtccgtcactgagtacacaatgacataggcatcccccatggccatgcagtggccgggcaaccagcggcccccgtc

SEQ ID NO: 26555 - DNA, 159 bp, Homo sapiens
  MAP TO CHR18.3; EXPRESSED IN HEART, SIGNAL = 1.5; SWISSPROT HIT: O13360, EVALUE 3.90e-01; NT HIT: gi14725854, EVALUE 5.50e-01; EST_HUMAN HIT: BF902848.1, EVALUE 8.10e-01
acaaggttatacactgttcagacactgtgatcatgctatatgtatctggatttatagcctataacacaatgcaaatcatagagcatgggttactaaatatttgtgaaatcaacttagacatcaagggattgaaagtttgtatggttgtgtggattgagg

SEQ ID NO: 26556 - DNA, 241 bp, Homo sapiens
  MAP TO CHR14.3; EXPRESSED IN HEART, SIGNAL = 2.6; EST_HUMAN HIT: BI061179.1, EVALUE 1.00e-99; NT HIT: U53530.1, EVALUE 0.00e+00; SWISSPROT HIT: Q14204, EVALUE 2.00e-42
ctctaccgcaatggccagcgcttactggaaaagcaaaggttccagttcccaccttcctggctttatattgacaacatcgagggagagtggggagccttcaatgacatcatgcggcgaaaggactctgccattcagcagcaggtggcaaacctgcaaatgaagattgtccaggaggatcgggccgtggaaagccgcaccaccgacctgctgactgactgggagaagaccaagcctgtcacgg

SEQ ID NO: 26557 - DNA, 115 bp, Homo sapiens
  MAP TO CHR6.3; EXPRESSED IN FETAL LIVER, SIGNAL =   3; EXPRESSED IN ADULT LIVER, SIGNAL = 3.2; EXPRESSED IN LUNG, SIGNAL = 3.8; EXPRESSED IN HEART, SIGNAL = 3.5; EST_HUMAN HIT: BE082544.1, EVALUE 2.00e-53; SWISSPROT HIT: Q9UMN6, EVALUE 1.20e+00; NT HIT: gi15304463, EVALUE 2.00e-58
gacaattgattcaggggtcttgacagaggacctatttgtcctgcccctagtggcccgagatgtgggctcaggggtgacaggttggtctgtggaggtgggaggctggagctcaggg

SEQ ID NO: 26558 - DNA, 123 bp, Homo sapiens
  MAP TO CHR12.3; EXPRESSED IN HEART, SIGNAL = 1.3; EXPRESSED IN ADULT LIVER, SIGNAL = 1.6; EXPRESSED IN FETAL LIVER, SIGNAL = 1.7; EXPRESSED IN BRAIN, SIGNAL = 2.5; NT HIT: gi14784254, EVALUE 4.00e-63; EST_HUMAN HIT: BG328162.1, EVALUE 5.00e-63; SWISSPROT HIT: P47876, EVALUE 7.90e+00
ctgcatccggcggctggcaggcctggtccctggcatgttgccatctgtgatgctgaggaaggggctatatccaaagccacctgacaacatacggctcatatgctgacggtgaatagcaaaggg

SEQ ID NO: 26559 - DNA, 127 bp, Homo sapiens
  MAP TO CHR12.3; EXPRESSED IN HEART, SIGNAL = 1.2; EXPRESSED IN ADULT LIVER, SIGNAL = 1.2; EST_HUMAN HIT: AI383837.1, EVALUE 2.00e-65; SWISSPROT HIT: P27536, EVALUE 7.80e+00; NT HIT: gi15042944, EVALUE 2.00e-65
acacacttaatcttagcggattacttcagatgtttttaaaaagtatattaagatgccttttcactgtagtatttaaatatctgttacaggtttccaaggtggacttgaacagatggccttatattac

SEQ ID NO: 26560 - DNA, 139 bp, Homo sapiens
  MAP TO CHR11.3; EXPRESSED IN FETAL LIVER, SIGNAL = 5.3; EXPRESSED IN ADULT LIVER, SIGNAL =   2; EXPRESSED IN BRAIN, SIGNAL = 1.5; EXPRESSED IN LUNG, SIGNAL = 2.2; EXPRESSED IN HEART, SIGNAL =   2; NT HIT: M95623.1, EVALUE 7.00e-68; EST_HUMAN HIT: AL516000.1, EVALUE 4.00e-58; SWISSPROT HIT: P08397, EVALUE 2.00e-16
tccttagcaactctccacagcggggaaacctcaacacccggcttcggaagctggacgagcagcaggagttcagtgccatcatcctggcaacagctggcctgcagcgcatgggctggcacaaccgggtggggcaggtagg

SEQ ID NO: 26561 - DNA, 120 bp, Homo sapiens
  MAP TO CHR5.3; EXPRESSED IN BRAIN, SIGNAL = 3.1; EXPRESSED IN HEART, SIGNAL = 0.52; EXPRESSED IN FETAL LIVER, SIGNAL = 0.41; EXPRESSED IN ADULT LIVER, SIGNAL = 0.36; SWISSPROT HIT: P43003, EVALUE 6.00e-15; NT HIT: Z31707.1, EVALUE 1.00e-59; EST_HUMAN HIT: BI596738.1, EVALUE 8.00e-59
cccaggtatgcccccgtgggtattctcttcctgattgctgggaagattgtggagatggaagacatgggtgtgattggggggcagcttgccatgtacaccgtgactgtcattgttggctta

SEQ ID NO: 26562 - DNA, 122 bp, Homo sapiens
  MAP TO CHR11.3; EXPRESSED IN ADULT LIVER, SIGNAL = 0.7; EXPRESSED IN BRAIN, SIGNAL = 2.7; EXPRESSED IN LUNG, SIGNAL = 1.2; EXPRESSED IN HEART, SIGNAL =   1; EST_HUMAN HIT: BI039007.1, EVALUE 3.00e-61; SWISSPROT HIT: O08560, EVALUE 1.00e-16; NT HIT: D10604.1, EVALUE 1.00e-62
tccagggcgacactccccggcagcgggctgagaaggctcaggacaccgagctggccgcctacctggagaaccggcagcactaccagatgatccagcgggaggaccaggagacggctgtgtag

SEQ ID NO: 26563 - DNA, 175 bp, Homo sapiens
  MAP TO CHR13.3; EXPRESSED IN FETAL LIVER, SIGNAL =   2; EXPRESSED IN BRAIN, SIGNAL = 0.88; EXPRESSED IN ADULT LIVER, SIGNAL = 1.4; EXPRESSED IN LUNG, SIGNAL = 2.5; EXPRESSED IN HEART, SIGNAL =   2; EST_HUMAN HIT: AL118916.1, EVALUE 4.00e-55; SWISSPROT HIT: P28350, EVALUE 5.70e+00; NT HIT: gi13649247, EVALUE 3.00e-55
actgatgctacgaagatcccaggaatatcccattttattgtaaacccaaagtcaagactcttcccaggcgtctggtttatgctgattctcatatcactgaactgatcctgaaaacaaaacatgaaacgctggtatccggtgtccctggcacccacatggaggaaagtctatccat

SEQ ID NO: 26564 - DNA, 151 bp, Homo sapiens
  MAP TO CHRX.3; EXPRESSED IN HEART, SIGNAL = 3.5; EXPRESSED IN FETAL LIVER, SIGNAL =  12; EXPRESSED IN BRAIN, SIGNAL = 2.1; EST_HUMAN HIT: BG057288.1, EVALUE 1.00e-79; SWISSPROT HIT: P49061, EVALUE 9.00e-26; NT HIT: M12670.1, EVALUE 1.00e-75
cttccaggtgtttccctgtttatccatcccctgcaaactgcagagtggcactcattgcttgtggacggaccagctcctccaaggctctgaaaagggcttccagtcccgtcaccttgcctgcctgcctcgggagccagggctgtgcacctgg

SEQ ID NO: 26565 - DNA, 262 bp, Homo sapiens
  MAP TO CHR19.3; EXPRESSED IN FETAL LIVER, SIGNAL = 0.7; EXPRESSED IN ADULT LIVER, SIGNAL =   1; EXPRESSED IN BRAIN, SIGNAL =   1; EXPRESSED IN LUNG, SIGNAL = 0.88; EXPRESSED IN HEART, SIGNAL = 1.3; EST_HUMAN HIT: AU132251.1, EVALUE 0.00e+00; SWISSPROT HIT: P48378, EVALUE 3.00e-36; NT HIT: gi10835184, EVALUE 0.00e+00
gcctacacctacaaccccgagcctcagatgtacgcccccagcagcacggcttcttacttcgaggccccaggcggtgcccaggtgaccgtggcagcctcgtccccgccagcggtcccctcccacagcatggtgggcatcaccatggatgtcggggggagccccatcgtctccagcgcgggagcctatctcatccacggggggatggacagcaccagacactccctggcccacacctcccgctcatcgcccgccacggtatgta

SEQ ID NO: 26566 - DNA, 414 bp, Homo sapiens
  MAP TO CHR6.3; EXPRESSED IN LUNG, SIGNAL = 2.2; EXPRESSED IN HEART, SIGNAL = 1.7; EXPRESSED IN BRAIN, SIGNAL = 1.4; EST_HUMAN HIT: AI351370.1, EVALUE 0.00e+00; SWISSPROT HIT: P16106, EVALUE 3.00e-72; NT HIT: X14732.1, EVALUE 1.00e-119
aatttacgccctctccccacgaatgcggcgagcaagctggatgtccttgggcatgatagtcactcgcttggcgtgaatggcgcataggttggtgtcctcaaacagccccaccaggtaggcctcgcaggcctcctgcagcgccatcaccgccgagctctgaaaacgcagatcagtcttgaagtcctgcgcgatctcacggactagacgctggaatggcagtttgcgaatcagcagctcggtcgacttctggtagcggcggatctcgcgcagagccaccgtgccgggccggtaacggtggggcttcttcacgccgccggtggctggagcgctctttcgagcagccttggtggccagctgcttgcgtggcgctttcccacccgtggacttgcgagcagtctgcttggtacgagccat

SEQ ID NO: 26567 - DNA, 185 bp, Homo sapiens
  MAP TO CHR4.3; EXPRESSED IN LUNG, SIGNAL =   2; EXPRESSED IN HEART, SIGNAL = 2.6; EXPRESSED IN FETAL LIVER, SIGNAL = 1.3; EXPRESSED IN BRAIN, SIGNAL = 1.9; EST_HUMAN HIT: AI367573.1, EVALUE 5.00e-92; SWISSPROT HIT: P12250, EVALUE 5.60e+00; NT HIT: gi14733422, EVALUE 1.00e-91
cagtgacccacagtgaagagaaaagatatttaattatttctcaggctaatctcttaaagcgctcaaagtgttttcacaagtgcaaggggagggattgttctcagccaacatttaccagtgattccgacacacgcaaaaacactcccaatcacggtgctttatacttacttttaatttctgcactg

SEQ ID NO: 26568 - DNA, 204 bp, Homo sapiens
  MAP TO CHR20.3; EXPRESSED IN ADULT LIVER, SIGNAL = 0.39; EXPRESSED IN BRAIN, SIGNAL = 1.3; EXPRESSED IN LUNG, SIGNAL = 0.64; EXPRESSED IN HEART, SIGNAL = 0.57; EST_HUMAN HIT: BG193433.1, EVALUE 1.00e-109; SWISSPROT HIT: P18075, EVALUE 1.00e-32; NT HIT: gi14786441, EVALUE 1.00e-108
tacctgccacgttggccatccgcagggcttcctggttcttgggcgtcttggagcggttctggctgcgctgtttgctccccgtggaccggatgctgcggaagtggacctccgtggccttgaagaaagccaccatgaagggctgcttgttctggggcccgtgccgcccaatcaggcccgccaacttggggttgatgctctgccctg

SEQ ID NO: 26569 - DNA, 163 bp, Homo sapiens
  MAP TO CHR11.3; EXPRESSED IN FETAL LIVER, SIGNAL = 2.2; EXPRESSED IN ADULT LIVER, SIGNAL =   3; EXPRESSED IN HEART, SIGNAL =   2; NT HIT: gi14783735, EVALUE 8.00e-62; EST_HUMAN HIT: BF891829.1, EVALUE 2.00e-84; SWISSPROT HIT: Q60649, EVALUE 2.00e-19
ccccacccatgggcagttccctcttactctcttggcccagaagtttagttccttgttgacgagttggatgagctccgagtggcagaaggggaggaagtagacgatctcattgatccgtcccagaaactcatccctccggaagtgagcctgaagggccaggtta

SEQ ID NO: 26570 - DNA, 122 bp, Homo sapiens
  MAP TO CHR1.3; EXPRESSED IN FETAL LIVER, SIGNAL = 0.83; EXPRESSED IN ADULT LIVER, SIGNAL = 0.55; EXPRESSED IN LUNG, SIGNAL = 1.3; EXPRESSED IN HEART, SIGNAL = 0.61; EST_HUMAN HIT: AW401940.1, EVALUE 1.00e-60; SWISSPROT HIT: P32019, EVALUE 3.00e-18; NT HIT: gi15297339, EVALUE 9.00e-61
ctcacctgtttgcttgctgtgtagttgccagaacactccaagcagttatggtaggtgctgtaacagatgacaggctctggaaggctctccaggaaaagcagcagggcttcggctacagaatg

SEQ ID NO: 26571 - DNA, 174 bp, Homo sapiens
  MAP TO CHRX.3; EXPRESSED IN LUNG, SIGNAL = 1.4; EXPRESSED IN HEART, SIGNAL = 1.1; EXPRESSED IN BRAIN, SIGNAL = 1.4; SWISSPROT HIT: O60907, EVALUE 3.00e-29; NT HIT: gi14764641, EVALUE 7.00e-90; EST_HUMAN HIT: BE465313.1, EVALUE 1.00e-89
ctagtgcttcgtttgattctacggtgcgactgtgggacatagaacgaggcgtctgcacccacacgctcacgaagcatcaggagcctgtctatagcgtagctttcagccctgatgggaagtacttggccagtggatccttcgacaagtgcgtccatatctggaatactcaggtaa

SEQ ID NO: 26572 - DNA, 412 bp, Homo sapiens
  MAP TO CHR1.3; EXPRESSED IN ADULT LIVER, SIGNAL = 1.3; EXPRESSED IN HEART, SIGNAL = 1.3; EST_HUMAN HIT: AL582006.1, EVALUE 0.00e+00; SWISSPROT HIT: O87777, EVALUE 4.00e-01; NT HIT: gi15299394, EVALUE 0.00e+00
tctgaccctggtctttctctatcctagatccagtttgtcctggtctcactgcacatctcccagtactactttatgtccagctgtaactaccagtacccagtcattattcacctcatctggatgtatggcaccatcttcttcatgctgttctccaacttctggtatcactcttataccaagggcaagcggctgccccgtgcacttcagcaaaatggagctccaggtattgccaaggtcaaggccaactgagaagcatggcctagataggcgcccacctaagtgcctcaggactgcaccttagggcagtgtccgtcagtgccctctccacctacacctgtgaccaaggcttatgtggtcaggactgagcaggggactggccctcccctccccacagctgctctacagggaccac

SEQ ID NO: 26573 - DNA, 364 bp, Homo sapiens
  MAP TO CHRX.3; EXPRESSED IN LUNG, SIGNAL = 0.97; EXPRESSED IN HEART, SIGNAL = 0.85; EXPRESSED IN FETAL LIVER, SIGNAL = 1.8; EXPRESSED IN ADULT LIVER, SIGNAL = 0.54; EST_HUMAN HIT: AL538003.1, EVALUE 0.00e+00; SWISSPROT HIT: P49715, EVALUE 2.20e+00; NT HIT: gi14757481, EVALUE 0.00e+00
catgccgttgaccttgttacaggactggtgtcggggggaacacctgaacacccggaggtgcatgctcatcctggggatccccgaggactgtggcgaggatgagtttgaggagacactccaggaggcttgcaggcacctgggcagatacagggtgattggcaggatgtttaggagggaggagaacgcccaggcgattctactggagctggcacaagatatcgactatgctttgctcccaagggaaataccaggaaagggggggccctgggaagtgattgtaaaaccccgtaactcagatggggaatttctcaacagactgaaccgcttcttagaggaggagaggcggaccgtgtcagatatgaac

SEQ ID NO: 26574 - DNA, 129 bp, Homo sapiens
  MAP TO CHR11.3; EXPRESSED IN LUNG, SIGNAL =   1; EXPRESSED IN HEART, SIGNAL = 0.76; NT HIT: AB012922.1, EVALUE 1.00e-66; SWISSPROT HIT: Q13330, EVALUE 6.00e-09; EST_HUMAN HIT: AL580744.1, EVALUE 1.00e-60
aggggagtttgaagaggaatcaaagcagccaggggtgtctgagcagcagcgccatcaactgaagcaccgggaactttttctttctcggcaatttgaatcattaccagccacccacatacggtacaggac

SEQ ID NO: 26575 - DNA, 211 bp, Homo sapiens
  MAP TO CHR17.3; EXPRESSED IN HEART, SIGNAL = 1.5; EXPRESSED IN ADULT LIVER, SIGNAL = 1.5; SWISSPROT HIT: Q14457, EVALUE 4.00e-19; NT HIT: gi14785894, EVALUE 1.00e-107; EST_HUMAN HIT: AL549639.1, EVALUE 1.00e-107
agcactcactgagcttcctcctgatccagtctctcagcctcagcctggaccttctcgagattttctgccactatcttgcggttcttttccacgtcttccagctcctggatcagcctctcctcctctagtgccagctcctttagctccatctgtaactgttcactgtcatcctcattcatttgctctaagatctccaaacagcgtctgccaa

SEQ ID NO: 26576 - DNA, 146 bp, Homo sapiens
  MAP TO CHR9.3; EXPRESSED IN ADULT LIVER, SIGNAL = 4.4; EXPRESSED IN LUNG, SIGNAL =   9; EXPRESSED IN HEART, SIGNAL = 3.8; EST_HUMAN HIT: BF516386.1, EVALUE 1.00e-70; SWISSPROT HIT: P17813, EVALUE 8.00e-12; NT HIT: AF036970.1, EVALUE 8.00e-77
acacactcacgtaggccaagtgcagtgggattcccagggcctggagatgcaggaagacactgctgtttacactgaggaccagaagcacctctcggggccaggtgccattttgcttggatgcctggagagtcagctccagctgtgac

SEQ ID NO: 26577 - DNA, 135 bp, Homo sapiens
  MAP TO CHR19.3; EXPRESSED IN LUNG, SIGNAL = 1.5; EXPRESSED IN HEART, SIGNAL =   1; EXPRESSED IN FETAL LIVER, SIGNAL = 0.89; EXPRESSED IN BRAIN, SIGNAL = 0.84; EXPRESSED IN ADULT LIVER, SIGNAL = 0.81; EST_HUMAN HIT: BG479295.1, EVALUE 2.00e-66; SWISSPROT HIT: Q9Y6Q5, EVALUE 2.00e-17; NT HIT: gi15302008, EVALUE 1.00e-66
caggtcaatgccaacggcagcgtccttctgagcgaaatcgtcggtaccatcaagctcaaggtgtttctgtcaggaatgccagagctgcggctgggcctcaatgaccgcgtgctcttcgagctcactggccgtaag

SEQ ID NO: 26578 - DNA, 237 bp, Homo sapiens
  MAP TO CHR22.3; EXPRESSED IN HEART, SIGNAL = 0.71; EXPRESSED IN ADULT LIVER, SIGNAL = 0.76; EST_HUMAN HIT: BI915267.1, EVALUE 1.00e-125; SWISSPROT HIT: O15442, EVALUE 1.00e-40; NT HIT: gi4502496, EVALUE 1.00e-125
gcaggcagcctgccctacgagtacaagatcgtgatcgcaggcaaccacgagctgacctttgaccaggagttcatggccgacctcatcaagcaggacttttactacttcccatctgtgtcgaagctgaagccggagaactatgagaatgtgcagtcgctgctgaccaactgcatctaccttcaggactcggaggtcaccgtgcggggcttccggatctatggctccccatggtgagtg

SEQ ID NO: 26579 - DNA, 137 bp, Homo sapiens
  MAP TO CHR11.3; EXPRESSED IN LUNG, SIGNAL = 0.62; EXPRESSED IN HEART, SIGNAL = 0.67; SWISSPROT HIT: O00526, EVALUE 6.00e-19; EST_HUMAN HIT: BG489265.1, EVALUE 6.00e-69; NT HIT: gi5803214, EVALUE 3.00e-70
cagacttcaacatctcaagcctctctggtctgctgtccccggcgctaacggagagcctgctggttgccttgcccccctgtcacctcacaggaggcaatgccacactgatggtccggagagccaatgacagcaaaggt

SEQ ID NO: 26580 - DNA, 116 bp, Homo sapiens
  MAP TO CHR17.3; EXPRESSED IN LUNG, SIGNAL = 0.99; EXPRESSED IN HEART, SIGNAL = 0.61; EXPRESSED IN ADULT LIVER, SIGNAL = 0.78; EXPRESSED IN BRAIN, SIGNAL = 0.47; EXPRESSED IN FETAL LIVER, SIGNAL = 0.66; NT HIT: M23178.1, EVALUE 1.00e-56; SWISSPROT HIT: P10147, EVALUE 2.00e-16; EST_HUMAN HIT: BG236157.1, EVALUE 3.00e-55
acttacatgacaccaggcttggagcactggctgctcgtctcaaagtagtcagctatgaaattctgtggaatctgccgggaggtgtagctgaagcagcaggcggtcggcgtgtcagc

SEQ ID NO: 26581 - DNA, 211 bp, Homo sapiens
  MAP TO CHR21.3; EXPRESSED IN LUNG, SIGNAL = 2.2; EXPRESSED IN HEART, SIGNAL = 2.6; EXPRESSED IN FETAL LIVER, SIGNAL = 1.9; EXPRESSED IN BRAIN, SIGNAL = 2.8; SWISSPROT HIT: P02489, EVALUE 3.00e-36; EST_HUMAN HIT: BF726399.1, EVALUE 1.00e-113; NT HIT: gi14780619, EVALUE 1.00e-115
caggacgaccacggctacatttcccgtgagttccaccgccgctaccgcctgccgtccaacgtggaccagtcggccctctcttgctccctgtctgccgatggcatgctgaccttctgtggccccaagatccagactggcctggatgccacccacgccgagcgagccatccccgtgtcgcgggaggagaagcccacctcggctccctcgtcct

SEQ ID NO: 26582 - DNA, 223 bp, Homo sapiens
  MAP TO CHR19.3; EXPRESSED IN ADULT LIVER, SIGNAL =   2; EXPRESSED IN LUNG, SIGNAL = 2.2; EXPRESSED IN HEART, SIGNAL = 1.9; EXPRESSED IN FETAL LIVER, SIGNAL = 3.1; NT HIT: gi4508026, EVALUE 1.00e-122; SWISSPROT HIT: P17038, EVALUE 7.00e-43; EST_HUMAN HIT: AI566486.1, EVALUE 1.00e-115
tttaaaagctttgccacattcttcacatttgtagggtttctctccagtatgaattatcttatgtttagtaagggttgaggaccacttaaaggctttgccacattcttcacatttgtagggtttctcctcagtgtgaattatcttatgtttagtaagagttgagaactggttaaaagctttgccacattcttcacatttgtagggttttcctccagtatgaatt

SEQ ID NO: 26583 - DNA, 124 bp, Homo sapiens
  MAP TO CHR1.3; EXPRESSED IN LUNG, SIGNAL = 2.8; EXPRESSED IN HEART, SIGNAL = 2.1; EST_HUMAN HIT: N40671.1, EVALUE 1.00e-63; NT HIT: gi4557021, EVALUE 9.00e-64; SWISSPROT HIT: P31994, EVALUE 1.00e-19
ccaaaggctgtgctgaaactcgagccccagtggatcaacgtgctccaggaggactctgtgactctgacatgccgggggactcacagccctgagagcgactccattcagtggttccacaatggga

SEQ ID NO: 26584 - DNA, 102 bp, Homo sapiens
  MAP TO CHR12.3; EXPRESSED IN FETAL LIVER, SIGNAL = 0.59; EXPRESSED IN ADULT LIVER, SIGNAL = 0.81; EXPRESSED IN BRAIN, SIGNAL = 0.56; EXPRESSED IN LUNG, SIGNAL = 1.5; EXPRESSED IN HEART, SIGNAL = 0.91; NT HIT: gi13652760, EVALUE 1.00e-50; SWISSPROT HIT: Q9Y6K5, EVALUE 7.00e-14; EST_HUMAN HIT: BE621215.1, EVALUE 1.00e-50
gggcgagtactccacctgcttcacagagctacaacgggacttcatcatctctcgccctaccaagctgaagagcctgatccggctggtgaagcactggtacca

SEQ ID NO: 26585 - DNA, 148 bp, Homo sapiens
  MAP TO CHR18.3; EXPRESSED IN ADULT LIVER, SIGNAL = 0.84; EXPRESSED IN HEART, SIGNAL = 0.76; EXPRESSED IN BRAIN, SIGNAL = 0.76; SWISSPROT HIT: P25637, EVALUE 5.00e-08; EST_HUMAN HIT: BE380089.1, EVALUE 6.00e-63
agttcttttccactagtatgtttctggcacagttgttgatatgtttaaagcgatctggtcctagcagaatccctccataccagcgtgatactaccaccatgacattcttcacattcaaaatctgttattttttggaagcataattaga

SEQ ID NO: 26586 - DNA, 153 bp, Homo sapiens
  MAP TO CHR9.3; EXPRESSED IN LUNG, SIGNAL = 4.3; EXPRESSED IN HEART, SIGNAL =  46; EXPRESSED IN ADULT LIVER, SIGNAL = 1.3; EXPRESSED IN BRAIN, SIGNAL =  14; NT HIT: M98538.1, EVALUE 6.00e-81; SWISSPROT HIT: P41222, EVALUE 2.00e-21; EST_HUMAN HIT: BI755624.1, EVALUE 1.00e-76
tgtcccacctgaggaaggtggaggtcaggttgaggccaccatccgtggcaggggccaccacagacttgcacatggacaacgccgccttcttctcccggagccagctcgagttggaggcgaggcccgcgctgaaccagcgccccaggaactgcg

SEQ ID NO: 26587 - DNA, 104 bp, Homo sapiens
  MAP TO CHR17.3; EXPRESSED IN LUNG, SIGNAL = 0.61; EXPRESSED IN HEART, SIGNAL = 0.54; EXPRESSED IN ADULT LIVER, SIGNAL = 0.57; SWISSPROT HIT: P38398, EVALUE 2.00e-13; EST_HUMAN HIT: BF791668.1, EVALUE 9.00e-52; NT HIT: gi6552304, EVALUE 6.00e-52
taaaaacagcagaactttccttaatgtcattttcagcaaaactagtatcttcctttatttcaccatcatctaacaggtcatcaggtgtctcagaacaaacctga

SEQ ID NO: 26588 - DNA, 118 bp, Homo sapiens
  MAP TO CHR13.3; EXPRESSED IN FETAL LIVER, SIGNAL = 6.1; EXPRESSED IN LUNG, SIGNAL = 8.7; EXPRESSED IN HEART, SIGNAL = 5.3; SWISSPROT HIT: P13798, EVALUE 5.00e-14; EST_HUMAN HIT: AI952008.1, EVALUE 5.00e-60; NT HIT: U37055.1, EVALUE 3.00e-60
tacaggctcctgctctatcccaaaagcacccacgcattatcagaggtggaggtggagtcagacagcttcatgaatgctgtgctctggctacgcacacacttgggcagctgaagccctg

SEQ ID NO: 26589 - DNA, 218 bp, Homo sapiens
  MAP TO CHR3.3; EXPRESSED IN LUNG, SIGNAL = 0.34; EXPRESSED IN HEART, SIGNAL = 0.52; EXPRESSED IN ADULT LIVER, SIGNAL = 0.58; SWISSPROT HIT: O97881, EVALUE 2.00e-36; EST_HUMAN HIT: BI764263.1, EVALUE 1.00e-117; NT HIT: AF011536.1, EVALUE 1.00e-119
ccctgccaaaaaatcaatgtgaagcaaatcgcagcccgcctcctgcctccgctctactcactggtgttcatctttggttttgtgggcaacatgctggtcatcctcatcctgataaactgcaaaaggctgaagagcatgactgacatctacctgctcaacctggccatctctgacctgtttttccttcttactgtccccttctgggctcactatgctgc

SEQ ID NO: 26590 - DNA, 123 bp, Homo sapiens
  MAP TO CHR11.3; EXPRESSED IN LUNG, SIGNAL = 4.4; EXPRESSED IN HEART, SIGNAL = 3.9; EXPRESSED IN BRAIN, SIGNAL = 4.2; EST_HUMAN HIT: BF344476.1, EVALUE 3.00e-55; NT HIT: AF126246.1, EVALUE 3.00e-54
atgtgatactaaccgggcagggttctgaggaatgaaaggaatgctcagggaacagcaggccccatcatggtaggcatccaggagcccttgccggtctccagagtcgtaaattgcatagtacct

SEQ ID NO: 26591 - DNA, 116 bp, Homo sapiens
  MAP TO CHR9.3; EXPRESSED IN FETAL LIVER, SIGNAL = 2.7; EXPRESSED IN HEART, SIGNAL = 1.8; EST_HUMAN HIT: AL549808.1, EVALUE 7.00e-59; NT HIT: gi11429613, EVALUE 8.00e-58; SWISSPROT HIT: Q15526, EVALUE 1.00e-16
agcccaatggaactgaaaaatctggagtataggccagtgaaggtcagggggtgctttgaccattccaaggagctgtatatgatgccccggaccatggtggaccctgtccgggaggc

SEQ ID NO: 26592 - DNA, 110 bp, Homo sapiens
  MAP TO CHR5.3; EXPRESSED IN ADULT LIVER, SIGNAL = 2.3; EXPRESSED IN BRAIN, SIGNAL = 1.5; EXPRESSED IN LUNG, SIGNAL = 2.5; EXPRESSED IN HEART, SIGNAL = 1.5; EST_HUMAN HIT: BE745892.1, EVALUE 3.00e-52; NT HIT: gi14723088, EVALUE 7.00e-52; SWISSPROT HIT: O15342, EVALUE 2.00e-13
ttttagttggctgattgcaattctggcccaactcaaccctctctttggaccgcaattgaaaaatgaaaccatctggtatctgaagtatcattggccttgaggaagaagac

SEQ ID NO: 26593 - DNA, 105 bp, Homo sapiens
  MAP TO CHR16.3; EXPRESSED IN LUNG, SIGNAL =  19; EXPRESSED IN HEART, SIGNAL = 8.6; EST_HUMAN HIT: AA531174.1, EVALUE 7.00e-34; NT HIT: L11566.1, EVALUE 5.00e-34; SWISSPROT HIT: Q07020, EVALUE 1.00e-10
gggaaagggacagaggtggccggttggtacgactcataaacaacctcttcagcacaacctggttgaatgtggagtcggttcgtctggccagaaaactgcacagct

SEQ ID NO: 26594 - DNA, 126 bp, Homo sapiens
  MAP TO CHR1.3; EXPRESSED IN LUNG, SIGNAL = 1.6; EXPRESSED IN HEART, SIGNAL = 0.95; EXPRESSED IN FETAL LIVER, SIGNAL = 0.48; EXPRESSED IN BRAIN, SIGNAL = 1.1; EST_HUMAN HIT: BI862007.1, EVALUE 8.00e-62; SWISSPROT HIT: P38994, EVALUE 5.00e-05; NT HIT: gi14780995, EVALUE 6.00e-62
cttaccaagtaatcatcgggccggataccaaatagctcccggaagtagcggaaggcaacaggtgcataggtcttgaaacgaaagtcattgtagtgatgagcaggggtcaggttgctcccttcactg

SEQ ID NO: 26595 - DNA, 176 bp, Homo sapiens
  MAP TO CHR2.3; EXPRESSED IN LUNG, SIGNAL = 2.1; EXPRESSED IN HEART, SIGNAL = 1.6; EXPRESSED IN FETAL LIVER, SIGNAL = 2.2; EXPRESSED IN BRAIN, SIGNAL = 1.6; SWISSPROT HIT: Q92545, EVALUE 1.00e-24; EST_HUMAN HIT: BG258593.1, EVALUE 4.00e-80; NT HIT: gi16160064, EVALUE 3.00e-80
atacttacagctgccaggtttgtgaactggaacggaatcccactccggtggaggagagtctttttcaccctctgagctactggtgttgcctaattcttgactattcgggaggaattttgctagggcaggtggtctgttatccactaacttacttgtacctgcacaaaaatcagaaa

SEQ ID NO: 26596 - DNA, 183 bp, Homo sapiens
  MAP TO CHR9.3; EXPRESSED IN BRAIN, SIGNAL =   1; EXPRESSED IN LUNG, SIGNAL = 0.71; EXPRESSED IN HEART, SIGNAL = 1.2; SWISSPROT HIT: P07902, EVALUE 2.00e-31; EST_HUMAN HIT: BI754558.1, EVALUE 5.00e-95; NT HIT: L46723.1, EVALUE 9.00e-99
ccccagaccatcagcatatccgctacaacccgctgcaggatgagtgggtgctggtgtcagctcaccgcatgaagcggccctggcagggtcaagtggagccccagcttctgaagacagtgccccgccatgaccctctcaaccctctgtgtcctggggccatccgagccaacggagaggtaagcc

SEQ ID NO: 26597 - DNA, 121 bp, Homo sapiens
  MAP TO CHR15.3; EXPRESSED IN FETAL LIVER, SIGNAL = 0.76; EXPRESSED IN ADULT LIVER, SIGNAL = 0.67; EXPRESSED IN BRAIN, SIGNAL = 0.65; EXPRESSED IN HEART, SIGNAL = 0.77; SWISSPROT HIT: Q63362, EVALUE 6.00e+00; EST_HUMAN HIT: AL599623.1, EVALUE 5.00e-20; NT HIT: AF067375.1, EVALUE 6.00e-31
cccaccttatctggagttcaggaggcagttctttttcctcttcccatatagtcatttctacgacatattttatcactgaaggaaatattttcctggcttggacaattacctcttcattcaa

SEQ ID NO: 26598 - DNA, 198 bp, Homo sapiens
  MAP TO CHR1.3; EXPRESSED IN LUNG, SIGNAL =   1; EXPRESSED IN HEART, SIGNAL = 0.88; EXPRESSED IN FETAL LIVER, SIGNAL = 0.54; EXPRESSED IN ADULT LIVER, SIGNAL = 0.91; EXPRESSED IN BRAIN, SIGNAL =   1; SWISSPROT HIT: Q61130, EVALUE 1.00e-16; EST_HUMAN HIT: BF675391.1, EVALUE 1.00e-105; NT HIT: gi14723843, EVALUE 1.00e-106
cagcagatcatcttcttcatggtgccatacatgtcctcgtccttgtaggagtagatgatggggttcacgacggagttgagcagcgccagcagcaggaaccaccttttcacatgctgcacgccacactgcctgcagttcaggccgtcgaggagcagaaccaccaggcccggggtccagcataccacaaacgcccctgca

SEQ ID NO: 26599 - DNA, 106 bp, Homo sapiens
  MAP TO CHR1.3; EXPRESSED IN BRAIN, SIGNAL = 1.1; EXPRESSED IN LUNG, SIGNAL =   2; EXPRESSED IN HEART, SIGNAL =   2; EXPRESSED IN FETAL LIVER, SIGNAL = 1.8; SWISSPROT HIT: P30054, EVALUE 7.00e-10; NT HIT: gi14747175, EVALUE 3.00e-26; EST_HUMAN HIT: BG107556.1, EVALUE 4.00e-26
tctgaaagcaagatgggtcaccagcagctctactggagccaccaacaaaaattcggccagggttcttgctcttgtcacgtctgctcaaaccagcagggtctgatcc

SEQ ID NO: 26600 - DNA, 142 bp, Homo sapiens
  MAP TO CHR11.3; EXPRESSED IN BRAIN, SIGNAL = 3.9; EXPRESSED IN LUNG, SIGNAL = 2.3; EXPRESSED IN HEART, SIGNAL = 1.8; SWISSPROT HIT: Q50638, EVALUE 2.60e+00; EST_HUMAN HIT: BG749033.1, EVALUE 3.00e-74; NT HIT: gi14784557, EVALUE 2.00e-74
caacactggatgcaatggtgttacactggagcccgctgcaggccagctctgctgttcactggccctacccgagactggtgaaactggaagtcttcacactggagttgctgttccagctggtcgcccctcacggcacagaggg

SEQ ID NO: 26601 - DNA, 203 bp, Homo sapiens
  MAP TO CHR1.3; EXPRESSED IN FETAL LIVER, SIGNAL = 3.3; EXPRESSED IN ADULT LIVER, SIGNAL = 2.4; EXPRESSED IN LUNG, SIGNAL = 2.9; EXPRESSED IN HEART, SIGNAL = 2.3; SWISSPROT HIT: Q99062, EVALUE 7.00e-34; EST_HUMAN HIT: BG015369.1, EVALUE 1.00e-106; NT HIT: gi14732837, EVALUE 1.00e-101
tcacccaccaacatccatgggatcaagacacagttgtggggacatgctggtccccagcgcattctctgcctgcacccagatgcccatattctggtacaacagcaggtgtttgcgtgggatgcagcagtggctctgcccgtccttgggcacgcagtccaggatggagtccccttgggtctgacagttgccccggctcctgccaa

SEQ ID NO: 26602 - DNA, 182 bp, Homo sapiens
  MAP TO CHR10.3; EXPRESSED IN HEART, SIGNAL = 0.88; EXPRESSED IN FETAL LIVER, SIGNAL = 0.63; EXPRESSED IN ADULT LIVER, SIGNAL = 0.8; EXPRESSED IN BRAIN, SIGNAL = 2.2; NT HIT: AJ277074.1, EVALUE 3.00e-98; SWISSPROT HIT: Q15811, EVALUE 4.00e-10; EST_HUMAN HIT: BG961300.1, EVALUE 5.00e-95
taatcagtatagtgcatgattgattcaacatagttcccagggaacagaccagtcactcgattgcagactccttcataccagccatcatcattcttctttataacataaatgattgcaccctccataaatgacagctcatcatccttgtcttttgtataatcatatattgcaacaactatgga

SEQ ID NO: 26603 - DNA, 184 bp, Homo sapiens
  MAP TO CHR9.3; EXPRESSED IN HEART, SIGNAL = 1.3; EXPRESSED IN FETAL LIVER, SIGNAL = 0.32; EST_HUMAN HIT: BI459442.1, EVALUE 1.00e-61; SWISSPROT HIT: O55131, EVALUE 1.00e-15; NT HIT: S72008.1, EVALUE 8.00e-56
gatgtgaagaatcttgttctcccaaactgatcaattcagtcgtattaaatactgtgtatttcagacttaaaccattggatattgagtttatgaagcgtttgcatgaaaaagtgagtatcaccccacttattgccaaagcagacacactcacaccagaggaatgccaacagtttaaaaaacaggt

SEQ ID NO: 26604 - DNA, 127 bp, Homo sapiens
  MAP TO CHR1.3; EXPRESSED IN ADULT LIVER, SIGNAL = 1.5; EXPRESSED IN HEART, SIGNAL = 1.2; NT HIT: M90724.1, EVALUE 9.00e-61; SWISSPROT HIT: P31994, EVALUE 2.00e-16; EST_HUMAN HIT: BI834976.1, EVALUE 5.00e-63
ttctccatcccacaagcaaaccacagtcacagtggtgattaccactgcacaggaaacataggctacacgctgtactcatccaagcctgtgaccatcactgtccaaggtatgaggagtctgccaagat

SEQ ID NO: 26605 - DNA, 157 bp, Homo sapiens
  MAP TO CHR5.3; EXPRESSED IN ADULT LIVER, SIGNAL = 0.67; EXPRESSED IN FETAL LIVER, SIGNAL = 0.87; EXPRESSED IN HEART, SIGNAL = 0.78; NT HIT: gi13569935, EVALUE 1.00e-75; SWISSPROT HIT: P07084, EVALUE 4.40e+00
gagctgacagcgcggagctggcgctgtggagcgcaggagccttgccggttcctccgaccggcgtctgcgagtacagcggcggctaacctgccccggcttcaggatttacacagacgtggggcgatgcttgtgaccctgcagctcctcaaagtaagtc

SEQ ID NO: 26606 - DNA, 259 bp, Homo sapiens
  MAP TO CHR1.3; EXPRESSED IN ADULT LIVER, SIGNAL = 0.74; EXPRESSED IN BRAIN, SIGNAL = 0.55; EXPRESSED IN HEART, SIGNAL = 0.7; SWISSPROT HIT: P56396, EVALUE 2.00e-22; NT HIT: gi15298705, EVALUE 0.00e+00; EST_HUMAN HIT: BE890332.1, EVALUE 0.00e+00
tctgagaagctgacctgagattgttggaaaaggatgcttttttccgggtttatgccacaggcaagaagaacagcagtcatgtccaggatgctctgccgaaggacagctgggtcttgggggacagtaatggagtggaggtcaacaatgctgtataatacagagtcatattcatcctgtaacctcacccagctctcaatggctcccaggtaattgcccaggtggaggattcctgtaggttgaatgccggaaaatactcgct

SEQ ID NO: 26607 - DNA, 157 bp, Homo sapiens
  MAP TO CHR12.3; EXPRESSED IN BRAIN, SIGNAL = 4.5; EXPRESSED IN ADULT LIVER, SIGNAL = 4.7; EXPRESSED IN HEART, SIGNAL = 3.1; SWISSPROT HIT: Q9Z0N2, EVALUE 2.00e-22; NT HIT: AJ006932.1, EVALUE 2.00e-83; EST_HUMAN HIT: BE785141.1, EVALUE 5.00e-76
tagctggtaatgaatcttgccctcagcctcagacatctgaacacctggctgctatagagatcatgaaactgaagcatattttgattctacaaaataaaattgatttggtaaaagaaaggcaggctaaagaacaatacgagcagatccttgcgtttgt

SEQ ID NO: 26608 - DNA, 474 bp, Homo sapiens
  MAP TO CHR5.3; EXPRESSED IN HEART, SIGNAL = 1.1; EXPRESSED IN ADULT LIVER, SIGNAL = 0.89; EST_HUMAN HIT: AU127985.1, EVALUE 0.00e+00; NT HIT: gi14195611, EVALUE 0.00e+00; SWISSPROT HIT: Q9Y5E4, EVALUE 3.00e-83
agatggcagaaaatacccagagctggtgctggacaaagcgctggaccgggaggagcggcctgagctcagcttaacactcactgcactggacggtggggctccgcccaggtccgggaccaccacaattcgcattgtcgtcttggataataatgacaacgcccccgaatttttacaatcattctatgaggtacaggtgcccgagaacagcccccttaactccttagttgtcgttgtctccgctcgagatttagatgcaggagcatatgggagtgtagcctatgctctattccaaggcgatgaagttactcaaccatttgtaatagacgagaaaacagcagaaattcgcctgaaaagggcattggatttcgaggcaactccatattataacgtggaaattgtagccacagatggtgggggcctttcaggaaaatgcactgtggctatagaagtggtggatgtgaatgacaacgcccc

SEQ ID NO: 26609 - DNA, 126 bp, Homo sapiens
  MAP TO CHR19.3; EXPRESSED IN LUNG, SIGNAL = 5.6; EXPRESSED IN HEART, SIGNAL = 1.1; EXPRESSED IN BRAIN, SIGNAL = 1.8; EST_HUMAN HIT: AU120192.1, EVALUE 8.00e-56; SWISSPROT HIT: P43630, EVALUE 1.00e-05; NT HIT: gi16162945, EVALUE 4.00e-63
ggccaacttcaccctgggccctgtgagcccctccaatgggggccagtacaggtgctacggtgcacacaacctctcctccgagtggtcggcccccagcgaccccctgaacatcctgatggcaggtga

SEQ ID NO: 26610 - DNA, 174 bp, Homo sapiens
  MAP TO CHR2.3; EXPRESSED IN LUNG, SIGNAL = 0.85; EXPRESSED IN HEART, SIGNAL = 1.1; EXPRESSED IN BRAIN, SIGNAL = 0.72; EXPRESSED IN FETAL LIVER, SIGNAL = 0.81; NT HIT: gi11429010, EVALUE 2.00e-93; EST_HUMAN HIT: BF975928.1, EVALUE 8.90e-01; SWISSPROT HIT: O95393, EVALUE 1.00e-27
tcaaaaatggtaattttccggtctactccatcgtatatcatacgatccctttgcaccagtgtgtatagcctaagttcagccatgatgacctcttcatggtgaggaatggacacattgaagaggagggggtattttcggagcccattaaaactgaccggctgggaaaacagatct

SEQ ID NO: 26611 - DNA, 254 bp, Homo sapiens
  MAP TO CHR6.3; EXPRESSED IN LUNG, SIGNAL = 0.76; EXPRESSED IN HEART, SIGNAL = 0.62; EXPRESSED IN ADULT LIVER, SIGNAL = 0.86; EXPRESSED IN BRAIN, SIGNAL = 0.84; EST_HUMAN HIT: BF086479.1, EVALUE 2.00e-11; SWISSPROT HIT: Q04859, EVALUE 3.00e-23; NT HIT: gi14758073, EVALUE 1.00e-92
ggaagctgttggctttggcccactggcctttgttttgtatcattaccttttttggtgtccccagcacttggcaaattttgaatattgtgtcaatttcactggctccagggaagagtggcctgagggtgtaaacttctgccatgatgcagcccaccgcccagacgtcaatgggggagctgtagttggtagacctcaggagtacttctggagccctgtacctggaggaacaaaggttaactgctagctattgcttc

SEQ ID NO: 26612 - DNA, 114 bp, Homo sapiens
  MAP TO CHR22.3; EXPRESSED IN ADULT LIVER, SIGNAL = 0.81; EXPRESSED IN LUNG, SIGNAL = 1.6; EXPRESSED IN HEART, SIGNAL = 0.86; EXPRESSED IN BRAIN, SIGNAL = 0.66; NT HIT: gi14778686, EVALUE 8.00e-58; EST_HUMAN HIT: BI025347.1, EVALUE 1.00e-57; SWISSPROT HIT: Q9UIA0, EVALUE 6.00e-17
ggcagttcctgtggagcttccggctgccgggcgaggcccagaagatagaccggatgatggaggcctttgccactcgatactgcctctgcaacccaggcgtcttccagtccacag

SEQ ID NO: 26613 - DNA, 201 bp, Homo sapiens
  MAP TO CHR5.3; EXPRESSED IN HEART, SIGNAL = 0.55; EXPRESSED IN ADULT LIVER, SIGNAL = 0.49; EXPRESSED IN FETAL LIVER, SIGNAL = 0.72; EXPRESSED IN BRAIN, SIGNAL = 0.66; SWISSPROT HIT: O14511, EVALUE 3.00e-29; NT HIT: AF119152.1, EVALUE 1.00e-109; EST_HUMAN HIT: BF108794.1, EVALUE 3.00e-93
ctcacctacctgccttgtaacccacagccacccggcccaagttgaagaagatgaagagccagacgggacaggtgggtgagaagcaatcgctgaagtgtgaggcagcagccggtaatccccagccttcctaccgttggttcaaggatggcaaggagctcaaccgcagccgagacattcgcatcaaatatggcaacggcaggt

SEQ ID NO: 26614 - DNA, 310 bp, Homo sapiens
  MAP TO CHR20.3; EXPRESSED IN BRAIN, SIGNAL = 2.2; EXPRESSED IN LUNG, SIGNAL = 3.5; EXPRESSED IN HEART, SIGNAL = 2.5; EXPRESSED IN FETAL LIVER, SIGNAL = 1.9; SWISSPROT HIT: P07204, EVALUE 2.00e-08; NT HIT: gi12742414, EVALUE 0.00e+00; EST_HUMAN HIT: BI907890.1, EVALUE 0.00e+00
ttgtgccagttagagtaaggcgtgtcctcccccccgcccacccagctgaagcccttcagcggcagactagggtccaggcacttgcccttctctcgctggagcccaatccagaacttgctcatcctcgccgtcagggctgcctcccgcctcaggagctgggccagtactcgctggacgtgctgggcctcctccttgctcttcacagtggccaggttgcccccgttctggttgcagtggttctgggcctcggcagcgctcagcttgcccgagtgggccgtgtagcaggcggtccccacgcagaccaccgcct

SEQ ID NO: 26615 - DNA, 239 bp, Homo sapiens
  MAP TO CHR6.3; EXPRESSED IN HEART, SIGNAL = 1.2; EXPRESSED IN FETAL LIVER, SIGNAL = 0.85; EXPRESSED IN ADULT LIVER, SIGNAL =   1; EXPRESSED IN BRAIN, SIGNAL = 1.1; SWISSPROT HIT: Q01484, EVALUE 1.70e+00; NT HIT: gi14758073, EVALUE 0.00e+00; EST_HUMAN HIT: BG951553.1, EVALUE 3.00e-35
ttgtggagggatgggaaaagcaacgggcttggcttgtcctcctggagatggcttgggtgatctgtcctggagacctctgctttgtaggggtacgtgagatgcagagggggctggctggcttgatgctgtcgtgaagaaattcgtgtgtgtggcttggctggtggctgggcaggtgggactggcttaatataaggaggtgggcctgccttttccaggatgcctttctgtggtttttctga

SEQ ID NO: 26616 - DNA, 198 bp, Homo sapiens
  MAP TO CHR8.3; EXPRESSED IN HEART, SIGNAL = 0.79; EXPRESSED IN ADULT LIVER, SIGNAL = 0.75; EXPRESSED IN BRAIN, SIGNAL = 0.92; SWISSPROT HIT: Q13519, EVALUE 8.00e-33; NT HIT: X97368.1, EVALUE 1.00e-107; EST_HUMAN HIT: BG755732.1, EVALUE 1.00e-107
gtatctttgcaggtgtgcatcctcgagtgtgaagagaaggtcttccccagccccctctggactccatgcaccaaggtcatggccaggagctcttggcagctcagccctgccgccccagagcatgtggcggctgctctctaccagccgagagcttcggagatgcagcatctgcggcgaatgccccgagtccggagcttg

SEQ ID NO: 26617 - DNA, 330 bp, Homo sapiens
  MAP TO CHR8.3; EXPRESSED IN LUNG, SIGNAL =  10; EXPRESSED IN HEART, SIGNAL = 4.3; EXPRESSED IN BRAIN, SIGNAL = 2.2; EXPRESSED IN FETAL LIVER, SIGNAL =  10; EXPRESSED IN ADULT LIVER, SIGNAL = 9.4; SWISSPROT HIT: P05787, EVALUE 5.00e-53; NT HIT: gi15300590, EVALUE 0.00e+00; EST_HUMAN HIT: BI258644.1, EVALUE 0.00e+00
gtcatggtcaaccagagcctactgagcccccttgtcctggaggtggaccccaacatccaggctgtgtgcacccaggagaaggagcagatcaagaccctcaacaacaagtttgcctccttcacagacaaggtacggttcctggagcagcagaacaagatgctggagaccaagtggagcctcctgcagcagcagaagatggctcggagcaacatggacaacatgttcgagagctacatcaacaaccttaggcggcagctggagactctgggccaggagaagctgaagctggaggcggagcttggcaacatgcagaggctggtggaggacttc

SEQ ID NO: 26618 - DNA, 127 bp, Homo sapiens
  MAP TO CHR22.3; EXPRESSED IN HEART, SIGNAL = 0.8; EXPRESSED IN FETAL LIVER, SIGNAL =   5; EXPRESSED IN ADULT LIVER, SIGNAL = 1.1; EXPRESSED IN BRAIN, SIGNAL = 2.8; SWISSPROT HIT: Q09472, EVALUE 2.00e-07; NT HIT: gi13655161, EVALUE 2.00e-65; EST_HUMAN HIT: BF881659.1, EVALUE 2.00e-65
tggcatgccccaggggcagccagggctacagccacctaccatgccaggtcagcagggggtccactccaatccagccatgcagaacatgaatccaatgcaggcgggcgttcagagggctggcctgccc

SEQ ID NO: 26619 - DNA, 139 bp, Homo sapiens
  MAP TO CHR1.3; EXPRESSED IN LUNG, SIGNAL = 1.2; EXPRESSED IN HEART, SIGNAL = 0.76; EXPRESSED IN BRAIN, SIGNAL = 0.6; EXPRESSED IN ADULT LIVER, SIGNAL = 0.92; SWISSPROT HIT: P17927, EVALUE 2.00e-16; EST_HUMAN HIT: AW502222.1, EVALUE 3.00e-49; NT HIT: L24920.1, EVALUE 1.00e-56
tgtctgacaacagaagcttattttccttaaatgaagttgtggagtttaggtgtcagcctggctttgtcatgaaaggaccccccgcaccgtgtgcaatgccaggccctgaacaaatgggagccggagctaccaagctgct

SEQ ID NO: 26620 - DNA, 210 bp, Homo sapiens
  MAP TO CHR11.3; EXPRESSED IN LUNG, SIGNAL = 1.9; EXPRESSED IN HEART, SIGNAL = 1.9; EXPRESSED IN FETAL LIVER, SIGNAL = 0.8; EXPRESSED IN BRAIN, SIGNAL = 1.9; SWISSPROT HIT: Q05512, EVALUE 6.00e-36; EST_HUMAN HIT: BG994839.1, EVALUE 1.00e-113; NT HIT: gi14764250, EVALUE 1.00e-113
aacatcaagattgcagactttggcttcagcaatgaattcacctttgggaacaagctggacaccttctgtggcagtcccccttatgctgccccagaactcttccagggcaaaaaatatgatggacccgaggtggatgtgtggagcctaggagttatcctctatacactggtcagcggatccctgccttttgatggacagaacctcaaggtg

SEQ ID NO: 26621 - DNA, 143 bp, Homo sapiens
  MAP TO CHR21.3; EXPRESSED IN HEART, SIGNAL =   1; EXPRESSED IN FETAL LIVER, SIGNAL = 2.9; NT HIT: AJ239024.1, EVALUE 5.00e-75; SWISSPROT HIT: P48449, EVALUE 4.00e-23; EST_HUMAN HIT: BG982721.1, EVALUE 1.00e-39
tacctggcggaggctctggaccagcgggtcttccgcggcactcagccgaacggcgtagcagtagctcatgggcaggtacacctgccggcagtggcaccagagtgtggaggggtgtgccggtgcccagtcaggaaacagcctgg

SEQ ID NO: 26622 - DNA, 114 bp, Homo sapiens
  MAP TO CHR18.3; EXPRESSED IN HEART, SIGNAL = 0.53; EXPRESSED IN BRAIN, SIGNAL = 0.48; SWISSPROT HIT: P32780, EVALUE 4.00e-14; NT HIT: gi14773063, EVALUE 4.00e-41; EST_HUMAN HIT: AA418247.1, EVALUE 6.00e-41
agatggtgccaagtgatattcagtctgaattgaaacacttgtatgtagctgttggagaacttctatggcatttctggtcctactttcctgttaatacaccattcctagaagaaa

SEQ ID NO: 26623 - DNA, 178 bp, Homo sapiens
  MAP TO CHRX.3; EXPRESSED IN LUNG, SIGNAL = 0.89; EXPRESSED IN HEART, SIGNAL = 1.6; EXPRESSED IN ADULT LIVER, SIGNAL = 1.2; EXPRESSED IN BRAIN, SIGNAL = 1.6; SWISSPROT HIT: P15056, EVALUE 9.00e-22; EST_HUMAN HIT: AI307173.1, EVALUE 9.00e-72; NT HIT: gi14765973, EVALUE 2.00e-93
attctcacctctattaagctgctgacccgctcattgccaaaaattcaccacagtgcatcaaaaccctccttgaattgggctggtttccaaacagaggattttagtctatatgcttgttcttctccaaaaacacccatccaggcagggggatatggtgcatttcttgtctactgaaaca

SEQ ID NO: 26624 - DNA, 274 bp, Homo sapiens
  MAP TO CHR13.3; EXPRESSED IN HEART, SIGNAL = 0.78; EXPRESSED IN ADULT LIVER, SIGNAL = 0.67; EXPRESSED IN BRAIN, SIGNAL = 0.31; NT HIT: gi13649247, EVALUE 8.00e-54; SWISSPROT HIT: P25943, EVALUE 7.60e-01; EST_HUMAN HIT: AW978522.1, EVALUE 1.00e-102
tactcacagaactctgaaggctttcggagaaatcagttgttacagatagatttgaagatttttctgagttgtaaattccagaagttgcatcaatccactttgtttcaggtgaacctataattttggtagccatactggtgagattgagggttttatgccgtataaatggcagggaaggttggtctttgccccagtctgattggcacatgaagatcaaatgagtacacatagatgttgaagtggaaagaataaagtcattgaatgcacatatata

SEQ ID NO: 26625 - DNA, 138 bp, Homo sapiens
  MAP TO CHR14.3; EXPRESSED IN HEART, SIGNAL = 0.75; EXPRESSED IN LUNG, SIGNAL = 1.4; EXPRESSED IN BRAIN, SIGNAL = 0.82; EXPRESSED IN ADULT LIVER, SIGNAL = 0.75; SWISSPROT HIT: Q9UHC1, EVALUE 4.00e-16; EST_HUMAN HIT: AA043268.1, EVALUE 4.00e-58; NT HIT: AF195658.1, EVALUE 5.00e-72
tactgaccataagagtctcctttgttcctctgtcactgttatctctagcggaggaattagagtagaagacagtaattttttccgaccagagccttgtgcctgttgcttctcgtaggaatctattggcagaaagatgaa

SEQ ID NO: 26626 - DNA, 210 bp, Homo sapiens
  MAP TO CHR17.3; EXPRESSED IN LUNG, SIGNAL = 0.29; EXPRESSED IN HEART, SIGNAL = 0.52; EXPRESSED IN FETAL LIVER, SIGNAL = 0.66; EXPRESSED IN BRAIN, SIGNAL = 0.46; SWISSPROT HIT: O75106, EVALUE 2.00e-37; EST_HUMAN HIT: AL540526.1, EVALUE 1.00e-21; NT HIT: gi14785907, EVALUE 1.00e-114
caggatctggtggcttgggtcacagccagcttcctgcacattccccatgccgaggacatcccaaacacagtgactctggggaacagagttggcttcttgctccgaccctataacttctttgatgaggacccctccatcttctcccctggcagtgtctactttgagaagggccaggatgctgggctctgcagcatcaatcctgtggcctgc

SEQ ID NO: 26627 - DNA, 141 bp, Homo sapiens
  MAP TO CHR19.3; EXPRESSED IN HEART, SIGNAL = 0.92; EXPRESSED IN ADULT LIVER, SIGNAL = 0.62; EXPRESSED IN BRAIN, SIGNAL = 0.73; SWISSPROT HIT: O43240, EVALUE 1.00e-22; EST_HUMAN HIT: BE899455.1, EVALUE 1.00e-73; NT HIT: gi14755036, EVALUE 7.00e-74
aaacgacacgcgcttggaccccgaagcctatggctccccgtgcgcgcgcggctcgcagccctggcaggtctcgctcttcaacggcctctcgttccactgcgcgggtgtcctggtggaccagagttgggtgctgacggccgc

SEQ ID NO: 26628 - DNA, 386 bp, Homo sapiens
  MAP TO CHR1.3; EXPRESSED IN HEART, SIGNAL = 0.53; EXPRESSED IN BRAIN, SIGNAL = 0.69; SWISSPROT HIT: P23786, EVALUE 8.00e-69; EST_HUMAN HIT: BE542163.1, EVALUE 0.00e+00; NT HIT: U09645.1, EVALUE 0.00e+00
taaagactggcatcacagctgctaaggaaaagtttgatgccaccatgaaaaccctcactattgactgcgtccagtttcagagaggaggcaaagaattcctgaagaagcaaaagctgagccctgacgcagttgcccagctggcattccagatggccttcctgcggcagtacgggcagacagtggccacctacgagtcctgtagcactgccgcattcaagcacggccgcactgagaccatccgcccggcctccgtctatacaaagaggtgctctgaggcctttgtcagggagccctccaggcacagtgctggtgagcttcagcagatgatggttgagtgctccaagtaccatggccagctgaccaaagaagcagcaatgggtgaggca

SEQ ID NO: 26629 - DNA, 120 bp, Homo sapiens
  MAP TO CHR20.3; EXPRESSED IN ADULT LIVER, SIGNAL = 2.1; EXPRESSED IN BRAIN, SIGNAL =   2; EXPRESSED IN LUNG, SIGNAL = 1.4; EXPRESSED IN HEART, SIGNAL =   2; NT HIT: gi9558763, EVALUE 2.00e-46; SWISSPROT HIT: O95793, EVALUE 5.00e-19; EST_HUMAN HIT: BI769536.1, EVALUE 4.00e-42
cacatacctcgggggataagcacctcctctcatgttgtagttataggtggactgcatccgagagtaagggtcaacaggcttatacattggtttttttccaagtttcatgcacagtgcatt

SEQ ID NO: 26630 - DNA, 226 bp, Homo sapiens
  MAP TO CHR3.3; EXPRESSED IN LUNG, SIGNAL = 0.6; EXPRESSED IN HEART, SIGNAL = 0.95; EXPRESSED IN FETAL LIVER, SIGNAL = 0.68; EXPRESSED IN ADULT LIVER, SIGNAL = 0.94; EXPRESSED IN BRAIN, SIGNAL = 0.62; SWISSPROT HIT: P25687, EVALUE 1.00e-13; NT HIT: AF333025.1, EVALUE 5.00e-67
actaactttacgagtcagtggatggcagctgtctcccagtttgcccataggtgtgcaaatccttatgctcttgacccagatactgacagcacagcacatgcctccaccacattgggagtccttgtcacaagcctgaaatgtaataaacaaacagataaatatagataacaggaaagactcaggctaaggaaacctaaaattagcagtgaaatgccctttaaatatc

SEQ ID NO: 26631 - DNA, 352 bp, Homo sapiens
  MAP TO CHR8.3; EXPRESSED IN LUNG, SIGNAL = 0.4; EXPRESSED IN HEART, SIGNAL = 0.85; SWISSPROT HIT: P20333, EVALUE 4.00e-18; EST_HUMAN HIT: BG427252.1, EVALUE 0.00e+00; NT HIT: AB008822.1, EVALUE 0.00e+00
taccagcttgcaccactccaaatccaggagggcagctcctatgtttcaagcagaactctatctcaaggtagcgcccttccttgcattcgcacacgcggttgtgggtgcgattgcactcctgcttgacgtactgcagctccttgcacacggggctgcagtatagacactcgtcactggtgtgccagctgtctgtgtagtagtggtcagggcaaggggcgcacacggtcttccactttgctgtacagtgttgttttaggtaggtaccaggaggacatttgtcacacaacagctgatgagaggtttcttcgtcataatgaaggtactttggaggaaacgtttcctgggtggtcca

SEQ ID NO: 26632 - DNA, 225 bp, Homo sapiens
  MAP TO CHR2.3; EXPRESSED IN ADULT LIVER, SIGNAL = 1.1; EXPRESSED IN FETAL LIVER, SIGNAL = 0.6; EXPRESSED IN BRAIN, SIGNAL = 1.8; EXPRESSED IN HEART, SIGNAL = 0.86; SWISSPROT HIT: Q13618, EVALUE 8.00e-29; EST_HUMAN HIT: AW401889.1, EVALUE 4.00e-96; NT HIT: U58089.1, EVALUE 3.00e-96
attactacttacccctttgactccctttttcagcttatcatcaataaataatgagaggtattcaggagacctggagttgaggttgagaaaatactcaaagtcacccgcaatagtttgtttaaagagacggtcattgttgaatgattccaggaggaagcgatcgaacctactcttcagatccaataagcccttagaaataaaaacaaaatttaggacacattataa

SEQ ID NO: 26633 - DNA, 234 bp, Homo sapiens
  MAP TO CHR14.3; EXPRESSED IN HEART, SIGNAL = 0.9; EXPRESSED IN ADULT LIVER, SIGNAL = 1.4; NT HIT: gi14750893, EVALUE 1.00e-115; SWISSPROT HIT: P20631, EVALUE 1.90e-01; EST_HUMAN HIT: BG823316.1, EVALUE 1.00e-115
ctccacctgaatcatattgcagagcctggtcaggcggcttttggcagtctacgcactccccagctggggccgggcagagctggcactgtcactgctgcaggagacacccaggaactatgagttgggggatgtggtagaagctgtgaggcacagccaggaccgggccttcctgcgccgcttgcttgcccaggagtgtgccgtgtgtggctgggccctgccccacaaccgggtaag

SEQ ID NO: 26634 - DNA, 226 bp, Homo sapiens
  MAP TO CHR1.3; EXPRESSED IN HEART, SIGNAL = 1.4; EXPRESSED IN FETAL LIVER, SIGNAL = 2.5; EXPRESSED IN BRAIN, SIGNAL = 1.1; EXPRESSED IN ADULT LIVER, SIGNAL = 1.2; SWISSPROT HIT: P12314, EVALUE 7.00e-38; EST_HUMAN HIT: AW819103.1, EVALUE 1.00e-121; NT HIT: X14355.1, EVALUE 1.00e-121
accctgagctgtgaaacaaagttgctcttgcagaggcctggtttgcagctttacttctccttctacatgggcagcaagaccctgcgaggcaggaacacatcctctgaataccaaatactaactgctagaagagaagactctgggttatactggtgcgaggctgccacagaggatggaaatgtccttaagcgcagccctgagttggagcttcaagtgcttggtgagt

SEQ ID NO: 26635 - DNA, 140 bp, Homo sapiens
  MAP TO CHR6.3; EXPRESSED IN BRAIN, SIGNAL = 1.4; EXPRESSED IN HEART, SIGNAL = 1.9; NT HIT: gi13540472, EVALUE 7.00e-68; SWISSPROT HIT: Q9XT06, EVALUE 2.00e-18; EST_HUMAN HIT: AA147916.1, EVALUE 3.00e-68
accactgaagtagttccatctccaacttctttgtcttgcagatcagccagctcacaaagaactttagctgcaggatgttctacctccagtaacttcaggatggttgcaccatcgttagtaatggttacatcctaagaaat

SEQ ID NO: 26636 - DNA, 134 bp, Homo sapiens
  MAP TO CHR19.3; EXPRESSED IN FETAL LIVER, SIGNAL = 2.1; EXPRESSED IN BRAIN, SIGNAL = 1.6; EXPRESSED IN HEART, SIGNAL = 0.7; SWISSPROT HIT: P95539, EVALUE 1.20e+00; EST_HUMAN HIT: BG773753.1, EVALUE 2.00e-68; NT HIT: Y18417.1, EVALUE 2.00e-68
aggcatggcgcaggccctgggccctgacacgccattcacagccatcgccggcagtgaaatcttctccctggagatgagcaagaccgaggcgctgacgcaggccttccggcggtccatcggcgttcgcatcaagt

SEQ ID NO: 26637 - DNA, 126 bp, Homo sapiens
  MAP TO CHR1.3; EXPRESSED IN LUNG, SIGNAL = 1.7; EXPRESSED IN HEART, SIGNAL = 0.95; EXPRESSED IN BRAIN, SIGNAL = 0.34; EST_HUMAN HIT: BF978677.1, EVALUE 3.00e-52; NT HIT: AF208043.1, EVALUE 2.00e-52; SWISSPROT HIT: Q16666, EVALUE 3.00e-18
caacaaagccatttgaatatgagaccccagaaatggagaaaaaaataatgtttcatgctacagtggctacacagacacagttcttccatgtgaaggttttaaacaccagcttgaaggagaaattca

SEQ ID NO: 26638 - DNA, 113 bp, Homo sapiens
  MAP TO CHR11.3; EXPRESSED IN HEART, SIGNAL = 0.75; EXPRESSED IN ADULT LIVER, SIGNAL = 0.92; EXPRESSED IN BRAIN, SIGNAL = 1.6; NT HIT: gi14783776, EVALUE 3.00e-57; EST_HUMAN HIT: AA452496.1, EVALUE 3.00e-36
cagtccagctgttgtaagccctgcagctgctcttcaggctgtgggtcatcctgctgccagtccagctgctgcaagccctgctgttcccagtccagctgctgtaagccctgctg

SEQ ID NO: 26639 - DNA, 128 bp, Homo sapiens
  MAP TO CHR6.3; EXPRESSED IN HEART, SIGNAL = 0.85; EST_HUMAN HIT: AL578581.1, EVALUE 3.00e-58; SWISSPROT HIT: P18850, EVALUE 7.00e-05; NT HIT: gi15208634, EVALUE 4.00e-66
ctcacccttcggaaagagacaacataaaatgtgtcttcccgtcggtcaattgcatccaagaatgctggctgcgaacggtctgggtggcgatatagttgcagctggcccacagaatccctaggcaggtg

SEQ ID NO: 26640 - DNA, 458 bp, Homo sapiens
  MAP TO CHR20.3; EXPRESSED IN HEART, SIGNAL =   1; EXPRESSED IN BRAIN, SIGNAL = 0.65; NT HIT: L12760.1, EVALUE 0.00e+00; EST_HUMAN HIT: BG399344.1, EVALUE 0.00e+00; SWISSPROT HIT: P35558, EVALUE 2.00e-88
caggcaaaatcatcatgcatgacccctttgccatgcggcccttctttggctacaacttcggcaaatacctggcccactggcttagcatggcccagcacccagcagccaaactgcccaagatcttccatgtcaactggttccggaaggacaaggaaggcaaattcctctggccaggctttggagagaactccagggtgctggagtggatgttcaaccggatcgatggaaaagccagcaccaagctcacgcccataggctacatccccaaggaggatgccctgaacctgaaaggcctggggcacatcaacatgatggagcttttcagcatctccaaggaattctgggagaaggaggtggaagacatcgagaagtatctggaggatcaagtcaatgccgacctcccctgtgaaatcgagagagagatccttgccttgaagcaaagaataagccagatgtaa

SEQ ID NO: 26641 - DNA, 148 bp, Homo sapiens
  MAP TO CHR9.3; EXPRESSED IN HEART, SIGNAL = 1.5; EXPRESSED IN BRAIN, SIGNAL = 1.6; EXPRESSED IN ADULT LIVER, SIGNAL = 1.7; EST_HUMAN HIT: AI823478.1, EVALUE 8.00e-78; SWISSPROT HIT: O00602, EVALUE 2.00e-25; NT HIT: gi8051583, EVALUE 5.00e-78
gccgcaccttcatctctgacaccttgtagctatatttgtaccccttcgccgcactccagttgataccattggcatagctctcatggggtcccatgaggtagagaccattgaggtttgaagcatgacagtcggcgtaccaccaggctcc

SEQ ID NO: 26642 - DNA, 125 bp, Homo sapiens
  MAP TO CHR16.3; EXPRESSED IN HEART, SIGNAL = 0.91; EXPRESSED IN BRAIN, SIGNAL = 1.2; EST_HUMAN HIT: BG259388.1, EVALUE 3.00e-61; SWISSPROT HIT: P79797, EVALUE 6.00e-04; NT HIT: gi14776741, EVALUE 2.00e-61
gtacctgtgtggatgagcttcacgtggcgctgcaggtagcggtcgatcatgaaaaccttgttgcagccagggtgggggcagggccgctcccggacctcctcgtggtgctccttgatgtgcttctg

SEQ ID NO: 26643 - DNA, 126 bp, Homo sapiens
  MAP TO CHR19.3; EXPRESSED IN LUNG, SIGNAL = 1.2; EXPRESSED IN HEART, SIGNAL = 0.99; EXPRESSED IN ADULT LIVER, SIGNAL = 0.81; EXPRESSED IN BRAIN, SIGNAL = 0.9; SWISSPROT HIT: Q15928, EVALUE 5.00e-14; NT HIT: gi13652777, EVALUE 6.00e-62; EST_HUMAN HIT: AA295628.1, EVALUE 5.00e-60
gtgactttcagggatgtggccattgacttctctcaggaggaatgggaatgcctggaccctgctcagagggacttgtacagggatgtgatgttggagaactacagcaacctgatctcattgggtaag

SEQ ID NO: 26644 - DNA, 240 bp, Homo sapiens
  MAP TO CHR11.3; EXPRESSED IN LUNG, SIGNAL = 0.8; EXPRESSED IN HEART, SIGNAL = 0.57; EST_HUMAN HIT: AI949966.1, EVALUE 1.00e-123; SWISSPROT HIT: Q01432, EVALUE 7.00e-42; NT HIT: U29910.1, EVALUE 0.00e+00
atcctgttttgcagacttccaccctcctccactgccccaggaagacccctactgcctggatgatgcaccccccaacctggattacttggtccacatgcaggggggcatcctctttgtgtatgataacaagaagatgctggagcaccaggagccgcacagcctaccctaccccgacctggagacctacacggtggacatgagccacatcctggctctcatcaccgatggccccacgtaagc

SEQ ID NO: 26645 - DNA, 229 bp, Homo sapiens
  MAP TO CHR12.3; EXPRESSED IN HEART, SIGNAL = 0.56; EXPRESSED IN FETAL LIVER, SIGNAL = 1.2; EXPRESSED IN ADULT LIVER, SIGNAL = 0.84; EXPRESSED IN BRAIN, SIGNAL =   5; SWISSPROT HIT: Q10091, EVALUE 3.40e+00; NT HIT: gi7662267, EVALUE 1.00e-110; EST_HUMAN HIT: BG743364.1, EVALUE 1.00e-112
gctctctctgcagtgatacccagcgccgcaaccctcatcattgtggtgtgcgtgggcttcctggtgctcatggtcgtcctgggcctggtgcgcatccattcccttcaccgccgcgtctcaggggccggcgggcctccaggggcctccagtgaccccaaggacccagacctcttctgggatgactcagctctcaccatcattgtgaaccccatggaggtgagaggcctgg

SEQ ID NO: 26646 - DNA, 212 bp, Homo sapiens
  MAP TO CHR17.3; EXPRESSED IN HEART, SIGNAL = 1.1; EXPRESSED IN BRAIN, SIGNAL =   1; SWISSPROT HIT: Q99456, EVALUE 6.00e-17; NT HIT: gi14775973, EVALUE 1.00e-116; EST_HUMAN HIT: AL554824.1, EVALUE 1.00e-116
agatcttcaattattgaatagtatttgctataatctcttcccgatccaccgtctccagacccaggcccatatttgtcataccactccttgattttgttctccagatcagtgttagcctcctccagggctctgaccttgtctaggtaattggccaagcggtcattgaggttctgcatggtttgcttttcccctccagagaaaagccccccatc

SEQ ID NO: 26647 - DNA, 131 bp, Homo sapiens
  MAP TO CHR16.3; EXPRESSED IN HEART, SIGNAL = 2.5; SWISSPROT HIT: P40306, EVALUE 4.00e-14; NT HIT: X71874.1, EVALUE 6.00e-68; EST_HUMAN HIT: BG231722.1, EVALUE 9.00e-68
aggctgtccctcctccctcccaggtctggccgctaccactttgtgcctggaaccacagctgtcctgacccagacagtgaagccactaaccctggagctagtggaggaaactgtgcaggctatggaggtgga

SEQ ID NO: 26648 - DNA, 193 bp, Homo sapiens
  MAP TO CHR17.3; EXPRESSED IN BRAIN, SIGNAL = 3.3; EXPRESSED IN HEART, SIGNAL = 1.1; EST_HUMAN HIT: BG697132.1, EVALUE 1.00e-104; SWISSPROT HIT: P24708, EVALUE 1.10e+00; NT HIT: AF036241.1, EVALUE 1.00e-104
agctgaattcccaagacagccccccaaaacaggactccacagcgccctcgtctacctcctcctccgaccccatcctagacttcaacatctccctggccatggccaaagagagggcccaccagaaacgcagcagcaaacgggccccgcagatggactggagcaagaaaaacgaactcttcagcaacctctgagc

SEQ ID NO: 26649 - DNA, 103 bp, Homo sapiens
  MAP TO CHR1.3; EXPRESSED IN BRAIN, SIGNAL = 0.83; EXPRESSED IN LUNG, SIGNAL = 1.7; EXPRESSED IN HEART, SIGNAL = 0.67; EXPRESSED IN FETAL LIVER, SIGNAL = 0.94; EXPRESSED IN ADULT LIVER, SIGNAL = 1.1; NT HIT: AJ131016.1, EVALUE 2.00e-51; EST_HUMAN HIT: BG748872.1, EVALUE 1.00e-50; SWISSPROT HIT: Q13113, EVALUE 1.00e-04
acggctcctcctggcaccagaagtggttgactgcaaaggcgattgcaacgaggaccaggaacacggccaccgcgataaggccctgcatccagggctgaaggtt

SEQ ID NO: 26650 - DNA, 371 bp, Homo sapiens
  MAP TO CHR19.3; EXPRESSED IN HEART, SIGNAL =   1; EXPRESSED IN ADULT LIVER, SIGNAL = 0.96; NT HIT: gi14766572, EVALUE 0.00e+00; EST_HUMAN HIT: BG708202.1, EVALUE 0.00e+00; SWISSPROT HIT: P20916, EVALUE 4.00e-63
gactcactgacgatatccaggacgctgtgctctgagaaggtgtactggttgtagccgcccaggtccccacggaagtagtacttcccgcccagctcggggctgacgttgctgagcaggagggtgcagtttcgcaggcccaggtcccccaggaggcggctgcggccctggaagctctcgtggactacttgggtgcgcgacttgaagaccaccggggggtagttcttggggtaggggctattgaagtaccagacaccatgcaccacagcgggccgcagctcatccgggaagtcaaagcggcaggggatggagacgcacgtgccttcgaaggccgagatggacgagggcatccaggcaccccagtgaccccctcg

SEQ ID NO: 26651 - DNA, 107 bp, Homo sapiens
  MAP TO CHR19.3; EXPRESSED IN LUNG, SIGNAL =   2; EXPRESSED IN HEART, SIGNAL = 1.7; EXPRESSED IN ADULT LIVER, SIGNAL = 1.5; EXPRESSED IN BRAIN, SIGNAL = 1.9; NT HIT: gi14774829, EVALUE 1.00e-53; EST_HUMAN HIT: AV702929.1, EVALUE 2.00e-53; SWISSPROT HIT: P51522, EVALUE 2.00e-16
ggtttctctccggtatgaattctttgatgttgtgcaaggtgtgaaatttgattaaagaccttgccacattcattacatttatatggtttctctccagtatgaatcct

SEQ ID NO: 26652 - DNA, 133 bp, Homo sapiens
  MAP TO CHR19.3; EXPRESSED IN ADULT LIVER, SIGNAL =   1; EXPRESSED IN BRAIN, SIGNAL = 1.1; EXPRESSED IN LUNG, SIGNAL = 1.4; EXPRESSED IN HEART, SIGNAL = 1.2; NT HIT: gi14757261, EVALUE 2.00e-65; EST_HUMAN HIT: BG107810.1, EVALUE 6.00e-66; SWISSPROT HIT: P28282, EVALUE 2.00e+00
gaggaagaagatgtggagatgagtgaggacgcctacacggtgctgacccgcatcgggctggagacgtcactgcgctacgccatccagctcatcacagctgccagcttggtgtgccggaaacgcaaggtcagcc

SEQ ID NO: 26653 - DNA, 109 bp, Homo sapiens
  MAP TO CHR8.3; EXPRESSED IN HEART, SIGNAL = 1.6; EXPRESSED IN FETAL LIVER, SIGNAL = 0.64; EXPRESSED IN LUNG, SIGNAL = 1.9; EST_HUMAN HIT: N28924.1, EVALUE 6.00e-50; SWISSPROT HIT: Q9UPE1, EVALUE 4.00e-17; NT HIT: gi14752654, EVALUE 4.00e-50
aggtggctatcatccagtgaaaattgcagacctcttcaatggccggtatcatgttattagaaagcttggatgggggcacttctctactgtctggctgtgctgggatatg

SEQ ID NO: 26654 - DNA, 358 bp, Homo sapiens
  MAP TO CHR21.3; EXPRESSED IN HEART, SIGNAL = 0.77; EXPRESSED IN ADULT LIVER, SIGNAL = 0.7; EST_HUMAN HIT: BF000531.1, EVALUE 2.00e-31; NT HIT: gi14780362, EVALUE 0.00e+00; SWISSPROT HIT: Q14190, EVALUE 5.00e-61
tgcagcaatacagctcgttccaaatggacaaactggaatgcggccagctcggaaactggagagccagtccccctgcaagcgctgctgctcctccagaactgcagccccactcagaaagcagtgaccttctgtacacgccatcctacagcctgcccttctcctaccattacggacacttccctctggactctcacgtcttcagcagcaaaaagccaatgttgccggccaagttcgggcagccccaaggatccccttgtgaggtggcacgctttttcctgagcacactgccagccagcggtgaatgccagtggcattatgccaaccccctagtgcctagcagctcgtctccagctaaaaa

SEQ ID NO: 26655 - DNA, 112 bp, Homo sapiens
  MAP TO CHR2.3; EXPRESSED IN ADULT LIVER, SIGNAL = 0.59; EXPRESSED IN BRAIN, SIGNAL = 0.83; EXPRESSED IN HEART, SIGNAL = 0.91; SWISSPROT HIT: P10277, EVALUE 6.10e+00; EST_HUMAN HIT: BE047000.1, EVALUE 2.00e-56; NT HIT: gi4755133, EVALUE 1.00e-56
cagccctgtacagccaggtccagaagagcggggcctcagggagctgggactgtgggctctctagagtagggactgacaagactggggtcaagtcagagggctctacctgaga

SEQ ID NO: 26656 - DNA, 125 bp, Homo sapiens
  MAP TO CHR19.3; EXPRESSED IN ADULT LIVER, SIGNAL = 0.49; EXPRESSED IN HEART, SIGNAL = 0.55; EST_HUMAN HIT: AF150239.1, EVALUE 8.00e-59; NT HIT: gi8923786, EVALUE 2.00e-64; SWISSPROT HIT: Q14585, EVALUE 2.00e-15
catcaaagaattcatacaggtgaaaagccctacaaatgtaaggaatgtgacaaggcctttatttatggctcacaacttagtgaacatcagagaattcacagaggtgaaaaaccttatgaatgtaa

SEQ ID NO: 26657 - DNA, 260 bp, Homo sapiens
  MAP TO CHR4.3; EXPRESSED IN BRAIN, SIGNAL = 0.56; EXPRESSED IN HEART, SIGNAL = 0.71; EXPRESSED IN LUNG, SIGNAL = 0.95; EST_HUMAN HIT: AW951417.1, EVALUE 0.00e+00; NT HIT: X56416.1, EVALUE 0.00e+00; SWISSPROT HIT: P08319, EVALUE 8.00e-42
cctgcacagtcaagggcaaaatccacacctcccttggtcaattcaatgataacttcctggatcggtttatgtaagtctctaggattgaggcagtcagtggctcccagggctttagccttcacaaacttctcactgttgatgtcaatacctatgattctggaagctcctgctgctttacaacccattacagcagaaagacccacacctcctaggccaaagacagcacaagtcgaaccaggggtgacctgcaagcaggaaaa

SEQ ID NO: 26658 - DNA, 114 bp, Homo sapiens
  MAP TO CHR1.3; EXPRESSED IN ADULT LIVER, SIGNAL = 2.4; EXPRESSED IN BRAIN, SIGNAL = 1.8; EXPRESSED IN LUNG, SIGNAL = 7.2; EXPRESSED IN HEART, SIGNAL = 2.3; EST_HUMAN HIT: BF369833.1, EVALUE 1.00e-57; NT HIT: gi14732847, EVALUE 8.00e-58; SWISSPROT HIT: Q99062, EVALUE 2.00e-19
ccagaagatggtgtagtgggtaagggggctcttccccagctcagggggctcaggcacccactccagctgtgcccaggtcttgccaatgtgctttagatgcagctctggggcatg

SEQ ID NO: 26659 - DNA, 145 bp, Homo sapiens
  MAP TO CHR13.3; EXPRESSED IN HEART, SIGNAL = 0.8; EXPRESSED IN ADULT LIVER, SIGNAL = 0.49; EXPRESSED IN BRAIN, SIGNAL = 0.69; EST_HUMAN HIT: AV750843.1, EVALUE 6.00e-63; NT HIT: gi14754602, EVALUE 3.00e-76; SWISSPROT HIT: P97588, EVALUE 8.00e-25
gggttggggtgctgagtatcatcgccaggatgtcaccagcaccccctgctggattgagattcatcttcatgggccactgcagtggctggacaaagttctgactcagatgggctctccacataaccccatttcttcagtgtcttaa

SEQ ID NO: 26660 - DNA, 210 bp, Homo sapiens
  MAP TO CHR17.3; EXPRESSED IN ADULT LIVER, SIGNAL = 0.43; EXPRESSED IN HEART, SIGNAL = 0.55; SWISSPROT HIT: Q09199, EVALUE 4.00e-25; EST_HUMAN HIT: BI013237.1, EVALUE 4.30e+00; NT HIT: S83275.1, EVALUE 2.00e-96
agagaggaagctcagaaacctggttaccattgctaccaagactttcctccgcccccacaagctcatgatcatgctccggagtattcgagagtattacccagacttgaccgtaatagtggctgatgacagccagaagcccctggaaattaaagacaatcacgtggagtattacactatgcctttgggaaggtatgtccctctcagattggg

SEQ ID NO: 26661 - DNA, 150 bp, Homo sapiens
  MAP TO CHR11.3; EXPRESSED IN HEART, SIGNAL =   2; EXPRESSED IN BRAIN, SIGNAL = 1.6; EXPRESSED IN ADULT LIVER, SIGNAL = 1.6; EST_HUMAN HIT: BG203987.1, EVALUE 1.90e-01; NT HIT: AF121975.1, EVALUE 2.00e-31; SWISSPROT HIT: Q9H346, EVALUE 2.00e-10
tccatcccactctattcattctccttggcatcccaggactggagcaataccacatctggctttccattcctttctaccttatgtacatcactgcagtcttgggaaatggagccctcatcctagttgtcctcagtgaacacaccctccatg

SEQ ID NO: 26662 - DNA, 239 bp, Homo sapiens
  MAP TO CHR12.3; EXPRESSED IN BRAIN, SIGNAL = 1.3; EXPRESSED IN LUNG, SIGNAL =   1; EXPRESSED IN HEART, SIGNAL = 1.8; NT HIT: gi13654556, EVALUE 0.00e+00; SWISSPROT HIT: P21695, EVALUE 1.00e-40; EST_HUMAN HIT: AL539938.1, EVALUE 1.00e-130
aagaatgtagtggccgtgggggctggcttctgtgatggcctgggctttggcgacaacaccaaggcggcagtgatccggctgggactcatggagatgatagccttcgccaagctcttctgcagtggccctgtgtcctctgccaccttcttggagagctgtggtgttgctgacctgatcactacctgctatggagggcggaaccggaaagtggctgaggcctttgcgcgtacaggaaaggt

SEQ ID NO: 26663 - DNA, 136 bp, Homo sapiens
  MAP TO CHR19.3; EXPRESSED IN ADULT LIVER, SIGNAL = 0.96; EXPRESSED IN LUNG, SIGNAL = 1.8; EXPRESSED IN HEART, SIGNAL = 0.92; EST_HUMAN HIT: AW872942.1, EVALUE 4.00e-70; NT HIT: AJ001704.1, EVALUE 7.00e-71; SWISSPROT HIT: P49366, EVALUE 2.00e-19
cccacagcggaacggggccgactacgctgtttacatcaacacagcccaggagtttgatggctctgactcaggtgcccgaccagacgaggctgtctcctggggcaagatccgggtggatgcacagcccgtcaaggta

SEQ ID NO: 26664 - DNA, 126 bp, Homo sapiens
  MAP TO CHR12.3; EXPRESSED IN HEART, SIGNAL = 1.5; EXPRESSED IN FETAL LIVER, SIGNAL =   2; EST_HUMAN HIT: AL537744.1, EVALUE 2.00e-59; NT HIT: gi14758330, EVALUE 1.00e-59; SWISSPROT HIT: Q13438, EVALUE 3.00e-14
aagactcacccgaacctcggcctcccggggcctcccattaaggtcgcacttggacccattgccataggtctggctgtggtagcgtttaagacgatgctgcttggaggcctggagaagacatgaggc

SEQ ID NO: 26665 - DNA, 151 bp, Homo sapiens
  MAP TO CHR15.3; EXPRESSED IN HEART, SIGNAL = 0.96; EXPRESSED IN FETAL LIVER, SIGNAL = 1.1; EXPRESSED IN ADULT LIVER, SIGNAL = 1.2; EXPRESSED IN BRAIN, SIGNAL = 0.82; SWISSPROT HIT: P26440, EVALUE 2.00e-21; NT HIT: AF191215.1, EVALUE 9.00e-80; EST_HUMAN HIT: AL598222.1, EVALUE 5.00e-73
tgcccttaggaaatcactacatcctgaatggcaacaagttctggatcactaatggccctgatgctgacgtcctgattgtctatgccaagacagatctggctgctgtgccagcttctcggggcatcacagccttcattgtggagaaggtgag

SEQ ID NO: 26666 - DNA, 221 bp, Homo sapiens
  MAP TO CHR1.3; EXPRESSED IN HEART, SIGNAL = 0.56; EXPRESSED IN ADULT LIVER, SIGNAL = 0.5; EXPRESSED IN BRAIN, SIGNAL = 0.58; SWISSPROT HIT: P26374, EVALUE 1.00e-26; NT HIT: gi11422912, EVALUE 1.00e-121; EST_HUMAN HIT: AU123990.1, EVALUE 1.00e-121
tcaaagataatgtcttctggatttggaggtggagggcagaattcttcagttggaaagatctcctggaaaagtgtttcagcttgcttgacagcatgctcatttcccaggccacagtcaggcccagagcagacataaacattggaaggcaagccattatacgagcttctgctgattcccgaggaatctctcatattaaaataaagagcccacaagagtcttgg

SEQ ID NO: 26667 - DNA, 331 bp, Homo sapiens
  MAP TO CHR17.3; EXPRESSED IN BRAIN, SIGNAL = 2.7; EXPRESSED IN ADULT LIVER, SIGNAL = 2.3; EXPRESSED IN LUNG, SIGNAL = 4.5; EXPRESSED IN HEART, SIGNAL = 2.3; EST_HUMAN HIT: AU138848.1, EVALUE 1.00e-113; SWISSPROT HIT: P49213, EVALUE 4.10e+00; NT HIT: gi14775966, EVALUE 1.00e-52
ttttttaaatggctgtgcttatgattcaaaaagacctaattctgaaggcatttctggtcaattccagttgtttgccggatgctgtaatagttgattctcctaccgtgacccggctgttggtgcccgggttccctcccagcctgtagttgttgtaggcgagatgactgtatggattgtatcccacaaaccctggtgtgctgggcatttgctgatggaaacaaatgagacaaaaacacgaatgagaaatgagctcaaacgaggaaaacacagaaatgaaaaatgatctgcatatggcatgcaaaagcaacctgaatttaaacaagcaatgatg

SEQ ID NO: 26668 - DNA, 200 bp, Homo sapiens
  MAP TO CHRX.3; EXPRESSED IN LUNG, SIGNAL = 1.2; EXPRESSED IN HEART, SIGNAL = 2.1; EXPRESSED IN BRAIN, SIGNAL = 1.3; EST_HUMAN HIT: BI092461.1, EVALUE 2.00e-82; SWISSPROT HIT: Q9Z2C4, EVALUE 4.00e-25; NT HIT: AJ224979.1, EVALUE 1.00e-82
cttcttctttctccaacaccttacagggcttgccaaatgagagttggaaaatatccaaaataaacagtaattatgagttctgtgacacctaccctgccatcattgttgtgccaactagtgtaaaagatgatgacctttcaaaagtggcagcttttcgagcaaaaggcagagtccctgtaagtaataaacattgtcattta

SEQ ID NO: 26669 - DNA, 209 bp, Homo sapiens
  MAP TO CHR11.3; EXPRESSED IN HEART, SIGNAL = 0.56; EXPRESSED IN ADULT LIVER, SIGNAL = 0.71; EXPRESSED IN BRAIN, SIGNAL = 0.52; EXPRESSED IN FETAL LIVER, SIGNAL = 0.55; NT HIT: AJ289697.1, EVALUE 5.00e-11; SWISSPROT HIT: Q00193, EVALUE 2.00e-19; EST_HUMAN HIT: BE937265.1, EVALUE 7.00e-02
ctctccctgcagacgagaccttcagctcgtactatggggaggatgactatcccatcgtgaggctgctccgagaaccagtccatgtggaggtccggcttctgcagaggacagaccccaacctggtcctgctgctgcaccagtgctggggcgctcccagtgccaaccccttccagcagccccagtggcccatcctgtcagacgggtgagtg

SEQ ID NO: 26670 - DNA, 204 bp, Homo sapiens
  MAP TO CHR11.3; EXPRESSED IN FETAL LIVER, SIGNAL =   2; EXPRESSED IN ADULT LIVER, SIGNAL = 1.3; EXPRESSED IN BRAIN, SIGNAL = 1.1; EXPRESSED IN LUNG, SIGNAL = 1.7; EXPRESSED IN HEART, SIGNAL = 1.3; EST_HUMAN HIT: AU141318.1, EVALUE 2.00e-67; SWISSPROT HIT: O14773, EVALUE 7.00e-19; NT HIT: AF039704.1, EVALUE 1.00e-106
tccacacccttcccttccatacttacatcaaagagtcctgccccatgctgctggtagagccttgggttgagaaagccaagaggggggcggccactaaggatcctgtgctcattgatcaaggataggatccccccaaacactggagtagaggcctacaagagtgaaggtgcaagtagaggtcaggggttctgagtgattggactt

SEQ ID NO: 26671 - DNA, 108 bp, Homo sapiens
  MAP TO CHR11.3; EXPRESSED IN ADULT LIVER, SIGNAL = 6.9; EXPRESSED IN BRAIN, SIGNAL =  11; EXPRESSED IN LUNG, SIGNAL = 6.8; EXPRESSED IN HEART, SIGNAL =   8; EXPRESSED IN FETAL LIVER, SIGNAL = 3.5; EST_HUMAN HIT: AW601860.1, EVALUE 2.00e-50; NT HIT: gi14763695, EVALUE 3.00e-54
cagatcatgattctggaaggaggtggtgtaatgaatctcaaccccggcaacaacctccttcaccagccgccagcctggacagacagctactccacgtgcaatggtaag

SEQ ID NO: 26672 - DNA, 104 bp, Homo sapiens
  MAP TO CHR12.3; EXPRESSED IN FETAL LIVER, SIGNAL = 0.38; EXPRESSED IN BRAIN, SIGNAL = 0.51; EXPRESSED IN LUNG, SIGNAL = 0.49; EXPRESSED IN HEART, SIGNAL = 0.64; NT HIT: AF125948.1, EVALUE 2.00e-51; SWISSPROT HIT: P43351, EVALUE 3.00e-13; EST_HUMAN HIT: AV758969.1, EVALUE 4.00e-51
taccttctggcctccgccagccatgcggctacttatgtattctgggcccagcctctgcctcagggccttctggatggcctggtactcttctgctgtgtactggc

SEQ ID NO: 26673 - DNA, 187 bp, Homo sapiens
  MAP TO CHR2.3; EXPRESSED IN LUNG, SIGNAL = 0.75; EXPRESSED IN HEART, SIGNAL = 1.4; EXPRESSED IN FETAL LIVER, SIGNAL = 0.89; EXPRESSED IN ADULT LIVER, SIGNAL = 1.4; SWISSPROT HIT: Q62245, EVALUE 1.00e-24; EST_HUMAN HIT: BE005296.1, EVALUE 1.00e-86; NT HIT: gi15529995, EVALUE 8.00e-87
aaacacatgtagaaacctacctcaaatgtgtggtctagtctgtaaacaggtgatgaattcatagcactgacaacctcaaggacaccattaaagttgttcaactcttgaaagacttgtagaatctcaataattcgactcaccacagctactctttcttctaaattttcagtttctacaatacatctgg

SEQ ID NO: 26674 - DNA, 115 bp, Homo sapiens
  MAP TO CHR17.3; EXPRESSED IN HEART, SIGNAL = 2.3; EXPRESSED IN FETAL LIVER, SIGNAL = 4.6; EXPRESSED IN LUNG, SIGNAL = 2.1; NT HIT: gi16164077, EVALUE 2.00e-58; EST_HUMAN HIT: T15543.1, EVALUE 3.00e-58
tttggtcccctccctcgtgggcttgtgctcgggatcaaacctttctggcctgttatgattctgaacatttgacttgaaccacaagtgaatctttctcctggtgactcaaataaaa

SEQ ID NO: 26675 - DNA, 186 bp, Homo sapiens
  MAP TO CHR14.3; EXPRESSED IN LUNG, SIGNAL = 0.85; EXPRESSED IN HEART, SIGNAL = 1.5; SWISSPROT HIT: P05154, EVALUE 5.00e-29; EST_HUMAN HIT: AV647684.1, EVALUE 5.00e-98; NT HIT: AF361796.1, EVALUE 4.00e-98
agtgccatgaagacgctgtacctggcagacactttccctaccaactttagggactctgcaggggccatgaagcagatcaatgattatgtggcaaagcaaacgaagggcaagattgtggacttgcttaagaacctcgatagcaatgcggtcgtgatcatggtgaattacatcttctttaaaggtaag

SEQ ID NO: 26676 - DNA, 153 bp, Homo sapiens
  MAP TO CHR3.3; EXPRESSED IN HEART, SIGNAL = 0.69; EXPRESSED IN BRAIN, SIGNAL = 0.68; NT HIT: AF184110.1, EVALUE 6.00e-81; SWISSPROT HIT: P30414, EVALUE 3.00e-06; EST_HUMAN HIT: AA427983.1, EVALUE 2.00e-57
ctgatagatggagttattaggaacacaacttttagctctaccttcactgaagtccccaccctgaatcataaagtttttaaccacacgatggaacgtagaacctttataacataacttcttcccagttgttttcccaaggcctttctctcctgg

SEQ ID NO: 26677 - DNA, 195 bp, Homo sapiens
  MAP TO CHR22.3; EXPRESSED IN HEART, SIGNAL = 1.3; EXPRESSED IN ADULT LIVER, SIGNAL = 1.4; EXPRESSED IN BRAIN, SIGNAL = 4.2; EXPRESSED IN FETAL LIVER, SIGNAL = 2.3; EST_HUMAN HIT: AV686595.1, EVALUE 5.00e-98; NT HIT: gi16167524, EVALUE 2.00e-99; SWISSPROT HIT: P46196, EVALUE 2.00e-30
aaaaggatacacatctttcatttgctcgatggttggtgctcgaataatgtcattgattccaatgatgttctcatgtctgaagcgcagtaagatttttatctccctcagggttctctggcagtaggtctggtgctcaaaggggctgattttcttgatagctactcgaactttgttgacattatcataagcagagct

SEQ ID NO: 26678 - DNA, 146 bp, Homo sapiens
  MAP TO CHR3.3; EXPRESSED IN FETAL LIVER, SIGNAL = 3.4; EXPRESSED IN LUNG, SIGNAL = 4.8; EXPRESSED IN HEART, SIGNAL = 4.2; EXPRESSED IN BRAIN, SIGNAL = 2.4; SWISSPROT HIT: P21333, EVALUE 3.00e-21; EST_HUMAN HIT: BG749746.1, EVALUE 1.00e-76; NT HIT: gi4503746, EVALUE 8.00e-77
cctctctccaggccagggcctcctgcccgcaccttgtgggcgcctccttcaccaagtggccccacggtgaactggaaggggctgccggtgacgtgctgcccacggtacttgacgctgaccgtgtgcacgcccatctcctggggcac

SEQ ID NO: 26679 - DNA, 103 bp, Homo sapiens
  MAP TO CHR17.3; EXPRESSED IN HEART, SIGNAL = 1.2; EXPRESSED IN BRAIN, SIGNAL = 1.2; SWISSPROT HIT: P34810, EVALUE 1.00e-12; EST_HUMAN HIT: BI061874.1, EVALUE 3.00e-45; NT HIT: gi13651401, EVALUE 2.00e-45
tttagctttacctctcctccaccctgggttgtgtacatgactcgaatctgaatctgggcttggaggtggacacagggctgggaaccattggtccacgtgtagt

SEQ ID NO: 26680 - DNA, 118 bp, Homo sapiens
  MAP TO CHR9.3; EXPRESSED IN BRAIN, SIGNAL = 1.5; EXPRESSED IN LUNG, SIGNAL = 2.8; EXPRESSED IN HEART, SIGNAL = 0.64; EST_HUMAN HIT: BE045793.1, EVALUE 7.00e-59; NT HIT: gi14742065, EVALUE 3.00e-60; SWISSPROT HIT: P35030, EVALUE 1.00e-17
agtgcctggatgctccggtgctgacccaggctgagtgtaaagcctcctaccctggaaagattaccaacagcatgttctgtgtgggcttccttgagggaggcaaggattcctgccaggt

SEQ ID NO: 26681 - DNA, 132 bp, Homo sapiens
  MAP TO CHR5.3; EXPRESSED IN BRAIN, SIGNAL = 0.29; EXPRESSED IN HEART, SIGNAL = 0.75; NT HIT: gi15295129, EVALUE 3.00e-67; SWISSPROT HIT: P02805, EVALUE 7.90e-02; EST_HUMAN HIT: BG252822.1, EVALUE 4.00e-67
ctacctgtgtatattatcctggccagaagggactgcacctacattggctacatttacaaccttctgaaagatcacagagggagtgaaattctgtggtgcagcaatgattacagcagaagtttcattcattcc

SEQ ID NO: 26682 - DNA, 256 bp, Homo sapiens
  MAP TO CHR1.3; EXPRESSED IN LUNG, SIGNAL =  17; EXPRESSED IN HEART, SIGNAL = 5.2; EXPRESSED IN BRAIN, SIGNAL = 2.6; SWISSPROT HIT: O25136, EVALUE 2.50e+00; EST_HUMAN HIT: AV752858.1, EVALUE 0.00e+00; NT HIT: AB051901.1, EVALUE 0.00e+00
tacctgttggctggtcttccagaagaagcgtgtcttcatagcgcaggtactccgaagtctgtttgcactgctgggatccctgcatccaaagcactttagccactccgcaagccaggatcctaacggctttgacacgagtaacttcacacacctccactatcacccggccagccaccttctcgccactgccgtacaccttttcagggtcgttaaagaccacctcaaaagacttgatcttcttgaacatcaccatgat

SEQ ID NO: 26683 - DNA, 105 bp, Homo sapiens
  MAP TO CHR12.3; EXPRESSED IN HEART, SIGNAL =   1; EXPRESSED IN ADULT LIVER, SIGNAL = 0.75; EXPRESSED IN BRAIN, SIGNAL = 0.58; EST_HUMAN HIT: AA296894.1, EVALUE 2.00e-52; NT HIT: gi11435887, EVALUE 2.00e-52; SWISSPROT HIT: P41970, EVALUE 1.00e-12
cagttccccacactgcttaatggccacatgccagtgccaatccccagtctggacagagctgcttctccagtactgctttcttcaaactctcagaaatcctgatga

SEQ ID NO: 26684 - DNA, 131 bp, Homo sapiens
  MAP TO CHRX.3; EXPRESSED IN HEART, SIGNAL = 0.57; EXPRESSED IN ADULT LIVER, SIGNAL = 0.66; EXPRESSED IN FETAL LIVER, SIGNAL = 0.45; SWISSPROT HIT: P27918, EVALUE 3.00e-21; NT HIT: AF005666.1, EVALUE 6.00e-68; EST_HUMAN HIT: BG341989.1, EVALUE 1.00e-63
tcctcaccaggacagcactgctggtcctcacaggcctggagctgccactccagggtcccaggtgccacctttccagagcactgcccattccagcccacacagcgccggtaccgcagctgggagccctcaga

SEQ ID NO: 26685 - DNA, 257 bp, Homo sapiens
  MAP TO CHR3.3; EXPRESSED IN HEART, SIGNAL = 1.1; SWISSPROT HIT: P51114, EVALUE 8.00e-10; NT HIT: gi15294716, EVALUE 1.00e-112; EST_HUMAN HIT: AV705749.1, EVALUE 0.00e+00
aaggtacaaattctgagctgtctaacccctctgaaacggaatctgagcgtaaagacgagctgagtgattggtcattggcaggagaagatgatcgagacagccgacatcagcgtgacagcaggagacgcccaggaggaagaggcagaagtgtttcagggggtcgaggtcgtggtggaccacgtggtggcaaatcctccatcagttctggtagtcttttctatactctgtcagcatccattatttgtaaacagtttaat

SEQ ID NO: 26686 - DNA, 165 bp, Homo sapiens
  MAP TO CHR6.3; EXPRESSED IN HEART, SIGNAL = 0.56; EXPRESSED IN BRAIN, SIGNAL = 0.27; SWISSPROT HIT: Q16552, EVALUE 2.00e-22; NT HIT: Z58820.1, EVALUE 9.00e-71; EST_HUMAN HIT: BI599044.1, EVALUE 8.40e-01
tttcctcctgatttttctcccctctgcagccgcaatgaggaccctgagagatatccctctgtgatctgggaggcaaagtgccgccacttgggctgcatcaacgctgatgggaacgtggactaccacatgaactctgtccccatccagcaagagatcctggtcctg

SEQ ID NO: 26687 - DNA, 254 bp, Homo sapiens
  MAP TO CHR17.3; EXPRESSED IN LUNG, SIGNAL = 0.94; EXPRESSED IN HEART, SIGNAL = 0.96; EXPRESSED IN BRAIN, SIGNAL = 0.72; EXPRESSED IN ADULT LIVER, SIGNAL = 0.87; EST_HUMAN HIT: W92863.1, EVALUE 1.00e-87; SWISSPROT HIT: P11678, EVALUE 4.00e-43; NT HIT: M29912.1, EVALUE 0.00e+00
ccctgcagggtacaatgcttggaggcgcttctgtgggctctcccagccccggaatttggcacagcttagccgggtgctgaaaaaccaggacttggcaaggaagttcctgaatttgtatggaacacctgacaacattgacatctggattggggccatcgctgagcctcttttgccgggggctcgagtggggcctcttctggcttgtctgttcgagaaccagttcagaagagcccgagacggagacaggtaagtga

SEQ ID NO: 26688 - DNA, 138 bp, Homo sapiens
  MAP TO CHR17.3; EXPRESSED IN LUNG, SIGNAL = 0.75; EXPRESSED IN HEART, SIGNAL = 2.3; EXPRESSED IN FETAL LIVER, SIGNAL = 1.5; EXPRESSED IN BRAIN, SIGNAL = 0.68; EST_HUMAN HIT: BG996402.1, EVALUE 4.00e-70; SWISSPROT HIT: P14672, EVALUE 3.00e-20; NT HIT: gi4507010, EVALUE 5.00e-72
agccatgagctacgtctccattgtggccatctttggcttcgtggcattttttgagattggccctggccccattccttggttcatcgtggccgagctcttcagccagggaccccgcccggcagccatggctgtggctgg

SEQ ID NO: 26689 - DNA, 134 bp, Homo sapiens
  MAP TO CHR19.3; EXPRESSED IN BRAIN, SIGNAL = 2.9; EXPRESSED IN HEART, SIGNAL = 2.3; SWISSPROT HIT: P12660, EVALUE 2.00e-14; NT HIT: S40022.1, EVALUE 1.00e-26; EST_HUMAN HIT: BF222920.1, EVALUE 3.00e-58
gcttgtgtcgggggctgggggctgctgttccgacggaagccgagagcggtcgggtcctgaggggtgagcaggggttggggactgagggtcccagctcgtttctgtgctccgtcctgtggatgaagaggggtcag

SEQ ID NO: 26690 - DNA, 219 bp, Homo sapiens
  MAP TO CHR9.3; EXPRESSED IN HEART, SIGNAL = 0.78; SWISSPROT HIT: P47735, EVALUE 7.90e-01; NT HIT: gi16179752, EVALUE 1.00e-120; EST_HUMAN HIT: BG824773.1, EVALUE 1.00e-120
ccacctctctaccttaatattgacaggaaaccccatccagagtttagccctgggagccttttctggactatcaagtttacagaagctggtggctgtggagacaaatctagcatctctagagaacttccccattggacatctcaaaactttgaaagaacttaatgtggctcacaatcttatccaatctttcaaattacctgagtatttttctaatctgac

SEQ ID NO: 26691 - DNA, 147 bp, Homo sapiens
  MAP TO CHR14.3; EXPRESSED IN ADULT LIVER, SIGNAL = 0.6; EXPRESSED IN BRAIN, SIGNAL = 0.86; EXPRESSED IN HEART, SIGNAL = 0.59; EST_HUMAN HIT: BI828638.1, EVALUE 1.00e-61; NT HIT: gi9845292, EVALUE 7.00e-62
ttctctcccagacccagcctgctgcttcctaaccacctggccatgatggagaccctagaagatgctccagatcccttttttgggatgatgtctgtggatcccagacttcctagtcctttcgatatccctcaggtagggctcattccc

SEQ ID NO: 26692 - DNA, 210 bp, Homo sapiens
  MAP TO CHR21.3; EXPRESSED IN BRAIN, SIGNAL = 1.5; EXPRESSED IN LUNG, SIGNAL = 1.6; EXPRESSED IN HEART, SIGNAL = 1.4; NT HIT: D13318.1, EVALUE 1.00e-107; EST_HUMAN HIT: AI954742.1, EVALUE 1.00e-107; SWISSPROT HIT: Q06546, EVALUE 6.00e-33
tttctctttttgaagatattattacgatggggacatgatttgtaaagttcaaggcaagagatttgtgtacaagtttgtctgtgacttgaagactcttattggatacagtgcagcggagttgaaccgtttggtcacagaatgtgaacagaagaaacttgcaaagatgcagctccatggaattgcccagccagtcacagcagtagctctggc

SEQ ID NO: 26693 - DNA, 320 bp, Homo sapiens
  MAP TO CHR8.3; EXPRESSED IN HEART, SIGNAL = 2.6; EXPRESSED IN BRAIN, SIGNAL = 1.6; EXPRESSED IN ADULT LIVER, SIGNAL =   2; EST_HUMAN HIT: BG472166.1, EVALUE 4.40e-01; SWISSPROT HIT: P00540, EVALUE 2.00e-57; NT HIT: J00119.1, EVALUE 0.00e+00
ctgccgcgccggctggcctggtgctccattgactgggagcaggtgtgcttgctgcagaggctgggagctggagggtttggctcggtgtacaaggcgacttaccgcggtgttcctgtggccataaagcaagtgaacaagtgcaccaagaaccgactagcatctcggcggagtttctgggctgagctcaacgtagcaaggctgcgccacgataacatcgtgcgcgtggtggctgccagcacgcgcacgcccgcagggtccaatagcctagggaccatcatcatggagttcggtggcaacgtcactttacaccaagtcatcta

SEQ ID NO: 26694 - DNA, 128 bp, Homo sapiens
  MAP TO CHR18.3; EXPRESSED IN LUNG, SIGNAL = 1.2; EXPRESSED IN HEART, SIGNAL = 0.68; EXPRESSED IN FETAL LIVER, SIGNAL = 1.3; EXPRESSED IN BRAIN, SIGNAL = 0.88; EST_HUMAN HIT: BG724173.1, EVALUE 5.00e-60; NT HIT: AF120981.1, EVALUE 4.00e-66
agccccacaggagacaggatccgaagcaaagttgagctgactcgatacctgggccctgcgtgtgatctcaccctcttcgacttcaaacaaggcatcttgtgctatccagcccccaaggtacttcacaa

SEQ ID NO: 26695 - DNA, 239 bp, Homo sapiens
  MAP TO CHR6.3; EXPRESSED IN HEART, SIGNAL =   2; NT HIT: AF019413.1, EVALUE 0.00e+00; EST_HUMAN HIT: BF845207.1, EVALUE 1.00e-113; SWISSPROT HIT: P01028, EVALUE 4.00e-36
tagcctcagatccattggacactttaggctctgagggggccttgtcaccaggaggcgtggcctccctcttgaggcttcctcgaggctgtggggagcaaaccatgatctacttggctccgacactggctgcttcccgctacctggacaagacagagcagtggagcacactgcctcccgagaccaaggaccacgccgtggatctgatccagaaaggttctgggtgcaagggcaagcaggag

SEQ ID NO: 26696 - DNA, 162 bp, Homo sapiens
  MAP TO CHR8.3; EXPRESSED IN ADULT LIVER, SIGNAL = 0.7; EXPRESSED IN BRAIN, SIGNAL = 7.1; EXPRESSED IN LUNG, SIGNAL = 0.64; EXPRESSED IN HEART, SIGNAL = 0.77; EST_HUMAN HIT: AL534240.1, EVALUE 2.00e-85; SWISSPROT HIT: Q93045, EVALUE 5.00e-04; NT HIT: gi14740212, EVALUE 1.00e-85
taggagaggcatgctgcggaggtgcgcaggaacaaggaactccaggttgaactgtctggctgaagcaagggagggtctggcacgccccaccaatagtaaatccccctgcctatattataatggatcatgcgatatcaggatggggaatgtatgacatggttt

SEQ ID NO: 26697 - DNA, 396 bp, Homo sapiens
  MAP TO CHR9.3; EXPRESSED IN LUNG, SIGNAL = 0.85; EXPRESSED IN HEART, SIGNAL = 1.4; EXPRESSED IN FETAL LIVER, SIGNAL = 0.74; EXPRESSED IN BRAIN, SIGNAL = 0.84; NT HIT: gi12734963, EVALUE 0.00e+00; SWISSPROT HIT: P05013, EVALUE 3.00e-73; EST_HUMAN HIT: BI335502.1, EVALUE 6.00e-10
gatttctgctctgacaacctcccaggcacaagggctgtactttttctctgtcaggtagagagtgattctttggaagtattttctcacagccaggatggagtcctcattcatcaggggagtccctcccacccacacctcctgcatcacacaggcttccaggtcattcagctgctggtaaagttcagtatagagtttgtctagaagcctctcatcccaagcaacagatgagtcctttgtgctgaagaggttgaaggtctgctgaatcacctcatggaggacagagatggcttcagccttctggaactggttgccatcaaactcctcctggggaaatctgaagtcatgtctgtccttcagacaggagaaaagagagattctcctcatttgtgccaggag

SEQ ID NO: 26698 - DNA, 300 bp, Homo sapiens
  MAP TO CHR11.3; EXPRESSED IN HEART, SIGNAL = 0.52; EXPRESSED IN BRAIN, SIGNAL = 0.53; NT HIT: gi7305340, EVALUE 2.00e-39; SWISSPROT HIT: Q95155, EVALUE 4.00e-17; EST_HUMAN HIT: BF972452.1, EVALUE 4.10e-01
agagaaactagagcttggacatacacagataaagaagagtgtcccatacaggatggagacagccatcaggtgtgaagagcaagtggagaagtctttgcgtctcgcgtcagcagagcgaattctcaggatggcaatgacaatgtaaatgtaggagaccaagatgatcacaccactgagtactcccagggcacccaccaagataaaaagtaaacatttattaatatgggtatctgcatatgccagggagaggacagggagaaggtcacagaagaagtgattgatgatgtttggaccacagta

SEQ ID NO: 26699 - DNA, 163 bp, Homo sapiens
  MAP TO CHR6.3; EXPRESSED IN ADULT LIVER, SIGNAL = 1.1; EXPRESSED IN HEART, SIGNAL = 1.1; SWISSPROT HIT: O95865, EVALUE 8.00e-25; EST_HUMAN HIT: AW167034.1, EVALUE 2.00e-78; NT HIT: AJ012008.1, EVALUE 7.00e-87
ccctctctcacctcctggctgttgggcagatccccacctccacggtgcaggaggaaagggggcacaccaggcaacccaggacgaagaaagagacagtcagcagctgcgtcatctgggagggtcagggaggcatatgggtgatctgtcagcactgccattgcct

SEQ ID NO: 26700 - DNA, 123 bp, Homo sapiens
  MAP TO CHR4.3; EXPRESSED IN HEART, SIGNAL = 0.79; EXPRESSED IN ADULT LIVER, SIGNAL =   1; EXPRESSED IN FETAL LIVER, SIGNAL = 0.94; EXPRESSED IN BRAIN, SIGNAL = 0.63; NT HIT: AB056160.1, EVALUE 4.00e-63; SWISSPROT HIT: Q13257, EVALUE 6.00e-17; EST_HUMAN HIT: BG613007.1, EVALUE 2.00e-59
tcttttgcagtcttgtcacactcaatatcaaactgccatctttccaggacctcaccactttcaatatttgagataactacaaccagtttctgaactgaacacttgtataaccaatctgcaaca

SEQ ID NO: 26701 - DNA, 124 bp, Homo sapiens
  MAP TO CHR1.3; EXPRESSED IN LUNG, SIGNAL = 0.72; EXPRESSED IN HEART, SIGNAL = 0.88; EXPRESSED IN ADULT LIVER, SIGNAL = 0.73; EXPRESSED IN FETAL LIVER, SIGNAL =   1; NT HIT: gi14743559, EVALUE 1.00e-62; SWISSPROT HIT: P46494, EVALUE 7.90e+00; EST_HUMAN HIT: BG829935.1, EVALUE 2.00e-62
gtacctgtgagtttccacttccagccaaaagctggatcatctgctgcatgagttgctgctgggcgctggaagcccctgttggagaagatgtggctggcgtggctggtgaggaagtgggggcctc

SEQ ID NO: 26702 - DNA, 149 bp, Homo sapiens
  MAP TO CHR11.3; EXPRESSED IN HEART, SIGNAL =  13; EXPRESSED IN FETAL LIVER, SIGNAL =  32; SWISSPROT HIT: P07339, EVALUE 4.00e-24; EST_HUMAN HIT: BE018860.1, EVALUE 8.00e-78; NT HIT: M63138.1, EVALUE 1.00e-78
caggtgtcgcaggccgggaagaccctctgcctgagcggcttcatgggcatggacatcccgccacccagcgggccactctggatcctgggcgacgtcttcatcggccgctactacactgtgtttgaccgtgacaacaacagggtgggctt

SEQ ID NO: 26703 - DNA, 390 bp, Homo sapiens
  MAP TO CHR6.3; EXPRESSED IN HEART, SIGNAL = 3.3; EXPRESSED IN ADULT LIVER, SIGNAL = 4.7; EXPRESSED IN BRAIN, SIGNAL = 6.1; SWISSPROT HIT: P02262, EVALUE 3.00e-54; EST_HUMAN HIT: BG109927.1, EVALUE 0.00e+00; NT HIT: gi16174434, EVALUE 0.00e+00
cccttagctttgtggtggctctcagtcttcttggggagcagtacggcctggatgttaggcagaacaccgccctgagcgatggtaactttaccaagcagcttgttgagctcctcgtcgttgcggatggccagctgcaagtggcgcgggatgatgcgggtctttttgttgtcgcgggctgcgttgcccgccagctccaggatctcggcagttaggtactccagcaccgccgccaggtaaaccggcgcgccggccccgacccgctcagcgtagttgcccttgcggagcaggcggtgcactcgtcctacaggaaattggagcccagctctagaggagcgggttttggccttggcgcgagccttgccgccctgcttgccacgtccagacatggta

SEQ ID NO: 26704 - DNA, 205 bp, Homo sapiens
  MAP TO CHR4.3; EXPRESSED IN HEART, SIGNAL =   1; EXPRESSED IN BRAIN, SIGNAL = 0.52; SWISSPROT HIT: O14967, EVALUE 2.00e-35; EST_HUMAN HIT: BE881542.1, EVALUE 1.00e-105; NT HIT: gi14723386, EVALUE 1.00e-106
tctttgaaggaaaacttttatgataaaacatcctatatcattatgtttggaccagataaatgtggagaagattataaacttcattttatcttcagacataaacatcccaaaactggagttttcgaagagaaacatgccaaacctccagatgtagaccttaaaaagttctttacagacaggaagactcatctttatacccttggta

SEQ ID NO: 26705 - DNA, 168 bp, Homo sapiens
  MAP TO CHR22.3; EXPRESSED IN HEART, SIGNAL = 1.6; EXPRESSED IN ADULT LIVER, SIGNAL = 1.4; SWISSPROT HIT: P53261, EVALUE 3.00e-06; EST_HUMAN HIT: BE792081.1, EVALUE 1.00e-89; NT HIT: gi13648038, EVALUE 7.00e-90
gcagggcacgggcagcgataatgtagtgcatgaactccacagtgagccggcggcacagctgaatggtctgcacgtggcacttgccagtccgcgggaaggtggaaaacaggaagcacatggagagggcatcgtccaggtcccgcagggcatcgatgaacgtgggatacc

SEQ ID NO: 26706 - DNA, 151 bp, Homo sapiens
  MAP TO CHR4.3; EXPRESSED IN HEART, SIGNAL = 0.59; EXPRESSED IN ADULT LIVER, SIGNAL = 0.57; EXPRESSED IN BRAIN, SIGNAL = 0.55; EST_HUMAN HIT: AW605378.1, EVALUE 2.00e-72; NT HIT: gi16158478, EVALUE 9.00e-80; SWISSPROT HIT: P12104, EVALUE 1.00e-21
gttccgtctgctagattgtaattaaaggtgacaccaagttcaaaaacaacttcaatgtttcgaaaagtgcttgattctttgactgtgaatttatttccttcttgtgtaattgtcagcttcaaattgtcatgagctgcaagcttccttttca

SEQ ID NO: 26707 - DNA, 160 bp, Homo sapiens
  MAP TO CHR5.3; EXPRESSED IN HEART, SIGNAL = 1.9; EXPRESSED IN FETAL LIVER, SIGNAL = 3.4; NT HIT: gi14726420, EVALUE 2.00e-77; SWISSPROT HIT: P34991, EVALUE 1.00e-12; EST_HUMAN HIT: BF573888.1, EVALUE 5.00e-79
taccagaatgagttcaaaaagtgttccttggtcaactttcaggaattcttggtcccaaacagggatatcatctgttcgcttttctttgttctcatcatcttcaggaggaggagggtcatccttgtggtgggtgcaccactgaatgacctacaacaacaaa

SEQ ID NO: 26708 - DNA, 120 bp, Homo sapiens
  MAP TO CHR17.3; EXPRESSED IN LUNG, SIGNAL = 0.57; EXPRESSED IN HEART, SIGNAL = 0.67; NT HIT: gi14775011, EVALUE 2.00e-61; SWISSPROT HIT: O76013, EVALUE 6.10e-02; EST_HUMAN HIT: AL582205.1, EVALUE 3.70e-02
agcttgcaagagctgctggagtacattgcggacacacgagtggagcccccactggcccctcctgggctcttgagagacccagaagagaagccggccttgaggcatttggaagccatggcc

SEQ ID NO: 26709 - DNA, 394 bp, Homo sapiens
  MAP TO CHR6.3; EXPRESSED IN BRAIN, SIGNAL = 1.6; EXPRESSED IN LUNG, SIGNAL = 0.95; EXPRESSED IN HEART, SIGNAL = 1.4; EST_HUMAN HIT: AW889671.1, EVALUE 6.00e-84; NT HIT: gi5454177, EVALUE 0.00e+00; SWISSPROT HIT: Q15776, EVALUE 6.00e-80
cagagaatccacactggggagaagccatatcagtgcaatcagtgtgggaaggctttcagtcagagtgcgggccttattctgcaccagagaatccacagtggagagagaccctatgaatgtaatgagtgtgggaaagctttcagtcatagctcacacctcattggacatcagagaatccacactggggagaagccctatgagtgtgatgagtgtgggaaaaccttcaggcggagctcacatcttattggtcatcagaggagccacactggggagaaaccctacaaatgcaatgagtgtgggagggccttcagtcagaagtcaggccttattgaacatcagagaatccacactggagaaagaccctataaatgtaaagaatgtgggaaagctttca

SEQ ID NO: 26710 - DNA, 280 bp, Homo sapiens
  MAP TO CHR21.3; EXPRESSED IN FETAL LIVER, SIGNAL = 1.2; EXPRESSED IN ADULT LIVER, SIGNAL = 1.3; EXPRESSED IN HEART, SIGNAL = 0.88; EST_HUMAN HIT: BE275670.1, EVALUE 0.00e+00; NT HIT: gi16166502, EVALUE 0.00e+00; SWISSPROT HIT: O60318, EVALUE 4.00e-50
taccccccaggggtggaaggtccatctgcggaagctggaacccgagcacagcctgcttcagccaggccaggtgctctggggcattccagtgcaggtgaggaagcagccggctgccccctgcctcagcaaactcagtgacaggccaggacaggtcacacagctgttcagaggacaccacagaagccaggaactgcagcacactgttaaacagctcaatgatggcgccaggctcctgagaagcaagaccgcccagacgcctctctcttctgtcatggaaaaa

SEQ ID NO: 26711 - DNA, 162 bp, Homo sapiens
  MAP TO CHR6.3; EXPRESSED IN HEART, SIGNAL = 2.7; EXPRESSED IN BRAIN, SIGNAL = 0.91; EXPRESSED IN LUNG, SIGNAL = 6.8; SWISSPROT HIT: O00299, EVALUE 9.00e-26; EST_HUMAN HIT: AW384438.1, EVALUE 4.00e-86; NT HIT: AF129756.1, EVALUE 3.00e-86
atttgagggcctttgccacttgctcataggcgagctcgatctcctcatcatctggacaggtggaagcgaattcttcccgggcgtaggcattgctcaagtaccgatgcactccccggaaggcctcggggatggtgaatccccggtacttcttacacaccacct

SEQ ID NO: 26712 - DNA, 129 bp, Homo sapiens
  MAP TO CHR2.3; EXPRESSED IN HEART, SIGNAL = 5.7; EXPRESSED IN FETAL LIVER, SIGNAL =   1; EXPRESSED IN ADULT LIVER, SIGNAL = 1.9; NT HIT: L27558.1, EVALUE 1.00e-66; SWISSPROT HIT: P24593, EVALUE 3.00e-19; EST_HUMAN HIT: H26773.1, EVALUE 3.00e-61
gtacctgctttctcttgtagaatcctttgcggtcacaattgggcaggtacacagcacggggcaccatgcgtgggctggctttgagctcctgcagggaagcctccatgtgtctgcggcaggggccctgtg

SEQ ID NO: 26713 - DNA, 206 bp, Homo sapiens
  MAP TO CHR6.3; EXPRESSED IN BRAIN, SIGNAL = 2.1; EXPRESSED IN LUNG, SIGNAL = 2.2; EXPRESSED IN HEART, SIGNAL = 2.1; EXPRESSED IN ADULT LIVER, SIGNAL = 2.1; EST_HUMAN HIT: BG283399.1, EVALUE 1.00e-98; NT HIT: gi7661777, EVALUE 1.00e-98; SWISSPROT HIT: Q12968, EVALUE 2.50e+00
ggttcgcagccctgtcaaccagctccgagccggcagcgaaacctgaagtggaccctgtggaaaatgaagctgtcgccccagaattcaccaaccggaacccccggaacctggagcttttatctgtagccaggaaagagcggggctggcggacggtgtttccctcccgtgagttctggcacaggtaattaaatctgcttgtgattgac

SEQ ID NO: 26714 - DNA, 165 bp, Homo sapiens
  MAP TO CHR1.3; EXPRESSED IN BRAIN, SIGNAL =   2; EXPRESSED IN HEART, SIGNAL = 0.66; SWISSPROT HIT: Q04637, EVALUE 7.00e-26; EST_HUMAN HIT: BF970120.1, EVALUE 4.00e-86; NT HIT: gi14733851, EVALUE 3.00e-86
tacctttgctttttcaaagtccaagtctttgccaatggtggtgagcaggcgacacaggcactccagggattcttcatcatggttctttagcagcttcaccacacagtcatgcatgatggcttcagtcagcattttgagtttaaagagttctccaataaacttgat

SEQ ID NO: 26715 - DNA, 193 bp, Homo sapiens
  MAP TO CHR3.3; EXPRESSED IN FETAL LIVER, SIGNAL = 1.3; EXPRESSED IN HEART, SIGNAL = 1.4; NT HIT: AF017306.1, EVALUE 4.00e-95; SWISSPROT HIT: Q13107, EVALUE 3.00e-29; EST_HUMAN HIT: BE894900.1, EVALUE 5.00e-95
tgttctgtttcagtgtttgagcaacactgcaccactgactgactactttctcaaagatgagtatgaagccgaaatcaacagagacaaccctctggggatgaaaggggaaattgcagaagcctatgctgaactcattaagcagatgtggtctggaagggacgcccatgtggcacctcgcatgttcaaagtaggt

SEQ ID NO: 26716 - DNA, 135 bp, Homo sapiens
  MAP TO CHR10.3; EXPRESSED IN ADULT LIVER, SIGNAL = 0.62; EXPRESSED IN BRAIN, SIGNAL = 2.7; EXPRESSED IN HEART, SIGNAL = 0.78; SWISSPROT HIT: Q16352, EVALUE 2.00e-08; EST_HUMAN HIT: AW157597.1, EVALUE 4.00e-70; NT HIT: gi14249341, EVALUE 3.00e-70
ttacaggaaactgctggaaggcgaggagacacgttttagcaccagtgggttaagcatttcggggctgaatccacttcccaatccaagttacctgctcccacctagaatcctcagtgctacaacctccaaagtctc

SEQ ID NO: 26717 - DNA, 112 bp, Homo sapiens
  MAP TO CHRX.3; EXPRESSED IN BRAIN, SIGNAL = 1.5; EXPRESSED IN LUNG, SIGNAL = 4.5; EXPRESSED IN HEART, SIGNAL = 2.9; NT HIT: Z68129.1, EVALUE 1.00e-56; SWISSPROT HIT: P51571, EVALUE 4.00e-14; EST_HUMAN HIT: AW960621.1, EVALUE 2.00e-56
cagggcacttggaacgggccctgggtgtccactgaggtgctggctgcggcgatcggccttgtgatctactacttggccttcagtgcgaagagccacatccaggcctgagggc

SEQ ID NO: 26718 - DNA, 208 bp, Homo sapiens
  MAP TO CHR10.3; EXPRESSED IN HEART, SIGNAL = 2.2; EXPRESSED IN ADULT LIVER, SIGNAL = 2.6; EXPRESSED IN BRAIN, SIGNAL = 4.3; SWISSPROT HIT: Q91998, EVALUE 1.90e+00; EST_HUMAN HIT: BF207634.1, EVALUE 1.00e-101; NT HIT: AJ277073.1, EVALUE 1.00e-113
gtaccttacctttctcaatataattcttgggggcccaagcaggatccccatctgcatatggatcattatactgaactactgcagcctcctcatcttcataatccactggtggtggtggtgggggaggtggagagtcatcaaacatgggaatgtcatctggtggaggtggtggcggtggagttggactatcagcaactaaaaagattca

SEQ ID NO: 26719 - DNA, 218 bp, Homo sapiens
  MAP TO CHR4.3; EXPRESSED IN FETAL LIVER, SIGNAL =  21; EXPRESSED IN LUNG, SIGNAL =  24; EXPRESSED IN HEART, SIGNAL =  18; NT HIT: X87373.1, EVALUE 1.00e-119; SWISSPROT HIT: P97351, EVALUE 8.00e-35; EST_HUMAN HIT: AA348873.1, EVALUE 1.00e-114
cacttacaatttattgaccacttctttcaagtcatttgtctgcacctctcgggtcatgatttccatcatcttcttccggatttggcggacctgttggtgctgagcataagaggtcttccgtatctgattgttgcgttttttagtaaaaccaacacagaacagacgaagcaagtaaccatcggtagtcttgacatcaacgtgagcttcaatcattgtct

SEQ ID NO: 26720 - DNA, 250 bp, Homo sapiens
  MAP TO CHR21.3; EXPRESSED IN BRAIN, SIGNAL = 3.1; EXPRESSED IN LUNG, SIGNAL = 3.8; EXPRESSED IN HEART, SIGNAL = 2.1; NT HIT: gi14780245, EVALUE 0.00e+00; SWISSPROT HIT: P22102, EVALUE 7.00e-43; EST_HUMAN HIT: BE746599.1, EVALUE 0.00e+00
gtttacctaaagtctggtcaccacaaccatcaggtgctggagaggagtactggagggaagattttgccacgattttcctcacaaggctaaatccattgctatgaagaccagatgaagctattccaacaacaacatcaccctcagtgattctttccaggtgagggagtttctgatctcgctccatggcaccaacggcaaacccagctaggtcatactctccagggggatacatgtcaggcatttctgctgt

SEQ ID NO: 26721 - DNA, 225 bp, Homo sapiens
  MAP TO CHR9.3; EXPRESSED IN LUNG, SIGNAL = 1.5; EXPRESSED IN HEART, SIGNAL =   2; EXPRESSED IN ADULT LIVER, SIGNAL = 1.8; EXPRESSED IN BRAIN, SIGNAL =   2; EST_HUMAN HIT: AL560564.1, EVALUE 1.00e-123; NT HIT: gi14735005, EVALUE 1.00e-124; SWISSPROT HIT: Q15528, EVALUE 1.00e-22
cgagccggcgagtccctgatgaagctggtgtccgacctcaagcagttcctgatcctcaatgacttcccctccgtgaacgaggccattgaccagcgcaaccagcagctgcgcacactgcaggaggagtgcgaccggaagctcatcacgctgcgagacgagatctccattgacctctacgagctggaggaggagtattactcgtccaggtataaatagcgctggact

SEQ ID NO: 26722 - DNA, 127 bp, Homo sapiens
  MAP TO CHR19.3; EXPRESSED IN BRAIN, SIGNAL = 1.5; EXPRESSED IN FETAL LIVER, SIGNAL = 1.2; EXPRESSED IN LUNG, SIGNAL = 0.86; EXPRESSED IN HEART, SIGNAL = 1.3; NT HIT: U09412.1, EVALUE 2.00e-65; SWISSPROT HIT: P52741, EVALUE 1.00e-20; EST_HUMAN HIT: AA206670.1, EVALUE 8.00e-22
cacttataaggcatttctccagtgtggattctcttgtgctgagtaaggttgtcttttcgactgaaggtttttccacattcgctgcattcataaggcctttctccagtatggattctctgatgctgga

SEQ ID NO: 26723 - DNA, 125 bp, Homo sapiens
  MAP TO CHR1.3; EXPRESSED IN LUNG, SIGNAL = 3.3; EXPRESSED IN HEART, SIGNAL = 3.4; EXPRESSED IN ADULT LIVER, SIGNAL =   4; EXPRESSED IN BRAIN, SIGNAL = 4.4; EST_HUMAN HIT: BG011141.1, EVALUE 8.00e-62; NT HIT: gi16165125, EVALUE 9.00e-61; SWISSPROT HIT: P28070, EVALUE 2.00e-16
ctcacccggttgtaagaacgggcatctcggtagtacagcactcgcatgcagcgttctactaagtcgcgggcctcggtctggcttagcactggctgcttctccagaacttctcgcagcagaggcta

SEQ ID NO: 26724 - DNA, 330 bp, Homo sapiens
  MAP TO CHR14.3; EXPRESSED IN HEART, SIGNAL = 0.55; EXPRESSED IN ADULT LIVER, SIGNAL = 0.77; EXPRESSED IN BRAIN, SIGNAL = 0.61; EST_HUMAN HIT: BI256170.1, EVALUE 0.00e+00; NT HIT: M83230.1, EVALUE 0.00e+00; SWISSPROT HIT: P22735, EVALUE 1.00e-28
cctggggagctgctctgtagtgtgcccctatcttggggcaatgtccttgctcatctgactccagtcccattgctcctggcacggggctaagctccacctcgagatgccatagggatggtctctcctaagtgactgtcacctccagcgtctgagaagaagcccccatccccaggggctggggccacatccacctggatgacaccgtgcacctgggagagctgtgggctgtccaagctggcaatgagctggcgggggcctggtcgcacaggcacaaacgactggcgcagtgtcactgtttcattgcctccaatgtccctgtgggcagagaca

SEQ ID NO: 26725 - DNA, 155 bp, Homo sapiens
  MAP TO CHR3.3; EXPRESSED IN LUNG, SIGNAL = 1.6; EXPRESSED IN HEART, SIGNAL = 2.1; EXPRESSED IN BRAIN, SIGNAL = 1.9; NT HIT: X65147.1, EVALUE 4.00e-82; SWISSPROT HIT: P09110, EVALUE 7.00e-22; EST_HUMAN HIT: BG488742.1, EVALUE 2.00e-75
ccacggcgcttcagctcattgagcagcgtgatgacctgtcgtgccccagtgcagcccagtgggtgccctaaggccactgcaccccccagggggttcaccttctcaggggggagtcgtagcttctccacacagtaggcagcctggaaggaggcaga

SEQ ID NO: 26726 - DNA, 133 bp, Homo sapiens
  MAP TO CHR11.3; EXPRESSED IN LUNG, SIGNAL = 1.4; EXPRESSED IN HEART, SIGNAL = 1.3; EXPRESSED IN ADULT LIVER, SIGNAL = 1.3; EXPRESSED IN BRAIN, SIGNAL =   2; EXPRESSED IN FETAL LIVER, SIGNAL = 2.6; NT HIT: gi14766996, EVALUE 2.00e-64; SWISSPROT HIT: P54105, EVALUE 3.00e-18; EST_HUMAN HIT: AI206937.1, EVALUE 4.00e-64
aaccctacctctcagcgatgtaaagggtaccagtgccgaggcccttcccgttcagcacagcctcagtgtctggctgctgccgcaggagcccctccgctggcccaggcggcgggaaacttttgaggaagctcat

SEQ ID NO: 26727 - DNA, 277 bp, Homo sapiens
  MAP TO CHR6.3; EXPRESSED IN FETAL LIVER, SIGNAL = 0.91; EXPRESSED IN ADULT LIVER, SIGNAL = 0.67; EXPRESSED IN BRAIN, SIGNAL = 0.86; EXPRESSED IN HEART, SIGNAL = 0.68; NT HIT: gi14782806, EVALUE 0.00e+00; SWISSPROT HIT: O15211, EVALUE 1.00e-26; EST_HUMAN HIT: AA640291.1, EVALUE 0.00e+00
tctctctcacctctgccacgcggatccacttctccaggagccgggccctctgtgggggacggagtggccgtatggtcacctccccaggtccctctccagtggaagtagcccccaggacagaactaaccactgcccctgccaccttgttaaactgtgtgacagtagctcggacagatgggcagaggtgagaatgtcctggccggtctctgtgaccccacaggcctcccaggcactgagaggggatcaaattgagaaaaagttcctgcagggtagaggt

SEQ ID NO: 26728 - DNA, 262 bp, Homo sapiens
  MAP TO CHR1.3; EXPRESSED IN HEART, SIGNAL = 2.4; EXPRESSED IN BRAIN, SIGNAL = 1.8; NT HIT: gi14742457, EVALUE 1.00e-104; SWISSPROT HIT: P35590, EVALUE 7.00e-22; EST_HUMAN HIT: AI124668.1, EVALUE 1.00e-102
cactgaccgagcctgactggtaggtgaaggtgcgtctccgatgcaggcagcttctgcggatgcacaccagggttaaaagggcagccaggatggtgaggcaggtggcagacacggagcccaccaccgccaggatcagctgctgatccaggccctcttcagctgcccggctctcttggactgggccctcagcctgcagccctggacacagtgagaggggcagattgtggggacacctgggtcagggaacccagaggccaccatg

SEQ ID NO: 26729 - DNA, 152 bp, Homo sapiens
  MAP TO CHRX.3; EXPRESSED IN FETAL LIVER, SIGNAL = 9.9; EXPRESSED IN BRAIN, SIGNAL =  10; EXPRESSED IN HEART, SIGNAL = 2.8; NT HIT: K03201.1, EVALUE 2.00e-80; EST_HUMAN HIT: H40269.1, EVALUE 3.00e-80
caagattcagctagtggccaagagatgcagtgccaggaacccttaaacagttgcacagcatctcagctcatctttactgcaccctggatttgcctacattcttcaagatcccatttgaatttcttagtgactaaaccattgtgcattctaga

SEQ ID NO: 26730 - DNA, 174 bp, Homo sapiens
  MAP TO CHR12.3; EXPRESSED IN ADULT LIVER, SIGNAL = 0.73; EXPRESSED IN BRAIN, SIGNAL = 1.5; EXPRESSED IN HEART, SIGNAL =   1; EST_HUMAN HIT: AW965615.1, EVALUE 2.00e-79; NT HIT: D43704.1, EVALUE 2.00e-93; SWISSPROT HIT: P54286, EVALUE 6.00e-14
tgcccactggaaatggttacctgaagtccggggatggcactgggaggacccagaagtccggggccaggggctgggtggtgcgtggcccgccagtaaacctccaggtactcagccaggtgctcacaggcatcctccagctggttctcatccagaatcacatcaaatgactcctgg

SEQ ID NO: 26731 - DNA, 173 bp, Homo sapiens
  MAP TO CHR12.3; EXPRESSED IN HEART, SIGNAL = 0.88; EXPRESSED IN BRAIN, SIGNAL = 2.1; EST_HUMAN HIT: BI906691.1, EVALUE 1.00e-92; NT HIT: AF304052.1, EVALUE 8.00e-93; SWISSPROT HIT: Q03386, EVALUE 1.70e-01
tcttcctaccccacagaatgttttctctgcccttcaggcagcctgagccgggcagggcccctgcctctgctacggcagcccccgatcatgcagcccccactggacctcaagcagatcctgcccttcccactcgagccagcccctacccttggcctcttcagcaactacagcac

SEQ ID NO: 26732 - DNA, 236 bp, Homo sapiens
  MAP TO CHR9.3; EXPRESSED IN HEART, SIGNAL = 0.95; EXPRESSED IN BRAIN, SIGNAL = 1.6; NT HIT: AF078867.1, EVALUE 1.00e-103; SWISSPROT HIT: O15260, EVALUE 3.00e-33; EST_HUMAN HIT: BE396641.1, EVALUE 1.00e-123
gcagccacctcacccttgggtttctgtggccctgcagttcctccgtgtcacaaagcagtacctgccccacgtggcgcgcctctgtctgatcagcaccttcctggaggacggcatccgtatgtggttccagtggagcgagcagcgcgactacatcgacaccacctggaactgcggctacctgctggcctcgtccttcgtcttcctcaacttgctgggacagctgagtgagtggctct

SEQ ID NO: 26733 - DNA, 114 bp, Homo sapiens
  MAP TO CHRX.3; EXPRESSED IN HEART, SIGNAL = 5.1; EXPRESSED IN FETAL LIVER, SIGNAL = 8.4; EXPRESSED IN ADULT LIVER, SIGNAL = 9.9; NT HIT: gi14762358, EVALUE 8.00e-58; SWISSPROT HIT: O95916, EVALUE 1.00e-16; EST_HUMAN HIT: BG575048.1, EVALUE 7.00e-53
tgcggataggatagggggcgtaatctgtcataatcttcttgtccagctgtattccataagcccagattcaccagttttccatctaccataacattggcagaataattgtcaaag

SEQ ID NO: 26734 - DNA, 166 bp, Homo sapiens
  MAP TO CHR6.3; EXPRESSED IN HEART, SIGNAL = 0.67; EXPRESSED IN ADULT LIVER, SIGNAL = 0.64; EXPRESSED IN BRAIN, SIGNAL = 0.5; EST_HUMAN HIT: AW963729.1, EVALUE 1.00e-86; NT HIT: gi9910431, EVALUE 7.00e-87; SWISSPROT HIT: Q39491, EVALUE 4.00e-06
gcagcctggccggggtctccaggagcgtgacactggtgatcgcatacatcatgaccgtcactgactttggctgggaggatgccctgcacaccgtgcgtgctgggagatcctgtgccaaccccaacgtgggcttccagagacagctccaggagtttgagaagcatga

SEQ ID NO: 26735 - DNA, 232 bp, Homo sapiens
  MAP TO CHR1.3; EXPRESSED IN BRAIN, SIGNAL = 1.5; EXPRESSED IN HEART, SIGNAL = 0.63; NT HIT: X82877.1, EVALUE 1.00e-128; SWISSPROT HIT: P06536, EVALUE 2.70e+00; EST_HUMAN HIT: AL598343.1, EVALUE 1.00e-127
agagaaaagtggtaaagaatctacctcactgggaatgtcatcattaccaacttcagatgggtttaaccatcccgcccgttcttcaggacagagtcctgatgttggtaatcctatgagtcttgctcgctctgtctctgcttcagtctgccctatcaagcccagtgactcagatcgcattgaacctaaagctgtgaaggctttgaaggcttcagctgaattccagctaaactct

SEQ ID NO: 26736 - DNA, 253 bp, Homo sapiens
  MAP TO CHR17.3; EXPRESSED IN HEART, SIGNAL = 0.95; EXPRESSED IN LUNG, SIGNAL = 1.4; EXPRESSED IN BRAIN, SIGNAL = 0.92; NT HIT: D90145.1, EVALUE 0.00e+00; SWISSPROT HIT: P16619, EVALUE 4.00e-07; EST_HUMAN HIT: AV737007.1, EVALUE 1.00e-84
gactcacgtggtgcagagaggacctggttgcagagagccatggtgcagaggaggacggcaagggcagcagtggagacctgcatgattgggagcaggtgatggaatgtgggctcgagtgtcagcagagccaagaagggactgactactctttgctgcctgcgtccttctgatgtctgaagccatctctcctctttataggcagccctggcggatggggaaatggaatctgggggtgaggagggaaatttttaag

SEQ ID NO: 26737 - DNA, 187 bp, Homo sapiens
  MAP TO CHR6.3; EXPRESSED IN LUNG, SIGNAL = 3.8; EXPRESSED IN BRAIN, SIGNAL = 3.2; EXPRESSED IN HEART, SIGNAL = 3.8; NT HIT: U77887.1, EVALUE 1.00e-101; SWISSPROT HIT: P01028, EVALUE 6.00e-10; EST_HUMAN HIT: AU133569.1, EVALUE 1.00e-92
tcttccaggaagcctccatctcaaaggcaagctcatttttgggggagaaagcaagtgctgggctcctgggtgcccacgcagctgccatcacggcctatgccctgacactgaccaaggcccctgcggacctgcggggtgttgcccacaacaacctcatggcaatggcccaggagactggaggtgaggg

SEQ ID NO: 26738 - DNA, 116 bp, Homo sapiens
  MAP TO CHR14.3; EXPRESSED IN FETAL LIVER, SIGNAL = 0.89; EXPRESSED IN ADULT LIVER, SIGNAL = 1.3; EXPRESSED IN HEART, SIGNAL = 1.1; NT HIT: gi14750881, EVALUE 7.00e-55; EST_HUMAN HIT: AA912087.1, EVALUE 7.00e-59
agggcagtggcactggagctgcaggctaacagggagcccgacttcagcagcctggtgtcacctctcagcccccgcaggatggctgcccgggtcttctacctgctcctgggtgagtg

SEQ ID NO: 26739 - DNA, 353 bp, Homo sapiens
  MAP TO CHR19.3; EXPRESSED IN HEART, SIGNAL = 0.63; SWISSPROT HIT: Q15717, EVALUE 2.00e-60; NT HIT: gi14757935, EVALUE 0.00e+00; EST_HUMAN HIT: AU123765.1, EVALUE 0.00e+00
gcatgagcgagttatttgtgggacttgttggttttgaaggaaacctgtaagattttgtcccccaggcggtagccgttcaggctggctatggccatcgcggcttcttcatagtttgtcatggtcacaaagccaaaccctttgcacttgttggtgttgaagtcgcggatcactttcacattggtgacggcaccaaacggcccaaacatctgccagaggatcccctcgtcggcatcctgccccaggttgtagatgaaaatgcaccagccggaggaggcgtttcctggcacgttgacgccagagagcccgctcatgtgatcgacgcccatgggggagaacctggcagacagagagca

SEQ ID NO: 26740 - DNA, 167 bp, Homo sapiens
  MAP TO CHR2.3; EXPRESSED IN HEART, SIGNAL = 0.75; EXPRESSED IN ADULT LIVER, SIGNAL = 1.6; EXPRESSED IN BRAIN, SIGNAL = 0.72; SWISSPROT HIT: Q29400, EVALUE 5.00e-24; NT HIT: S37726.1, EVALUE 3.00e-89; EST_HUMAN HIT: AL522456.1, EVALUE 3.00e-74
cagactccctgccaacaggaactggaccaggtcctggagcggatctccaccatgcgccttccggatgagcggggccctctggagcacctctactccctgcacatccccaactgtgacaagcatggcctgtacaacctcaaacaggtgagcatggtgccagcctgggc

SEQ ID NO: 26741 - DNA, 168 bp, Homo sapiens
  MAP TO CHR20.3; EXPRESSED IN FETAL LIVER, SIGNAL = 1.8; EXPRESSED IN LUNG, SIGNAL = 4.1; EXPRESSED IN HEART, SIGNAL = 1.3; SWISSPROT HIT: Q09895, EVALUE 1.50e-02; NT HIT: AF151812.1, EVALUE 3.00e-61; EST_HUMAN HIT: BF745020.1, EVALUE 1.00e-61
ttccagatctgagtattgatgccatggatgtggccggagaacagcagctggatgtggaacacaacctgttcaagcaacgactagataaagatggcatccccgtgagctcagaggctgagcggcatggtaaccaggggagggggccgggtctcagatcccaaagctgga

SEQ ID NO: 26742 - DNA, 155 bp, Homo sapiens
  MAP TO CHR3.3; EXPRESSED IN BRAIN, SIGNAL = 0.79; EXPRESSED IN HEART, SIGNAL = 0.77; SWISSPROT HIT: P38318, EVALUE 4.50e-02; NT HIT: D88152.1, EVALUE 1.00e-75; EST_HUMAN HIT: AU117408.1, EVALUE 2.00e-75
ctgcagtgtatttgctgataatcagaggcagtattatctgcaaaggaaccattggaactgccaataaggctaaatgttctttgggtactccctcttctaccaatttcagtcctgttacagcatctgctgctgaaaaaccaatctgcaatataaaa

SEQ ID NO: 26743 - DNA, 160 bp, Homo sapiens
  MAP TO CHR12.3; EXPRESSED IN ADULT LIVER, SIGNAL = 1.2; EXPRESSED IN HEART, SIGNAL =   1; SWISSPROT HIT: P22516, EVALUE 1.00e-05; NT HIT: gi14783876, EVALUE 2.00e-84; EST_HUMAN HIT: BI061715.1, EVALUE 9.00e-81
caggcagggccatcaggcaccagaaggattttgccagcgtagtgctcctggaccagcgatatgcccggccccctgtcctggccaagctgccggcctggatccgagcccgtgtggaggtcaaagctacctttggccccgccattgctgctgtgcagaaggt

SEQ ID NO: 26744 - DNA, 112 bp, Homo sapiens
  MAP TO CHR17.3; EXPRESSED IN LUNG, SIGNAL = 0.78; EXPRESSED IN HEART, SIGNAL = 0.67; EXPRESSED IN ADULT LIVER, SIGNAL = 0.63; NT HIT: gi14774602, EVALUE 4.00e-50; EST_HUMAN HIT: BF768401.1, EVALUE 6.00e-50
aactcacctgatccaagaaatttgtgaagtttatgaatccaagttagcccaacactatgtacaccagcttcatgagtacagtgatatcttgaaggacacttgggatctgcaa

SEQ ID NO: 26745 - DNA, 459 bp, Homo sapiens
  MAP TO CHR3.3; EXPRESSED IN FETAL LIVER, SIGNAL = 3.4; EXPRESSED IN HEART, SIGNAL = 2.3; EXPRESSED IN LUNG, SIGNAL = 6.9; SWISSPROT HIT: Q04637, EVALUE 2.00e-63; NT HIT: gi14733249, EVALUE 0.00e+00; EST_HUMAN HIT: BF316163.1, EVALUE 0.00e+00
gggggaggagcaagctctgggcttgactccacctctggttccagatcttcagatgggaccatgccattaggctcatgaatttccactgtgtgagatgccaaaggggtgggagcctggagaggactggaagaaaactcagattctggaaccggtttgctaagtgtcacttctacttccagtatgggttcggcgagaggagtgggttctggagagaggcgatatggctccccagtttcacgggagatgggggttgattcttctacagacatttgtatagttgtcatagtgtccccaggaatagagaggactgcgagattaggctcagaccccggttccaagactggggatggtgatggggtcggagaaggcgacgaaggctgggattctgaagggctatgctctgggccaggcagccctggccggtcagcaatgattgctccctgtgaccggtcatctgca

SEQ ID NO: 26746 - DNA, 186 bp, Homo sapiens
  MAP TO CHR11.3; EXPRESSED IN LUNG, SIGNAL = 2.9; EXPRESSED IN HEART, SIGNAL = 1.2; EXPRESSED IN BRAIN, SIGNAL = 1.2; EXPRESSED IN ADULT LIVER, SIGNAL = 1.2; SWISSPROT HIT: P15328, EVALUE 1.00e-36; NT HIT: U20391.1, EVALUE 1.00e-100; EST_HUMAN HIT: AL555980.1, EVALUE 1.00e-100
ccctggaggaagaatgcctgctgttctaccaacaccagccaggaagcccataaggatgtttcctacctatatagattcaactggaaccactgtggagagatggcacctgcctgcaaacggcatttcatccaggacacctgcctctacgagtgctcccccaacttggggccctggatccagcaggta

SEQ ID NO: 26747 - DNA, 187 bp, Homo sapiens
  MAP TO CHR20.3; EXPRESSED IN HEART, SIGNAL = 1.4; EXPRESSED IN LUNG, SIGNAL = 3.9; EXPRESSED IN BRAIN, SIGNAL = 0.87; EXPRESSED IN FETAL LIVER, SIGNAL = 0.97; SWISSPROT HIT: Q07954, EVALUE 3.00e-06; NT HIT: gi12742414, EVALUE 1.00e-88; EST_HUMAN HIT: BI036403.1, EVALUE 9.70e-01
catgggctggagctgcaagggtttcgagaggcacaggtcaccaggtcatccagcagccggaatcctggtcggcagccgcagaggaaggagccatcccccccttcaaagcagtcctggtggcagcccccattgttgaagttgcagccatacttggggctgacacagagggggcccgagctgccccagt

SEQ ID NO: 26748 - DNA, 146 bp, Homo sapiens
  MAP TO CHR12.3; EXPRESSED IN LUNG, SIGNAL = 1.3; EXPRESSED IN ADULT LIVER, SIGNAL = 0.64; EXPRESSED IN HEART, SIGNAL = 0.98; NT HIT: AB030256.1, EVALUE 8.00e-77; EST_HUMAN HIT: BG707431.1, EVALUE 1.00e-70; SWISSPROT HIT: P37139, EVALUE 7.00e-20
cccaaacttaccacatattttgagtggtgcttcaagttctagtaggataggctgactgagaaagatttcacgagactttaagcacagtcctctgatttcattctcctgaagctggacattcttaccaggcttggaccctctcactg

SEQ ID NO: 26749 - DNA, 205 bp, Homo sapiens
  MAP TO CHR11.3; EXPRESSED IN HEART, SIGNAL = 0.63; NT HIT: gi4557630, EVALUE 1.00e-112; EST_HUMAN HIT: AV725979.1, EVALUE 7.00e-45; SWISSPROT HIT: P48058, EVALUE 3.00e-27
gagaggaggtcattgacttttctaagcccttcatgagtttgggcatatctatcatgatcaaaaagcctcagaaatccaaaccaggagtgttttccttcttggatcctctggcctatgagatttggatgtgcatagtctttgcctacattggtgtcagcgtggtcttattcctagttagtagatttagtccatatgagtggcacac

SEQ ID NO: 26750 - DNA, 199 bp, Homo sapiens
  MAP TO CHR3.3; EXPRESSED IN HEART, SIGNAL = 1.7; EXPRESSED IN ADULT LIVER, SIGNAL = 8.1; NT HIT: AB026898.1, EVALUE 1.00e-108; EST_HUMAN HIT: AL564138.1, EVALUE 6.00e-98; SWISSPROT HIT: P09110, EVALUE 5.00e-28
gaaggagccaccttacctgctttttgcaaagctactgggatggcataggcaggtccaatgcccatgatgtcaggtgggaccccaaccactgcataagacctcaggaccccaaggatgggaaggcccaactcttctgccttggacctccgggccagcaggatggcagctgccccatcactcacctggctagagtttccta

SEQ ID NO: 26751 - DNA, 122 bp, Homo sapiens
  MAP TO CHR2.3; EXPRESSED IN HEART, SIGNAL = 1.4; EXPRESSED IN ADULT LIVER, SIGNAL = 2.2; EXPRESSED IN BRAIN, SIGNAL = 1.6; NT HIT: D78152.1, EVALUE 3.00e-60; EST_HUMAN HIT: AI821617.1, EVALUE 5.00e-60; SWISSPROT HIT: P09525, EVALUE 4.00e-16
ggcaccgatgataacaccctcatcagagtgatggtttctcgagcagaaattgacatgttggatatccgggcacacttcaagagactctatggaaagtctctgtactcgttcatcaaggtagg

SEQ ID NO: 26752 - DNA, 157 bp, Homo sapiens
  MAP TO CHR2.3; EXPRESSED IN HEART, SIGNAL = 1.3; EXPRESSED IN ADULT LIVER, SIGNAL = 1.2; NT HIT: gi14721863, EVALUE 8.00e-65; SWISSPROT HIT: Q10045, EVALUE 5.00e-10; EST_HUMAN HIT: AA443018.1, EVALUE 7.00e-66
tttgctcttaggttcatctctaacaagtatttagtgaaacgacagagcagagactatgatgtggaatggggctatgcttttgatgtgcatctcaatgctttttatccactcctggtcattttgcattttatccagctttttttcatcaaccgtaagt

SEQ ID NO: 26753 - DNA, 169 bp, Homo sapiens
  MAP TO CHR5.3; EXPRESSED IN LUNG, SIGNAL = 1.5; EXPRESSED IN HEART, SIGNAL = 1.2; SWISSPROT HIT: Q09118, EVALUE 4.00e-13; NT HIT: gi14726895, EVALUE 7.00e-84; EST_HUMAN HIT: AA146681.1, EVALUE 2.00e-78
aacactcacctaaacatgagaagccccacgatgaccagcagacagacagatgacagcaccacagccaccacggccaggatggttgtgtggtcataggtatataagcgattttccactgggaggctcagcccatgacacctctctccatggtaacccgggtggcagctag

SEQ ID NO: 26754 - DNA, 271 bp, Homo sapiens
  MAP TO CHR1.3; EXPRESSED IN HEART, SIGNAL = 2.3; EXPRESSED IN ADULT LIVER, SIGNAL = 1.7; EXPRESSED IN BRAIN, SIGNAL = 2.7; SWISSPROT HIT: P41832, EVALUE 1.30e+00; NT HIT: gi16165816, EVALUE 0.00e+00; EST_HUMAN HIT: BE314627.1, EVALUE 1.00e-126
tctttcttttatctaaagcaaaaagtccaaagtgcgtttctgctgaatgtagggcctgggacaggaaagggttgcccaggcaggatcaggttggcagccccagcctgccccacctaggtatgaggcctcaagatggcatgcactgcacccggtcagggccctcctcctcgtccgatgtgtctgaggagctgggagactcatcagagtccgcgtctgtggccccaaccccaggttctcgccagcgctgtggatgggaaaggcttgttagtaa

SEQ ID NO: 26755 - DNA, 362 bp, Homo sapiens
  MAP TO CHR16.3; EXPRESSED IN LUNG, SIGNAL = 1.2; EXPRESSED IN HEART, SIGNAL = 0.88; EXPRESSED IN ADULT LIVER, SIGNAL = 0.94; EST_HUMAN HIT: AA864604.1, EVALUE 0.00e+00; SWISSPROT HIT: O43826, EVALUE 3.70e+00; NT HIT: gi14785385, EVALUE 0.00e+00
ataaaccgtgggcgacaccacagcgaaagatcacagaggactcaaggcccgtcactaccagcaactccagtctttgtacctgttccaccacctcctttgtatccgcctcctccccatacacttcctctccctccgggtgttcctcctccacagttttctcctcagtttcctcctggccagccaccacccgctgggtatagtgtccctcctccaggggtttcctccagctcctgccaatttatcaacacctgggtatcatcaggagtgcagacagctcattcaaataccatcccaacaacacaagcaccacctttgtccaggggaagaattctatagagagcagcgacgactaaaagaagagt

SEQ ID NO: 26756 - DNA, 321 bp, Homo sapiens
  MAP TO CHR6.3; EXPRESSED IN ADULT LIVER, SIGNAL = 0.81; EXPRESSED IN HEART, SIGNAL = 1.1; EST_HUMAN HIT: BF676393.1, EVALUE 2.00e-43; SWISSPROT HIT: O43309, EVALUE 6.00e-60; NT HIT: gi12732534, EVALUE 0.00e+00
tcctggttcatccagttctctctctaaatcctccagcacagtcaccacctcctccccactctctggatgctgctcctgcacccaggcctggagctcctcaggtaggatggtcaggaactgctccagcaccagcagctccagaatctgttctttggtgtgggtctctggcctcagccactgatggcaaagttctcggagtcggctcaaagcctcacggggaccagatgtctcctggtagcagaactgtctgaagtactgacggaagacctctctgctatgggtgttgtttttacgcaggtcccaatcctgtctggtggtata

SEQ ID NO: 26757 - DNA, 183 bp, Homo sapiens
  MAP TO CHR19.3; EXPRESSED IN HEART, SIGNAL = 0.96; EXPRESSED IN FETAL LIVER, SIGNAL = 2.1; SWISSPROT HIT: Q14653, EVALUE 2.00e-28; NT HIT: gi14786887, EVALUE 1.00e-94; EST_HUMAN HIT: BE076293.1, EVALUE 8.00e-97
gcacctggaagattccgaaatcctcctgctgtgcatcctgccgtaggccgtgcttccaagggatgcggaagcgcgtgcggctcttgttcacccaggccacgccctccagttgccccaggtccagctgcgacaccagccagggcaggatccgtggctttggggttcccatggtccggcctgcgc

SEQ ID NO: 26758 - DNA, 197 bp, Homo sapiens
  MAP TO CHR2.3; EXPRESSED IN HEART, SIGNAL =   1; EST_HUMAN HIT: BE707519.1, EVALUE 1.00e-107; SWISSPROT HIT: P49759, EVALUE 5.00e-29; NT HIT: gi14731415, EVALUE 1.00e-101
aagatataccaagaacttacaattcacagacttgcatatctgatatgccatctttctgatatgatccagtcgaaatggtagaaaaccattttctttaatgaagtcgtaagtactaagtcccaatagttcaaaaacaatgcaaatgtgaccatgatgctcaaaccattccaacatctggacacagcggctacaaacac

SEQ ID NO: 26759 - DNA, 166 bp, Homo sapiens
  MAP TO CHR8.3; EXPRESSED IN LUNG, SIGNAL = 0.53; EXPRESSED IN HEART, SIGNAL = 0.78; SWISSPROT HIT: P07451, EVALUE 1.00e-28; NT HIT: M29457.1, EVALUE 1.00e-88; EST_HUMAN HIT: BI831159.1, EVALUE 1.00e-83
ccagggcaaggaggcgcccttcacaaagtttgacccatcctgcctgttcccggcatgccgggactactggacctaccagggctcattcaccacgccgccctgcgaggaatgcattgtgtggctgctgctgaaggagcccatgaccgtgagctctgaccaggtgagc

SEQ ID NO: 26760 - DNA, 176 bp, Homo sapiens
  MAP TO CHR2.3; EXPRESSED IN HEART, SIGNAL = 1.3; EXPRESSED IN FETAL LIVER, SIGNAL = 5.6; EST_HUMAN HIT: BG422483.1, EVALUE 5.00e-92; SWISSPROT HIT: P18827, EVALUE 3.00e-21; NT HIT: Z48199.1, EVALUE 1.00e-94
tcaggcatagaattcctcctgtttggtgggcttctggtaggccccgccgttggcttgtttcggctcctccaaggagtagctgccttcgtccttcttcttcatgcggtacagcatgaaacccaccaggcacacagcaaagatgagccccacgaggcctccggcaatgacccctaggg

SEQ ID NO: 26761 - DNA, 202 bp, Homo sapiens
  MAP TO CHR1.3; EXPRESSED IN LUNG, SIGNAL = 4.5; EXPRESSED IN HEART, SIGNAL = 4.8; SWISSPROT HIT: Q03574, EVALUE 7.40e-02; NT HIT: gi16168172, EVALUE 1.00e-104; EST_HUMAN HIT: AA482657.1, EVALUE 1.00e-110
tattcatagatccccggatccagggctaccctctgatggggtcccccttgctaatgacctccattctcctgacctacgtgtacttcgttctctcacttgggcctcgcatcatggctaatcggaagcccttccagctccgtggcttcatgattgtctacaacttctcactggtggcactctccctctacattgtctatgaggt

SEQ ID NO: 26762 - DNA, 122 bp, Homo sapiens
  MAP TO CHR3.3; EXPRESSED IN LUNG, SIGNAL = 0.45; EXPRESSED IN HEART, SIGNAL = 0.52; SWISSPROT HIT: Q9RDC9, EVALUE 2.00e+00; EST_HUMAN HIT: BF083374.1, EVALUE 4.00e-51; NT HIT: gi14721546, EVALUE 3.00e-51
aaagacaatgcaggcagttaacaagaagatggatccacaaaagacattacaaacaatgcagaatttccagaaggaaaacatgaaaatggaaatgactgaagaaatgagtaagtttaataaat

SEQ ID NO: 26763 - DNA, 310 bp, Homo sapiens
  MAP TO CHR16.3; EXPRESSED IN HEART, SIGNAL = 2.1; EXPRESSED IN LUNG, SIGNAL = 2.2; EXPRESSED IN FETAL LIVER, SIGNAL = 1.6; SWISSPROT HIT: Q25479, EVALUE 7.00e-06; EST_HUMAN HIT: BI829510.1, EVALUE 4.00e-78; NT HIT: AF047338.1, EVALUE 3.00e-78
cataggcacccagcatgggcaccctcatgggggtgtacctgccctgcctgcagaatatctttggggttatcctcttcctgcggctgacctggatggtgggcacagcaggtgtgctacaggccctcctcatcgtgcttatctgctgctgttgtgtgagtgtcctggcgtgggagggttgggctgggcatgggccacggctgcccccacagagcccacccagctgagccgctcacccaggccctccttcccacagaccctgctgacggccatctccatgagtgccatcgccaccaacggtgtggttccaggt

SEQ ID NO: 26764 - DNA, 257 bp, Homo sapiens
  MAP TO CHR5.3; EXPRESSED IN FETAL LIVER, SIGNAL =   2; EXPRESSED IN HEART, SIGNAL = 0.57; SWISSPROT HIT: O07347, EVALUE 1.00e+01; EST_HUMAN HIT: BG682578.1, EVALUE 1.00e-128; NT HIT: gi16157231, EVALUE 0.00e+00
atctttgccaaataaactggagtttccaggggagaatgaaaatccagtcagggggacagagcttaatgagcccaaaacagagctatcaactttcttgccgaaattaaatgaggcacttgtcgctcctagtgatgatgggtccgttttcttttcagatgtcagctccaccttcttgtcaggtgtatcttcagttttgttgccatgaaacaaaaacgctgactcttgctgtaattttgttgagccaacaagggaaggag

SEQ ID NO: 26765 - DNA, 117 bp, Homo sapiens
  MAP TO CHR11.3; EXPRESSED IN HEART, SIGNAL = 0.66; NT HIT: X89507.1, EVALUE 1.00e-59; SWISSPROT HIT: P19493, EVALUE 1.00e-17; EST_HUMAN HIT: AW894126.1, EVALUE 7.00e-22
gaaatgctgttaacctcgcagttttaaaactgaatgaacaaggcctcttggacaaattgaaaaacaaatggtggtacgacaaaggagaatgtggcagcgggggaggtgactccaagg

SEQ ID NO: 26766 - DNA, 304 bp, Homo sapiens
  MAP TO CHRX.3; EXPRESSED IN LUNG, SIGNAL = 0.53; EXPRESSED IN HEART, SIGNAL = 0.54; SWISSPROT HIT: P33879, EVALUE 6.00e-05; NT HIT: gi12965168, EVALUE 1.00e-68
agcactgaccactctcatctgtgattgctctgcaggcctgatcttactcatttacttcttcttctatgcctccttggctgctgtgatcaccctctgcatgtacacactatttctgaccatcagtccctatataccaaccttcacggagcgggtaaagcctcctggtgagtgtgcccagatgccctgtgttgtcagaacttgctggacagaaatatgcttgcacagcatgttcagcctcaattaactttggctcttcctggtaatgacttagagattcaattattaggaggaaaagtaaaatggt

SEQ ID NO: 26767 - DNA, 103 bp, Homo sapiens
  MAP TO CHR2.3; EXPRESSED IN HEART, SIGNAL = 4.8; EXPRESSED IN FETAL LIVER, SIGNAL = 3.7; SWISSPROT HIT: P45880, EVALUE 2.00e-15; EST_HUMAN HIT: AA148162.1, EVALUE 6.00e-50; NT HIT: gi14736135, EVALUE 2.00e-51
agtcttacaagagggagtgtataaaccttggttgtgatgttgactttgattttgctggacctgcaatccatggttcagctgtctttggttatgagggctggct

SEQ ID NO: 26768 - DNA, 168 bp, Homo sapiens
  MAP TO CHR14.3; EXPRESSED IN FETAL LIVER, SIGNAL =   2; EXPRESSED IN ADULT LIVER, SIGNAL =   1; EXPRESSED IN LUNG, SIGNAL = 2.2; EXPRESSED IN HEART, SIGNAL = 1.8; NT HIT: gi14751618, EVALUE 2.00e-81; SWISSPROT HIT: P32558, EVALUE 2.00e-04; EST_HUMAN HIT: AA102259.1, EVALUE 6.00e-79
gtaccttgattgtggcaatgtgaaacggtgttgcaatgccaaacacgggcattattacagtctcatatttcttatcgatgtagatcttcatttcccgaatatgtggttccttaggcatcagagatgggtttttataggacacattagacttgcgagctctggagtggg

SEQ ID NO: 26769 - DNA, 140 bp, Homo sapiens
  MAP TO CHR11.3; EXPRESSED IN HEART, SIGNAL = 0.79; EST_HUMAN HIT: AA410661.1, EVALUE 3.00e-71; NT HIT: gi14768618, EVALUE 2.00e-71; SWISSPROT HIT: P35601, EVALUE 7.70e+00
tacctgtattttatctttgtatgagagggtaggtctctgcttgaatactgctttgaaagttggctcaaatcaccttctccttttccccttccacctctggcaggttcaaaggttggcctggctgctgttgtcatctttta

SEQ ID NO: 26770 - DNA, 153 bp, Homo sapiens
  MAP TO CHR11.3; EXPRESSED IN HEART, SIGNAL = 1.8; EST_HUMAN HIT: BF091962.1, EVALUE 2.00e-78; NT HIT: D42041.1, EVALUE 9.00e-77; SWISSPROT HIT: P38138, EVALUE 2.00e-11
ccttaccacataaaggccatagatgttatgcacatcccggtgctcccagcccccataatgctgggcatccttgagcatggtgacctcaggaccattgaacacagatggttcgttcatgtcattccagacaaagaggttgggagctgagccctg

SEQ ID NO: 26771 - DNA, 316 bp, Homo sapiens
  MAP TO CHR1.3; EXPRESSED IN LUNG, SIGNAL = 0.5; EXPRESSED IN HEART, SIGNAL =   1; SWISSPROT HIT: P10667, EVALUE 7.50e-01; NT HIT: gi14730483, EVALUE 0.00e+00
aaaataacaagatgtatattttttctccagtaaaagataacaagaagaacagaactaaaaagaaacctacccccaaaccaccagttgtagatgaagctggaagtggattggacaatggtgacttcaaggtcacaactcctgacacgtctaccacccaacacaataaagtcagcacatctcccaagatcacaacagcaaaaccaataaatcccagacccagtcttccacctaattctgatacatctaaagagacgtctttgacagtgaataaagagacaacagttgaaactaaagaaactactacaacaaataaaca

SEQ ID NO: 26772 - DNA, 156 bp, Homo sapiens
  MAP TO CHR17.3; EXPRESSED IN HEART, SIGNAL = 0.83; SWISSPROT HIT: Q09199, EVALUE 1.00e-15; EST_HUMAN HIT: BG108413.1, EVALUE 2.00e-01; NT HIT: gi6679930, EVALUE 2.00e-31
ctaggtcaccctgacagcttctctggggacactgaacacccttgctgatgtcccagacagtgtggtgcagggcagaggccagaagcagctgatcatttctaccagtgaccggaagctgttgaagttcattcttcagcacgtgacatacaccagcac

SEQ ID NO: 26773 - DNA, 462 bp, Homo sapiens
  MAP TO CHR15.3; EXPRESSED IN LUNG, SIGNAL = 8.2; EXPRESSED IN HEART, SIGNAL = 1.5; NT HIT: X04300.1, EVALUE 0.00e+00; SWISSPROT HIT: P04798, EVALUE 4.00e-87; EST_HUMAN HIT: AL598760.1, EVALUE 0.00e+00
ctggcctctgtcatcttctgtctggtattctgggtaatcagggcctcaagacctcaggtccccaaaggcctgaagaatccaccagggccatggggctggcctctgattgggcacatgctgaccctgggaaagaacccgcacctggcactgtcaaggatgagccagcagtatggggacgtgctgcagatccgaattggctccacacccgtggtggtgctgagcggcctggacaccatccggcaggccctggtgcggcagggcgatgatttcaagggccggcccgacctctacaccttcaccctcatcagtaatggtcagagcatgtccttcagcccagactctggaccagtgtgggctgcccgccggcgcctggcccagaatggcctgaaaagtttctccattgcctctgacccagcctcctcaacctcctgctacctggaagagcatgtgagcaaggaggct

SEQ ID NO: 26774 - DNA, 133 bp, Homo sapiens
  MAP TO CHR15.3; EXPRESSED IN HEART, SIGNAL = 0.8; EXPRESSED IN FETAL LIVER, SIGNAL = 1.1; EXPRESSED IN LUNG, SIGNAL = 2.1; NT HIT: gi14754094, EVALUE 9.00e-58; EST_HUMAN HIT: AW896010.1, EVALUE 8.00e-50
tttctgttctgtcctagctttcagtgccaatggaaaagatatcattgtcgactttccccagcagtctcactggactgggttgctatcagaaatggagttggtacccagtattcatcctggggttacgtgagtt

SEQ ID NO: 26775 - DNA, 170 bp, Homo sapiens
  MAP TO CHR4.3; EXPRESSED IN LUNG, SIGNAL = 1.7; EXPRESSED IN HEART, SIGNAL = 1.9; EXPRESSED IN FETAL LIVER, SIGNAL = 1.6; NT HIT: AF233749.1, EVALUE 5.00e-91; SWISSPROT HIT: Q02108, EVALUE 2.00e-25; EST_HUMAN HIT: AW951558.1, EVALUE 4.00e-83
tacctgtaagttgttgggctgacattgatttttcgtggtacactgcaggactcaaatttgttagccagagtgacattgtttccaaaaagacagtaacggggcattttaactccaacgacgccagcaaaaactgatccagagtgcagtccaattcgcatctgaaagcaaaa

SEQ ID NO: 26776 - DNA, 278 bp, Homo sapiens
  MAP TO CHR4.3; EXPRESSED IN LUNG, SIGNAL = 0.59; EXPRESSED IN HEART, SIGNAL = 0.57; NT HIT: Z99995.1, EVALUE 0.00e+00; SWISSPROT HIT: P30968, EVALUE 1.00e-40; EST_HUMAN HIT: AI923433.1, EVALUE 1.50e+00
ttcttgtgtagtctatcaatcacagagaaaaatatccatagataagtggatcaaagcatgggtttaaaaaggcaaagagaaagaagaagtgatttactgggtctgacaacctgtttaacatttcaggatcaaaccaataccaaattcctaggacatagtagggagtccagcagacagtaaatgaagtggcaaatgcaaccgtcatttttagagtcttcagccgtgctcttggtatattgttcttggactgattcagttgtagttctgttggatagaga

SEQ ID NO: 26777 - DNA, 150 bp, Homo sapiens
  MAP TO CHR18.3; EXPRESSED IN FETAL LIVER, SIGNAL =  31; EXPRESSED IN HEART, SIGNAL = 6.4; NT HIT: U02523.1, EVALUE 3.00e-79; SWISSPROT HIT: P35544, EVALUE 2.00e-21; EST_HUMAN HIT: AV721161.1, EVALUE 3.00e-65
acctccaagcatgcggcctgctacttccagggcagtcaaggcctccacgccgcactggcccagagtggcctcatcctccagcggtgcacctgccaggagcacgacttgatcttccggggcaatgccctccagtgaggctacatgagcctt

SEQ ID NO: 26778 - DNA, 209 bp, Homo sapiens
  MAP TO CHR4.3; EXPRESSED IN LUNG, SIGNAL =   1; EXPRESSED IN HEART, SIGNAL = 0.7; EXPRESSED IN FETAL LIVER, SIGNAL =   1; EXPRESSED IN ADULT LIVER, SIGNAL = 0.38; SWISSPROT HIT: Q16589, EVALUE 2.00e-36; EST_HUMAN HIT: BG025559.1, EVALUE 1.00e-108; NT HIT: gi16158915, EVALUE 1.00e-109
cctgcttacctttcactttcatcaaaacaacccccctcaggtatcgttggcagctcaggaacactatagtagctgttgtggaggttctgggctgtgcgccttgaaacgatccaaaccaacttcttaagatctggtttgcaacattcaggagaagaatactcggctaggcatttagaaaccaactctctccagtagaagaactcagtgtc

SEQ ID NO: 26779 - DNA, 161 bp, Homo sapiens
  MAP TO CHR19.3; EXPRESSED IN HEART, SIGNAL = 0.78; NT HIT: gi4506928, EVALUE 1.00e-85; SWISSPROT HIT: Q99961, EVALUE 4.00e-25; EST_HUMAN HIT: BG914107.1, EVALUE 1.00e-85
tcagtctccaggaggttgtgcatgctggtttctgccacctccttggactcctcgaacttctccagcgcctggcgtagctcctcatcggggatcttgccctgccgcttcttcttgtagtcaaagtccaggcggcggccctccagtttcttcaggtggtgctg

SEQ ID NO: 26780 - DNA, 292 bp, Homo sapiens
  MAP TO CHR14.3; EXPRESSED IN LUNG, SIGNAL = 2.2; EXPRESSED IN HEART, SIGNAL = 1.4; EXPRESSED IN ADULT LIVER, SIGNAL = 1.1; EST_HUMAN HIT: BG696716.1, EVALUE 0.00e+00; NT HIT: L13858.1, EVALUE 0.00e+00; SWISSPROT HIT: Q07890, EVALUE 9.00e-22
ggaggagtgcttggcgaatttggacacgtactaatgtctctgagccagtctgaatctctgtgaagatgccccagtggaggtggctgaagattaaatggacagtttataaagtgttctggaggccgaaggggaactggtggaggggtatcaggaagaggatctcttggtggtggcggaggtggactatgcagaggcccatcaaatgcaccagtaggaacaggaactctgggttttacctttggaggaggaggctgtctcggtggaatagcaggaggatcatcatcagatttca

SEQ ID NO: 26781 - DNA, 195 bp, Homo sapiens
  MAP TO CHR11.3; EXPRESSED IN HEART, SIGNAL = 0.94; NT HIT: gi16184410, EVALUE 1.00e-101; SWISSPROT HIT: Q08262, EVALUE 8.40e-01; EST_HUMAN HIT: AW952288.1, EVALUE 1.00e-103
gcactcacttctgggaccactcgaggttcatgccagactgggtagagaatgcttgcaacatttcctgctgctctggagagagggtgggcaccgggctggaggaaggcgtgggtgcaggcatagcgaaggctctttggatctcttcagaactggcattccgcacaaatagctcatcatttacaatacatagccttg

SEQ ID NO: 26782 - DNA, 160 bp, Homo sapiens
  MAP TO CHR12.3; EXPRESSED IN HEART, SIGNAL = 0.67; NT HIT: gi14784175, EVALUE 4.00e-85; SWISSPROT HIT: Q08600, EVALUE 9.90e+00; EST_HUMAN HIT: AA256970.1, EVALUE 6.00e-85
cctagctctccaccaagggaaagtgctgattttccttgtcatggtcctggccttgctcccatgctcgtcctccagttttcagaagtcgtccagttccaagaatggctccttcctttagttcactaacattttcacttaggggtgaaggccgcttaccctg

SEQ ID NO: 26783 - DNA, 265 bp, Homo sapiens
  MAP TO CHR5.3; EXPRESSED IN HEART, SIGNAL =   2; SWISSPROT HIT: P08571, EVALUE 4.00e-46; EST_HUMAN HIT: AL553094.1, EVALUE 0.00e+00; NT HIT: M86511.1, EVALUE 0.00e+00
tgggcgtctccattcctgtgttgcgcagcgctagattctggatggccgggaacttgtggggacagagagccgccatcagtccgcgttcgcccagtccaggattgtcagacaggtctaggctggtaagggccgggaaggcgcgaacctgttcgcaggaaaaggcaggcgagtgtgcttgggcaatgctcagtaccttgaggcctggcttgagccactgctgcagctcggcgagccaagaacgccctgtcgcccacgacacgttgcg

SEQ ID NO: 26784 - DNA, 235 bp, Homo sapiens
  MAP TO CHR6.3; EXPRESSED IN HEART, SIGNAL = 0.56; NT HIT: gi13642849, EVALUE 5.00e-70; SWISSPROT HIT: Q9Z191, EVALUE 1.00e-20; EST_HUMAN HIT: BF951762.1, EVALUE 1.00e-129
ggattacttcctggatattatagggtttcactgaatctaggctgtctaaattaatacacagtctttgttgccacagtaatgctatttttctgatatttaggccctatccacacattctttctacaccagcagctcaaacaatgtctgcctatgcaggccagactcagtattcggggatgcagcagccagccgtctacacagcctactcacagacaggacagccctacagcttgcc

SEQ ID NO: 26785 - DNA, 123 bp, Homo sapiens
  MAP TO CHR16.3; EXPRESSED IN HEART, SIGNAL =  13; NT HIT: X06352.1, EVALUE 4.00e-63; SWISSPROT HIT: P04075, EVALUE 3.00e-16; EST_HUMAN HIT: BI910362.1, EVALUE 5.00e-63
ccgcaccagtggactcatctgcagccaggatgcccttgccaggtgccacgatgcggtgagcgatgtcagacagctccttcttctgctccggggtcagtgctggatattggtagggcatggtgc

SEQ ID NO: 26786 - DNA, 174 bp, Homo sapiens
  MAP TO CHR10.3; EXPRESSED IN FETAL LIVER, SIGNAL =   1; EXPRESSED IN ADULT LIVER, SIGNAL = 0.69; EXPRESSED IN BRAIN, SIGNAL = 0.54; EXPRESSED IN LUNG, SIGNAL = 0.68; EST_HUMAN HIT: BF790486.1, EVALUE 2.00e-85; NT HIT: AJ304804.1, EVALUE 2.00e-93; SWISSPROT HIT: Q60707, EVALUE 3.30e+00
cagggccaagagcgcgtgcgcaagacgtccctggacctgcggcgggagatcatcgatgtgggcgggatccagaacctcatcgagctgcggaagaaacgcaagcagaagaagcgggacgctctggccgcctcgcatgagccgcccccagagcccgaggagatcgtaagggtcctg

SEQ ID NO: 26787 - DNA, 111 bp, Homo sapiens
  MAP TO CHR1.3; EXPRESSED IN LUNG, SIGNAL = 0.41; EXPRESSED IN BRAIN, SIGNAL = 0.55; SWISSPROT HIT: P13789, EVALUE 1.80e-01; NT HIT: AF004417.1, EVALUE 3.00e-23; EST_HUMAN HIT: AA780872.1, EVALUE 4.00e-23
gaagagagggctcgacgagaggaggaggagaacaggaggaaggctgaggatgaggcccggaagaagaaggctttgtccaacatgatgcattttgggggttacatccagaag

SEQ ID NO: 26788 - DNA, 181 bp, Homo sapiens
  MAP TO CHRX.3; EXPRESSED IN BRAIN, SIGNAL = 0.36; EXPRESSED IN LUNG, SIGNAL = 0.51; EST_HUMAN HIT: W21948.1, EVALUE 5.00e-64; SWISSPROT HIT: P04000, EVALUE 8.00e-31; NT HIT: gi12743143, EVALUE 8.00e-93
tagggatcacaggtctctggtctctggccatcatttcctgggagaggtggctggtggtgtgcaagccctttggcaatgtgagatttgatgccaagctggccatcgtgggcattgccttctcctggatctggtctgctgtgtggacagccccgcccatctttggttggagcaggtaagggtg

SEQ ID NO: 26789 - DNA, 211 bp, Homo sapiens
  MAP TO CHR10.3; EXPRESSED IN BRAIN, SIGNAL = 8.8; EXPRESSED IN LUNG, SIGNAL =  21; EST_HUMAN HIT: BI871273.1, EVALUE 1.00e-115; SWISSPROT HIT: P16632, EVALUE 2.00e-24; NT HIT: M31520.1, EVALUE 1.00e-115
tcttgcaagtctatgtttgggttcatttttctttgcataatccagggaatcataaatcatgccaaagccagttgtcttgccaccaccaaaatgagttctgaatccaaatacaaagatgacatccggtgtggtcttgtacattttggctagtttttcccgaatttctgtcttaggcactgtcgccttcccggggtgaaggacatcaatgacc

SEQ ID NO: 26790 - DNA, 173 bp, Homo sapiens
  MAP TO CHR3.3; EXPRESSED IN ADULT LIVER, SIGNAL = 0.46; EXPRESSED IN BRAIN, SIGNAL = 0.38; EXPRESSED IN LUNG, SIGNAL = 0.74; SWISSPROT HIT: O76082, EVALUE 5.00e-03; EST_HUMAN HIT: BI517655.1, EVALUE 3.00e-31; NT HIT: AB026898.1, EVALUE 8.00e-93
cagaatgggtggggccctcatggaggacgcaggccgtggtcctggcccagtgcaacttctccctcgggcagatggtgcttgcgggactcgcctacggtttccgcaactggaggctccttcagatcaccggcactgcgcctggcttactgctcttcttctacttctggtgagga

SEQ ID NO: 26791 - DNA, 178 bp, Homo sapiens
  MAP TO CHR19.3; EXPRESSED IN LUNG, SIGNAL = 3.5; EXPRESSED IN BRAIN, SIGNAL = 1.6; NT HIT: gi14761177, EVALUE 3.00e-95; EST_HUMAN HIT: AW263868.1, EVALUE 5.00e-95; SWISSPROT HIT: P43330, EVALUE 1.00e-18
ctacttgccggcgatgagcgggttccgcaggaccacgatgactgagtccccgcgcaggaacatcttggagatgtagcggtctttgttgactggcttggacttcttcttgcccttgccactcttgggtacctcagtccacatctccttcacgttctccagcaccatgttgcagtgcctg

SEQ ID NO: 26792 - DNA, 114 bp, Homo sapiens
  MAP TO CHR3.3; EXPRESSED IN ADULT LIVER, SIGNAL =  15; EXPRESSED IN BRAIN, SIGNAL =  62; NT HIT: M19283.1, EVALUE 1.00e-50; EST_HUMAN HIT: AW999038.1, EVALUE 9.00e-43
agttaacttgaatacaaggtcaaaatcagcaacaagttctacaatcaagtgctgatatcagatacaagcttcaaggacaatttctttttgaaggcttattccagtttcatgagg

SEQ ID NO: 26793 - DNA, 301 bp, Homo sapiens
  MAP TO CHR19.3; EXPRESSED IN FETAL LIVER, SIGNAL = 5.1; EXPRESSED IN BRAIN, SIGNAL =  11; EXPRESSED IN LUNG, SIGNAL = 8.1; SWISSPROT HIT: Q05481, EVALUE 1.00e-57; EST_HUMAN HIT: AV755078.1, EVALUE 0.00e+00; NT HIT: gi14755315, EVALUE 0.00e+00
agagaattcataccagagagaaaacctacaaatgtgaagaatgtggcaaagcatttagccagccttcacaccttactacacataagaggatgcacactggagagaaaccctacaaatgtgaagaatgtggcaaagcttttagccaatcctcaacccttactacacataagataattcatactggagagaaaccctacaaatgtgaagaatgtggcaaagcttttaggaaatcttcaactcttactgaacataagataattcatactggagagaaaccctacaaatgtgaagaatgtggcaa

SEQ ID NO: 26794 - DNA, 134 bp, Homo sapiens
  MAP TO CHR18.3; EXPRESSED IN BRAIN, SIGNAL = 0.35; SWISSPROT HIT: P36051, EVALUE 1.00e-13; EST_HUMAN HIT: AW238622.1, EVALUE 2.00e-65; NT HIT: gi6912499, EVALUE 2.00e-65
acctttggcaactgcactgacatcttcataaaacccagctatcagagctacatgacctggccgagattctgttggcacacgtgtatgagatatgccccagctgccttcatgcattatgatattcctaaaagata

SEQ ID NO: 26795 - DNA, 425 bp, Homo sapiens
  MAP TO CHR19.3; EXPRESSED IN LUNG, SIGNAL = 5.6; EXPRESSED IN FETAL LIVER, SIGNAL = 2.8; EXPRESSED IN ADULT LIVER, SIGNAL = 3.3; EXPRESSED IN BRAIN, SIGNAL = 9.2; EST_HUMAN HIT: AI937201.1, EVALUE 0.00e+00; NT HIT: gi16176317, EVALUE 0.00e+00; SWISSPROT HIT: Q14938, EVALUE 1.00e-79
ctgcaggatgagttccacccgttcatcgaggcactgctgcctcacgtccgcgctttctcctacacctggttcaacctgcaggcgcggaagcgcaagtacttcaagaagcatgaaaagcggatgtcgaaggacgaggagcgggcggtgaaggacgagctgctgggcgagaagcccgagatcaagcagaagtgggcatcccggctgctggccaagctgcgcaaggacatccggcccgagttccgcgaggacttcgtgctgaccatcacgggcaagaagcccccctgctgcgtgctctccaaccccgaccagaagggcaagatccggcggattgactgcctgcgccaggctgacaaggtgtggcggctggacctggtcatggtgattttgtttaaggggatccccctggaaagtactgatggggagcg

SEQ ID NO: 26796 - DNA, 225 bp, Homo sapiens
  MAP TO CHR17.3; EXPRESSED IN BRAIN, SIGNAL = 1.3; EXPRESSED IN LUNG, SIGNAL = 1.2; NT HIT: gi14770798, EVALUE 1.00e-124; SWISSPROT HIT: P36007, EVALUE 3.00e-04; EST_HUMAN HIT: AA877666.1, EVALUE 1.00e-123
caacagtgtgcaacccagctggtgtgggagaggatgaaactactcattgaacctacagctggtgttggagtggctgctgtgctgtctcaacattttcaaactgtttccccagaagtaaagaacatttgtattgtgctcagtggtggaaatgtagacttaacctcctccataacttgggtgaagcaggctgaaaggccagcttcttatcagtctgtttctgtttaa

SEQ ID NO: 26797 - DNA, 236 bp, Homo sapiens
  MAP TO CHR6.3; EXPRESSED IN LUNG, SIGNAL = 0.47; EXPRESSED IN BRAIN, SIGNAL = 0.69; SWISSPROT HIT: Q28083, EVALUE 5.70e-01; NT HIT: AB040292.1, EVALUE 4.00e-89; EST_HUMAN HIT: BF973295.1, EVALUE 8.00e-76
tcccagaccctgggcatcagcagcacacggaaagaaggacaagtccttgttccaaccaacctgggaacctggattctggtcgtttcccagcccccctggggtgtcactcacgctgtcatccaccaggtaggcattgatgaagtgggccagcaggttacagccccacaagaaaaccacatcgcccaggaggtgagggattaatccactaaaaaacaaggtaagcagagatgagcagg

SEQ ID NO: 26798 - DNA, 124 bp, Homo sapiens
  MAP TO CHR3.3; EXPRESSED IN LUNG, SIGNAL = 1.3; EXPRESSED IN ADULT LIVER, SIGNAL =   3; EXPRESSED IN FETAL LIVER, SIGNAL = 1.2; EXPRESSED IN BRAIN, SIGNAL =   6; EST_HUMAN HIT: BI598317.1, EVALUE 1.00e-63; NT HIT: gi14727749, EVALUE 9.00e-64; SWISSPROT HIT: P05090, EVALUE 2.00e-18
agtatctcggaagatggtacgaaattgagaagatcccaacaacctttgagaatggacgctgcatccaggccaactactcactaatggaaaacggaaagatcaaagtgttaaaccaggagttgag

SEQ ID NO: 26799 - DNA, 195 bp, Homo sapiens
  MAP TO CHR22.3; EXPRESSED IN LUNG, SIGNAL = 1.4; EXPRESSED IN ADULT LIVER, SIGNAL = 1.1; EXPRESSED IN FETAL LIVER, SIGNAL = 1.2; EXPRESSED IN BRAIN, SIGNAL = 1.5; NT HIT: gi14776845, EVALUE 1.00e-106; SWISSPROT HIT: P51691, EVALUE 4.90e-01; EST_HUMAN HIT: BG478377.1, EVALUE 1.00e-105
tggcagtctgagagcttacctgtgtcactgtcagctagccagagttggcacacagaaagcctgccagtgtcactaggccctgagtcctggcagcagattgcaatggatcctgaagaagtgaaaagcttagacagcaacggagctggagagaagagtgagaacaactcctctaattctgacattgtgcacgtggag

SEQ ID NO: 26800 - DNA, 352 bp, Homo sapiens
  MAP TO CHR1.3; EXPRESSED IN BRAIN, SIGNAL = 0.78; SWISSPROT HIT: P19320, EVALUE 3.00e-56; EST_HUMAN HIT: AL601445.1, EVALUE 0.00e+00; NT HIT: M73255.1, EVALUE 0.00e+00
tttttgcttgcgatttgcagcattccctagagatccagaaatcgagatgagtggtggcctcgtgaatgggagctctgtcactgtaagctgcaaggttcctagcgtgtacccccttgaccggctggagattgaattacttaagggggagactattctggagaatatagagtttttggaggatacggatatgaaatctctagagaacaaaagtttggaaatgaccttcatccctaccattgaagatactggaaaagctcttgtttgtcaggctaagttacatattgatgacatggaattcgaacccaaacaaaggcagagtacgcaaacactttatgtcaatggtaagtacata

SEQ ID NO: 26801 - DNA, 185 bp, Homo sapiens
  MAP TO CHR11.3; EXPRESSED IN LUNG, SIGNAL = 0.48; EXPRESSED IN BRAIN, SIGNAL = 0.4; SWISSPROT HIT: P01225, EVALUE 9.00e-30; EST_HUMAN HIT: BI033915.1, EVALUE 1.00e-86; NT HIT: M16646.1, EVALUE 1.00e-100
tgtttgcttcccagaccaggatgaagacactccagtttttcttccttttctgttgctggaaagcaatctgctgcaatagctgtgagctgaccaacatcaccattgcaatagagaaagaagaatgtcgtttctgcataagcatcaacaccacttggtgtgctggctactgctacaccagggtaggt

SEQ ID NO: 26802 - DNA, 123 bp, Homo sapiens
  MAP TO CHR15.3; EXPRESSED IN FETAL LIVER, SIGNAL = 2.1; EXPRESSED IN ADULT LIVER, SIGNAL = 1.7; EXPRESSED IN BRAIN, SIGNAL = 3.1; SWISSPROT HIT: P37108, EVALUE 6.00e-17; EST_HUMAN HIT: BF971505.1, EVALUE 3.00e-61; NT HIT: gi14749251, EVALUE 2.00e-61
agctcaccacagtgctgatcttcttcttcccatcggtagctcttaacagacacttgttgtctgcgggctcaaagccctccacagtacccttctttggaatgggtttggttcgaccgtcatctg

SEQ ID NO: 26803 - DNA, 243 bp, Homo sapiens
  MAP TO CHR8.3; EXPRESSED IN LUNG, SIGNAL = 6.3; EXPRESSED IN ADULT LIVER, SIGNAL = 0.87; EXPRESSED IN BRAIN, SIGNAL = 4.4; SWISSPROT HIT: Q92597, EVALUE 1.00e-39; EST_HUMAN HIT: AL530564.1, EVALUE 0.00e+00; NT HIT: gi5174656, EVALUE 0.00e+00
tagcaggagacctccatggacttgggcccggcgctgttcccagcagcacccgagttgggggtgatgtccaggtgggccccctcgctggtgtgcgagcggctgcgggtgccctcgctggtgtgggagcggcttcgggtgccctcgctggtgtgggagcggctgcgggtgccatccagagaagtgacgctggaaccagaggctgtgcgggaccgcatcaggcgggtcatgctagccgagggcact

SEQ ID NO: 26804 - DNA, 199 bp, Homo sapiens
  MAP TO CHR6.3; EXPRESSED IN FETAL LIVER, SIGNAL = 0.34; EXPRESSED IN BRAIN, SIGNAL = 0.27; NT HIT: gi13631082, EVALUE 2.00e-90; SWISSPROT HIT: P81133, EVALUE 1.00e-15
aaagttgcaaaacagcaatgcacttacctgagggtatggggaagtcctggattttgactttgagctggagagccgggatttggccccctttctgttgtcagtcatggtgggggtggagctgctggtataggagaaggctggtttggaggctgagatctgatccagggagagctgcagccctttgtattctgtgtctctg

SEQ ID NO: 26805 - DNA, 146 bp, Homo sapiens
  MAP TO CHR17.3; EXPRESSED IN LUNG, SIGNAL = 1.1; EXPRESSED IN ADULT LIVER, SIGNAL = 0.51; EXPRESSED IN BRAIN, SIGNAL = 0.56; NT HIT: gi4505152, EVALUE 3.00e-70; EST_HUMAN HIT: AL135644.1, EVALUE 4.00e-70; SWISSPROT HIT: Q99759, EVALUE 4.00e-20
ctaggaggtgagtgctctggagtgcgagatccagttgctaaagaacttgcagcatgagcgcatcgtgcagtactatggctgtctgcgggaccgcgctgagaagaccctgaccatcttcatggagtacatgccaggggtacgtgccc

SEQ ID NO: 26806 - DNA, 215 bp, Homo sapiens
  MAP TO CHR3.3; EXPRESSED IN FETAL LIVER, SIGNAL = 0.69; EXPRESSED IN BRAIN, SIGNAL = 0.58; EXPRESSED IN LUNG, SIGNAL = 0.35; SWISSPROT HIT: Q07494, EVALUE 2.00e-35; NT HIT: AF037331.1, EVALUE 1.00e-117; EST_HUMAN HIT: BG481991.1, EVALUE 2.00e-39
aatgacgggcagttcaccgtgatccagcttgtgggtatgctcaggggcatcgctgctggcatgaagtacctggctgagatgaattatgtgcatcgggacctggctgctaggaacattctggtcaacagtaacctggtgtgcaaggtgtccgactttggcctctcccgctacctccaggatgacacctcagatcccacctacaccagctccttggt

SEQ ID NO: 26807 - DNA, 172 bp, Homo sapiens
  MAP TO CHR17.3; EXPRESSED IN FETAL LIVER, SIGNAL = 1.1; EXPRESSED IN BRAIN, SIGNAL = 0.38; NT HIT: gi14775713, EVALUE 3.00e-89; EST_HUMAN HIT: BF883646.1, EVALUE 5.00e-73; SWISSPROT HIT: O00182, EVALUE 3.00e-27
cttaccgagaagctctggcctcggacgaagggcatttttcggggcagacttcgctcctcagacccccaagagttgttgatctgggtgttacggaccacagcattctcatcaaaacgggggttcatgtggaaggcgatgtggctcccagagcacaggttgatgtggaacctgg

SEQ ID NO: 26808 - DNA, 113 bp, Homo sapiens
  MAP TO CHR14.3; EXPRESSED IN BRAIN, SIGNAL = 0.53; EST_HUMAN HIT: AU098601.1, EVALUE 5.40e-01; NT HIT: gi6755043, EVALUE 5.00e-22
atgcggctgaaactctcgaccaagttctccgcagcttcttcatcttgcggatcttctcgcccggctgcagctcaaagaggtggcacctctgggcaacgcagggccccggcaac

SEQ ID NO: 26809 - DNA, 135 bp, Homo sapiens
  MAP TO CHR5.3; EXPRESSED IN LUNG, SIGNAL = 0.88; EXPRESSED IN BRAIN, SIGNAL = 1.9; NT HIT: gi14727940, EVALUE 3.00e-70; SWISSPROT HIT: P52538, EVALUE 7.80e+00; EST_HUMAN HIT: BI753524.1, EVALUE 4.00e-70
ggaacagcacgactgacaacagtgaccagtgaggtcctcaaatggaaacaagccacttagccagtttttgtaataatggcaaatctctcccatgtagcaattccctgctcctttttcctatctacatgagccctc

SEQ ID NO: 26810 - DNA, 185 bp, Homo sapiens
  MAP TO CHR12.3; EXPRESSED IN LUNG, SIGNAL = 5.9; EXPRESSED IN BRAIN, SIGNAL = 5.5; NT HIT: gi13652163, EVALUE 1.00e-100; EST_HUMAN HIT: AA977447.1, EVALUE 3.00e-90; SWISSPROT HIT: P50502, EVALUE 2.00e-28
ggaatggccggaatgcctggactcaatgaaattcttagtgatccagaggttcttgcagccatgcaggatccagaagttctggtggccttccaggatgtggctcagaacccagcaaatatgtcaaaataccagagcaacccaaaggttatgaatctcatcagtaaattgtcagtcaaatttggagg

SEQ ID NO: 26811 - DNA, 226 bp, Homo sapiens
  MAP TO CHR6.3; EXPRESSED IN FETAL LIVER, SIGNAL = 1.5; EXPRESSED IN BRAIN, SIGNAL = 1.1; NT HIT: gi15303282, EVALUE 1.00e-111; SWISSPROT HIT: P36508, EVALUE 3.00e-33; EST_HUMAN HIT: BI772253.1, EVALUE 1.00e-111
ctaaccgcgtgttccctgcagaaggctatgaccccagcaccctggaagccgtccaactggaagatggctccactgcctacattcaccaccctgtggctgtgccatcggagagcaccatcctggccgtacagacagaggtgggcttggaggacctggcagcagaggatgatgagggcttcagtgcagacgcagtggtggccctggagcagtatgccagcaaggtgag

SEQ ID NO: 26812 - DNA, 263 bp, Homo sapiens
  MAP TO CHR15.3; EXPRESSED IN BRAIN, SIGNAL = 0.39; EST_HUMAN HIT: AA002010.1, EVALUE 1.00e-77; SWISSPROT HIT: P16452, EVALUE 4.00e-44; NT HIT: L06515.1, EVALUE 0.00e+00
gtaccttcaggatacttgtagttctgagtgatgtcctcgcagcggtcactgcccacacccttggtgctgatgttgttgccaacatactttgtgttggagtcagtcaactccagtgtcccatcctcacagcacttccagaccacacatgaggcatttatggcagcaaaaaggtctgacactgctggggtcagccccagcgtcccctccttgactgctctgaccggcaccagatcacaggaccccaggactgagggagagaaagg

SEQ ID NO: 26813 - DNA, 213 bp, Homo sapiens
  MAP TO CHR12.3; EXPRESSED IN LUNG, SIGNAL = 1.8; EXPRESSED IN ADULT LIVER, SIGNAL = 1.1; EXPRESSED IN BRAIN, SIGNAL = 2.4; NT HIT: gi14759301, EVALUE 1.00e-113; EST_HUMAN HIT: BF902971.1, EVALUE 1.00e-71; SWISSPROT HIT: P55937, EVALUE 3.00e-20
tttcagtgcacgacctgcgacagcagatgacagccttgcagagccagcttcagcaggtgcagctggagcggacgacgctgaccagcaagctgaaggcgtcgcaggcggagatctcgtccctgcagagtgtccggcagtggtaccagcagcagctcgccctggcacaggaggcccgcgtcaggctgcagggtgagatggcccacatccaggtac

SEQ ID NO: 26814 - DNA, 452 bp, Homo sapiens
  MAP TO CHR4.3; EXPRESSED IN FETAL LIVER, SIGNAL = 0.45; EXPRESSED IN BRAIN, SIGNAL = 0.53; EXPRESSED IN ADULT LIVER, SIGNAL = 0.57; EST_HUMAN HIT: BE746231.1, EVALUE 0.00e+00; NT HIT: gi15296881, EVALUE 0.00e+00; SWISSPROT HIT: P21918, EVALUE 6.00e-77
ccactggggccctcacaggtggtcaccgcctgcctgctgaccctactcatcatctggaccctgctgggcaacgtgctggtgtgcgcagccatcgtgcggagccgccacctgcgcgccaacatgaccaacgtcttcatcgtgtctctggccgtgtcagaccttttcgtggcgctgctggtcatgccctggaaggcagtcgccgaggtggccggttactggccctttggagcgttctgcgacgtctgggtggccttcgacatcatgtgctccactgcctccatcctgaacctgtgcgtcatcagcgtggaccgctactgggccatctccaggcccttccgctacaagcgcaagatgactcagcgcatggccttggtcatggtcggcctggcatggaccttgtccatcctcatctccttcattccggtccagctcaactggcacagggaccaggc

SEQ ID NO: 26815 - DNA, 304 bp, Homo sapiens
  MAP TO CHR10.3; EXPRESSED IN BRAIN, SIGNAL = 0.64; EXPRESSED IN ADULT LIVER, SIGNAL = 0.56; EXPRESSED IN LUNG, SIGNAL = 0.39; EST_HUMAN HIT: AU120851.1, EVALUE 0.00e+00; NT HIT: M31146.1, EVALUE 0.00e+00; SWISSPROT HIT: P05093, EVALUE 1.00e-37
cttaccatttgaggccgcccagagaagtccttgcccttcttaataagcacctccttggccagctggtggtggccgacaatcactgtagtcttggtgcccatacgaaccgaatagatggggccatattttttctgcagcttgaagaagttgttatgcatatggccgtgtctggggaggaatggcaggctgcccaccaggggcagggacaggaggctcttggggtacttggcaccagggcaccttctcttgggccaaaacaaataagctagggtaagcagcaagagagccacgagctcccacatgg

SEQ ID NO: 26816 - DNA, 239 bp, Homo sapiens
  MAP TO CHR14.3; EXPRESSED IN ADULT LIVER, SIGNAL = 0.46; EXPRESSED IN BRAIN, SIGNAL = 0.69; EST_HUMAN HIT: BG519620.1, EVALUE 7.00e-30; NT HIT: gi14211924, EVALUE 0.00e+00; SWISSPROT HIT: Q01101, EVALUE 2.00e-06
tccgagattttcgtgtgcccatattgccacaaaaagtttcgtcgccaagcctatctgcgcaagcacctgagcactcacgaggcgggctcggcccgtgcgctagcgccgggctttggctccgaacgcggtgccccacttgccttcgcttgcccattgtgcggagcgcacttccctacagcagatatcagggagaagcaccggctgtggcatgctgtccgcgaggagctgctcctgcccgc

SEQ ID NO: 26817 - DNA, 182 bp, Homo sapiens
  MAP TO CHR11.3; EXPRESSED IN ADULT LIVER, SIGNAL = 4.5; EXPRESSED IN BRAIN, SIGNAL = 9.2; NT HIT: AF119850.1, EVALUE 4.00e-76; EST_HUMAN HIT: BE257849.1, EVALUE 2.00e-76; SWISSPROT HIT: Q9D8N0, EVALUE 4.00e-23
tctgcctctgcagtgagcaatgaggagctgcggggaagtactccagaggcagcagcccaggtggtgcagtgggtgagctttgctgattccgatatagtgcccccagccagtacctgggtgttccccaccttgggcatcatgcaccacaacaaacaggtgagccttggaactttgagagaagc

SEQ ID NO: 26818 - DNA, 168 bp, Homo sapiens
  MAP TO CHR19.3; EXPRESSED IN ADULT LIVER, SIGNAL = 0.79; EXPRESSED IN BRAIN, SIGNAL = 2.5; SWISSPROT HIT: Q63570, EVALUE 2.00e-16; NT HIT: gi14763816, EVALUE 5.00e-57; EST_HUMAN HIT: BG703989.1, EVALUE 2.00e-63
agccccagctctgctctcccaccagaccagaagccagatgtgatgtacgcggacatcggaggcatggacatccagaagcaggaggtgcgggaggccgtggagctcccgctcacgcatttcgagctctacaagcaggtgaggcggtgcaggtggcagggaagggagagg

SEQ ID NO: 26819 - DNA, 237 bp, Homo sapiens
  MAP TO CHR2.3; EXPRESSED IN ADULT LIVER, SIGNAL = 3.1; EXPRESSED IN BRAIN, SIGNAL = 3.1; EXPRESSED IN LUNG, SIGNAL = 3.6; SWISSPROT HIT: Q9Y679, EVALUE 2.00e-17; NT HIT: gi14738465, EVALUE 3.00e-99; EST_HUMAN HIT: AA394249.1, EVALUE 1.00e-108
attgtcctctaaccccctcaccttcttgcgtattcatatagtgcttgcttgcgctcctgcaggctctcctgccgggcccaggaagacttggcaaatgttagggctgttggctgaggggtcaccgggccagagctgggaaactgaggtgatcacaatgtcagagggcttgcggagtcatcatcattaaacacgcatcgaatgcctactttgcaagagaggcactatgctagggtctca

SEQ ID NO: 26820 - DNA, 118 bp, Homo sapiens
  MAP TO CHR6.3; EXPRESSED IN LUNG, SIGNAL = 0.63; EXPRESSED IN BRAIN, SIGNAL = 0.86; EXPRESSED IN FETAL LIVER, SIGNAL = 0.99; SWISSPROT HIT: Q13608, EVALUE 7.00e-07; NT HIT: AF108098.1, EVALUE 3.00e-60; EST_HUMAN HIT: BG819986.1, EVALUE 5.00e-57
cccacctgccaggccgcagaagggcagggtccaggagatctggtctgttggtggctccaatcacaaacacatcctgagtgctgtgcagcccatctagctcggcaaggagctgagacac

SEQ ID NO: 26821 - DNA, 121 bp, Homo sapiens
  MAP TO CHR21.3; EXPRESSED IN ADULT LIVER, SIGNAL = 0.71; EXPRESSED IN FETAL LIVER, SIGNAL = 0.53; EXPRESSED IN BRAIN, SIGNAL = 0.59; SWISSPROT HIT: Q9Y2C3, EVALUE 2.00e-17; NT HIT: AL163280.2, EVALUE 5.00e-62; EST_HUMAN HIT: AJ003597.1, EVALUE 2.00e-59
acgggaacttccttaagctcccagatacagactgcaggcagacacctcccttcctcgtcctgctggtgacctcatcccacaaacagttggctgagcgcatggccatccggcagacgtgggg

SEQ ID NO: 26822 - DNA, 214 bp, Homo sapiens
  MAP TO CHR14.3; EXPRESSED IN BRAIN, SIGNAL = 2.1; EXPRESSED IN LUNG, SIGNAL = 7.4; SWISSPROT HIT: P23381, EVALUE 2.00e-37; NT HIT: gi14754334, EVALUE 1.00e-117; EST_HUMAN HIT: AU132923.1, EVALUE 1.00e-117
caatgagcttatcgtagtctatgccttttgcactgcttgtctgtactgtccatgggtccacaaaatcctcttcagcttctgtggcatctgggccatgattactggtaggtgctgggttccctggaggacagtcagccttgtaatcctcccccgcggcagctttgtagctcatttttaatgacaccaacatctttactgcagaatcaatttcatc

SEQ ID NO: 26823 - DNA, 114 bp, Homo sapiens
  MAP TO CHR1.3; EXPRESSED IN BRAIN, SIGNAL = 0.45; EXPRESSED IN FETAL LIVER, SIGNAL = 1.1; EST_HUMAN HIT: BF084254.1, EVALUE 1.00e-51; SWISSPROT HIT: Q9TT94, EVALUE 7.90e+00; NT HIT: gi8923027, EVALUE 7.00e-52
agactcacgtgctcagtgttacatccggtgaccctcattccagcacacaaggcgttggctgctctctcgttattaaataccctgaactgaacaaatcccgcagtgaattcccct

SEQ ID NO: 26824 - DNA, 191 bp, Homo sapiens
  MAP TO CHR5.3; EXPRESSED IN LUNG, SIGNAL = 1.2; EXPRESSED IN ADULT LIVER, SIGNAL = 0.8; EXPRESSED IN BRAIN, SIGNAL = 1.1; SWISSPROT HIT: P39062, EVALUE 8.50e-01; EST_HUMAN HIT: BG421812.1, EVALUE 1.00e-77; NT HIT: gi5730052, EVALUE 7.00e-78
aacttacctgatgcagcaggggaggctgcaacagtattgggtgtttgctgtatctccccaccatgtatcatgggaaggaccccgcctacctccaggaggacacctgtactgttcaggtggccagaagccacagccatttcactctcattgacctaccagggaagaatagaggtgaaggctacactcaagct

SEQ ID NO: 26825 - DNA, 128 bp, Homo sapiens
  MAP TO CHR20.3; EXPRESSED IN FETAL LIVER, SIGNAL = 0.68; EXPRESSED IN BRAIN, SIGNAL = 1.2; EST_HUMAN HIT: AA442566.1, EVALUE 4.00e-30; SWISSPROT HIT: P06300, EVALUE 5.00e-20; NT HIT: gi13654122, EVALUE 4.00e-66
tcctgagaccgagtcaccaccttgaactggcgccggagaaaaccgccatagcgcttctggttgtcccacttgagcttgggacgaatgcgccgcaagaagcccccatagcgtttgtacaggtcctcatg

SEQ ID NO: 26826 - DNA, 169 bp, Homo sapiens
  MAP TO CHR1.3; EXPRESSED IN LUNG, SIGNAL = 2.1; EXPRESSED IN BRAIN, SIGNAL = 0.61; EST_HUMAN HIT: BG398445.1, EVALUE 3.00e-59; SWISSPROT HIT: P08575, EVALUE 2.00e-07; NT HIT: M23461.1, EVALUE 4.00e-88
tttacagagaaaaacttctacagagataacaattattttgcttttcagaaggacgcatgctgtttcttagggacacggctgacttccagatatgaccatgtatttgtggcttaaactcttggcatttggctttgcctttctggacacagaagtatttgtgacaggtaag

SEQ ID NO: 26827 - DNA, 105 bp, Homo sapiens
  MAP TO CHRX.3; EXPRESSED IN BRAIN, SIGNAL = 0.5; SWISSPROT HIT: P15056, EVALUE 7.00e-12; EST_HUMAN HIT: AW880897.1, EVALUE 1.00e-47; NT HIT: X65188.1, EVALUE 2.00e-48
ggtacctgcaaggtgtggagttacagtcggagacagtctaaagaaagcactgatgatgagaggtctaatcccagagtgcggtgctgtttacagaattcaggatgg

SEQ ID NO: 26828 - DNA, 124 bp, Homo sapiens
  MAP TO CHR19.3; EXPRESSED IN LUNG, SIGNAL = 4.4; EXPRESSED IN ADULT LIVER, SIGNAL = 3.8; EXPRESSED IN FETAL LIVER, SIGNAL =   4; EXPRESSED IN BRAIN, SIGNAL = 8.2; SWISSPROT HIT: O43345, EVALUE 1.00e-20; EST_HUMAN HIT: BF773250.1, EVALUE 2.00e-44; NT HIT: gi6005975, EVALUE 9.00e-64
tttgccacattcttcacatttgtagggtttctctccagtatgaattaccttatgtttagtaaggactgagaatgtactaaagcttttgccacattcttcacatttgtagggtttctctccagta

SEQ ID NO: 26829 - DNA, 184 bp, Homo sapiens
  MAP TO CHR1.3; EXPRESSED IN LUNG, SIGNAL = 5.9; EXPRESSED IN BRAIN, SIGNAL = 1.3; SWISSPROT HIT: Q13228, EVALUE 1.00e-26; EST_HUMAN HIT: BI046493.1, EVALUE 2.00e-97; NT HIT: gi14780959, EVALUE 3.00e-98
acctcgttcttgtagaagcgctggatggtggagctgagtgcgcagcccacaaagccttgggcagcgtctgggttgtgcaggaagcggatctccaagggaataagcccatcttttagagacagggtctgcacaatctcatggcgctgccagtcccatacatataagtggctcccgtacagtcctg

SEQ ID NO: 26830 - DNA, 151 bp, Homo sapiens
  MAP TO CHR22.3; EXPRESSED IN BRAIN, SIGNAL = 1.2; SWISSPROT HIT: Q14129, EVALUE 1.00e-20; EST_HUMAN HIT: BI962700.1, EVALUE 2.00e-75; NT HIT: gi16166939, EVALUE 1.00e-75
ggcaggcggtggagcaccggatccgtgaggagcagcgggcgatggaccagaagatcgtcctggagctggaccggaaggtggctgaccagcagagcacactggagaaggcgggggtggctggcttctacgtgaccaccaacccacaggtcag

SEQ ID NO: 26831 - DNA, 214 bp, Homo sapiens
  MAP TO CHR14.3; EXPRESSED IN LUNG, SIGNAL = 0.33; EXPRESSED IN BRAIN, SIGNAL = 0.52; SWISSPROT HIT: Q9UKJ8, EVALUE 2.00e-34; EST_HUMAN HIT: AA912173.1, EVALUE 1.00e-43; NT HIT: gi14784368, EVALUE 1.00e-117
cttctctgttaagctacatctcatagctgggaattgtgtctcattactgtttactttgtaaaccaggtgttcaaatgtggcagagtgcctgatgggttcaatttcatgagtgaggccgtttatttttaatactcctcaaaagcccccacaacaagcactgaacacaaccagagactcaggggcaccctccacgtaaccatgatagtaacagtca

SEQ ID NO: 26832 - DNA, 149 bp, Homo sapiens
  MAP TO CHR16.3; EXPRESSED IN ADULT LIVER, SIGNAL = 2.8; EXPRESSED IN BRAIN, SIGNAL = 3.1; NT HIT: gi15319788, EVALUE 2.00e-68; EST_HUMAN HIT: BI262463.1, EVALUE 3.00e-68; SWISSPROT HIT: P30519, EVALUE 3.00e-21
tcaggacacacagacctacctttgtcttgttcagcagcgtagaaagggcatttacgcatgtctcctttcccatcgtgtacagggaacccatcctccaaggtctctctggccagtgtggagccggcctggtccagttcattgaatatctg

SEQ ID NO: 26833 - DNA, 217 bp, Homo sapiens
  MAP TO CHR3.3; EXPRESSED IN BRAIN, SIGNAL = 1.5; SWISSPROT HIT: P38606, EVALUE 2.00e-35; EST_HUMAN HIT: AL514316.1, EVALUE 1.00e-119; NT HIT: AF113129.1, EVALUE 1.00e-119
ctggtgtgtctgttggagatcctgtacttcgcactggtaaacccctctctgtagagcttggtcctggcattatgggagccatttttgatggtattcaaagacctttgtcggatatcagcagtcagacccaaagcatctacatccccagaggagtaaacgtgtctgctcttagcagagatatcaaatgggactttacaccttgcaaaaacctacgggt

SEQ ID NO: 26834 - DNA, 317 bp, Homo sapiens
  MAP TO CHR2.3; EXPRESSED IN LUNG, SIGNAL = 1.2; EXPRESSED IN BRAIN, SIGNAL = 0.3; SWISSPROT HIT: P55920, EVALUE 7.00e-38; EST_HUMAN HIT: AL531903.1, EVALUE 0.00e+00; NT HIT: X65858.1, EVALUE 0.00e+00
acaaacttgaccaagtgacgcttctgggtcagtgtgcgtgtggcatggacaatggccaggtaacggtccacactgatgcaggccaacagcaggatgccactgtagaagttgacttccttcaggagtgagaccaccttgcacaggaatgtgccaaaaatccagccattcaccttggaggcggcccagatgggcaaggtcagggcaaagagtaggtcggccaaggccaggttcagcaggtagacatcagtgacggagcggccgaccctgctgtataagatgaccagcatcaccagggagtttcccagcaggctcagcag

SEQ ID NO: 26835 - DNA, 241 bp, Homo sapiens
  MAP TO CHR19.3; EXPRESSED IN BRAIN, SIGNAL = 0.64; EXPRESSED IN ADULT LIVER, SIGNAL = 1.2; NT HIT: AJ278828.1, EVALUE 1.00e-130; SWISSPROT HIT: Q9ESW8, EVALUE 2.00e-42; EST_HUMAN HIT: BI755068.1, EVALUE 1.00e-130
cagctggtggtgcatgtgggggtgtcaggcatggcgaccacagtcacactggagaaatgtggacacaacaagggctacaaggggctggacaactgccgcttttgccccggctcccagtgctgcgtggaggacgggcctgaaagcattgactccatcatcgacatggatgctgtgtgcaagcgagtcaccacgttgggcctggatgtgtcggtgaccatctcgcaggatgccggcaggtagg

SEQ ID NO: 26836 - DNA, 304 bp, Homo sapiens
  MAP TO CHR14.3; EXPRESSED IN LUNG, SIGNAL = 0.68; EXPRESSED IN FETAL LIVER, SIGNAL =   1; EXPRESSED IN BRAIN, SIGNAL = 0.48; SWISSPROT HIT: Q9DBU0, EVALUE 3.00e-38; EST_HUMAN HIT: BF663442.1, EVALUE 0.00e+00; NT HIT: gi14750850, EVALUE 0.00e+00
gccatggaataaagggaggatacctgaaaggcaggaagcctccaacagtcatgtggatgacagtagacttgtaccagggctggggtggaatctcccgggcgatgttcttggtgcgacagggtgcatcaaaggggctggcgttgttcttcccaaagatgcctccaatgacagtgaggggaaagcccaccagcagccaaaccgtcagaagcagcaggatggttgtggctggcagagcctgtgtcgaaccattggcccaatgcactgagttcaccacactccacgtcaggaagaaaggcactgcagg

SEQ ID NO: 26837 - DNA, 292 bp, Homo sapiens
  MAP TO CHR6.3; EXPRESSED IN BRAIN, SIGNAL = 0.23; NT HIT: AJ302633.1, EVALUE 0.00e+00; SWISSPROT HIT: Q9GZK3, EVALUE 5.00e-25; EST_HUMAN HIT: BG386225.1, EVALUE 1.60e+00
gccatgaacttgggttgatcccttgagatggaggaggggggctgaaggtacatgctgatggctgggccataaaataagaaaactacaataagatgggaggagcatgtcccaaaggcctttttccttcccttggaagatttgatcttaaatacagcacttccaatactagcataggaagcaagaattaagcatagtgggacagctaacataaaaatgcataccacagagagtgtgagctcgttagaacccttttcaccacaggcaatctttatcagaacaggaatctcacaca

SEQ ID NO: 26838 - DNA, 188 bp, Homo sapiens
  MAP TO CHR19.3; EXPRESSED IN LUNG, SIGNAL =  15; EXPRESSED IN BRAIN, SIGNAL =  16; SWISSPROT HIT: P05197, EVALUE 8.00e-31; EST_HUMAN HIT: BF530690.1, EVALUE 1.00e-100; NT HIT: M19997.1, EVALUE 1.00e-100
cagggcgcactgtgtgaggagaacatgcggggtgtgcgcttcgacgtccacgacgtcaccctgcacgccgacgccatccaccgcggagggggccagatcatccccacagcacggcgctgcctctatgccagtgtgctgaccgcccagccacgcctcatggagcccatctaccttgtggagatccaggt

SEQ ID NO: 26839 - DNA, 120 bp, Homo sapiens
  MAP TO CHR1.3; EXPRESSED IN ADULT LIVER, SIGNAL = 0.52; EXPRESSED IN BRAIN, SIGNAL = 0.35; SWISSPROT HIT: P00797, EVALUE 2.00e-17; EST_HUMAN HIT: BI759718.1, EVALUE 1.00e-57; NT HIT: L00066.1, EVALUE 2.00e-61
gtagagacggctgcacttggaggagggcacccaaacattggacgaaccagtgtcaaagacgactttgaaggtctggggtggggtgccgatgccaatctcgccatagtactgggtctgtgg

SEQ ID NO: 26840 - DNA, 151 bp, Homo sapiens
  MAP TO CHR17.3; EXPRESSED IN FETAL LIVER, SIGNAL = 3.5; EXPRESSED IN BRAIN, SIGNAL = 1.1; SWISSPROT HIT: P34810, EVALUE 2.00e-13; EST_HUMAN HIT: BF744667.1, EVALUE 8.00e-78; NT HIT: gi4557434, EVALUE 5.00e-78
ggcagctgagcagcctggagcctcagggagagcaggtcgaggtggacagctggtgaaagaatgatgctcgagttgctgcaactgaagctctgccccaggggtgcttggagatctcgaagggatgcattctgagccgagaatgtccactctg

SEQ ID NO: 26841 - DNA, 159 bp, Homo sapiens
  MAP TO CHR11.3; EXPRESSED IN LUNG, SIGNAL = 0.57; EXPRESSED IN BRAIN, SIGNAL = 0.44; SWISSPROT HIT: O60882, EVALUE 7.00e-22; EST_HUMAN HIT: R09277.1, EVALUE 3.20e+00; NT HIT: Y12779.1, EVALUE 2.00e-80
acaatacctccattttcaaaagatatcataatatccgcttctcctgagtttattctgacaaagctcagagggacggcgctactccaggcctgcaaggccatctccactgctttgtccacctcgacagaactcatggaaggtgtgtatttagatattctg

SEQ ID NO: 26842 - DNA, 406 bp, Homo sapiens
  MAP TO CHR6.3; EXPRESSED IN ADULT LIVER, SIGNAL = 0.71; EXPRESSED IN BRAIN, SIGNAL = 1.6; EXPRESSED IN FETAL LIVER, SIGNAL = 1.1; EXPRESSED IN LUNG, SIGNAL = 1.2; SWISSPROT HIT: P39918, EVALUE 2.00e-13; EST_HUMAN HIT: R35410.1, EVALUE 0.00e+00; NT HIT: gi9910349, EVALUE 0.00e+00
gaaggaagggatagccaacttacataggattctgcaggtggctgttgactggaatcacttttttctgttttcctcccatgattaggacactttccttcctcacgtggaatgtgggacgatcactctgattggggcaaccactgaaaacccttccttccaggtcaacgctgctcttctgagccgctgtcgagtgattgttcttgagaagcttccagtagaggcaatggtgactattttaatgcgagcgatcaactccctgggaatccacgtcctagactctagccgtcccactgaccctctgagccacagcagcaacagcagctcagagtaagttgacagtgtgcagcgtcctgggggcacacacctcccagagagtctcctggcagggggccagaaagggccgggc

SEQ ID NO: 26843 - DNA, 287 bp, Homo sapiens
  MAP TO CHR1.3; EXPRESSED IN FETAL LIVER, SIGNAL = 0.37; EXPRESSED IN ADULT LIVER, SIGNAL = 0.37; EXPRESSED IN BRAIN, SIGNAL = 0.38; SWISSPROT HIT: P48357, EVALUE 2.00e-53; EST_HUMAN HIT: BI913269.1, EVALUE 0.00e+00; NT HIT: U59254.1, EVALUE 0.00e+00
tttccacctaaaattctgacaagtgttgggtctaatgtttcttttcactgcatctataagaaggaaaacaagattgttccctcaaaagagattgtttggtggatgaatttagctgagaaaattcctcaaagccagtatgatgttgtgagtgatcatgttagcaaagttacttttttcaatctgaatgaaaccaaacctcgaggaaagtttacctatgatgcagtgtactgctgcaatgaacatgaatgccatcatcgctatgctgaattatatgtgattggtaagaa

SEQ ID NO: 26844 - DNA, 320 bp, Homo sapiens
  MAP TO CHR21.3; EXPRESSED IN ADULT LIVER, SIGNAL = 3.8; EXPRESSED IN BRAIN, SIGNAL =  16; NT HIT: M34868.1, EVALUE 0.00e+00; SWISSPROT HIT: P08592, EVALUE 9.00e-32; EST_HUMAN HIT: BG163289.1, EVALUE 1.00e-90
aattagagaagtggacagaaatgtggttagtggtagcaacaggcccattcccaagaaccaggaaaatcaatctgttacaaaaagcagagtcagtggcgagagagacgaaaggtggccaggctcgaagaagggtccacttactggcgctgccacacacggccatgcagtactcttctgtgtcaaagttgttccggttgccgccacatccgccgtaaaagaatggggcacacttcccttcagtcacatcaaagtaccagcgggagatcattgctcggcacggccccgtctcggcttgttcagagcacacctctaatcagagg

SEQ ID NO: 26845 - DNA, 294 bp, Homo sapiens
  MAP TO CHR6.3; EXPRESSED IN LUNG, SIGNAL = 1.8e+02; EXPRESSED IN BRAIN, SIGNAL =   9; EXPRESSED IN FETAL LIVER, SIGNAL =  24; EST_HUMAN HIT: AL571284.1, EVALUE 1.00e-108; SWISSPROT HIT: P16190, EVALUE 3.00e-34; NT HIT: J00191.1, EVALUE 1.00e-117
ccctcagatcccccaaaggcacatgtgacccagcaccccgtctctgaccatgaggccacccttgaggtgctgggccctgggcctctaccctgcggagatcacactgacctggcagcaggatggggaggaccagacccaggacacggagcttgtggagaccaggcctgcaggggacggaaccttccagaagtgggtggctgtagtggtgccttccggagaggagcagagatacatgtgccatgtgcagcatgaggggctgccagagcccctcaccctgagatggggtaaggaggg

SEQ ID NO: 26846 - DNA, 179 bp, Homo sapiens
  MAP TO CHR11.3; EXPRESSED IN ADULT LIVER, SIGNAL =  11; EXPRESSED IN BRAIN, SIGNAL = 6.3; EXPRESSED IN LUNG, SIGNAL =  17; SWISSPROT HIT: P26641, EVALUE 7.00e-32; NT HIT: gi14773560, EVALUE 1.00e-94; EST_HUMAN HIT: AV717181.1, EVALUE 1.00e-95
ttagtacctttgtgttggatgaatttaagcgcaagtactccaatgaggacacactctctgtggcactgccatatttctgggagcactttgataaggacggctggtccctgtggtactcagagtatcgcttccctgaagaactcactcagaccttcatgagctgcaatctcatcactggt

SEQ ID NO: 26847 - DNA, 177 bp, Homo sapiens
  MAP TO CHR13.3; EXPRESSED IN ADULT LIVER, SIGNAL = 1.4; EXPRESSED IN BRAIN, SIGNAL =   1; EXPRESSED IN FETAL LIVER, SIGNAL = 1.5; SWISSPROT HIT: P25823, EVALUE 1.90e+00; NT HIT: gi9506634, EVALUE 2.00e-90; EST_HUMAN HIT: AV730824.1, EVALUE 5.80e-02
cagaatttgagctaataaaaatgacaaatgaaattcaaagtaatttaaaatgccttggtcttttggagccttatttctggaaaaaaggagaagcatgtgcagtaagaggatccgatactctgtggtatcgtggcaaggtgatggaggttgtaggtggcgctgtcagagtgagtctga

SEQ ID NO: 26848 - DNA, 335 bp, Homo sapiens
  MAP TO CHR12.3; EXPRESSED IN FETAL LIVER, SIGNAL = 1.1; EXPRESSED IN ADULT LIVER, SIGNAL = 1.1; EXPRESSED IN BRAIN, SIGNAL = 0.67; EXPRESSED IN LUNG, SIGNAL = 1.1; SWISSPROT HIT: P40603, EVALUE 1.10e+00; EST_HUMAN HIT: BE156272.1, EVALUE 0.00e+00; NT HIT: U48363.1, EVALUE 5.00e-77
gttagtattggtgggtagcgcccaagaggggtgtggacgacagacacaccatgcacacggcaaaccaaggcaaatacccttgttgttcttcgtaacaggttgcttggcagagggggttgggacagggattccagcagatttaggggtgggcatgttgacgaggaccgactggaaaggcactcccccagagattggttccgggggaatcagaggcagcagctcatcctcatcagcaggggcaaggggtttagagggtgattccaacaccagcccaggagaggacggcagaaattgctgtttaggaggcagagtgggaactggggagggagcaagag

SEQ ID NO: 26849 - DNA, 243 bp, Homo sapiens
  MAP TO CHR2.3; EXPRESSED IN BRAIN, SIGNAL = 1.7; EXPRESSED IN LUNG, SIGNAL = 2.1; SWISSPROT HIT: Q9JLV5, EVALUE 9.00e-38; EST_HUMAN HIT: BG258285.1, EVALUE 1.00e-127; NT HIT: gi14728230, EVALUE 1.00e-128
taacacttaccttctgtctttccatttttcaacatatgtactagcccagaattctccatttctactatagtcttcatgtgcttggaaatgagttccctttcaaccacctttacaattggttcttccgttgatttgtcaaggcagtgcatcactcgttctatttcttcattaattctagcttctactttctttatatatactgaagcactattttctgctaaaaatttctggctttccatctgc

SEQ ID NO: 26850 - DNA, 117 bp, Homo sapiens
  MAP TO CHR8.3; EXPRESSED IN BRAIN, SIGNAL = 0.65; EXPRESSED IN LUNG, SIGNAL = 2.4; EST_HUMAN HIT: AW237388.1, EVALUE 3.00e-52; SWISSPROT HIT: P15090, EVALUE 9.00e-14; NT HIT: J02874.1, EVALUE 2.00e-52
actcaccaccaccagtttatcatcctctcgttttctctttatggtggttgattttccatcccatttctgcacatgtaccaggacacccccatctaaggttatggtgctctgtaggca

SEQ ID NO: 26851 - DNA, 122 bp, Homo sapiens
  MAP TO CHR11.3; EXPRESSED IN LUNG, SIGNAL = 3.7; EXPRESSED IN ADULT LIVER, SIGNAL = 2.2; EXPRESSED IN BRAIN, SIGNAL = 2.3; SWISSPROT HIT: Q47536, EVALUE 1.20e+00; EST_HUMAN HIT: AW362810.1, EVALUE 2.00e-62; NT HIT: gi13647689, EVALUE 5.00e-56
aaaggatacacgaagaaccaggcggtgaagaacatgccaatggccaaaagcaccacggtcagatgggggaagacagctgggttcactgggctggtatatctgctcatggcctcgagctccta

SEQ ID NO: 26852 - DNA, 122 bp, Homo sapiens
  MAP TO CHR9.3; EXPRESSED IN LUNG, SIGNAL =   3; EXPRESSED IN ADULT LIVER, SIGNAL = 2.2; EXPRESSED IN BRAIN, SIGNAL = 3.3; EST_HUMAN HIT: AW379271.1, EVALUE 1.00e-54; SWISSPROT HIT: P52292, EVALUE 2.00e-15; NT HIT: U09559.1, EVALUE 3.00e-51
tatacacactcattttcatgattttggagagcttcaattttgtctaagcctccacattcttcaatcattatactaagtttctcagtttcacctagtttctcagcagcctgaaagatacttga

SEQ ID NO: 26853 - DNA, 166 bp, Homo sapiens
  MAP TO CHR2.3; EXPRESSED IN ADULT LIVER, SIGNAL = 0.6; EXPRESSED IN BRAIN, SIGNAL = 0.4; NT HIT: gi16157991, EVALUE 4.00e-82; EST_HUMAN HIT: BE867724.1, EVALUE 6.00e-82
cagagtgatgttagaactccaaaaagcactaaacatgtccattcgattcagtggagtagaacaaaacctcaggatgaagtgaaagcagtccaacttgccattcagacattattcaccaattcagatggcaaccctggaagcaggtccgactcaagtaagttagtgt

SEQ ID NO: 26854 - DNA, 196 bp, Homo sapiens
  MAP TO CHR9.3; EXPRESSED IN LUNG, SIGNAL = 0.82; EXPRESSED IN BRAIN, SIGNAL = 0.9; EXPRESSED IN FETAL LIVER, SIGNAL = 0.83; NT HIT: gi9966856, EVALUE 1.00e-106; EST_HUMAN HIT: BE208472.1, EVALUE 1.00e-106; SWISSPROT HIT: P53331, EVALUE 7.00e-05
gcctgacaagagccttagccttggactgtgagatggtgggcgtgggccctaagggggaggagagcatggccgcccgtgtgtccatcgtgaaccagtatgggaagtgcgtttatgacaagtacgtcaaaccaaccgagcccgtgacggactataggacagcggtcagtgggattcggcctgagaacctcaagcaggg

SEQ ID NO: 26855 - DNA, 249 bp, Homo sapiens
  MAP TO CHR1.3; EXPRESSED IN BRAIN, SIGNAL = 0.6; NT HIT: M67466.1, EVALUE 0.00e+00; EST_HUMAN HIT: AV706317.1, EVALUE 0.00e+00; SWISSPROT HIT: P26439, EVALUE 2.00e-44
caacccagtctatgttggcaacgtggcctgggcccacattctggccttgagggctctgcgggaccccaagaaggccccaagtgtccgaggtcaattctattacatctcagatgacacgcctcaccaaagctatgataaccttaattacatcctgagcaaagagtttggcctccgccttgattccagatggagccttcctttaaccctgatgtactggattggcttcctgctggaagtagtgagcttcct

SEQ ID NO: 26856 - DNA, 215 bp, Homo sapiens
  MAP TO CHR16.3; EXPRESSED IN LUNG, SIGNAL = 1.9; EXPRESSED IN BRAIN, SIGNAL = 2.1; NT HIT: gi14776862, EVALUE 1.00e-118; EST_HUMAN HIT: BI457159.1, EVALUE 1.00e-117; SWISSPROT HIT: P49815, EVALUE 5.00e-22
ttccccgtccagggtccctgactgtgaccgggccttaacctcagggctcagccggcccacgtcggccttgtccccagggtccccgaggatgtcctgcagagtctgcagctcgggagaggagctggacttgctcaggggctgcgagggctggaaggagaggtccacagagggccggccaccctccgaggagacgactcgctcgatggggatgcccc

SEQ ID NO: 26857 - DNA, 147 bp, Homo sapiens
  MAP TO CHR19.3; EXPRESSED IN LUNG, SIGNAL = 1.9; EXPRESSED IN ADULT LIVER, SIGNAL =   1; EXPRESSED IN BRAIN, SIGNAL = 0.81; SWISSPROT HIT: P35550, EVALUE 7.00e-20; NT HIT: gi13651410, EVALUE 1.00e-69; EST_HUMAN HIT: BE909610.1, EVALUE 4.00e-70
attttaggatggtctagtctatgcagtcgagttctcccaccgctctggccgtgacctcattaacttggccaagaagaggaccaacatcattcctgtgatcgaggatgctcgacacccacacaaataccgcatgctcatcggtgaggg

SEQ ID NO: 26858 - DNA, 152 bp, Homo sapiens
  MAP TO CHR12.3; EXPRESSED IN BRAIN, SIGNAL =   2; SWISSPROT HIT: Q01064, EVALUE 8.00e-23; NT HIT: gi4505676, EVALUE 5.00e-75; EST_HUMAN HIT: BG696525.1, EVALUE 1.00e-67
ggcacctaccaccatccctgtgcggagcaagaagcaatggactgtctgggtaacatcggctgcgtggatctggttgtggtaaggattcttgtacttcccatagcctgtctccaaggcatccaggaaactcatcaaaaacacagtgggaatct

SEQ ID NO: 26859 - DNA, 273 bp, Homo sapiens
  MAP TO CHR19.3; EXPRESSED IN BRAIN, SIGNAL = 1.2; EXPRESSED IN FETAL LIVER, SIGNAL = 1.9; EXPRESSED IN ADULT LIVER, SIGNAL = 1.3; NT HIT: gi14757935, EVALUE 1.00e-126; EST_HUMAN HIT: AI793329.1, EVALUE 0.00e+00; SWISSPROT HIT: Q15717, EVALUE 4.00e-39
cctcccgacccacctgaatctctgcgcctggtggtgaacggggcctccgaaccgtcgcgctggcgagtggtacagctgcgagaggagtgccacgtttttgttctggttggggttggctgcaaacttcactgtgatgggctcagaggaacctgggggtttatgaccattgaaactggtaattgcctcttctgcctccgaccgtttgtcaaaccggataaacgcaacccctctggacaaaccttttcaacaaatcaacaaaaacggagttagggg

SEQ ID NO: 26860 - DNA, 198 bp, Homo sapiens
  MAP TO CHR5.3; EXPRESSED IN ADULT LIVER, SIGNAL = 0.75; EXPRESSED IN BRAIN, SIGNAL = 0.51; SWISSPROT HIT: P10914, EVALUE 7.00e-21; NT HIT: L05072.1, EVALUE 1.00e-106; EST_HUMAN HIT: AA377066.1, EVALUE 2.00e-91
gggctgtcaatttctggctcctccttacagctaaagtctccatagacagaggtgggctggactccaggttcattgagtaggtaccccttcccatccacgtttgttggctgccactccgactgctccaagagctggggacagaagagcaagaggctatcaactcccttccagtgcagactcaccctgtggccctgccct

SEQ ID NO: 26861 - DNA, 112 bp, Homo sapiens
  MAP TO CHR17.3; EXPRESSED IN LUNG, SIGNAL = 1.4; EXPRESSED IN BRAIN, SIGNAL = 1.3; EXPRESSED IN FETAL LIVER, SIGNAL = 0.65; NT HIT: gi14774044, EVALUE 7.00e-55; EST_HUMAN HIT: T30795.1, EVALUE 2.00e-56
taggccatcggtgctcggaacttgctcaaatctatagcaaagcagagagaagctcaacagcagcaacttcaagccctaatagcagaaaagaaaatgcagctagaaaggtaag

SEQ ID NO: 26862 - DNA, 159 bp, Homo sapiens
  MAP TO CHR19.3; EXPRESSED IN LUNG, SIGNAL = 1.5; EXPRESSED IN ADULT LIVER, SIGNAL = 0.97; EXPRESSED IN BRAIN, SIGNAL = 1.3; SWISSPROT HIT: Q14585, EVALUE 5.00e-20; NT HIT: gi14758015, EVALUE 2.00e-84; EST_HUMAN HIT: BE742835.1, EVALUE 1.00e-82
atgtaaggactgtgggaaggcctttagtcgtggctatcaacttagtcaacatcagaaaatccatactggtgagaaaccttatgaatgtaaagaatgtaagaaggccttccgttggggcaatcagcttactcaacatcaaaaaattcatactggggagaa

SEQ ID NO: 26863 - DNA, 167 bp, Homo sapiens
  MAP TO CHR19.3; EXPRESSED IN ADULT LIVER, SIGNAL = 1.2; EXPRESSED IN BRAIN, SIGNAL = 1.1; NT HIT: gi15307371, EVALUE 7.00e-87; EST_HUMAN HIT: BG720671.1, EVALUE 1.00e-86; SWISSPROT HIT: P55199, EVALUE 3.00e-25
ctcacccaggtagcggcctccagccttgatgacaatggcacttcggctccgcgtctcctcctccgcctgggccatgctctgccgcgccttctggtaggagtcgtcggtggcacacaccgtgatcttgtcctgtatgctgcccaggcagtccaggtgaacttccccat

SEQ ID NO: 26864 - DNA, 207 bp, Homo sapiens
  MAP TO CHR2.3; EXPRESSED IN LUNG, SIGNAL = 0.67; EXPRESSED IN ADULT LIVER, SIGNAL = 1.1; EXPRESSED IN BRAIN, SIGNAL = 0.54; SWISSPROT HIT: P27487, EVALUE 6.00e-33; NT HIT: U13729.1, EVALUE 1.00e-113; EST_HUMAN HIT: AU139683.1, EVALUE 1.00e-105
acctggctgcttcaatttgatcttcaacttcaaatgttcccagtcttctgttgattgcatgcatgatcttatctccttggtaaccacttcctctgccatcaaagctagctactataatgttttctgtgcttgcaaggtaagtggcccagttcagtctgaagacagtgtctgctttttgactacatgggcctgcatacctatgaaaaa

SEQ ID NO: 26865 - DNA, 111 bp, Homo sapiens
  MAP TO CHR5.3; EXPRESSED IN FETAL LIVER, SIGNAL = 1.1; EXPRESSED IN BRAIN, SIGNAL = 0.93; NT HIT: gi11417364, EVALUE 5.00e-56; EST_HUMAN HIT: BE090611.1, EVALUE 5.30e-01; SWISSPROT HIT: O60383, EVALUE 7.00e-16
aagaaacacaaatggattcagattgatgtgaccagcctccttcaacctttagtggcctccaacaagagaagtattcacatgtctataaattttacttgcatgaaagaccag

SEQ ID NO: 26866 - DNA, 254 bp, Homo sapiens
  MAP TO CHR17.3; EXPRESSED IN LUNG, SIGNAL = 4.3; EXPRESSED IN BRAIN, SIGNAL = 1.9; SWISSPROT HIT: P02452, EVALUE 6.00e-42; NT HIT: AF017178.2, EVALUE 0.00e+00; EST_HUMAN HIT: BF869534.1, EVALUE 0.00e+00
tgcagttcgagtatggcggccagggctccgaccctgccgatgtggccatccagctgaccttcctgcgcctgatgtccaccgaggcctcccagaacatcacctaccactgcaagaacagcgtggcctacatggaccagcagactggcaacctcaagaaggccctgctcctccagggctccaacgagatcgagatccgcgccgagggcaacagccgcttcacctacagcgtcactgtcgatggctgcacggtgagt

SEQ ID NO: 26867 - DNA, 108 bp, Homo sapiens
  MAP TO CHR22.3; EXPRESSED IN LUNG, SIGNAL = 0.83; EXPRESSED IN BRAIN, SIGNAL = 0.79; EST_HUMAN HIT: BG775066.1, EVALUE 5.00e-41; NT HIT: X58468.1, EVALUE 4.00e-41; SWISSPROT HIT: O18992, EVALUE 3.00e-13
ggcctcctcggtcacccaccgctccagggacttcttgcccaggcccaagttgcgcaaggtggacacggagaagcgcctctgctcgcgccacgcgtgtccgtagtgtgc

SEQ ID NO: 26868 - DNA, 125 bp, Homo sapiens
  MAP TO CHR1.3; EXPRESSED IN LUNG, SIGNAL = 0.44; EXPRESSED IN BRAIN, SIGNAL = 0.3; EST_HUMAN HIT: BE783305.1, EVALUE 3.00e-52; SWISSPROT HIT: Q29076, EVALUE 2.00e-14; NT HIT: gi14736726, EVALUE 2.00e-52
ttattttgcttgctttctaggcacacaaaccaatggtctggactttcagaagcagcctgtgcctgtaggaggagcaatctcaacagcccaggcgcaggctttccttggacatctccatcaggtag

SEQ ID NO: 26869 - DNA, 205 bp, Homo sapiens
  MAP TO CHR14.3; EXPRESSED IN LUNG, SIGNAL = 0.63; EXPRESSED IN ADULT LIVER, SIGNAL = 0.68; EXPRESSED IN BRAIN, SIGNAL =   1; EST_HUMAN HIT: BE906151.1, EVALUE 1.00e-106; SWISSPROT HIT: P79802, EVALUE 7.00e-24; NT HIT: L76528.1, EVALUE 1.00e-112
tctccacagggtttgtgccttacattattactccttgccattttcaagaaagcattgccagctcttccaatctccatcacctttgggcttgttttctactttgccacagattatcttgtacagccttttatggaccaattagcattccatcaattttatatctagcatatttgcggttagaatcccatggatgtttcttctttga

SEQ ID NO: 26870 - DNA, 124 bp, Homo sapiens
  MAP TO CHR16.3; EXPRESSED IN BRAIN, SIGNAL = 0.64; EXPRESSED IN FETAL LIVER, SIGNAL = 2.2; EST_HUMAN HIT: AW856109.1, EVALUE 1.00e-60; NT HIT: gi7706510, EVALUE 3.00e-60; SWISSPROT HIT: Q9NZV6, EVALUE 2.00e-17
ccaggtgtcctgtggcaagtgtggcaatgggttgggccacgagttcctgaacgacggccccaagccggggcagtcccgattctgaatattcagcagctcgctgaagtttgtccctaaaggtgag

SEQ ID NO: 26871 - DNA, 119 bp, Homo sapiens
  MAP TO CHR19.3; EXPRESSED IN LUNG, SIGNAL = 3.8; EXPRESSED IN FETAL LIVER, SIGNAL = 4.2; EXPRESSED IN BRAIN, SIGNAL = 0.95; EST_HUMAN HIT: BI668322.1, EVALUE 1.00e-60; SWISSPROT HIT: P55899, EVALUE 1.00e-20; NT HIT: gi4758345, EVALUE 8.00e-61
tctgtggtctctttctcccaataccaggacacctggttttcccagacccaagctccacagggctccgcctcgccccgcaggctattgtagctcaggtactgctgcgggcccagccagcc

SEQ ID NO: 26872 - DNA, 135 bp, Homo sapiens
  MAP TO CHR1.3; EXPRESSED IN ADULT LIVER, SIGNAL = 1.5; EXPRESSED IN BRAIN, SIGNAL = 2.9; NT HIT: AF257303.1, EVALUE 2.00e-34; SWISSPROT HIT: P46097, EVALUE 6.00e-17; EST_HUMAN HIT: BE463993.1, EVALUE 2.00e-22
acctgaaaggccgcccacgtccatcttcttgaggttcttagcctccaggatgcagacagtgagcttcccggccgtgggcacatagcgcagggaggtgcagatgtcgcccagcttctccggctgtccaggggaaga

SEQ ID NO: 26873 - DNA, 235 bp, Homo sapiens
  MAP TO CHR13.3; EXPRESSED IN BRAIN, SIGNAL = 1.1; NT HIT: U72237.1, EVALUE 1.00e-129; SWISSPROT HIT: P05413, EVALUE 2.00e-31; EST_HUMAN HIT: BF574409.1, EVALUE 8.00e-73
gcaagaattttgatgactacatgaagttaatcggtgcaagttttgctatcaggcaggtggctagcatgacaaagcctaccacaatcatcaaaaagaatggggacattatcaccttaaaaacacagagcatgttcaagaacacagagatcagctttaagctggggatggggttcgatgagacaacagcagatgacaaaaaggtcaagtccattgtgacactggatggaagcaaact

SEQ ID NO: 26874 - DNA, 140 bp, Homo sapiens
  MAP TO CHR2.3; EXPRESSED IN FETAL LIVER, SIGNAL = 1.2; EXPRESSED IN BRAIN, SIGNAL = 0.8; EXPRESSED IN ADULT LIVER, SIGNAL = 0.89; EXPRESSED IN LUNG, SIGNAL = 1.1; SWISSPROT HIT: P05451, EVALUE 6.00e-21; NT HIT: AF172331.1, EVALUE 7.00e-71; EST_HUMAN HIT: BI791778.1, EVALUE 1.00e-70
acagctctattgccagaacatgaattcgggcaacctggtgtctgtgctcacccaggccgagggtgcctttgtggcctcactgattaaggagagtggcactgatgacttcaatgtctggattggcctccatgaccccaaaa

SEQ ID NO: 26875 - DNA, 180 bp, Homo sapiens
  MAP TO CHR21.3; EXPRESSED IN ADULT LIVER, SIGNAL = 0.44; EXPRESSED IN BRAIN, SIGNAL = 0.67; EST_HUMAN HIT: AL570914.1, EVALUE 3.00e-81; SWISSPROT HIT: P55347, EVALUE 1.00e-28; NT HIT: gi14780599, EVALUE 2.00e-81
caggttcatcaatgccagaagacgaattcttcagccaatgttggattcaagttgttcagagacccccaaaacaaagaaaaaaactgctcagaaccggccagttcagaggttttggcctgattctattgcatcaggagtcgcacagccaccgccgagcgagctcaccatgtcggaaggtac

SEQ ID NO: 26876 - DNA, 229 bp, Homo sapiens
  MAP TO CHR17.3; EXPRESSED IN ADULT LIVER, SIGNAL = 4.4; EXPRESSED IN BRAIN, SIGNAL = 7.8; EST_HUMAN HIT: BG564639.1, EVALUE 1.00e-126; SWISSPROT HIT: Q61656, EVALUE 1.00e-38; NT HIT: gi13514826, EVALUE 1.00e-126
agatgtggaagatgtgaaatttgtcatcaattatgactaccctaactcctcagaggattatattcatcgaattggaagaactgctcgcagtaccaaaacaggcacagcatacactttctttacacctaataacataaagcaagtgagcgaccttatctctgtgcttcgtgaagctaatcaagcaattaatcccaagttgcttcagttggtcgaagacagaggttcaggt

SEQ ID NO: 26877 - DNA, 213 bp, Homo sapiens
  MAP TO CHR21.3; EXPRESSED IN FETAL LIVER, SIGNAL = 0.61; EXPRESSED IN BRAIN, SIGNAL = 0.4; EST_HUMAN HIT: W76571.1, EVALUE 1.00e-77; SWISSPROT HIT: Q02817, EVALUE 1.30e-02; NT HIT: gi13386207, EVALUE 6.00e-23
tggcatgcaaactcagaatcttctcagtgtaactcagctgaactcacatctcccatcaacatgtcctacaactgctgctctggaaacttctcctcccgctcctgtggtggctacctgcactacccagcctcctcctgtggcttttcctaccccagcaaccaggtctacagcactgacctctgctctcccagcacgtgccagctgggttcctct

SEQ ID NO: 26878 - DNA, 175 bp, Homo sapiens
  MAP TO CHR5.3; EXPRESSED IN LUNG, SIGNAL = 0.7; EXPRESSED IN BRAIN, SIGNAL = 0.72; EST_HUMAN HIT: AU127985.1, EVALUE 2.00e-04; SWISSPROT HIT: Q9Y5E7, EVALUE 3.00e-26; NT HIT: AF217756.1, EVALUE 5.00e-94
agctggtgctgaacagagccctggatcgcgaggagcagcctgagatcaggttaaccctcacagcgctagatggcgggagtccacccaggtccggcacggccctggtacggattgaagttgtggacatcaatgacaacgtcccagagtttgcaaagctgctctatgaggtgcagat

SEQ ID NO: 26879 - DNA, 139 bp, Homo sapiens
  MAP TO CHR2.3; EXPRESSED IN ADULT LIVER, SIGNAL = 0.71; EXPRESSED IN BRAIN, SIGNAL = 0.46; NT HIT: D00649.1, EVALUE 1.00e-72; EST_HUMAN HIT: AA622384.1, EVALUE 3.00e-68; SWISSPROT HIT: P45887, EVALUE 5.00e-21
cagggtgtgatggtgggaatgggccagaaagacagctatgtgggggatgaggctcagagcaagcgagggatcctaactctcaaataccccattgaacacggcatcatcaccaactgggatgacatggagaaggtatctg

SEQ ID NO: 26880 - DNA, 183 bp, Homo sapiens
  MAP TO CHR14.3; EXPRESSED IN ADULT LIVER, SIGNAL = 2.5; EXPRESSED IN FETAL LIVER, SIGNAL = 2.5; EXPRESSED IN BRAIN, SIGNAL = 2.5; NT HIT: gi14750893, EVALUE 5.00e-94; SWISSPROT HIT: P50876, EVALUE 2.20e-01; EST_HUMAN HIT: BF854275.1, EVALUE 2.00e-94
agatgcaggccctgacttcctgtgagtgcaccatctgtcctgactgcttccgccagcacttcaccatcgccttgaaggagaagcacatcacagacatggtgtgccctgcctgtggccgccccgacctcaccgatgacacacagttgctcagctacttctctacccttgacatccaggtactgc

SEQ ID NO: 26881 - DNA, 191 bp, Homo sapiens
  MAP TO CHR11.3; EXPRESSED IN BRAIN, SIGNAL =   2; EXPRESSED IN FETAL LIVER, SIGNAL = 1.3; EXPRESSED IN ADULT LIVER, SIGNAL = 1.3; EXPRESSED IN LUNG, SIGNAL = 0.74; EST_HUMAN HIT: F25872.1, EVALUE 1.00e-103; SWISSPROT HIT: P11217, EVALUE 2.00e-23; NT HIT: U94777.1, EVALUE 1.00e-103
acagactcaagggctggtttggggtctggtctggaggctcagatggcctcatccggggctggcaggcgctggcgggaaggctccacaccccagatctcccgggcatactgggcaatggtgcggtcactggagaacttgccagaggtggctatgttccggatcaccatccgcgtccactctcttgggttctg

SEQ ID NO: 26882 - DNA, 114 bp, Homo sapiens
  MAP TO CHR19.3; EXPRESSED IN LUNG, SIGNAL = 0.7; EXPRESSED IN BRAIN, SIGNAL =   2; EXPRESSED IN FETAL LIVER, SIGNAL = 0.74; SWISSPROT HIT: Q14589, EVALUE 7.00e-14; EST_HUMAN HIT: BG291884.1, EVALUE 3.00e-55; NT HIT: gi12741394, EVALUE 8.00e-58
ttgcatttgtaaggtttcttgccactatgaattacctgatggttggtaagtgttgacctcacactaaaggctttgccacactctttacatgtgtaaggtttctctccaatatga

SEQ ID NO: 26883 - DNA, 172 bp, Homo sapiens
  MAP TO CHR1.3; EXPRESSED IN ADULT LIVER, SIGNAL = 4.3; EXPRESSED IN LUNG, SIGNAL = 4.6; EXPRESSED IN BRAIN, SIGNAL = 3.1; NT HIT: gi14722057, EVALUE 7.00e-84; EST_HUMAN HIT: AV751940.1, EVALUE 2.00e-91; SWISSPROT HIT: O08709, EVALUE 2.00e-25
ttcttcctttcagatggggcattctcttctcccaccctcgggactttaccccagtgtgcaccacagagcttggcagagctgcaaagctggcaccagaatttgccaagaggaatgttaagttgattgccctttcaatagacagtgttgaggaccatcttgcctggagcaaggt

SEQ ID NO: 26884 - DNA, 196 bp, Homo sapiens
  MAP TO CHR17.3; EXPRESSED IN FETAL LIVER, SIGNAL = 1.6; EXPRESSED IN BRAIN, SIGNAL = 2.4; EXPRESSED IN ADULT LIVER, SIGNAL = 1.2; NT HIT: gi14786064, EVALUE 2.00e-84; SWISSPROT HIT: P52632, EVALUE 5.00e-28; EST_HUMAN HIT: BE545849.1, EVALUE 3.00e-84
tgtgtcccctgcagcacgttcatcattgagaagcagcctcctcaggtcctgaagacccagaccaagtttgcagccactgtgcgcctgctggtgggcgggaagctgaacgtgcacatgaaccccccccaggtgaaggccaccatcatcagtgagcagcaggccaagtctctgctcaagaacgagaacacccgcaagt

SEQ ID NO: 26885 - DNA, 252 bp, Homo sapiens
  MAP TO CHR1.3; EXPRESSED IN ADULT LIVER, SIGNAL = 0.43; EXPRESSED IN BRAIN, SIGNAL = 0.39; NT HIT: gi14746315, EVALUE 0.00e+00; SWISSPROT HIT: P15812, EVALUE 5.00e-47; EST_HUMAN HIT: AA311140.1, EVALUE 0.00e+00
gaagccagaggcctggctgtcctgtggccccagtcctggccctggccgtctgcagcttgtgtgccatgtctcaggattctacccaaagcccgtgtgggtgatgtggatgcggggtgagcaggagcagcggggcactcagcgaggggacgtcctgcctaatgctgacgagacatggtatctccgagcaaccctggatgtggcggctggggaggcagctggcctgtcctgtcgggtgaaacacagcagtctagg

SEQ ID NO: 26886 - DNA, 231 bp, Homo sapiens
  MAP TO CHR3.3; EXPRESSED IN LUNG, SIGNAL = 1.2; EXPRESSED IN BRAIN, SIGNAL = 1.3; SWISSPROT HIT: P51178, EVALUE 1.00e-08; EST_HUMAN HIT: AL553689.1, EVALUE 1.00e-99; NT HIT: gi14737669, EVALUE 1.00e-122
  unsure 133
ctcaccagtctcgctgggctcgtagtgctcaatgagggagagggccagcgcaggctgccgccctcctcccgctgctggtgctgcaggaacgtcactaactgatccaccgacagagtctcccctgagcccgcgnctcggcgaaggtgcggtcgatctccacccgctggtcagcatcttgtagaaggcctcaatctcctcgtcctccagggagtctgtctgggagtggtcaca

SEQ ID NO: 26887 - DNA, 239 bp, Homo sapiens
  MAP TO CHR4.3; EXPRESSED IN BRAIN, SIGNAL = 0.64; EXPRESSED IN ADULT LIVER, SIGNAL = 0.6; SWISSPROT HIT: P30968, EVALUE 6.00e-41; EST_HUMAN HIT: BG189454.1, EVALUE 5.00e-03; NT HIT: AF001951.1, EVALUE 0.00e+00
tctaaggaatacataccgtgggggtcctgatgaaggacccgtgtcagggtgaagatgatttttgcattgcagatcagcatgatgaaaagagggatgatgaagaggcagctgaaggtgaaaaagttataaaatgcttgatgccaccattgtgaaaaactgcagtgtgttacacattgagagaaaacttttgtctgtccagagctgtctgctagatgaatcatcctgaagatgtataactg

SEQ ID NO: 26888 - DNA, 253 bp, Homo sapiens
  MAP TO CHR14.3; EXPRESSED IN BRAIN, SIGNAL = 0.88; EXPRESSED IN LUNG, SIGNAL =   1; NT HIT: gi6005893, EVALUE 0.00e+00; SWISSPROT HIT: P79241, EVALUE 3.70e-01; EST_HUMAN HIT: BE940121.1, EVALUE 2.00e-82
caggcactggttctccaaggagaggatgtctgggtgggcagacacatatccatgtggtttttccatggtcttcaggtcaggaagcgtggctaggcactggttcttcaaggagaggatatctgagtgggtagatacatgctgatgtagtttctccaagggctgtaagtcagggagcatagccaggcaccggttctccaaggagaggatgtctggatgggcagacacatgcccatggagtttttccatggctgaa

SEQ ID NO: 26889 - DNA, 142 bp, Homo sapiens
  MAP TO CHRX.3; EXPRESSED IN BRAIN, SIGNAL = 0.52; SWISSPROT HIT: Q14974, EVALUE 8.00e-10; EST_HUMAN HIT: BF724220.1, EVALUE 2.00e-19; NT HIT: gi14774783, EVALUE 2.00e-19
tcttggcagatgtaataaattgcatccaatgttgacttttccatgtactctaggctgctggggtttgtgacattggctaccagctaaagaatgagttctgacgactagtttactgggatctctgcacaaacagtatcagcca

SEQ ID NO: 26890 - DNA, 128 bp, Homo sapiens
  MAP TO CHR2.3; EXPRESSED IN LUNG, SIGNAL = 0.57; EXPRESSED IN BRAIN, SIGNAL = 0.33; EXPRESSED IN FETAL LIVER, SIGNAL = 0.42; NT HIT: gi11429262, EVALUE 2.00e-64; SWISSPROT HIT: P28330, EVALUE 2.00e-18; EST_HUMAN HIT: T40152.1, EVALUE 3.00e-64
taccttccagctccaggctctgtcattgctattgcaccaatacatttgcctgcagtcatctggggaataaagtgcttaatctgttcttctgagccatggtttgtaatataggacatgacaatacctga

SEQ ID NO: 26891 - DNA, 122 bp, Homo sapiens
  MAP TO CHRX.3; EXPRESSED IN ADULT LIVER, SIGNAL = 1.2; EXPRESSED IN BRAIN, SIGNAL = 1.4; EST_HUMAN HIT: BE873036.1, EVALUE 1.00e-54; NT HIT: L40817.1, EVALUE 1.00e-62; SWISSPROT HIT: P49184, EVALUE 1.00e-09
tctgccagtgctgggagacctccagaaacacatcgtagagggcgttcagctccttctctacggccttaggagtggtgtgcagcgggaccaacaccaggctgggaaggactgcaaggcccagg

SEQ ID NO: 26892 - DNA, 183 bp, Homo sapiens
  MAP TO CHR9.3; EXPRESSED IN BRAIN, SIGNAL = 0.39; EXPRESSED IN LUNG, SIGNAL = 0.49; NT HIT: gi16161152, EVALUE 9.00e-99; SWISSPROT HIT: P01567, EVALUE 1.00e-30; EST_HUMAN HIT: AI860608.1, EVALUE 2.00e-04
ctgctctctgggctgtgatctgcctcagacccacagcctgcgtaataggagggccttgatactcctggcacaaatgggaagaatctctcctttctcctgcttgaaggacagacatgaattcagattcccagaggaggagtttgatggccaccagttccagaagactcaagccatctctgtcct

SEQ ID NO: 26893 - DNA, 335 bp, Homo sapiens
  MAP TO CHR14.3; EXPRESSED IN LUNG, SIGNAL = 0.53; EXPRESSED IN BRAIN, SIGNAL = 0.67; EST_HUMAN HIT: BE673491.1, EVALUE 3.00e-45; NT HIT: gi14751733, EVALUE 0.00e+00; SWISSPROT HIT: P29597, EVALUE 1.10e+00
tgtttctagatggagtatccctatggagagctcatcatctccctgggcttcttttttgtcttctttttggagtcgctggcattgcagtgctgtcctggggctgctggaggatcgacagtgcaggacgaagaatggggtggggctcatatcttcgaactccacagccatggacatttaccctcaccctcaaagggtcccctccgagcccttgtcctcttgctgtcactctcctttcactcagtgtttgaagggctagctgtggggctgcagccgacagtagcagctaccgtgcagctctgccttgctgtcctggctcataaggggcttgtggtgtt

SEQ ID NO: 26894 - DNA, 220 bp, Homo sapiens
  MAP TO CHR8.3; EXPRESSED IN BRAIN, SIGNAL = 0.3; EXPRESSED IN FETAL LIVER, SIGNAL = 0.34; NT HIT: gi7657078, EVALUE 2.00e-57; SWISSPROT HIT: P87053, EVALUE 2.00e-06; EST_HUMAN HIT: AW835447.1, EVALUE 1.00e-114
cagtttgacaaatggacagactctcaaagaagaagaatcctcacaggcctgttggagcgctgctcgctgtcccagcaaaagttctgctgtcgaaagcttcaagagaaaattccagcagaagccctggactttacaaccaagcttccaagggtgttatctttatacatcttttctttcctggaccctcggagcctttgtcgttgtgcacaggtaaaggcaa

SEQ ID NO: 26895 - DNA, 465 bp, Homo sapiens
  MAP TO CHR14.3; EXPRESSED IN BRAIN, SIGNAL = 0.68; EXPRESSED IN LUNG, SIGNAL = 2.2; EST_HUMAN HIT: BG564488.1, EVALUE 0.00e+00; NT HIT: gi14751803, EVALUE 0.00e+00; SWISSPROT HIT: P03950, EVALUE 2.00e-74
ttttgccctccgcaggagcctgtgttggaagagatggtgatgggcctgggcgttttgttgttggtcttcgtgctgggtctgggtctgaccccaccgaccctggctcaggataactccaggtacacacacttcctgacccagcactatgatgccaaaccacagggccgggatgacagatactgtgaaagcatcatgaggagacggggcctgacctcaccctgcaaagacatcaacacatttattcatggcaacaagcgcagcatcaaggccatctgtgaaaacaagaatggaaaccctcacagagaaaacctaagaataagcaagtcttctttccaggtcaccacttgcaagctacatggaggttccccctggcctccatgccagtaccgagccacagcggggttcagaaacgttgttgttgcttgtgaaaatggcttacctgtccacttggatcagtcaattttc

SEQ ID NO: 26896 - DNA, 108 bp, Homo sapiens
  MAP TO CHR10.3; EXPRESSED IN ADULT LIVER, SIGNAL = 0.94; EXPRESSED IN BRAIN, SIGNAL = 0.84; EXPRESSED IN FETAL LIVER, SIGNAL = 0.35; NT HIT: AF006516.1, EVALUE 9.00e-42; SWISSPROT HIT: O06737, EVALUE 2.70e+00; EST_HUMAN HIT: BG541005.1, EVALUE 1.00e-41
aatctgcaaaaatccgtcacattgctgttgggacagattaagataaggctaaaatttttttccaagttaacatattgagaaaatagaatcataattctgcaataaatc

SEQ ID NO: 26897 - DNA, 147 bp, Homo sapiens
  MAP TO CHRX.3; EXPRESSED IN BRAIN, SIGNAL =   3; EXPRESSED IN ADULT LIVER, SIGNAL = 2.4; NT HIT: gi13540508, EVALUE 2.00e-77; SWISSPROT HIT: P06213, EVALUE 2.00e+00; EST_HUMAN HIT: AA121554.1, EVALUE 1.00e-67
atgcttgtaaaaacagttctctccaaatgggcagctcccacgtccttcatcaaaatacttgcatgccttgttgctcattgcctccttgtatttctgaatgagtttctgcttctcttctttctcctccacccagtactcacttggaat

SEQ ID NO: 26898 - DNA, 145 bp, Homo sapiens
  MAP TO CHR12.3; EXPRESSED IN LUNG, SIGNAL = 0.73; EXPRESSED IN ADULT LIVER, SIGNAL = 0.52; EXPRESSED IN BRAIN, SIGNAL = 0.42; NT HIT: gi11436313, EVALUE 1.00e-72; SWISSPROT HIT: P51890, EVALUE 4.00e-03; EST_HUMAN HIT: BF525988.1, EVALUE 7.00e-75
taggcccaaaacatgctgaagaaggtggaaggcttggaggatctgagcaatctcaccaccttgcatcttcgagacaaccagattgacaccctgagtggcttctccagagaaatgaaatcattgcagtacctcaacctgaggtatg

SEQ ID NO: 26899 - DNA, 131 bp, Homo sapiens
  MAP TO CHR11.3; EXPRESSED IN LUNG, SIGNAL = 1.7; EXPRESSED IN FETAL LIVER, SIGNAL = 0.64; EXPRESSED IN BRAIN, SIGNAL =  12; SWISSPROT HIT: P23927, EVALUE 7.00e-18; EST_HUMAN HIT: BF843896.1, EVALUE 9.00e-68; NT HIT: M28638.1, EVALUE 6.00e-68
acctggcgctcttcatgttttccatgcacctcaatcacatctcccaacaccttaactttgagttcctctggggagaagtgcttcacatccaggttgacagagaacctgtccttctccaggcgcatctagaa

SEQ ID NO: 26900 - DNA, 187 bp, Homo sapiens
  MAP TO CHR3.3; EXPRESSED IN LUNG, SIGNAL =   2; EXPRESSED IN BRAIN, SIGNAL = 1.5; NT HIT: S69002.1, EVALUE 1.00e-101; SWISSPROT HIT: Q03112, EVALUE 1.00e-30; EST_HUMAN HIT: BE466525.1, EVALUE 1.00e-101
cctgcgatttggactttctgtgtaacggctgcttaagttcctctggcacatgggaagtactaaaagaagacagctcagcttcagaatattgattatcttccattttcctcattttgaggctatctgtgaagtgccttatatgatctagagcagaaagtccacttttatattcttcctctttatacct

SEQ ID NO: 26901 - DNA, 206 bp, Homo sapiens
  MAP TO CHR1.3; EXPRESSED IN LUNG, SIGNAL = 0.68; EXPRESSED IN ADULT LIVER, SIGNAL = 0.73; EXPRESSED IN FETAL LIVER, SIGNAL = 0.61; EXPRESSED IN BRAIN, SIGNAL = 0.88; EST_HUMAN HIT: BE893005.1, EVALUE 4.00e-74; NT HIT: gi16168530, EVALUE 1.00e-104; SWISSPROT HIT: P34820, EVALUE 4.00e-22
cagggcacagcgtggatcctggcctggccggcctgctgggtcaacgggccccacgctcccaacagcctttcgtggtcactttcttcagggccagtccgagtcccatccgcacccctcgggcagtgaggccactgaggaggaggcagccgaagaaaaccaacgagctgccgcaggccaaccgactcccagggatctttggtgagggt

SEQ ID NO: 26902 - DNA, 147 bp, Homo sapiens
  MAP TO CHR8.3; EXPRESSED IN BRAIN, SIGNAL =  23; SWISSPROT HIT: P04406, EVALUE 2.00e-11; EST_HUMAN HIT: BG024425.1, EVALUE 2.00e-26; NT HIT: AF017079.1, EVALUE 3.00e-30
atgccaaagttgtcatggatgggcttggccgggggattaagcagttggtggtacagaaggcattgctgatgatcttgaggctgttttcagacttctcagggatcatgcccattatgaatatgggggcatcagcagagggggtagaga

SEQ ID NO: 26903 - DNA, 155 bp, Homo sapiens
  MAP TO CHR2.3; EXPRESSED IN LUNG, SIGNAL = 0.46; EXPRESSED IN BRAIN, SIGNAL = 0.85; NT HIT: gi15294734, EVALUE 1.00e-78; SWISSPROT HIT: Q99743, EVALUE 2.00e-22; EST_HUMAN HIT: AW662905.1, EVALUE 9.00e-81
ttgaagttttcggcacagttcagcatgttccagaccatcaaagaccagctagagcagcggacgcggatcctgcaggccaatatccggtggcaacaggaagagctccacaagatccaggagcagctctgcctggtccaggactccaacgtccaggt

SEQ ID NO: 26904 - DNA, 149 bp, Homo sapiens
  MAP TO CHR1.3; EXPRESSED IN BRAIN, SIGNAL = 0.46; EST_HUMAN HIT: BE789148.1, EVALUE 2.00e-78; NT HIT: AF015592.1, EVALUE 1.00e-78; SWISSPROT HIT: O00311, EVALUE 9.00e-22
attgacatgtggtctgcaggtgtcatatttctttctttgcttagtggacgatatccattttataaagcaagtgatgatttaactgctttggcccaaattatgacaattaggggatccagagaaactatccaagctgctaaaacttttgg

SEQ ID NO: 26905 - DNA, 170 bp, Homo sapiens
  MAP TO CHR14.3; EXPRESSED IN FETAL LIVER, SIGNAL = 1.7; EXPRESSED IN BRAIN, SIGNAL = 1.5; SWISSPROT HIT: P12883, EVALUE 2.00e-23; EST_HUMAN HIT: BF855580.1, EVALUE 5.00e-70; NT HIT: AJ238393.1, EVALUE 5.00e-91
ggtgcagcactcacgtagatcatccaggagccgtagcgatccttgaggttgtagagcaccgcgggctcatgcaggaaggtcagcatggccatgtcctcgattttgtcgaacttgggtgggttctgctgcatcacctggtcctccttcacggtcactgtctgcaagagccc

SEQ ID NO: 26906 - DNA, 331 bp, Homo sapiens
  MAP TO CHR1.3; EXPRESSED IN BRAIN, SIGNAL = 0.4; EST_HUMAN HIT: AL047443.1, EVALUE 1.00e-41; SWISSPROT HIT: P16581, EVALUE 3.00e-64; NT HIT: gi14737083, EVALUE 0.00e+00
ctgtgtagcatagggcaagcttcttcttgctgcacctctcatcattccacatgcccacatctttttctctcttgatgtagatctccacgcagtcctcatctttttgcctattgttgggttcacctggagcccagttcttggcttcttctgtcagaggtttctgggttcctacccagacccacacattgttgacttttctgattccaatccagtaataacttggtgaatagctcaatatggagtttaggtactcaatctcttctttgttttgaattgcaaccaggtgtgtgtacctttgctgacaataagcactggcctcatcataagtcat

SEQ ID NO: 26907 - DNA, 162 bp, Homo sapiens
  MAP TO CHR21.3; EXPRESSED IN FETAL LIVER, SIGNAL = 0.51; EXPRESSED IN BRAIN, SIGNAL = 0.4; NT HIT: gi6754491, EVALUE 2.00e-07; EST_HUMAN HIT: W76571.1, EVALUE 5.00e-30; SWISSPROT HIT: P47179, EVALUE 1.70e-01
agaggaacccagctggcaggtgctgggagatcaaaggttcagtgctgtagaccaggttgctggggtacgaggagccaccacgggagtagcctgagtagcacaggtagccctcacaggaatgggaggagaagtttccacagcagcagttgtaggacatgttga

SEQ ID NO: 26908 - DNA, 167 bp, Homo sapiens
  MAP TO CHR4.3; EXPRESSED IN LUNG, SIGNAL = 0.41; EXPRESSED IN ADULT LIVER, SIGNAL = 0.65; EXPRESSED IN BRAIN, SIGNAL = 0.4; EST_HUMAN HIT: BF701297.1, EVALUE 9.00e-78; SWISSPROT HIT: Q13257, EVALUE 2.00e-21; NT HIT: AB056160.1, EVALUE 3.00e-89
tacctttcagttgttccaccacattatttaggtattttatgagctcaagatcagtagttacaagcaaggtgagtccgtatttctgcactcgagtaaaggtttcagatggatatatgccacgctgatataaaatgctgttgatgccgaatgctgcaagcaaaagaaat

SEQ ID NO: 26909 - DNA, 184 bp, Homo sapiens
  MAP TO CHR2.3; EXPRESSED IN ADULT LIVER, SIGNAL = 0.49; EXPRESSED IN BRAIN, SIGNAL = 0.61; EST_HUMAN HIT: F06564.1, EVALUE 2.00e-88; SWISSPROT HIT: Q07917, EVALUE 6.00e-12; NT HIT: AB019433.1, EVALUE 2.00e-99
gcttcttaccctggaatagtccaggctggtcatagccgggttggagtcgacatgggccctgacgagggcactgatcagactcaccgggggcgaagggggagagggctcctgtgggctcttcggtttcgagggcaaacgacctctccggccttttaaactgtctgtgcgaaccactgcaaaggaa

SEQ ID NO: 26910 - DNA, 103 bp, Homo sapiens
  MAP TO CHR2.3; EXPRESSED IN LUNG, SIGNAL = 0.75; EXPRESSED IN BRAIN, SIGNAL = 0.61; EXPRESSED IN ADULT LIVER, SIGNAL = 0.62; EST_HUMAN HIT: BG686318.1, EVALUE 4.00e-51; SWISSPROT HIT: Q13342, EVALUE 4.00e-17; NT HIT: gi14724148, EVALUE 2.00e-51
gatgagtgtgaggtgtgccgggacggaggggagctgttctgttgcgacacttgttcaagagtcttccatgaggactgtcacatcccgcctgtggaagctgaga

SEQ ID NO: 26911 - DNA, 115 bp, Homo sapiens
  MAP TO CHR20.3; EXPRESSED IN BRAIN, SIGNAL = 3.1; EXPRESSED IN LUNG, SIGNAL = 5.1; EST_HUMAN HIT: F33782.1, EVALUE 1.00e-57; SWISSPROT HIT: P56381, EVALUE 2.00e-14; NT HIT: AF052955.1, EVALUE 8.00e-58
actttcacaatttttacgttgctgccagaagtcttctcagcatttgctttgaattctgtcttcagtgcatctctcactgcttttgcacagatctgggagtatcggatgtagctgg

SEQ ID NO: 26912 - DNA, 264 bp, Homo sapiens
  MAP TO CHR1.3; EXPRESSED IN LUNG, SIGNAL =  31; EXPRESSED IN BRAIN, SIGNAL = 3.1; EST_HUMAN HIT: AV653802.1, EVALUE 0.00e+00; SWISSPROT HIT: Q09456, EVALUE 2.70e+00; NT HIT: AB051901.1, EVALUE 0.00e+00
caccagtaaggaatattcaactcgaaggatgttgcagcccaggatagaaggcctgatcttctgaacccgaaggctcttgccacgccatgatgcgcatgtccctgagataatatgattgcctctgactgatgacaacttctgagtcagcaccttggtctggccattggcaaggtaagtgtggcgggccacaatggcagctttggggaccacaattcgggaacatgtattctcaaagtcagcatggatggaaatctcatcacctag

SEQ ID NO: 26913 - DNA, 109 bp, Homo sapiens
  MAP TO CHR18.3; EXPRESSED IN LUNG, SIGNAL = 1.8; EXPRESSED IN ADULT LIVER, SIGNAL = 1.9; EXPRESSED IN BRAIN, SIGNAL = 1.8; EST_HUMAN HIT: BE514898.1, EVALUE 1.00e-54; SWISSPROT HIT: P90587, EVALUE 1.40e-01; NT HIT: gi16163654, EVALUE 7.00e-55
agtctttttgccttcaccaacaaaattacttctgtgcacagtagaattatttggtcttgtgattggagtcctgacagcaagtatttcttcactgggagtcgagacaaaa

SEQ ID NO: 26914 - DNA, 117 bp, Homo sapiens
  MAP TO CHR10.3; EXPRESSED IN LUNG, SIGNAL = 0.87; EXPRESSED IN FETAL LIVER, SIGNAL = 1.2; EXPRESSED IN BRAIN, SIGNAL = 1.1; SWISSPROT HIT: O75607, EVALUE 2.00e-17; NT HIT: gi14746058, EVALUE 1.00e-59; EST_HUMAN HIT: AW296355.1, EVALUE 2.00e-59
catgggttggcaggacagcttgaggttggccacagggactgcgatctcctgatggtcatggttccgggccacaacttctaccacattacactcgtctttggctccctcggtgaggca

SEQ ID NO: 26915 - DNA, 112 bp, Homo sapiens
  MAP TO CHR2.3; EXPRESSED IN BRAIN, SIGNAL = 2.1; EXPRESSED IN ADULT LIVER, SIGNAL = 1.6; NT HIT: gi14733519, EVALUE 1.00e-56; EST_HUMAN HIT: BG483059.1, EVALUE 2.00e-56; SWISSPROT HIT: P49279, EVALUE 1.00e-13
gagaagccaacatgtacttcctgattgaggccaccatcgccctgtccgtctcctttatcatcaacctctttgtcatggctgtctttgggcaggccttctaccagaaaaccaa

SEQ ID NO: 26916 - DNA, 121 bp, Homo sapiens
  MAP TO CHR17.3; EXPRESSED IN FETAL LIVER, SIGNAL =   2; EXPRESSED IN ADULT LIVER, SIGNAL = 3.3; EXPRESSED IN BRAIN, SIGNAL = 0.33; EST_HUMAN HIT: AW611950.1, EVALUE 1.00e-57; SWISSPROT HIT: P35575, EVALUE 5.00e-14; NT HIT: gi15312345, EVALUE 3.00e-51
ccctctggccatgccatgggcacagcaggtgtatactacgtgatggtcacatctactctttccatctttcagggaaagataaagccgacctacagatttcggtaagaactcaccactgggg

SEQ ID NO: 26917 - DNA, 171 bp, Homo sapiens
  MAP TO CHR2.3; EXPRESSED IN ADULT LIVER, SIGNAL = 1.1; EXPRESSED IN FETAL LIVER, SIGNAL = 2.7; EXPRESSED IN BRAIN, SIGNAL = 0.88; NT HIT: AY016295.1, EVALUE 1.00e-91; EST_HUMAN HIT: AL047573.1, EVALUE 2.00e-91; SWISSPROT HIT: P02461, EVALUE 5.00e-33
cttggtcagtcctatgcggatagagatgtctggaagccagaaccatgccaaatatgtgtctgtgactcaggatccgttctctgcgatgacataatatgtgacgatcaagaattagactgccccaacccagaaattccatttggagaatgttgtgcagtttgcccacagcct

SEQ ID NO: 26918 - DNA, 141 bp, Homo sapiens
  MAP TO CHRX.3; EXPRESSED IN ADULT LIVER, SIGNAL = 0.78; EXPRESSED IN LUNG, SIGNAL = 0.83; EXPRESSED IN FETAL LIVER, SIGNAL = 0.85; EXPRESSED IN BRAIN, SIGNAL = 0.6; EST_HUMAN HIT: BI545533.1, EVALUE 3.00e-34; SWISSPROT HIT: Q61967, EVALUE 3.00e-13; NT HIT: gi14758278, EVALUE 7.00e-65
ccttacccacggagaccaggtgattataggtctccagcatcacatccctatgcagggtcttctgagcaggattcaactgctgccactcttcctgcgtgaagtccacagccacatcctcaaatgtcactggttcctataaca

SEQ ID NO: 26919 - DNA, 183 bp, Homo sapiens
  MAP TO CHR19.3; EXPRESSED IN FETAL LIVER, SIGNAL = 0.8; EXPRESSED IN BRAIN, SIGNAL = 0.6; EXPRESSED IN LUNG, SIGNAL = 0.73; EST_HUMAN HIT: AI733552.1, EVALUE 1.00e-95; SWISSPROT HIT: P41233, EVALUE 2.00e-20; NT HIT: AB055390.1, EVALUE 8.00e-96
accatgtcccagagaaagttgccaagccagtagagggtgggggacaggccccccatgagctgcaggtgcttggctcgggtgactcgctcctcaatgaggacaagagtgaagctggccgggacaaaggacatggcaaagaccacacagatggagacgaggacgtccaccgaggaggccatcctg

SEQ ID NO: 26920 - DNA, 258 bp, Homo sapiens
  MAP TO CHR19.3; EXPRESSED IN LUNG, SIGNAL = 0.86; EXPRESSED IN ADULT LIVER, SIGNAL = 0.88; EXPRESSED IN BRAIN, SIGNAL = 1.2; SWISSPROT HIT: Q61116, EVALUE 1.00e-48; EST_HUMAN HIT: AV745182.1, EVALUE 2.00e-58; NT HIT: gi15301660, EVALUE 0.00e+00
agtgtggactctctgatgggtatgaagatttgagctacaactaaagcgtttaccacaatccccacatttatatggtttctctccagtgtgaattctttcatgggcctgaagatgtgatctctgagtgaagcccttcccacacacctcacatttataaggtttctctccagtgtgaactctgcaatgaatgttaagatctgtgctacgactgaagcccttcccacaactgtcacatctatagggcttctctcctgtgtg

SEQ ID NO: 26921 - DNA, 143 bp, Homo sapiens
  MAP TO CHR9.3; EXPRESSED IN BRAIN, SIGNAL = 0.59; EXPRESSED IN LUNG, SIGNAL = 0.52; EXPRESSED IN ADULT LIVER, SIGNAL = 0.51; SWISSPROT HIT: P50517, EVALUE 4.00e-09; EST_HUMAN HIT: BG168127.1, EVALUE 4.00e-24; NT HIT: M88690.1, EVALUE 1.00e-29
gtcccttgaaatacctgaaccactgccttggagccaccaacttctagaacttgcccatgtctctgtgccatctagtaatgtccagtggacaatatcagcgtctatgggaaacttaacgtgatctaagatcactagtagaccat

SEQ ID NO: 26922 - DNA, 242 bp, Homo sapiens
  MAP TO CHR10.3; EXPRESSED IN LUNG, SIGNAL = 1.7; EXPRESSED IN BRAIN, SIGNAL = 0.6; EXPRESSED IN FETAL LIVER, SIGNAL = 1.2; EXPRESSED IN ADULT LIVER, SIGNAL = 0.6; EST_HUMAN HIT: BE727414.1, EVALUE 0.00e+00; NT HIT: gi14783292, EVALUE 0.00e+00; SWISSPROT HIT: O14879, EVALUE 2.00e-45
gtcacttggggaaactacgcctgggtctactatcacttgggcagactctcagatgctcagatttatgtagataaggtgaaacaaacctgcaagaaattttcaaatccatacagtattgagtattctgaacttgactgtgaggaagggtggacacaactgaagtgtggaagaaatgaaagggcgaaggtgtgttttgagaaggctctggaagaaaagcccaacaacccagaattctcctctgg

SEQ ID NO: 26923 - DNA, 108 bp, Homo sapiens
  MAP TO CHR19.3; EXPRESSED IN BRAIN, SIGNAL = 4.4; EST_HUMAN HIT: AA888551.1, EVALUE 4.00e-54; NT HIT: X56997.1, EVALUE 3.00e-54; SWISSPROT HIT: P14793, EVALUE 7.00e-07
acttgcggcagatcatcttgtcgcagttgtatttctgggcaagctggcggagagaaggctcaataatgccacctcgcaggcgcaacaccaggtgcagggtggactctg

SEQ ID NO: 26924 - DNA, 167 bp, Homo sapiens
  MAP TO CHR9.3; EXPRESSED IN LUNG, SIGNAL =  13; EXPRESSED IN BRAIN, SIGNAL = 6.9; NT HIT: M77232.1, EVALUE 3.00e-89; SWISSPROT HIT: P47838, EVALUE 1.00e-13; EST_HUMAN HIT: AA484108.1, EVALUE 4.00e-89
atttttaggtaagaaacctaggaccaaagcacccaagattcagcgtcttgttactccacgtgtcctgcagcacaaacggcggcgtattgctctgaagaagcagcgtaccaagaaaaataaagaagaggctgcagaatatgctaaacttttggccaagagaatgaagg

SEQ ID NO: 26925 - DNA, 163 bp, Homo sapiens
  MAP TO CHR6.3; EXPRESSED IN FETAL LIVER, SIGNAL = 0.6; EXPRESSED IN BRAIN, SIGNAL = 0.43; SWISSPROT HIT: O43196, EVALUE 6.00e-23; EST_HUMAN HIT: BI439178.1, EVALUE 9.00e-81; NT HIT: AF070079.1, EVALUE 7.00e-87
caggtaggcttgatcacattcatggccctggtaggcagctttgtgccagcagaggaggccgaaattggggcagtagacgccatcttcacacgaattcatagctgcgaatccatctcccttggcctctccaccttcatgatcgacctcaaccaggtcaaaggga

SEQ ID NO: 26926 - DNA, 116 bp, Homo sapiens
  MAP TO CHR19.3; EXPRESSED IN LUNG, SIGNAL = 2.6; EXPRESSED IN ADULT LIVER, SIGNAL =   2; EXPRESSED IN BRAIN, SIGNAL =   5; NT HIT: gi14755992, EVALUE 7.00e-55; SWISSPROT HIT: P81125, EVALUE 9.00e-16; EST_HUMAN HIT: AL539626.1, EVALUE 7.00e-59
tggctacaggtggggaccaatgccatggacagccccctcctcaagtacagcgccaaagactacttcttcaaggcggccctctgccacttctgcatcgacatgctcaacgccaaggt

SEQ ID NO: 26927 - DNA, 160 bp, Homo sapiens
  MAP TO CHR19.3; EXPRESSED IN ADULT LIVER, SIGNAL = 1.5; EXPRESSED IN BRAIN, SIGNAL = 1.8; EXPRESSED IN LUNG, SIGNAL = 1.8; NT HIT: gi15305988, EVALUE 2.00e-81; SWISSPROT HIT: P53355, EVALUE 2.00e-20; EST_HUMAN HIT: AW974502.1, EVALUE 9.00e-84
gcagcctgagcggtgcatccccgttcctgggcgagaccaagcaggagacgctcaccaacatctcagccgtgaactacgacttcgacgaggagtacttcagcaacaccagcgagctggccaaggacttcattcgccggctgctcgtcaaagatcccaagta

SEQ ID NO: 26928 - DNA, 378 bp, Homo sapiens
  MAP TO CHR9.3; EXPRESSED IN FETAL LIVER, SIGNAL = 0.58; EXPRESSED IN BRAIN, SIGNAL = 0.45; NT HIT: V00548.1, EVALUE 0.00e+00; SWISSPROT HIT: P01563, EVALUE 1.00e-69; EST_HUMAN HIT: AW963490.1, EVALUE 5.20e-01
ttctgctctgacaacctcccaggcacaagggctgtatttcttctctttcagatagagagtgattctttggaagtatttcctcacagccagaatggagtcctccttcatcaggggagtctctgtcacccccaccccctgtatcacacaggcttccaggtcattcagctgctggtagagttcagtgtagaatttgtctaggagggtctcatcccaagcagcagatgagtcctttgtgctgaagagattgaagatctgctggatcatctcatggaggacagggatggtttcagccttttggaactggttgccaaactcctcctggggaaatccaaagtcatgtctgtccttcaagcaggagaaaagagagattctcctcat

SEQ ID NO: 26929 - DNA, 129 bp, Homo sapiens
  MAP TO CHR11.3; EXPRESSED IN LUNG, SIGNAL = 2.3; EXPRESSED IN ADULT LIVER, SIGNAL = 2.6; EXPRESSED IN BRAIN, SIGNAL = 3.3; NT HIT: gi14767326, EVALUE 4.00e-66; SWISSPROT HIT: Q63569, EVALUE 3.00e-17; EST_HUMAN HIT: BG491623.1, EVALUE 6.00e-66
cagatcatgaagagtgaagtgttgagagtcacccatgagctccaagccatgaaggacaagataaaagagaacagtgagaaaatcaaagtgaacaagaccctgccgtaccttgtctccaacgtcatcgag

SEQ ID NO: 26930 - DNA, 146 bp, Homo sapiens
  MAP TO CHR19.3; EXPRESSED IN FETAL LIVER, SIGNAL = 0.61; EXPRESSED IN BRAIN, SIGNAL = 0.68; EXPRESSED IN LUNG, SIGNAL = 1.3; NT HIT: gi16163194, EVALUE 2.00e-71; SWISSPROT HIT: Q13625, EVALUE 2.00e-11; EST_HUMAN HIT: BE733694.1, EVALUE 3.00e-71
cagatgaacgacccgagccagcccaacgaggagggcatcactgccttgcacaacgccatctgcggcgccaactactctatcgtggatttcctcatcaccgcgggtgccaatgtcaactcccccgacagccacggctggtgagcccc

SEQ ID NO: 26931 - DNA, 274 bp, Homo sapiens
  MAP TO CHR9.3; EXPRESSED IN LUNG, SIGNAL = 1.5; EXPRESSED IN BRAIN, SIGNAL = 1.1; EXPRESSED IN ADULT LIVER, SIGNAL = 1.2; EST_HUMAN HIT: Z19133.1, EVALUE 4.00e-07; NT HIT: AF287262.1, EVALUE 0.00e+00; SWISSPROT HIT: O95477, EVALUE 1.00e-28
acaccagcccagcaccaagactgcagctcacctttttcaggtatgacacagtgctactactgtttctgcaggaactgagggaggattccacatctttcttgaccaaggtcaggtagtagcctgttcccagctggttcttcagaaacagggaggagcccacacagcacagcttcccatgggagatgatggcaatcctgtcccccaggacgtccgcttcatccatgtggtgtgtagagagaataatggtgcggcctgccaggcacaaacacaagga

SEQ ID NO: 26932 - DNA, 178 bp, Homo sapiens
  MAP TO CHR2.3; EXPRESSED IN BRAIN, SIGNAL = 0.3; EST_HUMAN HIT: BG424452.1, EVALUE 1.00e-95; NT HIT: gi6005929, EVALUE 8.00e-96; SWISSPROT HIT: P22309, EVALUE 5.00e-28
ctggttcccatggtgtttatgaaagcatatgcaatggcgttcccatggtgatgatgcccttgtttggtgatcagatggacaatgcaaagcgcatggagactaagggagctggagtgaccctgaatgttctggaaatgacttctgaagatttagaaaatgctctaaaagcagtcatcaa

SEQ ID NO: 26933 - DNA, 335 bp, Homo sapiens
  MAP TO CHR17.3; EXPRESSED IN BRAIN, SIGNAL = 0.94; SWISSPROT HIT: Q14525, EVALUE 1.00e-24; EST_HUMAN HIT: BF569905.1, EVALUE 1.00e-117; NT HIT: gi15208635, EVALUE 0.00e+00
ctccagctgacgcactttctccaggtagctggccaggcggtcgttcaggaactgcatagtctccttctcgctaccattgaaggagccctcgcagaaccagttgcagttgctcacattggcggggatgttgcaggccccgggcagggtgcagctgtggcagctggggggcacgcagggccgggaggagcagctggtgcggcagctcaggctgggcaggcagaagttgtagggcatagtgctgggagggagggagggagtgcctggctgaagacagagtctaaattctccaagccacagagctgtgggtctccttcctctagggagcatttatatcc

SEQ ID NO: 26934 - DNA, 170 bp, Homo sapiens
  MAP TO CHRX.3; EXPRESSED IN BRAIN, SIGNAL = 0.36; NT HIT: X14448.1, EVALUE 5.00e-91; SWISSPROT HIT: P06280, EVALUE 2.00e-28; EST_HUMAN HIT: BF965811.1, EVALUE 2.00e-84
actgtcacagtaacaaccatcaaattttagcagatctactccccagtcagcaaaggtctgggcatcaatgtcgtagtatccaaaactcccagggaagcctgcgcaggttttatttccaacatctgcataaatccctagcttcagtcctttgctgtgaacctgaaatgaga

SEQ ID NO: 26935 - DNA, 108 bp, Homo sapiens
  MAP TO CHRX.3; EXPRESSED IN ADULT LIVER, SIGNAL = 0.71; EXPRESSED IN BRAIN, SIGNAL = 0.63; EXPRESSED IN LUNG, SIGNAL = 0.66; SWISSPROT HIT: P43363, EVALUE 2.00e-14; EST_HUMAN HIT: R06041.1, EVALUE 6.00e-53; NT HIT: gi14762534, EVALUE 3.00e-54
tatgagaatgccagtcttgggcatgctctggacatcactcagcatcccatcataggtgaggcccagggaggtgacaaggacaaaggagtggccagtgggatccacttc

SEQ ID NO: 26936 - DNA, 317 bp, Homo sapiens
  MAP TO CHR2.3; EXPRESSED IN FETAL LIVER, SIGNAL = 1.3; EXPRESSED IN BRAIN, SIGNAL = 1.2; NT HIT: gi7661609, EVALUE 0.00e+00; SWISSPROT HIT: Q10045, EVALUE 3.00e-16; EST_HUMAN HIT: BG032797.1, EVALUE 0.00e+00
agaaatgtttttcttccatctaggaagatgttaccgagtacttcagtgaattccttagtgcaggggaacggagtcttgaattccagggatgcggcaagacacacagccggagcgaaacgctacaaatatctgagaaggcttttccgctttcggcaaatggactttgaatttgctgcctggcagatgctctacctgttcacatccccacagagagtttacagaaattttcattatcgaaaacagacgaaggaccagtgggccagagatgaccctgctttcttggtcctgttaagtatctggctctgtggtaagtgtgt

SEQ ID NO: 26937 - DNA, 174 bp, Homo sapiens
  MAP TO CHR17.3; EXPRESSED IN BRAIN, SIGNAL = 0.54; EST_HUMAN HIT: BE905269.1, EVALUE 1.00e-86; NT HIT: gi11434425, EVALUE 7.00e-87; SWISSPROT HIT: P08138, EVALUE 9.00e-28
ggctccaggtggaacagctgcaagcagaacaagcaaggagccaacagccggccagtgaaccagacgcccccaccagagggagaaaaactccacagcgacagtggcatctccgtggacagccagagcctgcatgaccagcagccccacacgcagacagcctcgggccagggtgag

SEQ ID NO: 26938 - DNA, 114 bp, Homo sapiens
  MAP TO CHR19.3; EXPRESSED IN BRAIN, SIGNAL = 1.3; NT HIT: AJ001703.1, EVALUE 8.00e-58; SWISSPROT HIT: P49366, EVALUE 4.00e-14; EST_HUMAN HIT: BG910711.1, EVALUE 2.00e-56
cagacctgaggctcatcaacacacaggccatctttgccaagtgcactgggatgatcattctgggcgggggcgtggtcaagcaccacattgccaatgccaacctcatggtgagtg

SEQ ID NO: 26939 - DNA, 141 bp, Homo sapiens
  MAP TO CHR16.3; EXPRESSED IN LUNG, SIGNAL = 1.5; EXPRESSED IN FETAL LIVER, SIGNAL = 0.93; EXPRESSED IN BRAIN, SIGNAL = 1.1; SWISSPROT HIT: P50226, EVALUE 1.00e-20; NT HIT: U34804.1, EVALUE 7.00e-74; EST_HUMAN HIT: BI752409.1, EVALUE 2.00e-47
cccctgcaggtggtctatgttgcccgcaacgcaaaggatgtggcggtttcctactaccacttctaccacatggccaaagtgtaccctcaccctgggacctgggaaagcttcctggagaagttcatggctggagaaggtggg

SEQ ID NO: 26940 - DNA, 130 bp, Homo sapiens
  MAP TO CHR14.3; EXPRESSED IN LUNG, SIGNAL = 5.6; EXPRESSED IN BRAIN, SIGNAL =   3; EST_HUMAN HIT: BE561078.1, EVALUE 9.00e-65; SWISSPROT HIT: P49755, EVALUE 2.00e-17; NT HIT: gi16190807, EVALUE 6.00e-65
tcattactcaatcaatttcttggccttgaagaagcgtcgcaggtagaagacctgccaggtagctagtccaatgagacagaacattgaaaagatgctgaagtataggacccgagtgtttgttgactctaaa

SEQ ID NO: 26941 - DNA, 115 bp, Homo sapiens
  MAP TO CHR16.3; EXPRESSED IN FETAL LIVER, SIGNAL = 0.55; EXPRESSED IN BRAIN, SIGNAL = 0.42; EXPRESSED IN LUNG, SIGNAL = 0.92; SWISSPROT HIT: P04268, EVALUE 2.70e+00; NT HIT: gi16165918, EVALUE 2.00e-58; EST_HUMAN HIT: AW299630.1, EVALUE 2.00e-56
accatgggaacctggatggggctgtgctgcttgttcgtgaccagatccagcttttcttctaaggatttacaagtagcctccagggcttgcaatttggcttcaatgctatccaacc

SEQ ID NO: 26942 - DNA, 155 bp, Homo sapiens
  MAP TO CHR10.3; EXPRESSED IN ADULT LIVER, SIGNAL = 0.58; EXPRESSED IN BRAIN, SIGNAL = 0.66; SWISSPROT HIT: P53352, EVALUE 4.40e+00; NT HIT: gi14736338, EVALUE 3.00e-73; EST_HUMAN HIT: BG431116.1, EVALUE 5.00e-73
tgtatctctaggtcgttcaagagcgaaatgacgctcagaggcaactttctcgagaacagaatgccagaatgttacaagatggaattctgaccaatcacctttccaaacaaaaggagattgaaatggctcaaaagaaaatgaattctgaggtattt

SEQ ID NO: 26943 - DNA, 122 bp, Homo sapiens
  MAP TO CHR2.3; EXPRESSED IN BRAIN, SIGNAL = 0.96; SWISSPROT HIT: P43304, EVALUE 3.00e-16; NT HIT: U40365.1, EVALUE 1.00e-62; EST_HUMAN HIT: BF678029.1, EVALUE 5.00e-60
taggaacaacttgaaacagccaggaagtttctatattatgaaatgggctataaatctcgatcagaacagttaacagatcgctctgaaattagcctactgccttcagacattgacaggtactt

SEQ ID NO: 26944 - DNA, 229 bp, Homo sapiens
  MAP TO CHR1.3; EXPRESSED IN BRAIN, SIGNAL = 0.51; EXPRESSED IN LUNG, SIGNAL = 0.43; SWISSPROT HIT: P33765, EVALUE 2.00e-27; NT HIT: gi14739381, EVALUE 1.00e-126; EST_HUMAN HIT: BE764037.1, EVALUE 1.00e-119
ttgatgatagataaaggcagccatgacagagcaaacaagaaaagaaccagaaacaaggacttagccgtcttgaactcccgtccataaaatgcacctgtctctttggagttagataagttcagactgagtttgttccgaatgatgtaaaagatgtcaagatagatggcgcacatgacaaccagggggatgaaaatccaggtgaggaagctgaagtataccatgtagtcca

SEQ ID NO: 26945 - DNA, 467 bp, Homo sapiens
  MAP TO CHR2.3; EXPRESSED IN BRAIN, SIGNAL = 0.39; EXPRESSED IN LUNG, SIGNAL = 0.29; NT HIT: M84125.1, EVALUE 0.00e+00; EST_HUMAN HIT: AV650286.1, EVALUE 0.00e+00; SWISSPROT HIT: P22309, EVALUE 2.00e-86
atggcctccctggcagaaagcagctttgatgtcatgctgacggaccctttccttccttgcagccccatcgtggcccagtacctgtctctgcccactgtattcttcttgcatgcactgccatgcagcctggaatttgaggctacccagtgccccaacccattctcctacgtgcccaggcctctctcctctcattcagatcacatgaccttcctgcagcgggtgaagaacatgctcattgccttttcacagaactttctgtgcgacgtggtttattccccgtatgcaacccttgcctcagaattccttcagagagaggtgactgtccaggacctattgagctctgcatctgtctggctgtttagaagtgactttgtgaaggattaccctaggcccatcatgcccaatatggtttttgttggtggaatcaactgccttcaccaaaatccactatcccaggtgtgtattgg

SEQ ID NO: 26946 - DNA, 119 bp, Homo sapiens
  MAP TO CHR4.3; EXPRESSED IN ADULT LIVER, SIGNAL = 1.1; EXPRESSED IN BRAIN, SIGNAL = 1.2; NT HIT: U23430.1, EVALUE 8.00e-61; EST_HUMAN HIT: AL524418.1, EVALUE 2.00e-03; SWISSPROT HIT: P32238, EVALUE 1.00e-19
tcctcctcccccacctctcccctcgcccctgggggaccaggattggggcagcaggggaaggtggccatgaagccgaggcggaagcgtttgttcatgaagcagtagatgatggggttgac

SEQ ID NO: 26947 - DNA, 129 bp, Homo sapiens
  MAP TO CHR5.3; EXPRESSED IN ADULT LIVER, SIGNAL = 2.1; EXPRESSED IN BRAIN, SIGNAL = 1.6; EXPRESSED IN LUNG, SIGNAL = 1.1; NT HIT: gi14735827, EVALUE 8.00e-55; EST_HUMAN HIT: BG698882.1, EVALUE 1.00e-54; SWISSPROT HIT: P49419, EVALUE 1.00e-14
ttaccttgcccccatagaccactgtgccaccttctttctttgcttcttccactgctccaagaaacatgctcactgcctgcttggtgtggagtggcccatagagaacattagctggagagagaaaaggaa

SEQ ID NO: 26948 - DNA, 104 bp, Homo sapiens
  MAP TO CHR12.3; EXPRESSED IN FETAL LIVER, SIGNAL = 0.41; EXPRESSED IN BRAIN, SIGNAL = 0.39; NT HIT: gi13651933, EVALUE 6.00e-52; EST_HUMAN HIT: BG189772.1, EVALUE 1.90e+00; SWISSPROT HIT: P43363, EVALUE 3.60e+00
aggcttgctttagcttgctgtttcctagaattaagataaatgagtgaccccagggatagatggctgtggttgtcattccaaacataagcagcagtttgttttct

SEQ ID NO: 26949 - DNA, 173 bp, Homo sapiens
  MAP TO CHR19.3; EXPRESSED IN FETAL LIVER, SIGNAL = 0.98; EXPRESSED IN BRAIN, SIGNAL =   2; NT HIT: gi7019370, EVALUE 1.00e-91; EST_HUMAN HIT: BF446227.1, EVALUE 2.00e-91; SWISSPROT HIT: P30205, EVALUE 2.50e+00
ccaggatgagggcagccagggcacggatgcccccaccccaggcaatgcggagaatgagcctccagagaaagagacactgtccccgcccagaaggactcctgcacccccagaacccggcagcccagcccccggtgaggggcccagtgggcggaagaggcggcgagtgccacggg

SEQ ID NO: 26950 - DNA, 203 bp, Homo sapiens
  MAP TO CHRX.3; EXPRESSED IN BRAIN, SIGNAL = 0.46; NT HIT: AF020671.1, EVALUE 1.00e-110; SWISSPROT HIT: Q13496, EVALUE 2.00e-31; EST_HUMAN HIT: AV763090.1, EVALUE 1.00e-102
accataggtgctgtcatggattcatccagaaaataagacggtcattgtgcgttgcagtcagcctcttgtcggtatgagtgggaaacgaaataaagatgatgagaaatatctcgatgttatcagggagactaataaacaaatttctaaactcaccatttatgatgcaagacccagcgtaaatgcagtggccaacaaggtgagtg

SEQ ID NO: 26951 - DNA, 180 bp, Homo sapiens
  MAP TO CHR17.3; EXPRESSED IN LUNG, SIGNAL =   4; EXPRESSED IN BRAIN, SIGNAL = 1.3; SWISSPROT HIT: P50096, EVALUE 5.00e-25; NT HIT: gi14752972, EVALUE 3.00e-61; EST_HUMAN HIT: BF970813.1, EVALUE 5.00e-61
gcctgggtgagcaggcccaggcggaatttgtcatcttcacaggtgcccacaactgccccgcacagcagctgcttgtgggaatccttggaggccagagggtagtctcggttcttcttcaggtccgtgcgggcgatgatggccaccagctcatcatgatcattgacaacaggcagcttccct

SEQ ID NO: 26952 - DNA, 154 bp, Homo sapiens
  MAP TO CHR8.3; EXPRESSED IN LUNG, SIGNAL = 2.1; EXPRESSED IN ADULT LIVER, SIGNAL = 1.1; EXPRESSED IN BRAIN, SIGNAL = 3.9; SWISSPROT HIT: P21281, EVALUE 5.00e-22; NT HIT: gi14745651, EVALUE 1.00e-81; EST_HUMAN HIT: AL533214.1, EVALUE 2.00e-81
ggtccttacgaaaatcgcactgtctttgagactttggacattggctggcagctactccgaatcttccccaaagaaatgctgaagagaatccctcagagcaccctcagcgaattttaccctcgagactctgcaaagcattagctgctgcttctgc

SEQ ID NO: 26953 - DNA, 163 bp, Homo sapiens
  MAP TO CHR4.3; EXPRESSED IN ADULT LIVER, SIGNAL = 0.86; EXPRESSED IN BRAIN, SIGNAL = 3.1; NT HIT: gi7657260, EVALUE 7.00e-87; SWISSPROT HIT: P52408, EVALUE 2.00e+00; EST_HUMAN HIT: D80473.1, EVALUE 2.00e-85
aaagtgccagggcaatttcttcacagtatttcacatgcaaaggggaaaggaagaaggggagaagaagccccatgctgcttttaaggcagggaaggaggcaaactggtccaccgtcctcagaatgtgagttccaaggctccaatgctcaggacgtcttcttgtg

SEQ ID NO: 26954 - DNA, 129 bp, Homo sapiens
  MAP TO CHR5.3; EXPRESSED IN ADULT LIVER, SIGNAL =   2; EXPRESSED IN BRAIN, SIGNAL =  10; SWISSPROT HIT: P34991, EVALUE 9.00e-01; NT HIT: gi15298934, EVALUE 6.00e-62; EST_HUMAN HIT: AA010045.1, EVALUE 1.00e-66
tctaatattaacaattataaacagagcagtgcaactagtatttggaacaatccttacagtgttacagtgtcaggcacaacatttcacttctcttcacaccactggttctctttgcgtacctaaaagaga

SEQ ID NO: 26955 - DNA, 228 bp, Homo sapiens
  MAP TO CHR19.3; EXPRESSED IN BRAIN, SIGNAL = 1.1; SWISSPROT HIT: O25254, EVALUE 1.30e-01; NT HIT: gi15305970, EVALUE 1.00e-123; EST_HUMAN HIT: BG760649.1, EVALUE 1.00e-123
cagaacatggtgatgagttttcgagtctccgaccttcagatgctcctgggtttcgtgggccggagtaagagtggactgaagcacgagctcgtcaccagggccctccagctggtgcagtttgactgtagccctgagctgttcaagaagatcaaggagctgtacgagacccgctacgccaagaagaactcggagcctgccccacagccgcaccggcccctggaccccctg

SEQ ID NO: 26956 - DNA, 206 bp, Homo sapiens
  MAP TO CHR20.3; EXPRESSED IN FETAL LIVER, SIGNAL = 2.8; EXPRESSED IN ADULT LIVER, SIGNAL = 2.5; EXPRESSED IN BRAIN, SIGNAL = 2.3; SWISSPROT HIT: P04961, EVALUE 4.00e-33; NT HIT: J04718.1, EVALUE 1.00e-112; EST_HUMAN HIT: AA742384.1, EVALUE 1.00e-112
actacttacagcttcctcctctttatcgacattacttgtctgtgacaatttaatgtttccatttccaagttctccacttgcagaaaatttcactccgtcttttgcacaggaaattacaacagcatctccaatatggctgagatctcggcatatacgtgcaaattcaccagaaggcatctttactacacagctgtactcctgttcct

SEQ ID NO: 26957 - DNA, 245 bp, Homo sapiens
  MAP TO CHR18.3; EXPRESSED IN LUNG, SIGNAL = 2.1; EXPRESSED IN BRAIN, SIGNAL =   3; EXPRESSED IN FETAL LIVER, SIGNAL = 2.4; EST_HUMAN HIT: BG707094.1, EVALUE 2.00e-51; SWISSPROT HIT: P12970, EVALUE 3.00e-15; NT HIT: X06705.1, EVALUE 3.00e-53
ggatagccctttgctgctgcaatcagatatagctgggccatttgacaaagcaagtgaggtccctttggggctgaatgtcctgtccaatgccaaaattcttaggccttttctcaaacaagggatttaccaccttcttagcctcctgctactttcagacagcaggggctggggtcgtcttcttccccttggccttcttttccttgggcatcttgggcagctggaggagaaagaaaggaaagggaatt

SEQ ID NO: 26958 - DNA, 113 bp, Homo sapiens
  MAP TO CHR6.3; EXPRESSED IN LUNG, SIGNAL = 1.6; EXPRESSED IN BRAIN, SIGNAL = 0.79; SWISSPROT HIT: P00751, EVALUE 7.00e-12; NT HIT: J00125.1, EVALUE 7.00e-55; EST_HUMAN HIT: AW848878.1, EVALUE 1.00e-54
tccagagaaagagctgctccctgcacaggatatcaaagctctgtttgtgtctgaggaggagaaaaagctgactcggaaggaggtctacatcaagaatggggataaggtgagaa

SEQ ID NO: 26959 - DNA, 399 bp, Homo sapiens
  MAP TO CHR14.3; EXPRESSED IN BRAIN, SIGNAL = 0.61; SWISSPROT HIT: O15321, EVALUE 6.00e-67; NT HIT: U94831.1, EVALUE 0.00e+00; EST_HUMAN HIT: BI518795.1, EVALUE 0.00e+00
gctgacctgtgcagaactgagctgcatgtggcacagaattctcttctccacgttttcccgaaagcggatctcatacaaagactcagccattcggtccccatccagcacttcacccaggctaaggcttttgtgacgtatcttctcagggcagcagactggaagctgatagtagtggtaagtttcctgagggttatggtagggtcccactttgttgacatacagaataacagggtcgccggccttgtagtgtgtcacgccttccacccctggcccatggcctgtgcccagcaacagtatcaggattggcaaccactggcagctccaacttcgagggttccctacgactgtcatccttaaggcagtggaacctgtttgggggaatcctgaggttatagaaac

SEQ ID NO: 26960 - DNA, 295 bp, Homo sapiens
  MAP TO CHR6.3; EXPRESSED IN BRAIN, SIGNAL = 0.25; NT HIT: AJ302632.1, EVALUE 0.00e+00; EST_HUMAN HIT: BF838729.1, EVALUE 1.60e+00; SWISSPROT HIT: P58173, EVALUE 8.00e-36
ttcatgatgagggtgtagtgaagaggtctgcagatggccacatagcgatcaaaggacataatagccaaaagcaaacattctgttccccccattatgtgaaagaaataaagctgaaccgcacaccccatatagctgatggtcttcttagagcttcccaggttaaacagcatctgagggacaatgcttgtggtataacacatgtccaaaaaggagaggttggtgaggaagaaatacatggggctatgaagacgagagtctaacctggacatgagaatgattgtgatgtttcccatca

SEQ ID NO: 26961 - DNA, 113 bp, Homo sapiens
  MAP TO CHR19.3; EXPRESSED IN LUNG, SIGNAL =   1; EXPRESSED IN BRAIN, SIGNAL = 0.99; SWISSPROT HIT: P34588, EVALUE 1.80e-01; NT HIT: gi14758729, EVALUE 1.00e-53; EST_HUMAN HIT: BI828162.1, EVALUE 7.00e-56
tcagaaatcaacgaccgggagcagaagttgcatgcccttaaggaggtattaaagaaatttccaaaggaaaaccacgaagtcttcaagtatgtcatctctcacctaaacaagta

SEQ ID NO: 26962 - DNA, 135 bp, Homo sapiens
  MAP TO CHR1.3; EXPRESSED IN ADULT LIVER, SIGNAL = 0.96; EXPRESSED IN BRAIN, SIGNAL = 0.93; SWISSPROT HIT: P97347, EVALUE 2.00e-16; EST_HUMAN HIT: BE893147.1, EVALUE 2.60e+00; NT HIT: X99251.1, EVALUE 6.00e-25
tctagcttatgatagcaggcttggaccaactggaacaccaacaagaggtactcatgaaaatcaatatgtccatctcggtcttgatctaagaggttcaagatggtttccacagtctctgggtcatttggtctctgt

SEQ ID NO: 26963 - DNA, 316 bp, Homo sapiens
  MAP TO CHRX.3; EXPRESSED IN ADULT LIVER, SIGNAL = 0.49; EXPRESSED IN BRAIN, SIGNAL = 0.63; SWISSPROT HIT: P30550, EVALUE 2.00e-33; EST_HUMAN HIT: AU125660.1, EVALUE 1.00e-129; NT HIT: gi12743373, EVALUE 0.00e+00
gtacttacctgtctgccgagagcgccgtgagtgtgaagacagacaccccaacagaggtaagctgtataaaggggatcagtttgcagccaatcctgccaaatagccatctgtcagccaggtacctgctggcatccactggagcacacgttattaggaggagcaggtctcccaaagccagactggaaatgaacaggtttggaacgtttcgcatggacttgactgtacagaagatcttgatcaaagtgatgttgccaatgaggcctatcagaatgataaccccataaactgcagggatgacatagaggatccccgggtg

SEQ ID NO: 26964 - DNA, 161 bp, Homo sapiens
  MAP TO CHR8.3; EXPRESSED IN ADULT LIVER, SIGNAL = 0.71; EXPRESSED IN BRAIN, SIGNAL = 1.1; SWISSPROT HIT: Q12797, EVALUE 4.00e-15; EST_HUMAN HIT: AW387165.1, EVALUE 9.00e-81; NT HIT: gi14589861, EVALUE 6.00e-81
ttcttacctagaacttcctcatagtcaacaagatcaaaccaaacgacagctacagatgtccagacgcccagcaatgcaatcaccataaaccacgtgaagaatgaagttcctgagagtccgcctttcctcccattcttgtgtcctccatgctttgtctctgt

SEQ ID NO: 26965 - DNA, 251 bp, Homo sapiens
  MAP TO CHR15.3; EXPRESSED IN BRAIN, SIGNAL = 0.37; SWISSPROT HIT: P16452, EVALUE 5.00e-41; NT HIT: L06449.1, EVALUE 0.00e+00; EST_HUMAN HIT: AA449886.1, EVALUE 1.00e-116
aggtccaaacttacctctattccaggggttaaaaagcagtgtgaactgacccaagaggagttgcttcctgcctgagacctgcagcagaagcgagtagtggccaatgacagcgtccgcaggtgtggtcacagagatggtccaggactgggcatctctctcctccaccactgcactccaccactttcggtcccccagactggaaattgggaatgtggcttgggtcctgttgatcttggaaggctgctctcctg

SEQ ID NO: 26966 - DNA, 285 bp, Homo sapiens
  MAP TO CHR2.3; EXPRESSED IN BRAIN, SIGNAL = 0.22; SWISSPROT HIT: P04114, EVALUE 2.00e-46; EST_HUMAN HIT: R28748.1, EVALUE 6.00e-74; NT HIT: X04714.1, EVALUE 0.00e+00
cttccatatttttcgtggttaagctcacagtactgttatgactaccctccacaaatttgttgctcagagacagagctgtggctaacttcaatcccctttttcttgtcaatcttgtggtgccctctaatttgtactgcagtgcatcaatgacagatgaagatgaagaaaggagatgagcaacaatatctgactggttaaaaagttcagcattggtattcagtgtgatgacacttgatttaaaggagaaatcataggtaatattgcccatggcaggaataaaaatat

SEQ ID NO: 26967 - DNA, 151 bp, Homo sapiens
  MAP TO CHR10.3; EXPRESSED IN BRAIN, SIGNAL = 3.1; EXPRESSED IN ADULT LIVER, SIGNAL = 1.8; EST_HUMAN HIT: BG026401.1, EVALUE 1.00e-79; NT HIT: gi14737790, EVALUE 9.00e-80; SWISSPROT HIT: Q00799, EVALUE 7.70e+00
tggtgaagaaagccaagactatgatgaagaatgctcagaagaagatgaatcggttggggaagaaaggggaggcggatagacacgtgtttgatatgaagcccaagcacttgctgtctgggaagaggaaagctggtaaaaaggacaggagata

SEQ ID NO: 26968 - DNA, 185 bp, Homo sapiens
  MAP TO CHR17.3; EXPRESSED IN BRAIN, SIGNAL = 4.8; SWISSPROT HIT: P43589, EVALUE 6.50e-01; EST_HUMAN HIT: AI132992.1, EVALUE 2.00e-97; NT HIT: gi14770301, EVALUE 1.00e-100
tgttttccctctgcttccagtggagtctccaccaccatcgaccccttctgggacatcagcttggatctccccggctcttccaccccattctggcccctgagcccagggagcgagggcaacgtggtaaacggggaaagccacgtgtcgggaaccaccacgctcacggactgcctgcgacggtgaga

SEQ ID NO: 26969 - DNA, 232 bp, Homo sapiens
  MAP TO CHR17.3; EXPRESSED IN BRAIN, SIGNAL = 0.57; EXPRESSED IN ADULT LIVER, SIGNAL = 0.74; EST_HUMAN HIT: AW263881.1, EVALUE 1.00e-122; NT HIT: AF049259.1, EVALUE 1.00e-128; SWISSPROT HIT: P13646, EVALUE 2.00e-27
acctacttggcgtcctggccctcgagcaggctgcggtaggtggcgatctcctgctccagacgtgtcttgatgtccagcagcatcttgtactcttggttctggcactccatctcactgcggagctcgctcagctgggcctcgatgctgctgatgagtccctggatctgctgcagctgcagggcatagcggcactccgtctctgccaccgtgttctccagccccgctttctggt

SEQ ID NO: 26970 - DNA, 309 bp, Homo sapiens
  MAP TO CHR10.3; EXPRESSED IN ADULT LIVER, SIGNAL = 0.62; EXPRESSED IN BRAIN, SIGNAL = 2.6; NT HIT: AJ243098.1, EVALUE 0.00e+00; SWISSPROT HIT: P70662, EVALUE 1.00e-05; EST_HUMAN HIT: AW948653.1, EVALUE 6.00e-96
actgtctttgcttctacgcctgctagtgagctcaggcttggaaaggggtcaggggtgagtggtggggcagcccagaagagagaagaaagccgagatgcttacaggtacctggctggagagggcgaaggtgctagctgggctcttcttcttgctgttgctgttgttggtgttgccaccaccagagctcatggtgctgccccctgacatcttccgtttccgccgtttgctgggctgctgacgtgtgggctccgctgtgccggtaaacggagactcagatgggagagggccccaggtcccctattctccatt

SEQ ID NO: 26971 - DNA, 282 bp, Homo sapiens
  MAP TO CHR19.3; EXPRESSED IN BRAIN, SIGNAL = 3.2; EXPRESSED IN ADULT LIVER, SIGNAL = 1.8; EST_HUMAN HIT: BE240828.1, EVALUE 8.00e-92; NT HIT: gi11426566, EVALUE 0.00e+00; SWISSPROT HIT: O43296, EVALUE 3.00e-56
ggtgaaggcctttccacattcactgcacacgaagggcttctccccagtgtgaatccgctggtgcctcttgaggtaggatcggtggttgaaagccttcccacactcgaggcactcaaagggcttctctccagtgtggatgacatagtggtgaatcagggctgcactctccaagaagaccttcccacattcactgcactcatagggcttctccccggtatgagtctgctggtgccacatgagatatgacctgtgtttgaagaccttgccacactccaagcactc

SEQ ID NO: 26972 - DNA, 181 bp, Homo sapiens
  MAP TO CHR10.3; EXPRESSED IN BRAIN, SIGNAL = 0.63; SWISSPROT HIT: Q15907, EVALUE 1.00e-14; EST_HUMAN HIT: AA306678.1, EVALUE 5.00e-24; NT HIT: gi13592147, EVALUE 6.00e-29
ctgccaaagctcttgccttcaactctaggaacttccctgagatgatgtaaatcactcttatttgtccatgataacatgacaacaacattactatcagtgtgatcgctcagttctttcagcaatcattctgtattttcatatgtgagatgtttagcaatgtcttaaaccaataaggcaccta

SEQ ID NO: 26973 - DNA, 113 bp, Homo sapiens
  MAP TO CHR12.3; EXPRESSED IN BRAIN, SIGNAL =   1; SWISSPROT HIT: P18429, EVALUE 7.90e+00; EST_HUMAN HIT: AI434292.1, EVALUE 4.00e-57; NT HIT: gi5453723, EVALUE 3.00e-57
gagtctggtaaatggccacaagatatgttctagagacgtccatgagtcctcttgctgtgtgggagcggcatccacagacttctggaataattggcctgtgaggaagctcatca

SEQ ID NO: 26974 - DNA, 224 bp, Homo sapiens
  MAP TO CHR12.3; EXPRESSED IN BRAIN, SIGNAL = 6.5; EST_HUMAN HIT: AU125920.1, EVALUE 1.00e-121; NT HIT: M23114.1, EVALUE 1.00e-121; SWISSPROT HIT: P16615, EVALUE 3.00e-38
cagggtgctcctgaaggtgtcattgacaggtgcacccacattcgagttggaagtactaaggttcctatgacctctggagtcaaacagaagatcatgtctgtcattcgagagtggggtagtggcagcgacacactgcgatgcctggccctggccactcatgacaacccactgagaagagaagaaatgcaccttgaggactctgccaactttattaaatatgaggt

SEQ ID NO: 26975 - DNA, 113 bp, Homo sapiens
  MAP TO CHR1.3; EXPRESSED IN BRAIN, SIGNAL = 0.53; SWISSPROT HIT: O14089, EVALUE 3.50e+00; EST_HUMAN HIT: H06574.1, EVALUE 1.40e-01; NT HIT: AL049848.1, EVALUE 4.00e-50
tgctggtggtggctggccgagctgatggctcacctgatgtacatgcatgccatctacagcagcatccccctcctggagactgtctcttgttggaccttaggtaattgtgggaa

SEQ ID NO: 26976 - DNA, 121 bp, Homo sapiens
  MAP TO CHR6.3; EXPRESSED IN BRAIN, SIGNAL = 0.57; SWISSPROT HIT: P23942, EVALUE 4.00e-16; EST_HUMAN HIT: BE266298.1, EVALUE 2.00e-37; NT HIT: U07148.1, EVALUE 5.00e-62
gttggtgatctgatactggatgcagggccgtggcgagctaggattgcagcagctgaaagggacgccgtccaccaggtaccgcccatccacgttgctcttgattcgacttaaagggaaacag

SEQ ID NO: 26977 - DNA, 119 bp, Homo sapiens
  MAP TO CHR2.3; EXPRESSED IN BRAIN, SIGNAL = 0.35; SWISSPROT HIT: O54451, EVALUE 4.60e+00; EST_HUMAN HIT: AA301959.1, EVALUE 8.00e-59; NT HIT: AF286162.1, EVALUE 5.00e-59
tgcaggagtagccactctataaaagaaccagtatctacacttcaccgactctcccagcgacgccgaagaacctactcagatacagattcttgtagtgatattcctcttgaagacccaga

SEQ ID NO: 26978 - DNA, 124 bp, Homo sapiens
  MAP TO CHR19.3; EXPRESSED IN ADULT LIVER, SIGNAL = 1.1; EXPRESSED IN BRAIN, SIGNAL = 0.76; NT HIT: L14061.1, EVALUE 9.00e-64; SWISSPROT HIT: P25089, EVALUE 3.00e-17; EST_HUMAN HIT: BG541691.1, EVALUE 5.00e-14
acaagctccttggccttttttaacagctgcctcaacccaattctctacgtctttatgggtcgtaacttccaagaaagactgattcgctctttgcccactagtttggagagggccctgactgagg

SEQ ID NO: 26979 - DNA, 135 bp, Homo sapiens
  MAP TO CHR13.3; EXPRESSED IN ADULT LIVER, SIGNAL = 0.65; EXPRESSED IN BRAIN, SIGNAL = 0.54; SWISSPROT HIT: P46059, EVALUE 2.00e-18; EST_HUMAN HIT: AV662097.1, EVALUE 9.00e-25; NT HIT: gi4827007, EVALUE 3.00e-67
agaaacctgagaatatgagaattccaatcccgtgacagagaagaccacttcgccacaggtgagaagaaaatactgcgggatttgcagagccatgttaactgtgttggctgaaatatcttcaaacaccttcacttc

SEQ ID NO: 26980 - DNA, 301 bp, Homo sapiens
  MAP TO CHR15.3; EXPRESSED IN BRAIN, SIGNAL = 0.31; EST_HUMAN HIT: BE891853.1, EVALUE 0.00e+00; NT HIT: gi14753896, EVALUE 0.00e+00; SWISSPROT HIT: Q16548, EVALUE 2.00e-52
cagagtgctacaaaatgttgcgttctcagtccaaaaagaagtggaaaagaatctgaagtcatgcttggacaatgttaatgttgtgtccgtagacactgccagaacactattcaaccaagtgatggaaaaggagtttgaagacggcatcattaactggggaagaattgtaaccatatttgcatttgaaggtattctcatcaagaaacttctacgacagcaaattgccccggatgtggatacctataaggagatttcatattttgttgcggagttcataatgaataacacaggagaatggata

SEQ ID NO: 26981 - DNA, 158 bp, Homo sapiens
  MAP TO CHR1.3; EXPRESSED IN ADULT LIVER, SIGNAL = 2.5; EXPRESSED IN BRAIN, SIGNAL =  22; NT HIT: gi16165826, EVALUE 6.00e-84; SWISSPROT HIT: Q62048, EVALUE 3.00e-23; EST_HUMAN HIT: AA017639.1, EVALUE 6.00e-82
agacaacctctcctacattgagcacatctttgagatctcccgccgtcctgacctactcactatggtggttgactacagaacccgtgtgctgaagatctctgaggaggatgagctggacaccaagctaacccgtatccccagtgccaagaagtacaaag

SEQ ID NO: 26982 - DNA, 212 bp, Homo sapiens
  MAP TO CHR6.3; EXPRESSED IN BRAIN, SIGNAL = 2.3; EXPRESSED IN ADULT LIVER, SIGNAL = 2.1; NT HIT: AF108098.1, EVALUE 1.00e-116; SWISSPROT HIT: Q13608, EVALUE 6.00e-32; EST_HUMAN HIT: BG118821.1, EVALUE 1.00e-108
actcactgcacaccgccgtgctagctgtgccaagttcacctcctggcccaggggaaggtgggcagtgagggcccgcaggatgctgagccgctgcccctctgacagagcaggcacctcgagctcatgaggaaatgctgtctgcacatcagcaggcaggtcctgggcccggcttgtggtggccacaaccatgaggggagggcagctgcagacag

SEQ ID NO: 26983 - DNA, 146 bp, Homo sapiens
  MAP TO CHR14.3; EXPRESSED IN BRAIN, SIGNAL = 0.46; SWISSPROT HIT: Q04756, EVALUE 3.40e+00; EST_HUMAN HIT: BI825694.1, EVALUE 2.00e-75; NT HIT: gi14751632, EVALUE 1.00e-75
caggagctggtggagaagagttcggggttctagagtactggatgaggctgcgtttccccataaaacccagcctacaggcgtgcaataaacgaaagaaagcccaggtctacctgtcaaccgatgtgcttggaggccggaaggcccag

SEQ ID NO: 26984 - DNA, 241 bp, Homo sapiens
  MAP TO CHR19.3; EXPRESSED IN BRAIN, SIGNAL = 6.8; NT HIT: gi5921996, EVALUE 1.00e-116; SWISSPROT HIT: P15253, EVALUE 4.00e-38; EST_HUMAN HIT: AW748184.1, EVALUE 1.00e-117
aacaccaacctcaggcttggagtctgtgggatcatcgatcttggcccgctcatcccagtcttccggttttgaagcatcaggatcctttatcttcttgggtggcaggaagtcccaatcgtcttccaaggagccggactccacctggctgttgtcaatcttcacctcataggtgttgtctggccgcacaatcagtgtgtacaggtgtgtaaactcatcatcctgaagaaggaagaaggtgagc

SEQ ID NO: 26985 - DNA, 184 bp, Homo sapiens
  MAP TO CHR19.3; EXPRESSED IN BRAIN, SIGNAL = 3.8; NT HIT: gi14760854, EVALUE 3.00e-98; SWISSPROT HIT: P53041, EVALUE 1.00e-30; EST_HUMAN HIT: AL576417.1, EVALUE 5.00e-98
cagaacgggcgctcgatcagcaagcggggcgtgagctgtcagtttgggcctgacgtcaccaaggccttcttggaagagaacaacctggactatatcatccgcagccacgaagtcaaggccgagggctacgaggtggctcacggaggccgctgtgtcaccgtcttctctgcccccaactactggt

SEQ ID NO: 26986 - DNA, 183 bp, Homo sapiens
  MAP TO CHR14.3; EXPRESSED IN ADULT LIVER, SIGNAL = 3.8; EXPRESSED IN BRAIN, SIGNAL = 1.6; NT HIT: gi7705615, EVALUE 1.00e-94; SWISSPROT HIT: P40017, EVALUE 3.30e+00; EST_HUMAN HIT: N59435.1, EVALUE 2.00e-94
catttccattagtgggaccaacccactgggtgatttgagtgttgagccgctggttggtccagtcctgccggatgtcatcaaggtggcagtcaaagtccacaaggtgctggtgggcccgatcttccagtagagctcccaccatctgccgtgactcttcccagtccctccacatcactctgaaat

SEQ ID NO: 26987 - DNA, 173 bp, Homo sapiens
  MAP TO CHR4.3; EXPRESSED IN BRAIN, SIGNAL = 0.42; EST_HUMAN HIT: BE172061.1, EVALUE 4.00e-89; NT HIT: gi10938004, EVALUE 1.00e-91; SWISSPROT HIT: Q00532, EVALUE 5.00e-20
aaaatggaaaaatatgaaaacctgggtttggttggagaagggagttatggaatggtgatgaagtgtaggaataaagatactggaagaattgtggccataaagaagttcttagaaagtgacgatgacaaaatggttaaaaagattgcaatgcgagaaatcaagttactaaaggt

SEQ ID NO: 26988 - DNA, 122 bp, Homo sapiens
  MAP TO CHR2.3; EXPRESSED IN BRAIN, SIGNAL = 0.37; SWISSPROT HIT: P22310, EVALUE 2.00e-18; EST_HUMAN HIT: BE565923.1, EVALUE 6.00e-44; NT HIT: M84128.1, EVALUE 1.00e-62
cacacagtgtccaaatccttcctcctatattcctaagttactaacgaccaattcagaccacatgacattcctgcaaagggtcaagaacatgctctaccctctggccctgtcctacatttgcc

SEQ ID NO: 26989 - DNA, 168 bp, Homo sapiens
  MAP TO CHR12.3; EXPRESSED IN BRAIN, SIGNAL = 0.77; NT HIT: gi14767769, EVALUE 2.00e-68; SWISSPROT HIT: Q14161, EVALUE 2.00e-19; EST_HUMAN HIT: AL529979.1, EVALUE 3.00e-68
ctcttaccttgcataatcaacgggagttttcccactagaatcctgtgtgcctgggtctgctccatatactgccaataattcagcctgtaaaatctgccctgctttggaggcaacatggagtggggtgtttcctttttcctaagaatcattaataaaaagtaggcaaaa

SEQ ID NO: 26990 - DNA, 222 bp, Homo sapiens
  MAP TO CHR4.3; EXPRESSED IN ADULT LIVER, SIGNAL =  14; EST_HUMAN HIT: AI146721.1, EVALUE 1.00e-105; SWISSPROT HIT: O97680, EVALUE 2.00e-37; NT HIT: M84643.1, EVALUE 1.00e-107
gacttctcagccacatggtgtgggccttgcaaaatgatcaagtctttctttcattccctctctgaaaagtattccaacatggtattccttgaagtagatgtggatgactgtcaggatgttgctttagagtatgaagtcaaatgcatgccaacattccagttttttaagaagggacaaaaggtgggtgaattttctggggccaataaggaaaagcttgaagcc

SEQ ID NO: 26991 - DNA, 159 bp, Homo sapiens
  MAP TO CHR5.3; EXPRESSED IN ADULT LIVER, SIGNAL = 1.3; SWISSPROT HIT: Q9Y5E8, EVALUE 5.90e-02; NT HIT: gi14724289, EVALUE 2.00e-84; EST_HUMAN HIT: AW973926.1, EVALUE 1.00e-70
cactttgtgggcgcggacggggttcgggctttcctgcagacctattcccacgaggtctccctcactgcggactcgcggaagagccacctgattttcccccagcccaactatgcggacacgctcatcagccaggagagctgtgagaaaagcgagcctctt

SEQ ID NO: 26992 - DNA, 341 bp, Homo sapiens
  MAP TO CHR16.3; EXPRESSED IN ADULT LIVER, SIGNAL = 0.87; NT HIT: gi5902043, EVALUE 0.00e+00; SWISSPROT HIT: Q03386, EVALUE 5.80e+00; EST_HUMAN HIT: AU124466.1, EVALUE 0.00e+00
aggctgtaaataacttcaaaaatgaaactggctatacaaaaagactacgaaaacagttacctcctccaccacccccaataccacctccgagaccactgattcagaggaacctacaacctctgatgagatctccgatatcaagacaacaagatcctcttatgattccagtgacatcttcatcaactcacccagctccgtctatatcttcattaacttctaatcagtcttccttggcccctcctgtgtctggaaatccgtcttctgctccagctcctgtacctgatataactgcaacagtatccatatcagttcattcagaaaaatcagatggaccttttcgg

SEQ ID NO: 26993 - DNA, 189 bp, Homo sapiens
  MAP TO CHR11.3; EXPRESSED IN ADULT LIVER, SIGNAL = 2.1; SWISSPROT HIT: Q01995, EVALUE 5.00e-29; EST_HUMAN HIT: C18868.1, EVALUE 1.00e-98; NT HIT: AF013711.1, EVALUE 1.00e-102
cctggtagattctgagcaagctggtgaacagcctgtaccctgatggctccaagccggtgaaggtgcccgagaacccaccctccatggtcttcaagcagatggagcaggtggctcagttcctgaaggcggctgaggactatggggtcatcaagactgacatgttccagactgttgacctctttgaaggta

SEQ ID NO: 26994 - DNA, 122 bp, Homo sapiens
  MAP TO CHR8.3; EXPRESSED IN ADULT LIVER, SIGNAL = 0.95; SWISSPROT HIT: Q92597, EVALUE 8.00e-17; EST_HUMAN HIT: BG700780.1, EVALUE 1.00e-54; NT HIT: D87953.1, EVALUE 8.00e-55
aacttacggttcatgccgatgtcatggtaggtgaggatgacaggccggtttcccttgggagtcccacacagcgtgacgtgaacagagccatgtaaagtctcgatgtcctgctcctgaggaga

SEQ ID NO: 26995 - DNA, 204 bp, Homo sapiens
  MAP TO CHR1.3; EXPRESSED IN FETAL LIVER, SIGNAL = 0.52; EXPRESSED IN ADULT LIVER, SIGNAL = 0.68; EXPRESSED IN LUNG, SIGNAL = 2.6; NT HIT: gi5031778, EVALUE 1.00e-111; EST_HUMAN HIT: BF907676.1, EVALUE 1.00e-111; SWISSPROT HIT: Q16666, EVALUE 4.00e-33
caaagaagtgatggtgctgaacgcaacagaatcatttgtatatgagcccaaagagcagaagaaaatgtttcatgccacagtggcaactgagaatgaagtcttccgagtgaaggtttttaatattgacctaaaggagaagttcaccccaaagaagatcattgccatagcaaattatgtttgccgcaatgggttcctggaggtata

SEQ ID NO: 26996 - DNA, 245 bp, Homo sapiens
  MAP TO CHR17.3; EXPRESSED IN ADULT LIVER, SIGNAL = 0.47; NT HIT: gi15208635, EVALUE 0.00e+00; SWISSPROT HIT: Q15323, EVALUE 1.00e-34; EST_HUMAN HIT: BF570391.1, EVALUE 1.00e-104
tgtactcacttgcagtcctcgctctccagcaggctccggtatgtgttgatctcacactccagccgggcacgcacatccagcagcacctggtactcctggttctgccgctccaggtcactgcggatctccgccagctgggactccacgttggtgatcaggctctgcacctgggacagctgggagctgtagcgggcctcactctctgtcagcgtgttttccagagagtctcgctgtggtggagaaga

SEQ ID NO: 26997 - DNA, 221 bp, Homo sapiens
  MAP TO CHRX.3; EXPRESSED IN ADULT LIVER, SIGNAL = 0.6; SWISSPROT HIT: Q13496, EVALUE 4.00e-34; EST_HUMAN HIT: BE789637.1, EVALUE 1.00e-96; NT HIT: AF020673.1, EVALUE 1.00e-121
cagctcgttttgacaggagccattcaagtagcagacaaagtttcttcagggaagagttcagtgcttgtgcattgcagtgacggatgggacaggactgctcagctgacatccttggccatgctgatgttggatagcttctataggagcattgaagggttcgaaatactggtacaaaaagaatggataagttttggacataaatttgcatctgtgagtaaaca

SEQ ID NO: 26998 - DNA, 283 bp, Homo sapiens
  MAP TO CHR19.3; EXPRESSED IN FETAL LIVER, SIGNAL =   4; EXPRESSED IN ADULT LIVER, SIGNAL = 4.5; EST_HUMAN HIT: BG619358.1, EVALUE 0.00e+00; SWISSPROT HIT: Q05481, EVALUE 5.00e-54; NT HIT: gi14755315, EVALUE 0.00e+00
agagaaaatctacaagtgtgaagaatgtggcaaagcatttctatggtcctcaaccctaactagacataagaggatacacactggagagaaaccctacaaatgtgaagaatgtggcaaagcttttagccattcttcaacccttgctaaacataagagaattcatactggagagaaaccctacaaatgtgaagaatgtggcaaagcttttagccgttcttcaacccttgctaaacataagagaattcatactggagagaaaccctacaaatgtaaagaatgtggc

SEQ ID NO: 26999 - DNA, 107 bp, Homo sapiens
  MAP TO CHR1.3; EXPRESSED IN ADULT LIVER, SIGNAL = 0.75; NT HIT: M35493.1, EVALUE 1.00e-53; EST_HUMAN HIT: AL550307.1, EVALUE 2.00e-53; SWISSPROT HIT: P14060, EVALUE 2.00e-15
tcctacaaggaaatcatccagaatggccatgaagaagagcctctggaaaacacatggcccgctccatacccacacagcaaaaagcttgctgagaaggctgtactggc

SEQ ID NO: 27000 - DNA, 181 bp, Homo sapiens
  MAP TO CHR2.3; EXPRESSED IN LUNG, SIGNAL = 1.1; EXPRESSED IN ADULT LIVER, SIGNAL = 1.1; EXPRESSED IN FETAL LIVER, SIGNAL = 1.2; SWISSPROT HIT: Q9PKX6, EVALUE 5.70e+00; NT HIT: gi14732782, EVALUE 1.00e-97; EST_HUMAN HIT: AA682324.1, EVALUE 2.00e-97
aggctggctataagaaaaaattatggaaaaagacacctgcaaggaagaagcgattgagggaatttgtattctgcaataaaacccagagtaaactcttagataaaatgacgacgtccttctggaagaggcgaaactggtacgttgatgatccttatcagaagtatcatgatcgaacaaacct

SEQ ID NO: 27001 - DNA, 171 bp, Homo sapiens
  MAP TO CHR7.3; EXPRESSED IN ADULT LIVER, SIGNAL = 1.4; SWISSPROT HIT: P52435, EVALUE 8.00e-27; EST_HUMAN HIT: BI116526.1, EVALUE 2.00e-91; NT HIT: gi15299708, EVALUE 3.00e-89
cctcacccggaagcgctcctccagcagggacagctcactgatgaggtcggtgatggcgttggtaaaggcttcctgggggctgtagtccggcgtggtctgcactcggatgatgatcttgtgctccaaggggtgggggactttgtagccagcaaatagcacttgcgggtcctt

SEQ ID NO: 27002 - DNA, 118 bp, Homo sapiens
  MAP TO CHR10.3; EXPRESSED IN ADULT LIVER, SIGNAL =   8; EXPRESSED IN LUNG, SIGNAL = 0.87; EST_HUMAN HIT: H66101.1, EVALUE 5.00e-57; NT HIT: L16882.1, EVALUE 3.00e-60; SWISSPROT HIT: P11712, EVALUE 1.00e-18
gtgctacatgacaacaaagaatttcccaacccagagatgtttgaccctcatcactttctggatgaaggtggcaattttaagaaaagtaaatacttcatgcctttctcagcaggtaata

SEQ ID NO: 27003 - DNA, 178 bp, Homo sapiens
  MAP TO CHR6.3; EXPRESSED IN ADULT LIVER, SIGNAL = 1.8; EST_HUMAN HIT: AA534908.1, EVALUE 1.00e-76; NT HIT: gi15304318, EVALUE 2.00e-93; SWISSPROT HIT: Q01860, EVALUE 2.00e-11
ccgattcctggccctccaggagggccttggaagcttagccaggtccgaggatcaacccagcccggctccggcccccctggcccatcacctccaccacctggagggggcgagaaggcgaaatctgaagccaggtgtcccgccatggggaaggaaggcgccccaagccgggggcctggtg

SEQ ID NO: 27004 - DNA, 225 bp, Homo sapiens
  MAP TO CHR2.3; EXPRESSED IN FETAL LIVER, SIGNAL = 1.3; EXPRESSED IN ADULT LIVER, SIGNAL = 1.1; EXPRESSED IN LUNG, SIGNAL = 2.6; EST_HUMAN HIT: BI459344.1, EVALUE 1.00e-104; NT HIT: AF064205.1, EVALUE 1.00e-124; SWISSPROT HIT: Q14203, EVALUE 4.00e-13
gcctccttgaggcgccgctgcaggtcggcctgctgctcctgcattttgctcttccattcctgcacctgctccagctggattttgtgtttctccagctcttttagctttgctttgtcttctgcccgtttcagtctcagggtctctagtttctcctccaggtcccgcacctgagcccttagtccctcctcctcctgcaaaggagaggcctcacggtctgtgcacagc

SEQ ID NO: 27005 - DNA, 207 bp, Homo sapiens
  MAP TO CHR19.3; EXPRESSED IN ADULT LIVER, SIGNAL = 0.28; EST_HUMAN HIT: AW964892.1, EVALUE 1.00e-110; NT HIT: gi16175350, EVALUE 1.00e-109; SWISSPROT HIT: P87312, EVALUE 1.30e-01
gctcaccttgaggaagcgccgatagcctcgcacagctgtctcaggcagtgggtgtgagcgcaggaagcgcagatacaggggccaaattcgagagtgctgcgtgatgggcagtgcccggagggcacggtcgaaggtgcggcgggtgtgtgtgacgcgcccctggtccatgaggaactggcagtaatctagccacagacgaggcatctg

SEQ ID NO: 27006 - DNA, 113 bp, Homo sapiens
  MAP TO CHR1.3; EXPRESSED IN ADULT LIVER, SIGNAL = 0.86; NT HIT: M23670.1, EVALUE 3.00e-57; SWISSPROT HIT: P01222, EVALUE 3.00e-16; EST_HUMAN HIT: BG202613.1, EVALUE 4.00e-51
gaactacatacccgtgtcatacaatatccagcacagatggtggtgttgatggttaggcaataagcacactctctcctttcgatgtgcattgtatactcagttggaatacaaaa

SEQ ID NO: 27007 - DNA, 187 bp, Homo sapiens
  MAP TO CHR12.3; EXPRESSED IN ADULT LIVER, SIGNAL = 0.84; SWISSPROT HIT: P18537, EVALUE 6.00e-10; NT HIT: gi6005761, EVALUE 1.00e-101; EST_HUMAN HIT: BG960287.1, EVALUE 1.00e-101
tatgtcatccaggagggactggagagcaccggctgcacgctggtcttcctggtcctctactacttcggcatggccagctcgctgtggtgggtggtcctcacgctcacctggttcctggccgccggcaagaagtggggccacgaggccatcgaagccaacagcagctacttccacctggcagcctggg

SEQ ID NO: 27008 - DNA, 131 bp, Homo sapiens
  MAP TO CHR19.3; EXPRESSED IN ADULT LIVER, SIGNAL = 1.3; SWISSPROT HIT: P54612, EVALUE 1.00e-17; NT HIT: J02902.1, EVALUE 6.00e-68; EST_HUMAN HIT: BF795756.1, EVALUE 9.00e-68
cttcagctgagccaggaagaggggcaagaggtgctcgatggtgttgtctttgcccaagatgggagagagacccatgatgactgaggccagggcagacttgacatgttggttggcatcggacaccagctcct

SEQ ID NO: 27009 - DNA, 140 bp, Homo sapiens
  MAP TO CHR19.3; EXPRESSED IN ADULT LIVER, SIGNAL = 1.3; NT HIT: AJ001702.1, EVALUE 3.00e-73; EST_HUMAN HIT: AU122285.1, EVALUE 4.00e-73; SWISSPROT HIT: P49366, EVALUE 6.00e-21
gatgaagaccagcacgcggacctgacccagagccgccgcccacttaccagctgcaccattttcctgggatatacatccaacctcatcagttcaggcatccgtgagaccattcgctaccttgtgcagcacaacatggtggg

SEQ ID NO: 27010 - DNA, 258 bp, Homo sapiens
  MAP TO CHR1.3; EXPRESSED IN FETAL LIVER, SIGNAL = 1.8; EXPRESSED IN ADULT LIVER, SIGNAL = 6.4; SWISSPROT HIT: P25970, EVALUE 1.00e-04; NT HIT: AF179235.1, EVALUE 0.00e+00; EST_HUMAN HIT: BI833292.1, EVALUE 0.00e+00
atctgccctcagaccaccaaggccttcctgccgcgtatgctggagctgcagaatggccacatcgtgtgcctcaactccgtgctggcactgtctgccatccccggtgccatcgactactgcacatccaaagcgtcagccttcgccttcatggagagcctgaccctggggctgctggactgtccgggagtcagcgccaccacagtgctgcccttccacaccagcaccgagatgttccagggcatgagagtcaggtcagtg

SEQ ID NO: 27011 - DNA, 229 bp, Homo sapiens
  MAP TO CHR5.3; EXPRESSED IN FETAL LIVER, SIGNAL = 0.32; EXPRESSED IN ADULT LIVER, SIGNAL = 0.35; SWISSPROT HIT: P35556, EVALUE 1.00e-45; EST_HUMAN HIT: BF368029.1, EVALUE 1.00e-126; NT HIT: gi15295006, EVALUE 1.00e-126
ctttgtaaaatggccgcccagtaagaacatcccctcggttagcaaagccagccccgcgggggcacagcgtctcgtattccttggtgccaggtttggggcactcctcacactcggtgccccaagccgccccgacagcacagcagcaggcatccatgcggaactttccaggaacggggtggatgcattcatcttcatcccacttcaagtaacactgctccatgcgaatatc

SEQ ID NO: 27012 - DNA, 196 bp, Homo sapiens
  MAP TO CHR16.3; EXPRESSED IN ADULT LIVER, SIGNAL = 0.89; EXPRESSED IN LUNG, SIGNAL = 1.4; NT HIT: AF145469.1, EVALUE 1.00e-106; SWISSPROT HIT: Q08705, EVALUE 4.00e-32; EST_HUMAN HIT: AU132930.1, EVALUE 8.00e-94
tgttttattttgcacataggtgtaaagaagacattccagtgtgagctttgcagttacacgtgtccacggcgttcaaatttggatcgtcacatgaaaagccacactgatgagagaccacacaagtgccatctctgtggcagggcattcagaacagtcaccctcctgaggaatcaccttaacacacacacaggtgctg

SEQ ID NO: 27013 - DNA, 121 bp, Homo sapiens
  MAP TO CHR1.3; EXPRESSED IN ADULT LIVER, SIGNAL = 1.2; EST_HUMAN HIT: BF183115.1, EVALUE 1.00e-57; NT HIT: AF043105.1, EVALUE 5.00e-62; SWISSPROT HIT: P21266, EVALUE 6.00e-17
tcacctcaaaacggcacatgaaagccttcaggtttgggaactcatccaggcacttggggtcaaatatacggttctgatccaagatatcataggtgagaaaatccacaaaggtgagctagaa

SEQ ID NO: 27014 - DNA, 104 bp, Homo sapiens
  MAP TO CHR2.3; EXPRESSED IN FETAL LIVER, SIGNAL = 2.9; EXPRESSED IN ADULT LIVER, SIGNAL = 1.2; SWISSPROT HIT: O95183, EVALUE 5.00e-03; NT HIT: AF077197.1, EVALUE 6.00e-52; EST_HUMAN HIT: BG420575.1, EVALUE 9.00e-52
gcccagaagaagtgctgggagaacatccgttaccggatctgcgtggggctggtggtggttggtgtcctgctcatcatcctgattgtgctgctggtcgtctttct

SEQ ID NO: 27015 - DNA, 149 bp, Homo sapiens
  MAP TO CHR3.3; EXPRESSED IN ADULT LIVER, SIGNAL = 8.1; SWISSPROT HIT: P41104, EVALUE 2.00e-21; EST_HUMAN HIT: AL547798.1, EVALUE 2.00e-78; NT HIT: L21756.1, EVALUE 1.00e-78
atttcaaataccttttggagaaaggcacctcggatgtcacggtgatcttgctcttgctcctttcgatggtcaccacccctccaccaaggttcccagcttttccgttcactttgatcctttcttgcaaaaactgctcaaaattggcagca

SEQ ID NO: 27016 - DNA, 299 bp, Homo sapiens
  MAP TO CHR11.3; EXPRESSED IN LUNG, SIGNAL =  19; EXPRESSED IN ADULT LIVER, SIGNAL =  11; SWISSPROT HIT: P10668, EVALUE 1.00e-52; EST_HUMAN HIT: BI468376.1, EVALUE 0.00e+00; NT HIT: gi16163508, EVALUE 0.00e+00
ccagaagataaacaccagatcctccttcttgctctccttggtctcataggttgcatcatagagggcatagcggcagtccttatctggcagcatcttgacaaaggtggcgtaggggtcgtcgacagtctggcccacatcgcccaccaggatctccttgccctcctccaggatgatgttcttcttgtcctcactcaggcagaagagcaccgccttcttgcgcttcttcacctcctctggcgttgaagacttacgcaccttcatgtcgttgaacaccttgatgacaccatcagagacagcca

SEQ ID NO: 27017 - DNA, 124 bp, Homo sapiens
  MAP TO CHR12.3; EXPRESSED IN FETAL LIVER, SIGNAL = 2.5; EXPRESSED IN ADULT LIVER, SIGNAL = 1.8; EST_HUMAN HIT: BE778098.1, EVALUE 2.00e-44; NT HIT: gi13651913, EVALUE 9.00e-64; SWISSPROT HIT: Q9Z0N1, EVALUE 2.00e-18
agatttatcaacttgatgacccaagttgccctcggccagaatgttatcgatcttgtgggagcagtatgcctgatgagtttcctacagacattccaggaaccaaagggaacttcagattagtcag

SEQ ID NO: 27018 - DNA, 198 bp, Homo sapiens
  MAP TO CHR11.3; EXPRESSED IN FETAL LIVER, SIGNAL =  33; EXPRESSED IN ADULT LIVER, SIGNAL = 4.5; EST_HUMAN HIT: BI552467.1, EVALUE 6.00e-98; NT HIT: gi14767553, EVALUE 1.00e-107; SWISSPROT HIT: P36220, EVALUE 5.00e-32
gaagtttgcactggcacctaccgccagctcttccaccctgagcagctcatcacaggcaaggaagatgctgccaataactatgcccgagggcactacaccattggcaaggagatcattgaccttgtgttggaccgaattcgcaagctggctaaccagtgcactggttttcagggcttcttggttttccacagctttggt

SEQ ID NO: 27019 - DNA, 165 bp, Homo sapiens
  MAP TO CHR4.3; EXPRESSED IN FETAL LIVER, SIGNAL = 0.78; EXPRESSED IN ADULT LIVER, SIGNAL = 0.94; EST_HUMAN HIT: BG709165.1, EVALUE 6.00e-88; NT HIT: X86693.1, EVALUE 3.00e-83
cctcgttagctctgcttctttgcccagaggcatattcaagtctactggagttgaaattctgctgctctgtcaactagtgggggtctgaagtgacagacgagaatttggaggttggcaccagagagtatttcagactgtcatcgtttttgttgcagattcctggat

SEQ ID NO: 27020 - DNA, 206 bp, Homo sapiens
  MAP TO CHR4.3; EXPRESSED IN FETAL LIVER, SIGNAL = 0.56; EXPRESSED IN ADULT LIVER, SIGNAL = 0.7; EXPRESSED IN LUNG, SIGNAL = 0.66; SWISSPROT HIT: Q02108, EVALUE 1.00e-36; EST_HUMAN HIT: AW513686.1, EVALUE 1.00e-111; NT HIT: AF233750.1, EVALUE 1.00e-112
ctaatctattcctgatgctttgcctaaaaaattggcattgccatcttccacatctttcttttggaagcatggttttgagtttgttccttgttggtaagcatccagaaaatggcagattccggggatttcactagggaagtttggtggaagttcctcccttgatcgaggggtaaacacgaaaccaggacagtctttgagtaatctga

SEQ ID NO: 27021 - DNA, 124 bp, Homo sapiens
  MAP TO CHR1.3; EXPRESSED IN FETAL LIVER, SIGNAL =  11; EXPRESSED IN ADULT LIVER, SIGNAL =  14; EST_HUMAN HIT: BI092611.1, EVALUE 1.00e-45; NT HIT: D14718.1, EVALUE 9.00e-64
ttttcagccttgataaatcccttttttgctgcatcaggcttccctttagctcaatatgcagcaatatcctttttgtatttttcctttagctttgcagccttcttttcacaaggctgcttgtctt

SEQ ID NO: 27022 - DNA, 130 bp, Homo sapiens
  MAP TO CHR1.3; EXPRESSED IN FETAL LIVER, SIGNAL = 0.7; EXPRESSED IN ADULT LIVER, SIGNAL = 0.38; SWISSPROT HIT: P15143, EVALUE 4.00e-04; EST_HUMAN HIT: BE783305.1, EVALUE 6.00e-63; NT HIT: gi14736726, EVALUE 4.00e-63
tcagtctaaatctaatgaagaatcgggggattcgcagcagccaagccagccttcccagcagccttcagtgcaggcagccattccccagacccagcttatgctagctggaggacagataactggggtaagt

SEQ ID NO: 27023 - DNA, 161 bp, Homo sapiens
  MAP TO CHR2.3; EXPRESSED IN LUNG, SIGNAL = 1.6; EXPRESSED IN ADULT LIVER, SIGNAL = 0.47; SWISSPROT HIT: P56672, EVALUE 7.60e+00; EST_HUMAN HIT: AL519965.1, EVALUE 1.00e-61; NT HIT: gi14721846, EVALUE 5.00e-63
cccgtgttgattctgtagcttgcagtgagctgcatactccatcgctagatcgaaagccaaatagttttgttgcggtgagtgtcaccacccctcctcaggcattctggacgaagcatgcacagacggagatcattgaggtgggtgctggtggtctctctctg

SEQ ID NO: 27024 - DNA, 159 bp, Homo sapiens
  MAP TO CHR10.3; EXPRESSED IN ADULT LIVER, SIGNAL = 6.1; EXPRESSED IN LUNG, SIGNAL = 5.8; EST_HUMAN HIT: AL135467.1, EVALUE 2.00e-84; SWISSPROT HIT: O00767, EVALUE 3.00e-26; NT HIT: gi14741472, EVALUE 2.00e-84
tgcccctctacttggaagacgacattcgccctgatataaaagatgatatatatgaccccacctacaaggataaggaaggcccaagccccaaggttgaatatgtctggagaaacatcatccttatgtctctgctacacttgggagccctgtatgggatca

SEQ ID NO: 27025 - DNA, 170 bp, Homo sapiens
  MAP TO CHR12.3; EXPRESSED IN ADULT LIVER, SIGNAL =   1; SWISSPROT HIT: P20645, EVALUE 2.00e-27; EST_HUMAN HIT: BE175497.1, EVALUE 7.00e-91; NT HIT: gi12745006, EVALUE 5.00e-91
ttacttccgttgaagatgtgagtctcgttgagtctccctaccactgtctccttcccattacttttgttgatttgcaccaggcctgccccagaagtgtggttgccagcttcccggcacaccctgaagatgtagatgtatgtgtctgaaccctggcccacagtgctctcaaa

SEQ ID NO: 27026 - DNA, 172 bp, Homo sapiens
  MAP TO CHR9.3; EXPRESSED IN ADULT LIVER, SIGNAL = 1.1; NT HIT: gi4507296, EVALUE 1.00e-85; SWISSPROT HIT: Q64320, EVALUE 3.00e-27; EST_HUMAN HIT: AI858740.1, EVALUE 2.00e-85
ctctctctttctcagcgcccgctatgggcactggcataagaacaaggccccaggcgagtaccgcagtggcccccgcctcatcattttcatccttgggggtgtgagcctgaatgagatgcgctgcgcctacgaggtgacccaggccaacggaaagtgggaggtgctgataggt

SEQ ID NO: 27027 - DNA, 117 bp, Homo sapiens
  MAP TO CHR14.3; EXPRESSED IN ADULT LIVER, SIGNAL = 1.2; EXPRESSED IN FETAL LIVER, SIGNAL = 0.41; EXPRESSED IN LUNG, SIGNAL = 2.2; EST_HUMAN HIT: BI027779.1, EVALUE 2.00e-53; SWISSPROT HIT: P20718, EVALUE 8.00e-15; NT HIT: J02907.1, EVALUE 1.00e-59
ccccagccagccacactgcacagctgccctggcttcacctgggccttgctgctaggtagcctgagaggccgcacagctgtggtccacttggcctttctctccagctggtggggaaga

SEQ ID NO: 27028 - DNA, 108 bp, Homo sapiens
  MAP TO CHR11.3; EXPRESSED IN ADULT LIVER, SIGNAL = 0.65; NT HIT: gi4506102, EVALUE 6.00e-46; EST_HUMAN HIT: BI335036.1, EVALUE 4.00e-54
ggaagaactgctaaagctttgaggtcattacaatttacgaatccaggaaggcaaactgaatttgctccagaaactggtaaaagagaaaaaagaaggcttacaaaaaat

SEQ ID NO: 27029 - DNA, 173 bp, Homo sapiens
  MAP TO CHR6.3; EXPRESSED IN LUNG, SIGNAL =  14; EXPRESSED IN ADULT LIVER, SIGNAL =  14; SWISSPROT HIT: P52859, EVALUE 5.00e-27; NT HIT: Z23090.1, EVALUE 3.00e-92; EST_HUMAN HIT: BG231561.1, EVALUE 1.00e-92
caggtgttatgtctggctgtagctgttggtcacgtgaagatgacagacgatgagcttgtgtataacattcacctggctgtcaacttcttggtgtcattgctcaagaaaaactggcagaatgtccgggccttatatatcaagagcaccatgggcaagccccagcgcctatatta

SEQ ID NO: 27030 - DNA, 151 bp, Homo sapiens
  MAP TO CHR18.3; EXPRESSED IN ADULT LIVER, SIGNAL = 0.57; NT HIT: M31549.1, EVALUE 9.00e-80; EST_HUMAN HIT: AL547037.1, EVALUE 1.00e-73; SWISSPROT HIT: P05120, EVALUE 4.00e-22
aaatcccaaacttgttacctgaaggttctgtagatggggataccaggatggtcctggtgaatgctgtctacttcaaaggaaagtggaaaactccatttgagaagaaactaaatgggctttatcctttccgtgtaaactcggtatgagacaa

SEQ ID NO: 27031 - DNA, 180 bp, Homo sapiens
  MAP TO CHR12.3; EXPRESSED IN LUNG, SIGNAL =  17; EXPRESSED IN FETAL LIVER, SIGNAL =  15; EXPRESSED IN ADULT LIVER, SIGNAL =  15; SWISSPROT HIT: O60711, EVALUE 6.50e-01; NT HIT: X12671.1, EVALUE 8.00e-93; EST_HUMAN HIT: AL565743.1, EVALUE 1.00e-92
aatgtgctgtgtaaagttagtctactcttaagccatcttggtaaatttccccacagtgtgaagttagaattccttcagggtgatgccaggttctatttggaatttatatacaacctgcttgggtggagaagccattgtcttcggaaaccttggtgtagttgaactgatagttactgttgt

SEQ ID NO: 27032 - DNA, 235 bp, Homo sapiens
  MAP TO CHR8.3; EXPRESSED IN ADULT LIVER, SIGNAL = 0.86; EST_HUMAN HIT: BG778015.1, EVALUE 1.00e-120; NT HIT: gi16162044, EVALUE 1.00e-120; SWISSPROT HIT: O14977, EVALUE 3.00e-40
aataaaatcaccttaccaatcactgaatgacatcatgtaataaatggctggcctctgaaaatcattaaaagcagatggttcatggaaagaatctgctcccatgttatcaaagataagccaatctcccacattcagctcaggaagaagacagctttccacaatttgatcaagctcatcacaggatggaccccaaaggctgcttgtaaacagaggctcatcttccttgtatttctgt

SEQ ID NO: 27033 - DNA, 152 bp, Homo sapiens
  MAP TO CHRX.3; EXPRESSED IN LUNG, SIGNAL = 1.4; EXPRESSED IN FETAL LIVER, SIGNAL = 2.6; EXPRESSED IN ADULT LIVER, SIGNAL = 2.2; SWISSPROT HIT: O14463, EVALUE 5.10e-01; EST_HUMAN HIT: AI914194.1, EVALUE 3.00e-62; NT HIT: L44140.1, EVALUE 2.00e-80
gccaggcttagcgggaaacggggggcccaaagcgctgcatggtccgcaccaccagggaaagctggtcaagaaagttgatgacggaaattcggagcaggcgacagtcttcagctttccagcggctaaaagtgaggggaaaagaaaatcaaatt

SEQ ID NO: 27034 - DNA, 160 bp, Homo sapiens
  MAP TO CHR12.3; EXPRESSED IN LUNG, SIGNAL = 0.58; EXPRESSED IN ADULT LIVER, SIGNAL = 0.46; NT HIT: gi14755699, EVALUE 6.00e-75; SWISSPROT HIT: P13056, EVALUE 1.00e-21; EST_HUMAN HIT: AW021046.1, EVALUE 8.00e-75
tttttaccttgttgaagactattgtgaagacaattgacaaatgttgctaatatagttgctacattcatcacttgccagcactgggcaagaccaagagtaaaaagttcattccagtaagctttcaccagtgatatgctgttttcttgcctattaaaaacag

SEQ ID NO: 27035 - DNA, 175 bp, Homo sapiens
  MAP TO CHR1.3; EXPRESSED IN LUNG, SIGNAL = 1.6; EXPRESSED IN ADULT LIVER, SIGNAL = 0.64; NT HIT: AF149301.1, EVALUE 5.00e-94; SWISSPROT HIT: Q9UN79, EVALUE 9.00e-18; EST_HUMAN HIT: AL517041.1, EVALUE 2.30e-01
atcctgggaggcccgggctgggtctccaggctgaggttcagcggcagtggctgagccctggggggcctcgtggcaaggctctttcttctcctctgacttgatggtgcagttcaccatggtgccaacgccatccagggccagctgggcagagatggggctcctcatggacatcctg

SEQ ID NO: 27036 - DNA, 205 bp, Homo sapiens
  MAP TO CHR17.3; EXPRESSED IN ADULT LIVER, SIGNAL = 0.42; NT HIT: gi14775009, EVALUE 1.00e-107; SWISSPROT HIT: Q14532, EVALUE 9.00e-32; EST_HUMAN HIT: BF756785.1, EVALUE 6.00e-27
gccttcaatggcaatgagaaggaaaccatgcagttccttaacgaccgcctggccagctacctgacgagggtgcggcagctggagcaggagaatgcggagctggagagcaggatccaagaggcctctcactcccaggtgctcaccatgactcctgactaccagtctcatttcaggaccattgaggagctccagcagaaggtgaggg

SEQ ID NO: 27037 - DNA, 301 bp, Homo sapiens
  MAP TO CHR22.3; EXPRESSED IN LUNG, SIGNAL = 0.65; EXPRESSED IN ADULT LIVER, SIGNAL = 0.6; NT HIT: gi4507332, EVALUE 0.00e+00; SWISSPROT HIT: O14994, EVALUE 2.00e-14; EST_HUMAN HIT: BG703843.1, EVALUE 0.00e+00
acttacttgagatgcggatggggtggtgctggcttcttggactcttcaccctgctgggaggtactacggccctgcacagggggccggggctgtgaggcgagggtggcacctggcttggaggcctggtttggggagctgccactggatgcccgggatagctgcggagagcctggtgacctttgctgctgtggagatccggactgggggctcaggggctgctggccttgtggggagagcctctgttgggaggggcttccagatctctggggctgaggagactgagcttggcgagggcctccta

SEQ ID NO: 27038 - DNA, 141 bp, Homo sapiens
  MAP TO CHR9.3; EXPRESSED IN ADULT LIVER, SIGNAL = 0.53; NT HIT: gi16179748, EVALUE 7.00e-74; SWISSPROT HIT: P98161, EVALUE 7.80e-02; EST_HUMAN HIT: BF095585.1, EVALUE 2.80e+00
cattttccaagtagtctagctttcttaaatcttactcagaatgactttgcttgtacttgtgaacaccagagtttcctgcaatggatcaaggaccagaggcagctcttggtggaagttgaacgaatggaatgtgcaacacct

SEQ ID NO: 27039 - DNA, 174 bp, Homo sapiens
  MAP TO CHR3.3; EXPRESSED IN FETAL LIVER, SIGNAL = 0.77; EXPRESSED IN ADULT LIVER, SIGNAL = 1.1; EXPRESSED IN LUNG, SIGNAL =   1; NT HIT: AB026898.1, EVALUE 2.00e-93; SWISSPROT HIT: P12755, EVALUE 1.90e+00; EST_HUMAN HIT: BG721487.1, EVALUE 1.00e-80
cgtctgcgcccctcctcgctgcgcacccaagatatctcgcacttgctcaccggcgtcttccgcaacttgtactcagccgaggtcatcggcgacgaagtgagcgcaagcttgatcaaggcccgcggcagcgagaatgagcgccacgaggagttcgtggaccagctgcagcaggta

SEQ ID NO: 27040 - DNA, 158 bp, Homo sapiens
  MAP TO CHR5.3; EXPRESSED IN LUNG, SIGNAL =  14; EXPRESSED IN ADULT LIVER, SIGNAL = 3.6; SWISSPROT HIT: P16975, EVALUE 5.00e-26; NT HIT: M25744.1, EVALUE 1.00e-81; EST_HUMAN HIT: AL553022.1, EVALUE 2.00e-81
tcttacccgtcaatggggtgctggtccagctggccgaactgccagtgtacagggaagatgtacatgttatagttcttctcgaagtcccgggccagcagctccacggggtggtctcctgcctccaggcgcttctcattctcatggatcttcttcacctg

SEQ ID NO: 27041 - DNA, 157 bp, Homo sapiens
  MAP TO CHR6.3; EXPRESSED IN LUNG, SIGNAL = 1.3; EXPRESSED IN ADULT LIVER, SIGNAL = 0.82; SWISSPROT HIT: Q9Y5X1, EVALUE 4.00e-15; NT HIT: gi14747912, EVALUE 4.00e-79; EST_HUMAN HIT: AI693971.1, EVALUE 1.00e-82
acttacttgttaaggggaattttcatggatgaggaactagcacgactgtttcctcgctgagcgccgcctgcatcagctgactctgaatccttaaagtaggaagaggatttgggcccatcccagtcttcatcccagtcatcatcatcaccagttgcta

SEQ ID NO: 27042 - DNA, 205 bp, Homo sapiens
  MAP TO CHR17.3; EXPRESSED IN FETAL LIVER, SIGNAL =   5; EXPRESSED IN ADULT LIVER, SIGNAL =   4; NT HIT: gi4503528, EVALUE 3.00e-77; EST_HUMAN HIT: AA483543.1, EVALUE 4.00e-77; SWISSPROT HIT: P29562, EVALUE 2.00e-20
agtcaggggctatacccaacaactcactaccaggcccgcctcctgcactgggccccacctctcgttccacgttgatgtagaactggcggataccctccagggtcaactcttccttcttgacaagaatccgaatggggtccctcatgaacttcttggtcacctcaagcacatcagaaggcattgtggctgacagcaaaactaccta

SEQ ID NO: 27043 - DNA, 110 bp, Homo sapiens
  MAP TO CHR5.3; EXPRESSED IN ADULT LIVER, SIGNAL = 1.6; EXPRESSED IN LUNG, SIGNAL =   2; NT HIT: M13519.1, EVALUE 2.00e-55; EST_HUMAN HIT: BG878016.1, EVALUE 3.00e-55; SWISSPROT HIT: P07686, EVALUE 2.00e-16
agtcacagcatctggcttccctgtaatcctttctgctccttggtacttagatttgattagctatggacaagattggaggaaatactataaagtggaacctcttgattttg

SEQ ID NO: 27044 - DNA, 380 bp, Homo sapiens
  MAP TO CHR6.3; EXPRESSED IN LUNG, SIGNAL = 7.5; EXPRESSED IN ADULT LIVER, SIGNAL = 4.3; EXPRESSED IN FETAL LIVER, SIGNAL =  11; EST_HUMAN HIT: BE622317.1, EVALUE 0.00e+00; SWISSPROT HIT: Q99879, EVALUE 2.00e-45; NT HIT: gi12732485, EVALUE 0.00e+00
catgcctgagccagcgaaatccgctcccgccccgaagaagggctccaagaaggccgtgaccaaggcgcagaagaaggacggcaagaagcgcaagcgcagccgcaaggagagctactccgtatacgtgtacaaggtgctgaaacaggtccaccccgacaccggcatctcctctaaagccatggggatcatgaattcctttgtcaacgacatcttcgagcgcatcgccggcgaggcttcccgcctggcgcattacaacaagcgctcgaccatcacctccagggagatccagacggccgtgcgcctgctgcttcccggggagctggccaagcacgctgtgtcagagggcaccaaggccgttaccaagtacaccagctccaagt

SEQ ID NO: 27045 - DNA, 119 bp, Homo sapiens
  MAP TO CHR17.3; EXPRESSED IN ADULT LIVER, SIGNAL =  10; EXPRESSED IN LUNG, SIGNAL =  12; NT HIT: gi16164938, EVALUE 8.00e-61; EST_HUMAN HIT: BG118748.1, EVALUE 7.00e-56; SWISSPROT HIT: P23821, EVALUE 8.00e-10
aagccatgttcagttcgagcgccaagatcgtgaagcccaatggcgagaagccggacgagttcgagtccggccatctcccaggctcttctggagctggagatgaactcggacctcaaggc

SEQ ID NO: 27046 - DNA, 266 bp, Homo sapiens
  MAP TO CHR2.3; EXPRESSED IN LUNG, SIGNAL = 0.45; EXPRESSED IN ADULT LIVER, SIGNAL = 0.52; NT HIT: gi11429010, EVALUE 0.00e+00; SWISSPROT HIT: O95393, EVALUE 1.00e-46; EST_HUMAN HIT: BG477354.1, EVALUE 3.60e-01
tgctcatgggaaatcatttcattcagttcctccttcctctccttgtcactgctttggtcatcagaaaacacgatgagcaaagggttatgcttattctgggcactggtatctatttctagccgtccactgctggcatcctcagcttcatcgtgtttgctctcaatgtggacctccagctggtgggtggatgagcctgacttttgccaacgtctgatggcatctgtgacatcaaaagtctcccactcactgttggttccatatatctc

SEQ ID NO: 27047 - DNA, 122 bp, Homo sapiens
  MAP TO CHR6.3; EXPRESSED IN FETAL LIVER, SIGNAL = 1.3; EXPRESSED IN ADULT LIVER, SIGNAL = 1.6; SWISSPROT HIT: P02554, EVALUE 2.00e-17; EST_HUMAN HIT: BI906644.1, EVALUE 3.00e-58; NT HIT: gi14781831, EVALUE 8.00e-58
accgaacacgaagttgtctggtctgaagatctggccgaagggtccagacctgacagagtccatggtgccaggctccagatccaccaggatggcccgaggtacatatttgttacctgcaggaa

SEQ ID NO: 27048 - DNA, 153 bp, Homo sapiens
  MAP TO CHR9.3; EXPRESSED IN ADULT LIVER, SIGNAL = 0.71; SWISSPROT HIT: P07902, EVALUE 2.60e+00; EST_HUMAN HIT: BI766583.1, EVALUE 8.00e-81; NT HIT: M96264.1, EVALUE 6.00e-81
gtggcctcatgtcgcgcagtggaaccgatcctcagcaacgccagcaggcgtcagaggcggacgccgcagcagcaaccttccgggcaaacggtaactgcaccgcggcagggactcgctggggcgcggagccgagccctccccttccttaggaag

SEQ ID NO: 27049 - DNA, 245 bp, Homo sapiens
  MAP TO CHR5.3; EXPRESSED IN ADULT LIVER, SIGNAL =  21; SWISSPROT HIT: P23892, EVALUE 3.60e-01; EST_HUMAN HIT: BF155208.1, EVALUE 1.00e-130; NT HIT: gi14110394, EVALUE 2.00e-48
agaattcgtggtctcagtgaaggaagactttgtggaagatgacttcattccagacctgggtatctccaatctacttccatccagccactgcccgaagccatcttcctgtctactggatgtttacagtgactgtgggtatgagggctcccctttccccttcagcgacatggcctctccacttggtgcaaaccattctaaggaggagactggccaatgaactctttcaccagctggttagtgtctaa

SEQ ID NO: 27050 - DNA, 162 bp, Homo sapiens
  MAP TO CHR8.3; EXPRESSED IN ADULT LIVER, SIGNAL = 0.38; EXPRESSED IN LUNG, SIGNAL = 0.42; SWISSPROT HIT: P07155, EVALUE 3.00e-12; NT HIT: gi15295009, EVALUE 6.00e-47; EST_HUMAN HIT: C02954.1, EVALUE 4.00e-46
tagtcttcctcctatctaagcacttcttcgaaaactctgagaagttgactgaaacatctggatgcttcttcttgagctcctcctgacaagtttgcgcaaagaatgcatataatgacattttgcctatcggcttcttaggacctcctttgcccaggcttagtt

SEQ ID NO: 27051 - DNA, 179 bp, Homo sapiens
  MAP TO CHR2.3; EXPRESSED IN ADULT LIVER, SIGNAL = 5.9; EXPRESSED IN LUNG, SIGNAL = 5.4; EST_HUMAN HIT: AA954166.1, EVALUE 6.00e-76; SWISSPROT HIT: P19338, EVALUE 3.80e-01; NT HIT: gi4885510, EVALUE 4.00e-76
tactgtcttggaatgtcctcagaaggctctgtcattgatcaggtaacagtaaaaaccccagagtcctttctttcaaatggaaaagggaaagcagagggacagaagctattcaaacttcgtcttctttccttgtggcttgtggtcacctcctcctcctctgcctcctcggaagcctcctc

SEQ ID NO: 27052 - DNA, 149 bp, Homo sapiens
  MAP TO CHR10.3; EXPRESSED IN ADULT LIVER, SIGNAL = 1.3; SWISSPROT HIT: P12956, EVALUE 1.00e-17; EST_HUMAN HIT: AU127392.1, EVALUE 5.00e-48; NT HIT: D88107.1, EVALUE 5.00e-66
ggagactataaatattcaggaagacatagtttgatttttttggttgatgcctccagggctatgtttgaatctcagagtgaagttttgattccttttgacatgagcatccagtgtatccaaagtgtgtacatcagtaagatcataagcag

SEQ ID NO: 27053 - DNA, 137 bp, Homo sapiens
  MAP TO CHR2.3; EXPRESSED IN ADULT LIVER, SIGNAL = 4.6; SWISSPROT HIT: P40925, EVALUE 8.00e-17; NT HIT: U20352.1, EVALUE 7.00e-68; EST_HUMAN HIT: N41333.1, EVALUE 1.00e-67
acagaataagacctggaagtgtgttgaaggtctccctattaatgatttctcacgtgagaagatggatcttactgcaaaggaactgacagaagaaaaagaaagtgcttttgaatttctttcctctgcctgactagaca

SEQ ID NO: 27054 - DNA, 118 bp, Homo sapiens
  MAP TO CHR5.3; EXPRESSED IN ADULT LIVER, SIGNAL = 8.4; EST_HUMAN HIT: BG339699.1, EVALUE 3.00e-55; NT HIT: AB054976.1, EVALUE 3.00e-60; SWISSPROT HIT: O43678, EVALUE 2.00e-10
gcgcctcacctgacgccctggctgccgggcgagcgctgacataagtggatgcgaatctcacgcaggcccagctttgccccgactcctcgacttgctgcggccgccgccatccttgtta

SEQ ID NO: 27055 - DNA, 153 bp, Homo sapiens
  MAP TO CHR19.3; EXPRESSED IN ADULT LIVER, SIGNAL = 0.73; SWISSPROT HIT: P51146, EVALUE 2.00e-10; EST_HUMAN HIT: BF880446.1, EVALUE 1.00e-73; NT HIT: gi14277708, EVALUE 8.00e-74
cctcctactcccagtcaaacaggactccaaccacacaatcggcgtggagtttggatcccgggctggtcaacgtgggtgggaagactgtgaagctacagatttgggacacggctggctaggagcggtttcggtaggtgggctgggctcccaagg

SEQ ID NO: 27056 - DNA, 119 bp, Homo sapiens
  MAP TO CHR1.3; EXPRESSED IN ADULT LIVER, SIGNAL = 0.73; SWISSPROT HIT: Q9Y624, EVALUE 7.00e-03; EST_HUMAN HIT: AL576433.1, EVALUE 3.00e-55; NT HIT: gi15295201, EVALUE 2.00e-55
atacttactgtcaaagtggcctcggctataggcaaaccagatgccaaaaaccaagattcccaggagaatcagggttacaaggacggctgccacgatgacccccacattccgctccactg

SEQ ID NO: 27057 - DNA, 211 bp, Homo sapiens
  MAP TO CHR1.3; EXPRESSED IN ADULT LIVER, SIGNAL =  49; NT HIT: X04802.1, EVALUE 1.00e-115; SWISSPROT HIT: P02248, EVALUE 2.00e-29; EST_HUMAN HIT: BG196817.1, EVALUE 1.00e-115
ggaccaggtacagggtcaactctttctggatgttgtagtcagaaagagtacagccatcttctagctgcatgcctgcaaagatgagcctctgctggtcggggaggatgccttccttatcctggatattggccttcacattttcgatggtgtcactgggctccacttcaagggtgatggtcttgccagtcagggtcttcacgaagatctgcat

SEQ ID NO: 27058 - DNA, 133 bp, Homo sapiens
  MAP TO CHR19.3; EXPRESSED IN ADULT LIVER, SIGNAL = 1.5; EST_HUMAN HIT: N28908.1, EVALUE 6.00e-69; NT HIT: X78929.1, EVALUE 4.00e-23; SWISSPROT HIT: Q9UJU3, EVALUE 7.00e-16
agaaaaaccttacaaatgtgaagagtgtgggaaaggctttggtaggagcttgaatcttcgccatcatcagagggtccacacgggagagaaaccccatatatgtgaggagtgtggtaaggccttcagtctcccc

SEQ ID NO: 27059 - DNA, 138 bp, Homo sapiens
  MAP TO CHRX.3; EXPRESSED IN ADULT LIVER, SIGNAL = 0.44; NT HIT: gi14765973, EVALUE 5.00e-72; EST_HUMAN HIT: AA953593.1, EVALUE 4.00e-67; SWISSPROT HIT: Q04982, EVALUE 6.00e-21
cagataatttttatggtgggacaaggatacctatctccagatctcagtaaggtacggagtaactgtccaaaagccatgaagagattaatggcagagtgcctcaaaaagaaaagagatgagagaccactctttccccaa

SEQ ID NO: 27060 - DNA, 353 bp, Homo sapiens
  MAP TO CHR22.3; EXPRESSED IN ADULT LIVER, SIGNAL = 0.8; SWISSPROT HIT: P98161, EVALUE 2.00e-13; NT HIT: gi11418311, EVALUE 0.00e+00
tccaaagtggtatcaacagaaagccatttctggcatatgaacagccaaatgtgcctgctaaacagattttccactttgattctacttaaataccagctaggcgatcgaccctcgttgttgtgccacacacggatggaatggatgtcccccaagtcactttttgtcgttaggaggaaagtgttgatgctacctcggtagagagttgtgaaatgtggatggcttaaacaatgcacgtcgctggtactcacagttcctctaagttgcacaaagacattggccctggtcccagacccccaacgacttcctgtaaaaatagtcaccaagtagcataaattatcataaggatcattatc

SEQ ID NO: 27061 - DNA, 296 bp, Homo sapiens
  MAP TO CHR1.3; EXPRESSED IN ADULT LIVER, SIGNAL = 0.43; NT HIT: AF149301.1, EVALUE 0.00e+00; SWISSPROT HIT: Q9UN79, EVALUE 5.00e-39; EST_HUMAN HIT: BF771113.1, EVALUE 0.00e+00
gggatcagtctgtgagcaccaccaactccccatcgctcttctcttcgccctccgagtcctcgtcctcgctgtaccggtacatctcgccatcagccaccgagtgcctgtcatctgtgccctcaccctcctctctgaggctgcaggtgttgacgatcacaggcatgttggggtccaggctacgagggacatagtgctccaccagtggctgtgccagcggcatgcctgctgcccgagggtacaggacatctgaggagctcatctgcacctggccagcctgcgggctgtggggcagagaa

SEQ ID NO: 27062 - DNA, 356 bp, Homo sapiens
  MAP TO CHR2.3; EXPRESSED IN ADULT LIVER, SIGNAL = 0.4; EST_HUMAN HIT: BG253038.1, EVALUE 0.00e+00; NT HIT: AF330128.1, EVALUE 0.00e+00; SWISSPROT HIT: Q9NY46, EVALUE 2.00e-58
gagttttcaagttggcaaaatcctggcccacactaaatatgctaattaagatcattggcaattctgtgggggctctaggaaacctcaccttggtgttggccatcatcgtcttcatttttgctgtggtcggcatgcagctctttggtaagagctacaaagaatgtgtctgcaagatcaatgatgactgtacgctcccacggtggcacatgaacgacttcttccactccttcctgattgtgttccgcgtgctgtgtggagagtggatagagaccatgtgggactgtatggaggtcgctggccaaaccatgtgccttattgttttcatgttggtcatggtcattggaaaccttgtggta

SEQ ID NO: 27063 - DNA, 255 bp, Homo sapiens
  MAP TO CHR1.3; EXPRESSED IN LUNG, SIGNAL = 2.3; EXPRESSED IN ADULT LIVER, SIGNAL = 1.6; EST_HUMAN HIT: BF843205.1, EVALUE 1.00e-119; NT HIT: gi13638447, EVALUE 0.00e+00; SWISSPROT HIT: P14543, EVALUE 6.00e-42
ccttacccctcacaggcccaatggagttgctgagagcatagcgcaagatcttctcctcctggttgtacaggacgaacacgctgtccaccgagagctgctgggtgctgggcagggctggccgggagtcatcgtggacgcattcctggaaggtgatggtctggcgccactggtaagtgtagatgcgtgaaggagatgccccatctcgctcgggctcagtcaccgtgtactcccgggtggaggaggaagtgatcactg

SEQ ID NO: 27064 - DNA, 125 bp, Homo sapiens
  MAP TO CHR9.3; EXPRESSED IN LUNG, SIGNAL = 1.2; EXPRESSED IN ADULT LIVER, SIGNAL =  41; NT HIT: gi14740524, EVALUE 4.00e-63; SWISSPROT HIT: P09034, EVALUE 2.00e-17; EST_HUMAN HIT: AA180270.1, EVALUE 5.00e-63
agctcagcaaatttcaagcccaggccttgtttgattttgcgcacttcccggtccatggtgaaggcctcgatgtctaaatgagcatggtaaaggatggtgcctgctggggtctcgtagatacctag

SEQ ID NO: 27065 - DNA, 170 bp, Homo sapiens
  MAP TO CHR8.3; EXPRESSED IN ADULT LIVER, SIGNAL = 0.51; SWISSPROT HIT: Q9UK22, EVALUE 2.50e+00; EST_HUMAN HIT: AW835447.1, EVALUE 3.00e-90; NT HIT: gi7657078, EVALUE 3.00e-18
ccaggtgtgctggcattggaagaaccttgctgagctggaccagctctggatgctgaaatgtttacggtttaactggtacatcaatttctctccaactccctttgagcaggggatctggaagaagcactatattcaaatggtgaaagaacttcatattaccaagcctaagg

SEQ ID NO: 27066 - DNA, 217 bp, Homo sapiens
  MAP TO CHR1.3; EXPRESSED IN ADULT LIVER, SIGNAL = 0.3; EXPRESSED IN LUNG, SIGNAL = 0.43; SWISSPROT HIT: Q02563, EVALUE 2.00e-34; EST_HUMAN HIT: BE313236.1, EVALUE 1.00e-113; NT HIT: gi16158286, EVALUE 1.00e-113
ccccttaccaagcattctgagcctgccgatcttgtccatgagcagggcagacacgatattcccaggaagcactgccagtgtccccaggaagctcacaaagtataccatgtaggcaccttcgcccgtccctgtcacgtctagcgggcagccctccttgttgtgcaggaatgtactgtttatcagacggctgttcacaaacttgtactcgaacaggtct

SEQ ID NO: 27067 - DNA, 210 bp, Homo sapiens
  MAP TO CHR5.3; EXPRESSED IN ADULT LIVER, SIGNAL = 3.5; NT HIT: AF118374.1, EVALUE 1.00e-115; SWISSPROT HIT: Q93088, EVALUE 1.00e-30; EST_HUMAN HIT: N52288.1, EVALUE 1.00e-114
tactcacccattttaggggcaggaagtcaatgaagctgcttgcgacatcgcccgacaagtggctgatgaaggagatgctttggtagcaggaggagtgagtcagacaccttcataccttagctgcaagagtgaaactgaagtcaaaaaagtatttctgcaacagttagaggtctttatgaagaagaacgtggacttcttgattgcagaggt

SEQ ID NO: 27068 - DNA, 321 bp, Homo sapiens
  MAP TO CHR6.3; EXPRESSED IN FETAL LIVER, SIGNAL = 0.33; EXPRESSED IN ADULT LIVER, SIGNAL = 0.39; NT HIT: gi16171936, EVALUE 1.00e-120; SWISSPROT HIT: P42260, EVALUE 4.00e-36; EST_HUMAN HIT: AA334499.1, EVALUE 1.00e-25
cttaccttgaaaaaagtcatggttgcaccatcctctactgctccatattctatcttggtttgtttagctaaatcatcagcagagtcaataggggattccatgcgttccactgtcagaaaggcggctaagttagcagtatacgaagaaatgatgataagtgtgaaaaaccaccaaatgcctcccactatcctggtggacagtgctttgggcatgagctcagaacctaacagagagtgggggaaaggtgaaacgaatatagagaatttgatcagcaatcagatactttttgtcacagtggcagaatggaatcactgtgtaata

SEQ ID NO: 27069 - DNA, 222 bp, Homo sapiens
  MAP TO CHR17.3; EXPRESSED IN LUNG, SIGNAL = 2.3; EXPRESSED IN FETAL LIVER, SIGNAL = 0.71; EXPRESSED IN ADULT LIVER, SIGNAL = 0.75; EST_HUMAN HIT: BF350861.1, EVALUE 4.00e-93; NT HIT: gi14775969, EVALUE 3.00e-93; SWISSPROT HIT: Q99191, EVALUE 5.40e+00
aatgaatgttttatgactttacctgatgaaccattaaggactggacctgccgtttgaggacctgcattctagctgttgtgacaactgaccgaacgtctggcaccacactctcactaagaatttcactgatgaggcggtggtttctctggaaacgggcggtggctgtatgcttcattgaaaagccatcatcataatctggagtgaacaaattgttctggaaat

SEQ ID NO: 27070 - DNA, 195 bp, Homo sapiens
  MAP TO CHR11.3; EXPRESSED IN ADULT LIVER, SIGNAL = 3.6; EST_HUMAN HIT: BG026964.1, EVALUE 1.00e-103; NT HIT: U12472.1, EVALUE 1.00e-106; SWISSPROT HIT: P09211, EVALUE 6.00e-31
ccctgcagatctccttcgctgactacaacctgctggacttgctgctgatccatgaggtcctagcccctggctgcctggatgcgttccccctgctctcagcatatgtggggcgcctcagtgcccggcccaagctcaaggccttcctggcctcccctgagtacgtgaacctccccatcaatggcaacgggaaacagt

SEQ ID NO: 27071 - DNA, 332 bp, Homo sapiens
  MAP TO CHR2.3; EXPRESSED IN ADULT LIVER, SIGNAL =   2; EST_HUMAN HIT: BE893678.1, EVALUE 0.00e+00; NT HIT: gi14721250, EVALUE 0.00e+00; SWISSPROT HIT: P19967, EVALUE 6.40e-01
tcagggctggtgcagcttcccccgctcggtcagcagtgtcatggcagaggcgtagaggacatagcccagggtgagcagcagcgtgcatgggaggggcccgacgcagaacagagaggccacgaagaaggccagcagcagcgagaccagcgtccggtaactgcccaggaagcgcaggctgagcctggggccgcgggtgtggccggccacctgcctccgccccacagggctcagcaggtgcctgctggccagcccaggttctgtgaggtggtagcgacagaagctgccgaggaagtcatcccgggaacacagagccgccatctgtcctgcaaact

SEQ ID NO: 27072 - DNA, 126 bp, Homo sapiens
  MAP TO CHR10.3; EXPRESSED IN ADULT LIVER, SIGNAL = 1.5; NT HIT: gi14745096, EVALUE 6.00e-65; SWISSPROT HIT: P40531, EVALUE 2.70e+00; EST_HUMAN HIT: AU130473.1, EVALUE 4.00e-48
ggcccggaggaggccgacgccatcttggcagccccctccccctcaagggcctggctctctttcaatccggctcttcctcttctcggaatcgaatcttcccaatgtctctttatagaacccacgttc

SEQ ID NO: 27073 - DNA, 193 bp, Homo sapiens
  MAP TO CHR18.3; EXPRESSED IN LUNG, SIGNAL = 1.1; EXPRESSED IN BONE MARROW, SIGNAL = 0.62; SWISSPROT HIT: Q64733, EVALUE 1.50e-02; EST_HUMAN HIT: AL541116.1, EVALUE 5.00e-21; NT HIT: AB038518.1, EVALUE 3.00e-21
acgacttcgcagaggaggaggaggtgcaatccttcggttacaagcggtttggtgagtcctaacaaagctgtgttccttctcagtggtcaacctgggatgcagccacgaaccctcagagaccattggcaggccactggcaggcccttcatgcacatgggtgtttgtggctctgaggtccaattttggttggaaa

SEQ ID NO: 27074 - DNA, 122 bp, Homo sapiens
  MAP TO CHR18.3; EXPRESSED IN LUNG, SIGNAL = 1.2; SWISSPROT HIT: O14628, EVALUE 2.00e-11; NT HIT: gi8923288, EVALUE 1.00e-62; EST_HUMAN HIT: BG205207.1, EVALUE 2.00e-62
ggagaaaaacctttcaagtgcgatgagtgtaactttgcctccacaactcagtcccatttgactcggcataaacgtgtccacactggagaaaagccctacagatgcccctggtgtgactacag

SEQ ID NO: 27075 - DNA, 217 bp, Homo sapiens
  MAP TO CHR19.3; EXPRESSED IN LUNG, SIGNAL = 2.6; EXPRESSED IN FETAL LIVER, SIGNAL = 3.1; NT HIT: gi14764015, EVALUE 1.00e-119; EST_HUMAN HIT: AI637637.1, EVALUE 1.00e-119; SWISSPROT HIT: O16520, EVALUE 7.60e-01
ccccagcaccacgttggcgtagagttcccgcgccgtcctggtctcgcgcttcctggagatctccgcgtcgtaccagaagccccgctccttggggttgtcggggttgtagttgagcatgaccacctggcccacctccaggtcctgccacttgatgatggtgcgggcgcgcgctcggacgtccctggagttcatctggaccacgccgttctccgggtag

SEQ ID NO: 27076 - DNA, 278 bp, Homo sapiens
  MAP TO CHR16.3; EXPRESSED IN LUNG, SIGNAL = 1.2; NT HIT: gi15316396, EVALUE 2.00e-29; SWISSPROT HIT: Q15878, EVALUE 6.10e-01; EST_HUMAN HIT: AL597167.1, EVALUE 0.00e+00
aggtggcccaaggctgaagaccgaggtccagggaggcgcctttccaaccgtgccagagagggcaggtcgcagacgccggggctgcggggaatagaggccctcaccgcagatgccacctgccgtgccctgctctgcggccaacgccagcgctggacccggagctacccgcccccgacccggaactccctcgagtaccgcgcgagccgcttggtcgccattcccgacactccttgcttttccaagtccagctgccggaagtcgctcgacttctacttccg

SEQ ID NO: 27077 - DNA, 94 bp, Homo sapiens
  MAP TO CHR16.3; EXPRESSED IN LUNG, SIGNAL =   1; EXPRESSED IN FETAL LIVER, SIGNAL = 1.5; NT HIT: D63791.1, EVALUE 7.40e-02; EST_HUMAN HIT: BG772763.1, EVALUE 1.10e-01; SWISSPROT HIT: O43246, EVALUE 3.60e+00
ttccctggttggcctcaagatgacgccaacacccacggagtccgcccagccgctccaggtgcagcggccacgggccgggaggagcgcagcgcgg

SEQ ID NO: 27078 - DNA, 207 bp, Homo sapiens
  MAP TO CHR16.3; EXPRESSED IN LUNG, SIGNAL = 1.1; EST_HUMAN HIT: BG819708.1, EVALUE 1.00e-102; SWISSPROT HIT: P23569, EVALUE 8.30e-01; NT HIT: AB011128.2, EVALUE 1.00e-112
ccccagagcactttggagacacgatcttattcacaaccgatgatgacattctcgaggccatattctattctgatgagatgtttgacctggatgtggggagcctggacagcctgcaggatgaagaggcaatgaggaggcccagcacggccgacggcgagggggatgagcggcccttcacccaggctggcttgggggctgatgaacggg

SEQ ID NO: 27079 - DNA, 274 bp, Homo sapiens
  MAP TO CHR16.3; EXPRESSED IN LUNG, SIGNAL = 2.2; NT HIT: gi13928731, EVALUE 1.00e+00; SWISSPROT HIT: Q10160, EVALUE 1.70e+00; EST_HUMAN HIT: D61522.1, EVALUE 1.50e+00
ttgtaaaattcttctttcccgcagtgtctgggttttgcaaatgcctgttcacctccctgccctttgcaggcaccacgtggcatctgtctagttcttctgttcccgtcctcccccttttgtcaaggatcctcagagtcatggagcccatcgtgaagacatcgttgttcatccccagggggctgcctcgaccctctgtgaactgcttgtccttgaagcgagaggcagggctgtgctctgttctgggtggaagccagtccctttctttagttctcat

SEQ ID NO: 27080 - DNA, 290 bp, Homo sapiens
  MAP TO CHR16.3; EXPRESSED IN LUNG, SIGNAL = 1.3; SWISSPROT HIT: O80340, EVALUE 4.40e+00; EST_HUMAN HIT: AI026779.1, EVALUE 9.90e-02; NT HIT: AF238295.1, EVALUE 4.20e+00
atgctggaatcatccactttgttcaccttaagtactatgctcacattaccacacattacgtaggagatgtagctgcgtggtgtctgatcttgccacgtgtgttccaggtgacaacagctcctgaggtatgggtggcggcctgcctctttccacatgtacacctgcacagagttatccttgaatgcagcgagcatgtggagggatgccacccagtagttgctgatggctgtctggtggtcgttaaatcattgcagccagtgacggtggagaggaacaagaatggcccactg

SEQ ID NO: 27081 - DNA, 125 bp, Homo sapiens
  MAP TO CHR19.3; EXPRESSED IN LUNG, SIGNAL = 2.8; EXPRESSED IN BONE MARROW, SIGNAL = 3.3; SWISSPROT HIT: Q9U969, EVALUE 2.00e-10; EST_HUMAN HIT: BG770242.1, EVALUE 3.00e-64; NT HIT: gi14757758, EVALUE 2.00e-64
gcagggcgaccgctccgactgcacttacatcgtgctcaatgggcggctgcgtagcgtgatccagcgaggcagtggcaagaaggagctggtgggcgagtacggccgcggcgacctcatcggcgtgg

SEQ ID NO: 27082 - DNA, 133 bp, Homo sapiens
  MAP TO CHR19.3; EXPRESSED IN LUNG, SIGNAL = 1.5; EXPRESSED IN BONE MARROW, SIGNAL = 2.5; EXPRESSED IN FETAL LIVER, SIGNAL = 1.4; NT HIT: X83461.1, EVALUE 4.00e-69; EST_HUMAN HIT: BI007660.1, EVALUE 2.00e-47; SWISSPROT HIT: P08059, EVALUE 3.00e-05
accaaagtgaaggagtttggaattgaccctcaaaacatgttcgagttctgggatgtaagtacaagcacttctgcactgggtgaattaagtgtcctttgccaagtcatggctgttgagaggcccatgaggtcag

SEQ ID NO: 27083 - DNA, 96 bp, Homo sapiens
  MAP TO CHR14.3; EXPRESSED IN LUNG, SIGNAL = 1.7; EXPRESSED IN BONE MARROW, SIGNAL = 1.2; SWISSPROT HIT: P28986, EVALUE 3.60e+00; EST_HUMAN HIT: BF932206.1, EVALUE 4.40e-01
caccaccttgcagcccacagccaacttccagcccaggcgctgctcctcattctgttcctggcatgctgttgactgccctccagtgtctaccaccca

SEQ ID NO: 27084 - DNA, 151 bp, Homo sapiens
  MAP TO CHR14.3; EXPRESSED IN FETAL LIVER, SIGNAL = 3.1; EXPRESSED IN LUNG, SIGNAL = 4.2; EST_HUMAN HIT: AL157542.1, EVALUE 5.00e-70; SWISSPROT HIT: P70345, EVALUE 3.00e-11; NT HIT: gi14574571, EVALUE 9.00e-80
ggcggagttcacagctctatacggggacggggccctggaggaggcgcggcgtctgcgggaggggaactgggcatcagtgaggacagtgctgacgggggccgtggcactgggggccctggtaactgtaggggccttttttgctagcaagtga

SEQ ID NO: 27085 - DNA, 99 bp, Homo sapiens
  MAP TO CHR18.3; EXPRESSED IN LUNG, SIGNAL = 1.2; EST_HUMAN HIT: BG119384.1, EVALUE 8.00e-49; NT HIT: gi14759396, EVALUE 6.00e-49
ctctcgtgctcattcccccatgatcgccgtaggaagtgatgacagtagccccaacgcaatggccaaggttcagatttttgaatataatgaaaacaccag

SEQ ID NO: 27086 - DNA, 253 bp, Homo sapiens
  MAP TO CHR16.3; EXPRESSED IN LUNG, SIGNAL = 1.3; EXPRESSED IN BONE MARROW, SIGNAL = 0.75; EST_HUMAN HIT: AA331850.1, EVALUE 5.30e+00; SWISSPROT HIT: P47623, EVALUE 9.40e+00
atcaaaaagcggctggaggaaaaagagctttgccaccgggcagtactgctgggtcttgcgtcacagagatgccttctgctcccttcttcagggagacctcagagtatgaaagtgctgcttacccagcagatgagatttagtccagtcatccatctgcgtggtctctgtggataaagtaagcgtttcattcaacttttaaaaatattgcaaattgaccctcgcacatcttttcttactgccggtcacctagcca

SEQ ID NO: 27087 - DNA, 162 bp, Homo sapiens
  MAP TO CHR18.3; EXPRESSED IN LUNG, SIGNAL = 1.7; EXPRESSED IN FETAL LIVER, SIGNAL = 0.83; NT HIT: X92847.1, EVALUE 8.70e+00; SWISSPROT HIT: Q90308, EVALUE 5.80e+00
ttgtttggtatcaagtcagtaattcaaacggactgttcaagtacttggaagatcatagtgaacccggacctgtcgtggtaccaccacgccaaccctatcctcctgctggtgatgtactacactctggccactctgatccgcatctggctgcaagagcccctt

SEQ ID NO: 27088 - DNA, 324 bp, Homo sapiens
  MAP TO CHR16.3; EXPRESSED IN LUNG, SIGNAL = 2.6; SWISSPROT HIT: P39060, EVALUE 7.30e+00; EST_HUMAN HIT: BI834039.1, EVALUE 0.00e+00
ctgggtgggaggctcaggggcccgatctgtcagcagggggaccgcagagccataccagtcctcagagcgctctcgggcggtgcccatgggctcaatccacagctctcctcctgggcgccacaccagggtgggtgcacggtggctggggtctgggcggagagcacggcggaacaggcgttcagccaacacagcggtggtgaggatgaagagcgcagccagggtggccaggaccagcatgatggggatgcagggcccacagggcagtgagggccatggggctgcttcccatgcggggggcccctccacgcgcccagagggcggctc

SEQ ID NO: 27089 - DNA, 217 bp, Homo sapiens
  MAP TO CHR18.3; EXPRESSED IN LUNG, SIGNAL = 1.1; EXPRESSED IN FETAL LIVER, SIGNAL = 1.9; EXPRESSED IN BONE MARROW, SIGNAL = 1.1; NT HIT: AJ276023.1, EVALUE 5.00e-02; SWISSPROT HIT: O95721, EVALUE 7.60e-01
ccttctgctgattaggctgctctgtgactcgagagttctgccctggaggactgtcagcaaaacagttagcatgtccagatgtggacacttccttaaaggtgaagtacaacagggggaaaagattaatctgtaatgcactgaagtcagaaactaacccagcgatgtgttcaatgaaaaggaaaagatgctgttgaattttatctccaagtggtgtcat

SEQ ID NO: 27090 - DNA, 200 bp, Homo sapiens
  MAP TO CHR18.3; EXPRESSED IN LUNG, SIGNAL = 1.2; SWISSPROT HIT: Q02487, EVALUE 2.00e-32; EST_HUMAN HIT: BF196457.1, EVALUE 8.00e-85; NT HIT: gi13645276, EVALUE 1.00e-109
ctttgtttgatgctccaaaaagacaaatattttcttcttttcttggttctcagtgttggaaagtaatatggtaaaacttctcttctccgaggacaatagaatagtatttgttgtatagactgaaccatcctccaaaatttggaagtcaggatcacttgaatgaattagatttgcagctgtaaagcactctttcaggttaa

SEQ ID NO: 27091 - DNA, 100 bp, Homo sapiens
  MAP TO CHR16.3; EXPRESSED IN LUNG, SIGNAL = 1.6; EXPRESSED IN FETAL LIVER, SIGNAL = 2.1; NT HIT: D87438.1, EVALUE 5.00e-43; SWISSPROT HIT: O00744, EVALUE 7.10e-01; EST_HUMAN HIT: AA678030.1, EVALUE 9.00e-49
gctgcagccaaatgtgatagcatgacgatgactcctggcccgtggctgggtttgccagctgttcctgcggtgacactgtataaacacgaccctgccttgg

SEQ ID NO: 27092 - DNA, 221 bp, Homo sapiens
  MAP TO CHR16.3; EXPRESSED IN LUNG, SIGNAL = 3.8; NT HIT: gi14778420, EVALUE 1.00e-121; EST_HUMAN HIT: AI337255.1, EVALUE 1.00e-121; SWISSPROT HIT: P46467, EVALUE 3.00e-28
ctttttgaagtgtgtggccgactgcaccttcctcacgggctgcatgagagagtcccgcacgatgatgctgatgtccgcgcccgagtagccttccgtcttccgggccagctcgtggatgtttgcatccgtgaggttgtggggagtgctcccgagatgcaaccggaacatctgggcgcgggcagcttcctccggcaaggggatataaattcgtttttcaaacc

SEQ ID NO: 27093 - DNA, 146 bp, Homo sapiens
  MAP TO CHR16.3; EXPRESSED IN FETAL LIVER, SIGNAL = 1.2; EXPRESSED IN LUNG, SIGNAL = 1.2
attgtgttaacagaaatgtactatgatgggttccatcgttccttttgtgatacagacgacctggaaacagtccatgaaagcgactgcatttttgcctttgagactcccgaaatatttaggcctgaaggaattctcagtcaaagagg

SEQ ID NO: 27094 - DNA, 179 bp, Homo sapiens
  MAP TO CHR18.3; EXPRESSED IN FETAL LIVER, SIGNAL = 2.9; EXPRESSED IN LUNG, SIGNAL = 1.1; SWISSPROT HIT: P09951, EVALUE 6.50e-01; EST_HUMAN HIT: AV706762.1, EVALUE 3.00e-96
agtgttcccgagtcacaggctgtcctgaagatcacctgctgactcattggtgcccttgtttccccgaggcctcctgcagtgacgtgctgaggagaggagcccaggtctgcgggtgggggacccgtcctctgagaagcctgcagcttctcctccaggacccttccagcccacctggctgg

SEQ ID NO: 27095 - DNA, 401 bp, Homo sapiens
  MAP TO CHR16.3; EXPRESSED IN LUNG, SIGNAL = 1.1; SWISSPROT HIT: Q05952, EVALUE 2.00e-40; EST_HUMAN HIT: AA634325.1, EVALUE 0.00e+00; NT HIT: U15422.1, EVALUE 0.00e+00
cctgagctccgcgtcttggttttgtacacctgctggatcctcttggccatttttttctttttcagcttgccttccaagttctttctgttcttggggcagcggcagtgcaggatggtgggccgcatgggagagtggtgggagttcatagtctttttgtggcgctttggtggtggactagtgttgggactctggctctggtggccggatgagctgtgggctccagttgggttgcggtggctggccgggctctggctggagctctggctccggctgccacgatggctctgtctgcaactctggctgaaggtttggcaatggcgggtgcaggtgcggctttggggctgagagttgctatggagctgagtgtgggtgataggaaggctgtgagtctgggtgtccat

SEQ ID NO: 27096 - DNA, 114 bp, Homo sapiens
  MAP TO CHR16.3; EXPRESSED IN BONE MARROW, SIGNAL = 0.94; EXPRESSED IN LUNG, SIGNAL = 1.2; SWISSPROT HIT: P48733, EVALUE 3.10e-01; NT HIT: AJ224356.1, EVALUE 5.80e+00; EST_HUMAN HIT: AW295166.1, EVALUE 5.50e-01
ctccctcttttttgggttcagagccagggaaatgagcactgtgtgtgtccacaggcaggaattggttgctttgttcaggggggcctttgtaggtgctcactgaatgcttgtgga

SEQ ID NO: 27097 - DNA, 144 bp, Homo sapiens
  MAP TO CHR14.3; EXPRESSED IN LUNG, SIGNAL =   1; NT HIT: U74494.1, EVALUE 7.60e+00; SWISSPROT HIT: Q9XGW1, EVALUE 4.50e+00; EST_HUMAN HIT: BI910471.1, EVALUE 3.00e-68
gatggaaagaactgttgaagaagcttttatacttcttgtttgcttgaagccttggagggtagcaagtagtctggagaaaaaggagaaggaggatgaatctttccagctgctacttggctcacgctataatgtattagagggtag

SEQ ID NO: 27098 - DNA, 101 bp, Homo sapiens
  MAP TO CHR14.3; EXPRESSED IN LUNG, SIGNAL = 1.1; NT HIT: AF045551.2, EVALUE 3.20e-01; EST_HUMAN HIT: AI766229.1, EVALUE 4.70e-01
aggtagaaaatgtacagatggtgccagtgaaggcacccgtggtcttcctaacagctatcttgttgctggtgcttgtttcaatctctgtgcatttccattaa

SEQ ID NO: 27099 - DNA, 310 bp, Homo sapiens
  MAP TO CHR16.3; EXPRESSED IN LUNG, SIGNAL = 1.1; EXPRESSED IN BONE MARROW, SIGNAL = 0.96; NT HIT: gi14777067, EVALUE 0.00e+00; EST_HUMAN HIT: BG707384.1, EVALUE 0.00e+00; SWISSPROT HIT: Q63934, EVALUE 1.60e+00
agacatggcccacattaaccagggacatgtagaggccccacagggcagccatgagaagcatgttggcgcagcccgtgatcagtacgaaagacgagatgcccagtccgagaagagccagcaagtccaggttggagttcatgtctgaccagtccatcagccagaggatggtgggcatgtagctgaagacttcccagctcgtcctgtcctggaagtactgctggaagttcttcaggaacactctgcagggaagcagccccctgtcaccgatgagctgcttgttctgatggaaagccaccaggaatgccacgac

SEQ ID NO: 27100 - DNA, 96 bp, Homo sapiens
  MAP TO CHR14.3; EXPRESSED IN LUNG, SIGNAL = 1.2; EXPRESSED IN BONE MARROW, SIGNAL = 1.1; NT HIT: AF053577.1, EVALUE 3.00e-04
tgtaaccttggcagcagtttttgtaccactttccaaaaaaagaaagatggtgactgattcagataagatggtatcatagaggccagtggccatgaa

SEQ ID NO: 27101 - DNA, 118 bp, Homo sapiens
  MAP TO CHR18.3; EXPRESSED IN LUNG, SIGNAL = 1.1; EST_HUMAN HIT: BE142803.1, EVALUE 1.00e-57; SWISSPROT HIT: P13744, EVALUE 5.30e-01; NT HIT: gi13376139, EVALUE 1.00e-59
tttgacattcttcttggtcaacataatgatgaaatgcaagaactgtcaggcaatataaaggaagaatccaaatctcaaaacagcaaagacagagtgatttgtgagttaagagcagagg

SEQ ID NO: 27102 - DNA, 199 bp, Homo sapiens
  MAP TO CHR16.3; EXPRESSED IN LUNG, SIGNAL = 1.9; EXPRESSED IN FETAL LIVER, SIGNAL = 2.4; NT HIT: gi16164709, EVALUE 1.00e-107; EST_HUMAN HIT: BG498757.1, EVALUE 1.00e-108; SWISSPROT HIT: Q9Y613, EVALUE 9.00e-22
caagacttgcggttgccgcgggaacgcttgcgttccctagcagctaaggcacgaggactgctcttggtcactgactgcaccagaaggtccatgatctcatctgatgtatcactgggtaaactggagcctgggggttcttctggggatgcagtggagggccccactgtgggcatgattggggagctgctctggaccatgc

SEQ ID NO: 27103 - DNA, 114 bp, Homo sapiens
  MAP TO CHR18.3; EXPRESSED IN LUNG, SIGNAL = 1.4; SWISSPROT HIT: O95180, EVALUE 7.00e-01; EST_HUMAN HIT: BE782787.1, EVALUE 5.50e-01
  unsure 111
ttgtttatcaagcctggattactgatcctaaaacagcactccgacaaagacacaaagagaaaaaaaggtctgcaagagaagaacggaaacgaaggcggaaaggatccaagnagg

SEQ ID NO: 27104 - DNA, 494 bp, Homo sapiens
  MAP TO CHR18.3; EXPRESSED IN LUNG, SIGNAL =   1; NT HIT: gi14761661, EVALUE 0.00e+00; SWISSPROT HIT: O43309, EVALUE 3.00e-40; EST_HUMAN HIT: AV689461.1, EVALUE 0.00e+00
gaaagaagagattactcacactccttcgcaagcacagaaccagttgtactgagctttttgctaagctgtttcagccaagaatggctgtggaatctggagtgatttcaaccctgatacctcaggatcctccggaacaagaactaatactagtgaaagtagaagataacttttcctgggatgagaaatttaagcagaatgggagtactcaatcctgccaagaattgtttcgtcagcaattcagaaaattttgctaccaggagacacctgggccccgggaggctctgagccgactccaggaactttgctatcagtggctaatgccagagttgcacacaaaggagcagatcttagaactgctggtactggagcagttcctgagcattctgcctgaggagctgcagatctgggttcagcaacataatccagaaagcggcgaggaagctgtgaccctgttggaggatttagagagggagtttgatgacccagggcagcag

SEQ ID NO: 27105 - DNA, 135 bp, Homo sapiens
  MAP TO CHR18.3; EXPRESSED IN LUNG, SIGNAL = 1.1; NT HIT: AF139188.1, EVALUE 2.90e-02; EST_HUMAN HIT: AI014952.1, EVALUE 4.00e-70
tctacttttggacgttcacaatgtctgcattttggagtcagaagagaaagccatgaggagaggaaaaagtaacttcaataaactatttaacacaaagaactggatggcagccgtcagcctgaatgaatcatggag

SEQ ID NO: 27106 - DNA, 86 bp, Homo sapiens
  MAP TO CHR16.3; EXPRESSED IN LUNG, SIGNAL = 1.1; SWISSPROT HIT: P21748, EVALUE 2.10e+00; NT HIT: gi4885556, EVALUE 2.70e-01; EST_HUMAN HIT: BI460604.1, EVALUE 2.50e-02
cactccacaaggaacatcaccctgctcccggcccagaggggcaagaaagccacattcaccatgaggacggtgggcatgatgaacgc

SEQ ID NO: 27107 - DNA, 170 bp, Homo sapiens
  MAP TO CHR18.3; EXPRESSED IN LUNG, SIGNAL = 1.2; EXPRESSED IN FETAL LIVER, SIGNAL = 3.4; NT HIT: gi15295627, EVALUE 2.00e-90; EST_HUMAN HIT: H29768.1, EVALUE 3.00e-90; SWISSPROT HIT: P42765, EVALUE 3.00e-25
cctgcaggacattgcccataatcacactgtcaactgtttcaggtgagactttgccagcagacaaggcagccttggcagcaaattcagacaagtcagtagcagtgaagtctttcagaaggcctccgtaagctccaaagggcgttcgcttagcagcaactacaaacacacct

SEQ ID NO: 27108 - DNA, 252 bp, Homo sapiens
  MAP TO CHR18.3; EXPRESSED IN LUNG, SIGNAL = 1.3; SWISSPROT HIT: P23579, EVALUE 4.20e+00; NT HIT: gi13384601, EVALUE 1.00e-127; EST_HUMAN HIT: BE326518.1, EVALUE 1.00e-120
caatttgttttttctctagtccatttgatcattgtctctggtgagcgatataggaatattaatttggcatagagatcttcttctagctccagttctcctgtctctcgaactaaaaaaatatctgtgcacaacttcaaaattcgatccacatttggaagctcttcaaacatgatggagtgagaaatcccactgaagaattcacggacaaatttcccaatcacaaggacaactgaagcatataatcccataata

SEQ ID NO: 27109 - DNA, 165 bp, Homo sapiens
  MAP TO CHR19.3; EXPRESSED IN LUNG, SIGNAL = 1.2; EXPRESSED IN BONE MARROW, SIGNAL = 1.8; EST_HUMAN HIT: AW298735.1, EVALUE 8.40e-01; NT HIT: gi11425216, EVALUE 4.00e-88; SWISSPROT HIT: Q44258, EVALUE 2.60e-02
gaggtggcctacattggcacccagcacccccagcacaaggcggcggtgatgctgtgcttggcggcgggcaaggccgttctgtgcgagaagcccacgggcgtgaacgcggcggaagttcgcgagatggtcgcggaggcccgatcccgagccctcttccttatggag

SEQ ID NO: 27110 - DNA, 115 bp, Homo sapiens
  MAP TO CHR16.3; EXPRESSED IN FETAL LIVER, SIGNAL = 2.1; EXPRESSED IN LUNG, SIGNAL = 3.4; SWISSPROT HIT: P49588, EVALUE 3.00e-16; EST_HUMAN HIT: BF972202.1, EVALUE 3.00e-58; NT HIT: gi16179468, EVALUE 2.00e-58
ctggggaacttgacacaggcacgtgatcttgccagcctcattgtccaccgtgaagagcatggcagaagtctgaggggagtgcatcttgaagagcttcaaggcttcattcagggcc

SEQ ID NO: 27111 - DNA, 128 bp, Homo sapiens
  MAP TO CHR14.3; EXPRESSED IN LUNG, SIGNAL = 1.3; EXPRESSED IN BONE MARROW, SIGNAL = 1.4; SWISSPROT HIT: P80302, EVALUE 4.60e+00; EST_HUMAN HIT: BE961826.1, EVALUE 9.80e+00; NT HIT: gi13812105, EVALUE 6.60e+00
ggtttaaacactttgccaaacccaaggataacgggcttcccattgatcttcgctctgctcaaatgttcaactgtgtgtgccaaaatgtacactgcagactgcattgtgtcgattccaacaatttttag

SEQ ID NO: 27112 - DNA, 388 bp, Homo sapiens
  MAP TO CHR14.3; EXPRESSED IN FETAL LIVER, SIGNAL = 1.7; EXPRESSED IN BONE MARROW, SIGNAL = 1.4; EXPRESSED IN LUNG, SIGNAL = 1.4; EST_HUMAN HIT: AI240680.1, EVALUE 2.00e-10; NT HIT: AF202635.1, EVALUE 7.00e-12; SWISSPROT HIT: P03304, EVALUE 2.10e-01
aagtaccttaccaataaggtactgcctttcaaaattctttcgatattggacaatgcccctggccacccagaaccatatgagttcgacatgaaaggtgctgaactggtcttcttgccctcaaacacaacatctttaatgtatcctctagatcagggggttgtgaggacctttaaggctcattatgcaggatactctatggaaaggattgtcagtgctatggaagagaaccctggtagagaaaaaatcatgaaaaagctgttaaagctatcaagcccaaaagaaattcctgctggagaaaagctgtgtccaaatgttgttcatgacttcacggaatttatgacagagtcaatcaggaaaatcatgaaagagattgtggatatggcataaa

SEQ ID NO: 27113 - DNA, 182 bp, Homo sapiens
  MAP TO CHR16.3; EXPRESSED IN LUNG, SIGNAL = 1.9; SWISSPROT HIT: P53990, EVALUE 1.00e-27; EST_HUMAN HIT: BF306288.1, EVALUE 5.00e-98; NT HIT: gi15319145, EVALUE 3.00e-98
cttcatagactggataaggccaaaccgagccagcagcaggtcacagtacagctccaggatctccatggcctccacgaggtagtcttcccggataatgtgctccacacggatccgagctcgttcatctttcccagcagccagatagtcagcaatctccttccttgctttctgggccagttccg

SEQ ID NO: 27114 - DNA, 397 bp, Homo sapiens
  MAP TO CHR14.3; EXPRESSED IN LUNG, SIGNAL = 6.7; EXPRESSED IN FETAL LIVER, SIGNAL = 8.6; NT HIT: AF111168.2, EVALUE 0.00e+00; SWISSPROT HIT: O95433, EVALUE 3.00e-29; EST_HUMAN HIT: AI025111.1, EVALUE 0.00e+00
ggacactttgccaccatcaccttgaccttcatcgacaagaacggagagactgagctgtgcatggaaggtcgaggcatccctgctcctgaggaagagcggacgcgacagggctggcagcggtactactttgagggcattaaacagacctttggctatggcgcacgcttattttagggccagcggcaggggactccagcctgctggacacttcagtccagctctctcctgactggggcttgcgactcacaggattgcatcgtcccagctgctaacttggggccggggcccctcccttccacatataccttgggtttgtgcatgttttctgctgggtgggttcagagggcaatttctcttttatgtgtacatatgctaaataaacataatttaaaaaaca

SEQ ID NO: 27115 - DNA, 112 bp, Homo sapiens
  MAP TO CHR18.3; EXPRESSED IN LUNG, SIGNAL = 1.3; NT HIT: gi14762393, EVALUE 1.00e-56; SWISSPROT HIT: P25391, EVALUE 1.00e-15
gttggagtccgtctctctggacatagccagctctaatgccatcgacctggtggtggccgctgatgtggagcactgtgaatgtccgcaaggctacacagggacctcctgtgag

SEQ ID NO: 27116 - DNA, 150 bp, Homo sapiens
  MAP TO CHR14.3; EXPRESSED IN LUNG, SIGNAL = 1.5; NT HIT: gi13654827, EVALUE 1.00e-78; EST_HUMAN HIT: AW997054.1, EVALUE 2.00e-78
gtccccaacacccttcctgcttatttttccaatataatacacagctgggcccaccttaccacatcctcgttgataccaactttatcaacttttccataaaagccaaactggacttagtgcagtcaatgatggactgtctgtatgccaagt

SEQ ID NO: 27117 - DNA, 237 bp, Homo sapiens
  MAP TO CHR18.3; EXPRESSED IN LUNG, SIGNAL =   1; EST_HUMAN HIT: BG677092.1, EVALUE 1.00e-127; SWISSPROT HIT: P77423, EVALUE 7.40e-01; NT HIT: gi14760257, EVALUE 0.00e+00
cattagccaggatcttgggtttatttgcaggactgaagcaaacattatgaaagataagaagaggcaataaagggctgctcttgtgcttgtatttgctcatctctgttagtaagtctagacagccatcaagcctcagaatcatttgttgcccatcttctccagatgatatattcaggagtaacttcaaccaaagaatagtcagattacttagatgtttatttcctccttttggcaatg

SEQ ID NO: 27118 - DNA, 94 bp, Homo sapiens
  MAP TO CHR16.3; EXPRESSED IN LUNG, SIGNAL = 1.1; SWISSPROT HIT: P77570, EVALUE 6.20e+00; EST_HUMAN HIT: BF797690.1, EVALUE 1.70e+00
atggcttgctttcagatattgggttatcagagcatgggcccatcagtcatgatgatggatttatgggtgaagagatatcttggaaggagatatg

SEQ ID NO: 27119 - DNA, 287 bp, Homo sapiens
  MAP TO CHR19.3; EXPRESSED IN LUNG, SIGNAL = 4.6; EXPRESSED IN BONE MARROW, SIGNAL = 1.9; NT HIT: gi13632544, EVALUE 0.00e+00; SWISSPROT HIT: Q9NXH9, EVALUE 7.00e-45; EST_HUMAN HIT: BI822238.1, EVALUE 0.00e+00
cgtcaggtcccgattgaattcctgcaccgggttataaaagacctcgttggcactgggaaaggcgattttggcagccccctcggtgactgtcgtctcctggacttcacgtggacgttcttctccgtagggcccggtgccgttctccatcgctgctgtattcggcagccctggagactgccactcgaaaaaccgggctctagagagcacccgggcggagcggaaagtgaggcttagccacagagacgatccttgcatgagacatccgctggcgcctccgcccgccaagc

SEQ ID NO: 27120 - DNA, 267 bp, Homo sapiens
  MAP TO CHR16.3; EXPRESSED IN LUNG, SIGNAL =   6; EXPRESSED IN FETAL LIVER, SIGNAL =  12; NT HIT: AF271775.1, EVALUE 0.00e+00; SWISSPROT HIT: P19711, EVALUE 3.70e+00; EST_HUMAN HIT: AW182584.1, EVALUE 0.00e+00
ttgttgctgtagcccatgctgtttatcaagcaatgctcagcttgaagaatattcctgttttggagactgcctataagttaatattgggagaaatgacttgtgccctaaacaacctcctgcacagtctgcaacttcctgaggcctgttctgaaataaaacatgaggcttttaagaatcatgtgttcaatgtagacaatgcaaaatttgtagttaaatttgacctcagtgccctgactacaactggaaatgccaaaaactcgagtcttt

SEQ ID NO: 27121 - DNA, 235 bp, Homo sapiens
  MAP TO CHR19.3; EXPRESSED IN LUNG, SIGNAL =  15; EXPRESSED IN FETAL LIVER, SIGNAL = 5.2; NT HIT: gi14758775, EVALUE 1.00e-129; SWISSPROT HIT: Q15758, EVALUE 3.00e-40; EST_HUMAN HIT: BG328650.1, EVALUE 1.00e-129
ggtacgcccctgtgggcatcatgttcctggtggctggcaagatcgtggagatggaggatgtgggtttactctttgcccgccttggcaagtacattctgtgctgcctgctgggtcacgccatccatgggctcctggtactgcccctcatctacttcctcttcacccgcaaaaacccctaccgcttcctgtggggcatcgtgacgccgctggccactgcctttgggacctcttccag

SEQ ID NO: 27122 - DNA, 98 bp, Homo sapiens
  MAP TO CHR16.3; EXPRESSED IN LUNG, SIGNAL = 2.4; EXPRESSED IN FETAL LIVER, SIGNAL = 1.2; NT HIT: gi14785415, EVALUE 2.00e-48; EST_HUMAN HIT: AI929053.1, EVALUE 3.00e-48
ctagacttgcgtcaggggcaaaaacttctggtagtagctcttggtgacgtcaatcatcagctcctgagtgcactccgggagctcccctgagaagagtc

SEQ ID NO: 27123 - DNA, 117 bp, Homo sapiens
  MAP TO CHR19.3; EXPRESSED IN LUNG, SIGNAL = 2.1; EST_HUMAN HIT: AL518852.1, EVALUE 1.40e-01; NT HIT: X81582.1, EVALUE 9.70e-02
tgccacgtgggctggcccctgttcccctctccttctctccgtctctgcctgccgggcttgggctgcgggggccggagcttccgtttcactttggtatcaccggtttcactttcaggg

SEQ ID NO: 27124 - DNA, 128 bp, Homo sapiens
  MAP TO CHR19.3; EXPRESSED IN LUNG, SIGNAL = 1.2; NT HIT: AF241362.1, EVALUE 1.70e+00; SWISSPROT HIT: P28284, EVALUE 2.70e+00
tgctggtgcgcaaggtgccctgccccacgtgctttccctggaaggggcggcacgccttggcaccaagcatctacacccaacgacagctgtcgctgctgaacctctcggtgggcctggcgccaccccag

SEQ ID NO: 27125 - DNA, 208 bp, Homo sapiens
  MAP TO CHR14.3; EXPRESSED IN LUNG, SIGNAL = 1.1; NT HIT: D28747.1, EVALUE 4.70e-02; SWISSPROT HIT: Q9XGH7, EVALUE 3.20e+00; EST_HUMAN HIT: BI602438.1, EVALUE 2.70e-01
atgtgttttggagaaatccgtttggagacttgattataaaacattaacacagtatcaaaaagttccatactgcaaaagatgctctgaagcagctttaatttaattagcagattatttaagaagaacatcctttgatgtacaaatgctgctcccagaaattcgtgtgctaaatctgccatcagaagcacaggagcacctttgtaactcc

SEQ ID NO: 27126 - DNA, 117 bp, Homo sapiens
  MAP TO CHR14.3; EXPRESSED IN LUNG, SIGNAL = 1.2; EST_HUMAN HIT: BG481976.1, EVALUE 5.70e-01
ccatccaggcagcccatttctacttgtaccctgtgcatcttgcaatctggcctgatacttggctccagagctttgcccgatgagaattaggcctttgaatccttggttccctcccat

SEQ ID NO: 27127 - DNA, 203 bp, Homo sapiens
  MAP TO CHR14.3; EXPRESSED IN LUNG, SIGNAL = 1.2; SWISSPROT HIT: P35331, EVALUE 5.50e+00; EST_HUMAN HIT: BG912383.1, EVALUE 1.10e+00; NT HIT: U10297.1, EVALUE 4.60e-02
ctgctgctgcagcgctgccaatggcctgtagagttgagcggccactgccagttctccgaatggtgctgctacccgcatctgagttctggttttcaatcttgtgctctacttgggccagttcttggatcacttcctggtagcgctccatgaacatcagttcccctgaactgggtgaggacttcaggttgaacgtgaacagcacc

SEQ ID NO: 27128 - DNA, 196 bp, Homo sapiens
  MAP TO CHR12.3; EXPRESSED IN LUNG, SIGNAL = 2.2; EXPRESSED IN FETAL LIVER, SIGNAL = 0.9; SWISSPROT HIT: P37139, EVALUE 2.00e-11; NT HIT: gi16163885, EVALUE 1.00e-106; EST_HUMAN HIT: BG622920.1, EVALUE 1.00e-106
acagatctatctgagcaagctgaccagtacacattacagtcttaaaaatgaaggttatatactctatgttacaagtcccgactaggcagtgtcaaaacgacatctatttctttgcttgctttgtgatcataccccttggaggcgttacaggtctcgtggcatttggcttctttttctctgcaggctttaaaatctg

SEQ ID NO: 27129 - DNA, 146 bp, Homo sapiens
  MAP TO CHR6.3; EXPRESSED IN LUNG, SIGNAL = 0.6; EST_HUMAN HIT: AV694621.1, EVALUE 3.00e-71; SWISSPROT HIT: P00747, EVALUE 6.00e-25; NT HIT: M33283.1, EVALUE 2.00e-74
gggacttacttgcaggggaagttttctggtgtcctgttatgtgtgtgaggggtctgtgcactccagtgctgacaggtgtgcccggacacggtaacagccacattcccgcgatagttttcacctgttcccttcagacactggtaggt

SEQ ID NO: 27130 - DNA, 119 bp, Homo sapiens
  MAP TO CHR3.3; EXPRESSED IN LUNG, SIGNAL = 2.2e+02; EST_HUMAN HIT: AA294838.1, EVALUE 2.00e-50; SWISSPROT HIT: O46414, EVALUE 2.00e-08; NT HIT: gi14784647, EVALUE 5.00e-50
gccgccgccgtgacgaccgcgtccacctcgcaggtgcgccagagctaccaccaggactcagaggccgtcatcaaccgctagatcaacctggagctctacgcctcctacgtttacctgtc

SEQ ID NO: 27131 - DNA, 460 bp, Homo sapiens
  MAP TO CHR3.3; EXPRESSED IN LUNG, SIGNAL = 0.31; SWISSPROT HIT: P37243, EVALUE 8.00e-60; NT HIT: X74497.1, EVALUE 0.00e+00
tggcgactgcacttgagaaaaagtaggcttttcttcagtgaaatattcaggttggctgtattgattcagggccatgtccaagtcagagtccttgcttttaaacatgtttccagggtaactacaggtataaggctgattcactgcccaggcctgttccatatatatgttgttactgggcacagcctgagcatcgcaaccgctgtaacccggactatcttcaaaatacgcgtaataatcagtggactgcatgtagcaattgctgccggcagctgggtgcacttcatatatttcttgcatacagtagttcattttgtttccctggttcagtttctagtttacatatacacacagtctacgcatgcattctccagccccatacaccctgagagctgggcatatacgcagagaagcatacatacatacacatgaaacgcgaagggaagatgaataaacaccacca

SEQ ID NO: 27132 - DNA, 156 bp, Homo sapiens
  MAP TO CHR8.3; EXPRESSED IN FETAL LIVER, SIGNAL =  11; EXPRESSED IN LUNG, SIGNAL =  13; EST_HUMAN HIT: BG536507.1, EVALUE 8.00e-78; NT HIT: gi14782739, EVALUE 3.00e-70; SWISSPROT HIT: P47833, EVALUE 9.00e-22
gttcccaaaggaaatctgaaatagagtactatgctatgttggctaaaactggtgtccatcactacagtggcaataatattgaactgggcacagcatgcggaaaatactacagagtgtgcacactggctatcattgatccaggtatgctttttaaat

SEQ ID NO: 27133 - DNA, 130 bp, Homo sapiens
  MAP TO CHR10.3; EXPRESSED IN LUNG, SIGNAL = 6.3; NT HIT: gi13645505, EVALUE 3.00e-67; EST_HUMAN HIT: AL045732.1, EVALUE 4.00e-67; SWISSPROT HIT: P55036, EVALUE 2.00e-15
tccctgcagggacatctgcatggcacaaacaatcttctcttcctcagtcatactgcttaggtcaggaagcccagtgtggccaaactcttgctggctgatggtcatcttcagcagggcatcgtctgagtct

SEQ ID NO: 27134 - DNA, 113 bp, Homo sapiens
  MAP TO CHR12.3; EXPRESSED IN LUNG, SIGNAL = 1.9; EXPRESSED IN FETAL LIVER, SIGNAL = 2.3; EST_HUMAN HIT: BG914252.1, EVALUE 4.00e-57; SWISSPROT HIT: Q10329, EVALUE 7.90e+00; NT HIT: gi16187848, EVALUE 3.00e-57
cccgcctggtgccgagcgcatctctgatgtctcttggtagaccttgggggcaccatcacccgtattggagtaggagatgacagtggaagatgagaaggtctggcaattgcctc

SEQ ID NO: 27135 - DNA, 281 bp, Homo sapiens
  MAP TO CHR1.3; EXPRESSED IN LUNG, SIGNAL = 1.7; EXPRESSED IN FETAL LIVER, SIGNAL = 0.8; SWISSPROT HIT: P39098, EVALUE 3.00e-24; EST_HUMAN HIT: BE219253.1, EVALUE 0.00e+00; NT HIT: AF053616.1, EVALUE 0.00e+00
atcacaaaactcagcttattacctctttaattttttcccttttctctcttatgtcattatcttctgggtctccaccacgtattcctacaaggttgggaatagggactggtggcagtggcttgttctcttttatcttcatttcttggactaccttatttttctctgtctgaatttctgctcgaatttcctctcttgactttcttaatttttcttttgcttcttccaaggccttctcatgatcagctcgaattttatttctcagacgttcttcctcttccctg

SEQ ID NO: 27136 - DNA, 110 bp, Homo sapiens
  MAP TO CHR21.3; EXPRESSED IN LUNG, SIGNAL = 2.7; SWISSPROT HIT: P56554, EVALUE 1.00e-14; EST_HUMAN HIT: BE781379.1, EVALUE 1.00e-54; NT HIT: AL163300.2, EVALUE 2.00e-55
cccagagacttctggacgatctgcttggcaatcttatagaactgctcccggtcatcgcgccacattttggacgcatccacgttagctccactttcgtcattgggctctga

SEQ ID NO: 27137 - DNA, 220 bp, Homo sapiens
  MAP TO CHR1.3; EXPRESSED IN LUNG, SIGNAL = 0.34; EXPRESSED IN FETAL LIVER, SIGNAL = 0.77; NT HIT: L05187.1, EVALUE 1.00e-116; SWISSPROT HIT: P22528, EVALUE 8.00e-20; EST_HUMAN HIT: BF354193.1, EVALUE 1.00e-116
gcagggctcaggcaccttgggctggcagggctctggaaccttgggctggcagggctcaggcactttggggtggcagggctcaggcaccttggggtggcagggctccttggttttggggatgcatggttcctggggtggaggctggcaaggttgtttcacctgctgctgctgaggctgagggggtggggtgcaaggctgcttctgctgctgagaattcatg

SEQ ID NO: 27138 - DNA, 122 bp, Homo sapiens
  MAP TO CHRX.3; EXPRESSED IN LUNG, SIGNAL = 0.45; EST_HUMAN HIT: BF979409.1, EVALUE 3.00e-09; NT HIT: U93163.1, EVALUE 5.00e-16; SWISSPROT HIT: O15481, EVALUE 1.00e-13
tccaggactttcatcttggtggtttcagcatgagcccttgggccccacgggaatttgtatcttggaggatcactgttggatacctgacagcactccaggtatttttcctgcaccaaatctct

SEQ ID NO: 27139 - DNA, 161 bp, Homo sapiens
  MAP TO CHR12.3; EXPRESSED IN LUNG, SIGNAL = 4.5; SWISSPROT HIT: P19438, EVALUE 5.00e-27; EST_HUMAN HIT: AU131978.1, EVALUE 1.00e-82; NT HIT: M75865.1, EVALUE 1.00e-85
cctacctttgtggcacttggtacagcaaatcgaattattttgagggtggatatattttccttggggacacacactatctctcttctccctgtcccctaggtgagggaccagtccaataacccctgaggggtatattcccaccaacagctccaggagcacct

SEQ ID NO: 27140 - DNA, 354 bp, Homo sapiens
  MAP TO CHR18.3; EXPRESSED IN LUNG, SIGNAL = 0.32; EST_HUMAN HIT: BF666685.1, EVALUE 0.00e+00; NT HIT: M24657.1, EVALUE 0.00e+00; SWISSPROT HIT: P05120, EVALUE 3.00e-47
tgctttgcagctggaaagtgaaataacctatgacaaactcaacaagtggaccagcaaagacaaaatggctgaagatgaagttgaggtatacataccccagttcaaattagaagagcattatgaactcagatccattctgagaagcatgggcatggaggacgccttcaacaagggacgggccaatttctcagggatgtcggagaggaatgacctgtttctttctgaagtgttccaccaagccatggtggatgtgaatgaggagggcactgaagcagccgctggcacaggaggtgttatgacagggagaactggacatggaggcccacagtttgtggcagatcatccttttctttt

SEQ ID NO: 27141 - DNA, 158 bp, Homo sapiens
  MAP TO CHR17.3; EXPRESSED IN LUNG, SIGNAL = 0.62; SWISSPROT HIT: Q92183, EVALUE 4.00e-22; NT HIT: Y11339.2, EVALUE 6.00e-84; EST_HUMAN HIT: AL120519.1, EVALUE 9.00e-84
ggacgctggtacagccggattatcccttcatcgtgtagccgcttccagacttctctctccagcttgaagtcatggtttatgtaaaagatcagccgcttccatgatgtatcatagtagtgatcagaaaagcgctcatggccctcagtgatgaagccata

SEQ ID NO: 27142 - DNA, 177 bp, Homo sapiens
  MAP TO CHR9.3; EXPRESSED IN LUNG, SIGNAL = 1.3; EST_HUMAN HIT: BE383381.1, EVALUE 1.00e-86; SWISSPROT HIT: P15951, EVALUE 7.00e-28; NT HIT: AF029308.1, EVALUE 3.00e-95
tccactccagttgctgtcccctttgacgatgatgacaagattgttgggggctacacctgtgaggagaattctctcccctaccaggtgtccctgaattctggctcccacttctgcggtggctccctcatcagcgaacagtgggtggtatcagcagctcactgctacaagacgtaagtg

SEQ ID NO: 27143 - DNA, 205 bp, Homo sapiens
  MAP TO CHR19.3; EXPRESSED IN LUNG, SIGNAL = 1.3; EST_HUMAN HIT: AA206179.1, EVALUE 9.00e-94; NT HIT: gi14760398, EVALUE 1.00e-106; SWISSPROT HIT: P30205, EVALUE 2.20e-01
caccgatgtggacgcgggcagcctgagctactggcctgggcagtcggagcagccggcgcccgtcctgcggctgggctggccagtggactctgcgtggaaaggcatcacccgggcgcagctgtacacccagcctcctggagagggtcagccgcccctcaaggagctggtgcggctggagatccaggctgcccacaaggtgggtgtc

SEQ ID NO: 27144 - DNA, 107 bp, Homo sapiens
  MAP TO CHR17.3; EXPRESSED IN LUNG, SIGNAL = 0.34; EST_HUMAN HIT: N47511.1, EVALUE 2.00e-53; NT HIT: M63623.1, EVALUE 1.00e-53
gagcatagaccttttattttccagatgtttgacagtgtaaacatacataaaatacatattaaagtttagatgctttatattttgtgcaataaattgaagccttaaaa

SEQ ID NO: 27145 - DNA, 173 bp, Homo sapiens
  MAP TO CHR2.3; EXPRESSED IN LUNG, SIGNAL = 0.61; EST_HUMAN HIT: AL534740.1, EVALUE 4.00e-77; SWISSPROT HIT: Q28892, EVALUE 2.00e-14; NT HIT: L03843.1, EVALUE 8.00e-93
tttacctatggtggtgaaaagctcgcagcccaaggaaacaaagtgagaaaaatgcaaatgcaagtgctgggagggaccaagtggccagggcatagccgatccattcaatgatctcaccgaggaaattggctccagaaacatacgtaaacaagccacctgcgtgcagaagaatc

SEQ ID NO: 27146 - DNA, 138 bp, Homo sapiens
  MAP TO CHR17.3; EXPRESSED IN LUNG, SIGNAL = 7.6; EST_HUMAN HIT: AW955242.1, EVALUE 3.00e-68; SWISSPROT HIT: P17844, EVALUE 3.00e-19; NT HIT: AJ010932.1, EVALUE 5.00e-72
aatgtcatggatgttattgcaagacagaatttcactgaacccactgctattcaagctcagggatggccagttgctctaagtggattggatatggttggagtggcacagactggatctgggaaaacattgtctgtaagt

SEQ ID NO: 27147 - DNA, 383 bp, Homo sapiens
  MAP TO CHR6.3; EXPRESSED IN LUNG, SIGNAL = 4.9; SWISSPROT HIT: Q93078, EVALUE 1.00e-45; NT HIT: gi16174421, EVALUE 0.00e+00; EST_HUMAN HIT: AA873858.1, EVALUE 0.00e+00
atgcccgagccctcaaagtccgctcctgccccgaagaaaggctccaagaaggcagtgacaaaggcccagaagaaggacggcaagaagcgcaagcgcagccgcaaggagagctactccgtgtacgtgtacaaggtgctgaagcaggtccaccccgacaccggtatctcgtccaaggccatgggcatcatgaactccttcgtcaatgacatcttcgagcgcatcgccggcgaggcttcccgcctggcgcattacaacaagcgctcgaccatcacctccagggagatccagacggccgtgcgcctgctgctgccaggggagctggccaagcacgcggtgtcggagggcaccaaggccgtcaccaagtacaccagttccaagtgagc

SEQ ID NO: 27148 - DNA, 247 bp, Homo sapiens
  MAP TO CHR17.3; EXPRESSED IN LUNG, SIGNAL = 0.99; EST_HUMAN HIT: BF673712.1, EVALUE 1.00e-116; SWISSPROT HIT: Q16586, EVALUE 1.00e-22; NT HIT: gi4506910, EVALUE 1.00e-115
cacattcaccttccctcccgccggcagcacatgacataggccagcagcaaggtgagaagcagggccaccagcaggggcaccaggagggtgaccagagcatccaccaagaagtcacggtctggggcctcagtgggtgggcagaagaacgggtcatgctccaggatcccatcacctggggtgggcacctcatctgcaggctccggcactgacttatccacctgcacagagagctcagggctgacgcagg

SEQ ID NO: 27149 - DNA, 109 bp, Homo sapiens
  MAP TO CHR18.3; EXPRESSED IN LUNG, SIGNAL = 1.5; SWISSPROT HIT: Q13409, EVALUE 6.10e+00; EST_HUMAN HIT: AU120172.1, EVALUE 9.00e-43; NT HIT: gi5453556, EVALUE 6.00e-43
atggctcaggactgtcccactccatacaccagaggactttgtgtttccattgcttcccaatgaagaattgagggagaaatacaggtgctacctcttcagggactatgtg

SEQ ID NO: 27150 - DNA, 112 bp, Homo sapiens
  MAP TO CHR11.3; EXPRESSED IN LUNG, SIGNAL = 1.1; EST_HUMAN HIT: BF947096.1, EVALUE 3.00e-52; NT HIT: AF188177.1, EVALUE 2.00e-55; SWISSPROT HIT: P29798, EVALUE 1.00e-12
tccaggatgaaaggtgagaccccggtgaacagcactatgagtattgggcaagcacgcaagatggtggaacagcttaagattgaagccagcttgtgtcggataaaggtaggtg

SEQ ID NO: 27151 - DNA, 190 bp, Homo sapiens
  MAP TO CHR6.3; EXPRESSED IN LUNG, SIGNAL = 1.1e+02; EST_HUMAN HIT: BF975696.1, EVALUE 5.00e-98; NT HIT: AJ303359.2, EVALUE 1.00e-103; SWISSPROT HIT: P16190, EVALUE 1.00e-31
cgcccccaggctcccactccatgaggtatttcaccacatccgtgtcccggcccggccgcggggagccccgcttcatcgccgtgggctacgtggacgacacgcagttcgtgcggtttgacagcgacgccgcgagccagaggatggagccgcgggcaccgtggatagagcaggaggggccggagtattggga

SEQ ID NO: 27152 - DNA, 118 bp, Homo sapiens
  MAP TO CHR20.3; EXPRESSED IN LUNG, SIGNAL = 1.1; NT HIT: AB029636.1, EVALUE 3.00e-60; SWISSPROT HIT: O76096, EVALUE 3.00e-17; EST_HUMAN HIT: AI583980.1, EVALUE 1.00e-57
gtgaaaggcctgaaatatatgctggaggtggaaattggcagaactacctgcaagaaaaaccagcacctgcgtctggatgactgtgacttccaaaccaaccacaccttgaagcaggtaa

SEQ ID NO: 27153 - DNA, 223 bp, Homo sapiens
  MAP TO CHR2.3; EXPRESSED IN LUNG, SIGNAL = 0.77; EST_HUMAN HIT: BF527027.1, EVALUE 2.00e-05; SWISSPROT HIT: Q01118, EVALUE 4.00e-38; NT HIT: gi16157121, EVALUE 1.00e-122
aaatgttggcttcaccagaacctaagggccttgttcccttcactaaagagtcttttgaacttataaaacagcatattgctaaaacacataatgaagaccatgaagaagaagacttaaagccaactcctgatttggaagttggcaaaaagcttccatttatttatggaaacctttctcaaggaatggtgtcagagcccttggaagatgtggacccatattacta

SEQ ID NO: 27154 - DNA, 405 bp, Homo sapiens
  MAP TO CHR6.3; EXPRESSED IN LUNG, SIGNAL =  32; SWISSPROT HIT: Q9CZM2, EVALUE 2.00e-61; NT HIT: gi12732288, EVALUE 0.00e+00; EST_HUMAN HIT: BE748077.1, EVALUE 0.00e+00
gagggtccgctgctggcagtaccgccagctctctgctctccacagggctccccgccccacccggcctgataaagcgcgccgactgggctacaaggccaagcaaggttacgttatatataggattcgtgttcgccgtggtggccgaaaacgcccagttcctaagggtgcaacttacggcaagcctgtccatcatggtgttaaccagctaaagtttgctcgaagccttcagtccgttgcagaggagcgagttggacgccactgtggggctctgagggtcctgaattcttactgggttggtgaagattccacatacaaattttttgaggttatcctcattgatccattccataaagctatcagaagaaatcctgacacccagtggatcaccaaaccagtccacaagca

SEQ ID NO: 27155 - DNA, 127 bp, Homo sapiens
  MAP TO CHR6.3; EXPRESSED IN LUNG, SIGNAL = 0.83; NT HIT: gi4508000, EVALUE 2.00e-65; EST_HUMAN HIT: BG771463.1, EVALUE 2.00e-65; SWISSPROT HIT: P49910, EVALUE 3.00e-18
ctcctggacctcgcgaggcactgagccgcctccgggagctctgctgtcagtggctgaagccagagatccataccaaggaacagattctggaactgctggtgctagagcagttcctgaccatcctgcc

SEQ ID NO: 27156 - DNA, 183 bp, Homo sapiens
  MAP TO CHR1.3; EXPRESSED IN FETAL LIVER, SIGNAL = 0.5; EXPRESSED IN LUNG, SIGNAL = 0.56; EST_HUMAN HIT: AW176538.1, EVALUE 7.00e-82; SWISSPROT HIT: P10775, EVALUE 3.00e-07; NT HIT: gi14731967, EVALUE 2.00e-93
tgaaggttggggcgctgtggcctctcgcatgagtgctgcttcgacatctccttggtcctcagcagcaaccagaagctggtggagctggacctgagtgacaacgccctcggtgacttcggaatcagacttctgtgtgtgggactgaagcacctgttgtgcaatctgaagaagctctggtgagtc

SEQ ID NO: 27157 - DNA, 111 bp, Homo sapiens
  MAP TO CHR2.3; EXPRESSED IN LUNG, SIGNAL = 2.7; EXPRESSED IN FETAL LIVER, SIGNAL = 2.3; NT HIT: AF077037.1, EVALUE 3.00e-54; EST_HUMAN HIT: AI302087.1, EVALUE 7.00e-56
tcacagggctcgttctcactgcttatgttcttcgggattctgggagccaccactctatccgtctccattctgctttgggcgacccagcgccgaaaagccaagacttcatga

SEQ ID NO: 27158 - DNA, 163 bp, Homo sapiens
  MAP TO CHR5.3; EXPRESSED IN LUNG, SIGNAL =   3; EXPRESSED IN FETAL LIVER, SIGNAL = 2.4; EST_HUMAN HIT: BG165787.1, EVALUE 1.00e-67; SWISSPROT HIT: P40227, EVALUE 4.00e-20; NT HIT: gi4502642, EVALUE 8.00e-68
cctctgttaaggcatctgcaagttcagcatgaactttagtatgaagagatgttctggccacatttataagtgtttccctgtccatctctttccttattttgacttcttccaaaaaccgaagggccttttcctttgcagcttcaaatccttcagtaattattct

SEQ ID NO: 27159 - DNA, 179 bp, Homo sapiens
  MAP TO CHR1.3; EXPRESSED IN LUNG, SIGNAL = 0.8; EST_HUMAN HIT: BF890875.1, EVALUE 9.20e-01; SWISSPROT HIT: P16581, EVALUE 3.00e-32; NT HIT: gi4506870, EVALUE 2.00e-96
cttcacaggtaggtagcaggccagaccagtgtcctgtggctccacatgtccgagctgcagagccattgagcgtccatccttcaggacaggcgaacttgcacacagtgccaaacacgggctccccactgcagctcatgttgatctttcccggaactgccaggcttgaacattttaccact

SEQ ID NO: 27160 - DNA, 228 bp, Homo sapiens
  MAP TO CHR1.3; EXPRESSED IN LUNG, SIGNAL = 2.3; EXPRESSED IN FETAL LIVER, SIGNAL = 1.4; SWISSPROT HIT: P35609, EVALUE 1.00e-39; NT HIT: AJ249765.1, EVALUE 1.00e-125; EST_HUMAN HIT: AL040376.1, EVALUE 1.00e-122
tggattcgtcgcacgatcccctggctggagaaccggactcccgagaagaccatgcaagccatgcagaagaagctggaggacttccgggattaccgccggaagcacaagccacccaaggtgcaggagaaatgccagctggagatcaacttcaacacgctgcagaccaagctgcggatcagcaaccgtcctgccttcatgccctccgagggcaagatggtgtcggtgagt

SEQ ID NO: 27161 - DNA, 217 bp, Homo sapiens
  MAP TO CHR1.3; EXPRESSED IN LUNG, SIGNAL = 0.56; SWISSPROT HIT: P40238, EVALUE 1.00e-33; NT HIT: U68159.1, EVALUE 1.00e-119
gggcagcaggtttctgtggcaatcagctgtatgaccgtgggaccagtggagttcttgggatctctggggccatagcggagttcgtacctcaggaaatcactgatttctggagctggctcctcccagctgatctgaagttcccctggctggctcccacccatggccttgatgatactggggggagccggcaggcctgagggcaagacagggcacatca

SEQ ID NO: 27162 - DNA, 147 bp, Homo sapiens
  MAP TO CHR22.3; EXPRESSED IN LUNG, SIGNAL = 2.2; SWISSPROT HIT: P43331, EVALUE 2.00e-19; NT HIT: gi14777844, EVALUE 8.00e-71; EST_HUMAN HIT: BE560199.1, EVALUE 1.00e-70
tcctgccaagatgtctattggtgtgccgattaaagtactgcatgaggccgagggccacattgtgacatgtgagacgaacaccggtgaggtatatcgggggaagctcattgaagcagaggacaacatgaactgccaggtattctgctt

SEQ ID NO: 27163 - DNA, 104 bp, Homo sapiens
  MAP TO CHR20.3; EXPRESSED IN LUNG, SIGNAL =  14; EXPRESSED IN FETAL LIVER, SIGNAL =  11; EST_HUMAN HIT: AA911544.1, EVALUE 9.00e-52; NT HIT: gi14771144, EVALUE 6.00e-52
tatatttatctatttttctagaaccaaggaagaataataatatattataagaacacagacacaaatatcccaccatccccttcattatattttgggatctgcta

SEQ ID NO: 27164 - DNA, 155 bp, Homo sapiens
  MAP TO CHR5.3; EXPRESSED IN LUNG, SIGNAL = 3.4; EXPRESSED IN FETAL LIVER, SIGNAL = 3.5; SWISSPROT HIT: O35501, EVALUE 5.00e-20; EST_HUMAN HIT: AV757352.1, EVALUE 8.00e-75; NT HIT: gi4758569, EVALUE 1.00e-72
cagcccttgtacctttttgtatgccatttcgaacagcttcaatgatgcctgctgaagagaggatgctgcctgtctaatattttctcctgtttcgctgtcttttctagccaggagctccctcattttggaaatctcttctttcagcttgttgcact

SEQ ID NO: 27165 - DNA, 139 bp, Homo sapiens
  MAP TO CHR1.3; EXPRESSED IN LUNG, SIGNAL = 6.9; EXPRESSED IN FETAL LIVER, SIGNAL = 8.9; NT HIT: gi14141160, EVALUE 1.00e-57; SWISSPROT HIT: Q00839, EVALUE 9.00e-18; EST_HUMAN HIT: BG541628.1, EVALUE 2.00e-72
taggggacggcaaaacagaacagaaaggcggagataaaaagaggggtgttaaaagaccacgagaagatcatggccgtggatattttgagtacattgaagagaacaagtatagcaggtataggatgctcacctagtttta

SEQ ID NO: 27166 - DNA, 211 bp, Homo sapiens
  MAP TO CHR4.3; EXPRESSED IN FETAL LIVER, SIGNAL = 1.7; EXPRESSED IN LUNG, SIGNAL = 2.2; NT HIT: gi5729988, EVALUE 1.00e-108; SWISSPROT HIT: Q9Y5Q5, EVALUE 2.00e-26; EST_HUMAN HIT: AA249850.1, EVALUE 2.00e-05
ttgcagggtgacagcggtgggcctcttgtttgtgagaagctggaggacggtggacattatttggattaacttcatggggctccgtctgcttttccaaagtcctggggcctggcgtttatagtaatgtgtcatatttcgtcgaatggattaaaagacagatttacatccagacctttctcctaaactaattataaggatgatcagagacttt

SEQ ID NO: 27167 - DNA, 229 bp, Homo sapiens
  MAP TO CHR13.3; EXPRESSED IN LUNG, SIGNAL = 0.86; SWISSPROT HIT: P28715, EVALUE 1.00e-36; EST_HUMAN HIT: AA312903.1, EVALUE 1.00e-115; NT HIT: AF255437.1, EVALUE 1.00e-126
taggagtctgatgacttttcacagtaccaactcaaaggcttgcttaaaaagaactatctgaaccagcatatagaacatgtccaaaaggaaatgaatcagcaacattcaggacacatccgaaggcagtatgaagatgaagggggctttctgaaggaggtagagtcaaggagagtggtctctgaagacacttcacattacatcttgataaaaggtatcaggcaccatcatt

SEQ ID NO: 27168 - DNA, 440 bp, Homo sapiens
  MAP TO CHR5.3; EXPRESSED IN LUNG, SIGNAL =  23; SWISSPROT HIT: Q02877, EVALUE 4.00e-74; EST_HUMAN HIT: BE736259.1, EVALUE 0.00e+00; NT HIT: gi14734892, EVALUE 0.00e+00
tcctgcatcttctcaattgtttcttccttgtatttgcccttttcctttcctacttggcaagatttggctttccgttcaaggatcttttcacagtctttgtccagttttagcctagtgataaccaccttgctggggtgaatgcctacgtggacagttgtgccattagccttttcccgctgcacccgttcaatgtagataacatatttcttcctgtaaacctggactactttgccaatttgctgacctttatagtgtccatgtacaacctgaacttcatcatcctttcggatgggcatggatcacacgttgtacttctgtctcagctctttggaaagaggggaagacatagtcttccttcgaatgtgggaaggtgcattgaaatgccttttgcgattcttgcttcggtcggaagtcacaaagggattaaacttcattttggc

SEQ ID NO: 27169 - DNA, 268 bp, Homo sapiens
  MAP TO CHR17.3; EXPRESSED IN FETAL LIVER, SIGNAL = 0.79; EXPRESSED IN LUNG, SIGNAL = 0.44; SWISSPROT HIT: O76009, EVALUE 8.00e-26; EST_HUMAN HIT: W76135.1, EVALUE 3.00e-85; NT HIT: Y16788.1, EVALUE 0.00e+00
ggggcctcgggtcctgagtggccacgtgcttagatgcccacctgcgtggcgaaccattgctccacttccctgcggttggtttccaccagggcctcatactgactcctggtctcattcaggacctggttcaggtccacagtgggagcagcgtccacctccacgttgaggcggtctccaagctggcagcgcagggtgttaacctcctgatggagaaagggcaaaattttaaatttcacaaaggatcttggtgctctccttaagagaatgc

SEQ ID NO: 27170 - DNA, 202 bp, Homo sapiens
  MAP TO CHR14.3; EXPRESSED IN LUNG, SIGNAL = 0.55; NT HIT: AF361796.1, EVALUE 1.00e-110; SWISSPROT HIT: P05154, EVALUE 9.00e-34; EST_HUMAN HIT: BG054621.1, EVALUE 1.00e-110
cgggtacccatgatgagccgcgaggatcagtatcactacctcctggaccggaacctctcctgcagggtggtgggggtcccctaccaaggcaatgccacggctttgttcattctccccagtgagggaaagatgcagcaggtggagaatggactgagtgagaaaacgctgaggaagtggcttaagatgttcaaaaagaggtact

SEQ ID NO: 27171 - DNA, 148 bp, Homo sapiens
  MAP TO CHRX.3; EXPRESSED IN LUNG, SIGNAL =   1; NT HIT: L19485.1, EVALUE 1.00e-63; SWISSPROT HIT: Q06787, EVALUE 7.00e-22; EST_HUMAN HIT: BF910416.1, EVALUE 1.00e-54
caaggaaattatgccaccaaattcccttccttccaataattcaagggttggacctaatgccccagaagaaaaaaaacatttagatataaaggaaaacagcacccatttttctcaacctaacagtacaaaagtccagagggtaagaatt

SEQ ID NO: 27172 - DNA, 142 bp, Homo sapiens
  MAP TO CHR1.3; EXPRESSED IN FETAL LIVER, SIGNAL = 0.72; EXPRESSED IN LUNG, SIGNAL = 2.3; NT HIT: gi16160976, EVALUE 2.00e-74; SWISSPROT HIT: Q11174, EVALUE 9.00e-07; EST_HUMAN HIT: AI918126.1, EVALUE 3.00e-74
tccaggtgcagcatttgcaggagttgctgaacaccaggcctgtcgggcagctttgctggaacagccgccccgctgcacagctgtagaagctggaccgttcccgaggattgggatagagcccatcagctttgccctggcagaa

SEQ ID NO: 27173 - DNA, 173 bp, Homo sapiens
  MAP TO CHR5.3; EXPRESSED IN LUNG, SIGNAL = 2.7; EXPRESSED IN FETAL LIVER, SIGNAL = 3.9; SWISSPROT HIT: Q9TT15, EVALUE 5.00e-25; EST_HUMAN HIT: BG323263.1, EVALUE 2.00e-81; NT HIT: AF151094.1, EVALUE 8.00e-93
tctctctcctttgaaggaatttacaagctcaggctcagccaacactgagaccaccaaagtgacgggcagtctggaaaccaagtacagatggactgagtacggcctgacgtttacagagaaatggaataccgacaatacactaggcaccgagattactgtggaagatcaggtaa

SEQ ID NO: 27174 - DNA, 151 bp, Homo sapiens
  MAP TO CHR19.3; EXPRESSED IN LUNG, SIGNAL = 6.4; EXPRESSED IN FETAL LIVER, SIGNAL = 4.7; NT HIT: AF092453.1, EVALUE 9.00e-80; SWISSPROT HIT: O75821, EVALUE 4.00e-20; EST_HUMAN HIT: AI817815.1, EVALUE 5.00e-73
cccaccttggattggccagtggtcttgtccttagccaggtagatgcgggagatggagccgaaaggccggaagagctcctgcaggtcggtctcacgcgtgtcctctgacaagttggtgacacggatggtggcgttgtcgtcggctgtgtggg

SEQ ID NO: 27175 - DNA, 169 bp, Homo sapiens
  MAP TO CHR1.3; EXPRESSED IN FETAL LIVER, SIGNAL = 3.2; EXPRESSED IN LUNG, SIGNAL = 7.2; NT HIT: gi14739280, EVALUE 1.00e-60; SWISSPROT HIT: Q22038, EVALUE 9.00e-18; EST_HUMAN HIT: BG762224.1, EVALUE 2.00e-60
ctgtcagggctgtcgatggagaagcacatgaggatgacatcagtgtccgggtaggagagaggccgcagtcgatcatagtcttcctgccctgctgtgtcccacagagccagctccacctgacacacagggccagtgagtagctggcctgagggccccaaccctgccaccc

SEQ ID NO: 27176 - DNA, 230 bp, Homo sapiens
  MAP TO CHR18.3; EXPRESSED IN LUNG, SIGNAL = 0.47; SWISSPROT HIT: P36051, EVALUE 1.00e-12; EST_HUMAN HIT: BG722695.1, EVALUE 1.00e-125; NT HIT: gi16163728, EVALUE 1.00e-125
ttacctaataaacggtgctctagagtttccattttcatctaattcgtaaagtgcatctgctcgaaggccatcagcaacaaacaacactaatcttctcgctggaggaggcaatggtgtaaactgaggagtcattccatgaaccaaaggagatgtaaaataaatgtcaaagatggaggcgaagaacacaaaatgtataagcaatcccaaagtaaagaacagcagcatatcca

SEQ ID NO: 27177 - DNA, 177 bp, Homo sapiens
  MAP TO CHR16.3; EXPRESSED IN LUNG, SIGNAL = 1.7; NT HIT: gi7661761, EVALUE 7.00e-90; SWISSPROT HIT: Q9ULV3, EVALUE 4.40e-02; EST_HUMAN HIT: AA203413.1, EVALUE 1.00e-89
cctacatacctatcacaaatactgaaatagcctgttgggaagcggtgctgccagcagtactggtcgtcctcggtgtggaaaaccttctctttgtgcttctcggaggagatgtggccctgccactgcttctcactgttgcagtttttcccacacatccagcagtgaaagtccacctaa

SEQ ID NO: 27178 - DNA, 102 bp, Homo sapiens
  MAP TO CHR14.3; EXPRESSED IN BONE MARROW, SIGNAL = 0.63; SWISSPROT HIT: P20917, EVALUE 8.00e+00; NT HIT: AJ002571.1, EVALUE 1.30e+00
atgaaaatatgaaactgtacatggatcggttcgtttattgtctgattgtggctctagaaattgcagttttctatccttccttctcatgggattatggaaaag

SEQ ID NO: 27179 - DNA, 305 bp, Homo sapiens
  MAP TO CHR14.3; EXPRESSED IN FETAL LIVER, SIGNAL = 5.4; EXPRESSED IN BONE MARROW, SIGNAL = 1.7; NT HIT: gi13650450, EVALUE 0.00e+00; EST_HUMAN HIT: BG767699.1, EVALUE 0.00e+00; SWISSPROT HIT: Q9SMM0, EVALUE 1.60e+00
ctactttgggtggctcatcattctcttcttaatctccacctttgcattcaccactgtcaccttccgcttggccctccaatggtttagtgggaaatggtgaagagactggtttactctggataatatctttgccaaataaactagagtttccaggggagaatgaaaatccagtcgggggacagagcttaatgagcccaaaacagagctatcaactttctcgccgaaattaaatgaggcacttgtcgctcctagtgatgatgggtccgttttcttttcagatgccacctccaccttcttgtcaggtg

SEQ ID NO: 27180 - DNA, 107 bp, Homo sapiens
  MAP TO CHR19.3; EXPRESSED IN BONE MARROW, SIGNAL = 0.76; SWISSPROT HIT: Q14324, EVALUE 3.00e-13; EST_HUMAN HIT: BE797212.1, EVALUE 2.00e-53; NT HIT: gi15303543, EVALUE 1.00e-53
cacatcacctgggcaccctcttctgacacctccactgccatttccacccggtcacccacaaacacctgctggtcctcaagaggtgtgacaattaggactggaggttc

SEQ ID NO: 27181 - DNA, 141 bp, Homo sapiens
  MAP TO CHR18.3; EXPRESSED IN FETAL LIVER, SIGNAL = 0.92; EXPRESSED IN BONE MARROW, SIGNAL = 1.2; NT HIT: AJ296303.1, EVALUE 1.20e-01; EST_HUMAN HIT: AU117752.1, EVALUE 7.00e-01
atgactcaaggctgggaagacccagagcccaaagctgtgaaggttctacgagtcacggtgatcttactgaacagggacttttcaagccacttcatttacggcactgcgcagagggtagcaaaggcagagatggctgggctg

SEQ ID NO: 27182 - DNA, 134 bp, Homo sapiens
  MAP TO CHR14.3; EXPRESSED IN BONE MARROW, SIGNAL = 1.3; SWISSPROT HIT: P21209, EVALUE 7.80e+00; EST_HUMAN HIT: AA436981.1, EVALUE 8.00e-19; NT HIT: AF394194.1, EVALUE 1.80e+00
tcacaggtttgattggatttcccctggagacagtggaggtggatccaggcgttcaacagtcctcgctgttcttcccttcctgtcagcaccacaggacagcagataagggagttgactgtggatttttcaaattc

SEQ ID NO: 27183 - DNA, 349 bp, Homo sapiens
  MAP TO CHR18.3; EXPRESSED IN BONE MARROW, SIGNAL = 0.69; EXPRESSED IN FETAL LIVER, SIGNAL = 0.93; SWISSPROT HIT: Q92617, EVALUE 9.00e-01
tcagctcagcgccagtccattaaacctgcttccaagaacacataatgatctgcttggcgcactcagactctccttggctgcccacacctcctcttctccttcagaaatatggacagagaggctgtttggatcagtcccacgtctctccaaaaaccaggcctcaaatgtctggcaaggggctcccaaaacagaccagctcctccatcctctttgtaagaaccctccttgttgaatatctaccgttcgcctgtgggctaccctggagggatcattgctggaaggcccagtccttgcctgcaaagggctcacattcgagtgcccaggagaagcagtgagcaggcactgtgtc

SEQ ID NO: 27184 - DNA, 105 bp, Homo sapiens
  MAP TO CHR16.3; EXPRESSED IN FETAL LIVER, SIGNAL = 0.87; EXPRESSED IN BONE MARROW, SIGNAL = 0.75; SWISSPROT HIT: Q04592, EVALUE 6.10e+00; EST_HUMAN HIT: BG332178.1, EVALUE 7.70e+00
cttgtcaagcatgttcttcagcatgtccacttcttttctgagggctgtgatggtgacctggagtgcatgaagatcagtgagcaagtcctgcagggtctgcattga

SEQ ID NO: 27185 - DNA, 185 bp, Homo sapiens
  MAP TO CHR19.3; EXPRESSED IN BONE MARROW, SIGNAL = 0.81; EXPRESSED IN FETAL LIVER, SIGNAL = 0.96; EST_HUMAN HIT: AU143000.1, EVALUE 6.00e-70; NT HIT: gi7657477, EVALUE 2.00e-99; SWISSPROT HIT: P14061, EVALUE 5.00e-03
gcatctccctggtggagccaggccccgtggtcaccgagtttgaggggaagcttctggcgcaggtttctatggctgagttcccaggcactgaccctgagaccctgcactacttccgggacctctatctcccagcctccaggaagctgttttgctccgtgggacagaacccacaggacgtggttcag

SEQ ID NO: 27186 - DNA, 130 bp, Homo sapiens
  MAP TO CHR18.3; EXPRESSED IN FETAL LIVER, SIGNAL = 0.98; EXPRESSED IN BONE MARROW, SIGNAL = 1.1; EST_HUMAN HIT: BG190442.1, EVALUE 4.10e-02; NT HIT: AF105107.1, EVALUE 6.80e+00
gatctcaatgaagaggttcttcagttgaaaaactcttcctttcactttggaaaaggggaagtcggagcaaatagagcctgcgttttctcttctgttactgagggggaaaatgcattcttcctgttgactc

SEQ ID NO: 27187 - DNA, 129 bp, Homo sapiens
  MAP TO CHR14.3; EXPRESSED IN BONE MARROW, SIGNAL = 0.91; EXPRESSED IN FETAL LIVER, SIGNAL = 1.1; EST_HUMAN HIT: AA418430.1, EVALUE 6.30e-01; NT HIT: D45173.1, EVALUE 6.70e+00
cagatgtggcttcaggaggcaagaggaagaccagcaaaatgatcagggcctgcattttccctgcgacattgcccatactgaccatggctagttctgtcaccccttcactgggccccgcttttatagccc

SEQ ID NO: 27188 - DNA, 76 bp, Homo sapiens
  MAP TO CHR16.3; EXPRESSED IN FETAL LIVER, SIGNAL = 1.2; EXPRESSED IN BONE MARROW, SIGNAL =   1; NT HIT: AB055894.1, EVALUE 4.00e-03; EST_HUMAN HIT: AW884493.1, EVALUE 2.10e-02
tattttcccagcttctcattgccttcatggatatattcatttgaatgactgtcgtcagagatttcatccacagacc

SEQ ID NO: 27189 - DNA, 200 bp, Homo sapiens
  MAP TO CHR18.3; EXPRESSED IN FETAL LIVER, SIGNAL =  78; EXPRESSED IN BONE MARROW, SIGNAL =  41; SWISSPROT HIT: P30742, EVALUE 5.00e-22; EST_HUMAN HIT: AI989335.1, EVALUE 4.00e-80; NT HIT: gi14743858, EVALUE 3.00e-80
tgacaaagaaaagagggaacaatggtcgtgctaaaaagggccgtggccacatgcagcctattcgctgcaggaactgtgcccgatgcatacccaaggacaaggccattaagaaattcatcattcacaacatagtggaggccgcagcagtcagggacatttctgaagcaagcgtcttcgatgcctatgtgcttcccaagctg

SEQ ID NO: 27190 - DNA, 166 bp, Homo sapiens
  MAP TO CHR18.3; EXPRESSED IN BONE MARROW, SIGNAL = 0.94; NT HIT: AJ233976.1, EVALUE 5.70e-01; EST_HUMAN HIT: AW183657.1, EVALUE 1.40e-02
ttttcatcatagctgcagcccattcttggcccacaaggttgaaagctctgacagaaggggttttaaggaaaaaggctgtgattttaacatcctgaacccgagtcaagttcctgttcacatgggaaattgtaaaggaaaagactgaaaagccgtcatttgttctagt

SEQ ID NO: 27191 - DNA, 132 bp, Homo sapiens
  MAP TO CHR14.3; EXPRESSED IN BONE MARROW, SIGNAL = 0.9; SWISSPROT HIT: P36941, EVALUE 6.90e-01; NT HIT: AF227258.1, EVALUE 3.00e-36; EST_HUMAN HIT: BI199022.1, EVALUE 6.50e-01
tgcccacatcatggccagcaataccatgcaagtggaagagccacccaagtctcctgagaaaatgtggcctaaagatgaaaattttgaacagagaagctcattggagtgtgctcagaaggctgcagagcttcg

SEQ ID NO: 27192 - DNA, 247 bp, Homo sapiens
  MAP TO CHR18.3; EXPRESSED IN BONE MARROW, SIGNAL = 0.92; SWISSPROT HIT: Q9Y8J2, EVALUE 1.80e+00; NT HIT: AE001669.1, EVALUE 5.70e-02
catcccactaccacagcaaaccaactaggattggccgaaatcgtgcctgcttgcgccttctttctagaaatttccatgtccccagcgtgcatgttctgtcgccttctgcccctttctgtcttgctgccgtactctccattggtcttgcctctgctgccttgtttcctttctgtacaagtgcaaggcagagctctttcctttcccctgagcatctgtccctgtgcaaatttatcaggtttctctcgtc

SEQ ID NO: 27193 - DNA, 1235 bp, Homo sapiens
  MAP TO CHR16.3; EXPRESSED IN BONE MARROW, SIGNAL = 0.62; NT HIT: L13613.1, EVALUE 7.70e-02; EST_HUMAN HIT: AW874691.1, EVALUE 0.00e+00; SWISSPROT HIT: Q9Z0L4, EVALUE 8.20e+00
taaaaatctctacagctttgagaatgactttgaaacactctttactgttggagcttaaagaaaataaatctctaatgtcctctgtattaattcacctgcttggaaagttagagattaaaaggtttagtaggatttttatattttctataatttctatttgtattggagtaaactgttcgttgtatggagtggcttagctttcataaaacagaaagattcctatattgagaaaagaggaagaaggaaaaagtgtaatataaatacataaaacttcctctagctttcttgtgttatgtgtaaaggagttagtacgttactttaattgtgtactttgaagaaagcaatctcctatttccattaatggtggactctgtgggtagagacatggatatttttccttttataagaaaggtcttgtctttcctcagaaggcattgtgagcaaaataagggaagaaaaagagaagtagataagaaaaacaaatcacaatattgaagcaggacccgagtactatagccttcctcatattttggtatctggaaccgaggttgctaattaatgacccaagagctaagccttgtttgatgaaatgcaagatgtaatacacagattgccttggagtgatgtgtgattattaccatccattcatgtgtaatcccgtatttggaaggtttgtaatttgtttttgacacatttctctctgattttatacactcatgcatacaggtctcacctccctccaaaaccttatttccaaagcagactttgtttgtttggtttgggtaattcattgggccctatttgtcttccttatacataatctattttcttactgctgcctctgtcttccaaaccaagaatataaagaatgaagcctggggactggaacttaaaacttctgccgagaaaagaaagtcaaggcctgtgggctcctaaaacatcctgtggaattcgcctcagatgcccctccatttgcactggtatatggaggatgtttgaaaaccaccagaacctattgtgtactttggaacaatggcattttcctgcttgattgtgaagatggccgctggaaaagaagccaactcccagggggcacgaggggctaagctgtctcctgggaagtttgagggaggccaagtgttttccagttcatttccaacgcgtatttcttcagggccaagggcccagctgtgcctcattaggggtgagagtttggctgtgacacgacttaatag

SEQ ID NO: 27194 - DNA, 151 bp, Homo sapiens
  MAP TO CHR14.3; EXPRESSED IN FETAL LIVER, SIGNAL = 0.79; EXPRESSED IN BONE MARROW, SIGNAL = 0.83; EST_HUMAN HIT: AA026011.1, EVALUE 1.90e-01
agatctgctgaatcaaaaatttgccatcttgagatataaccgaggctttagcaaccataaagcccatcagctctaccctcagtccctcctcattctcaattttaggtaaggtgataagccactttagcatcaagacaaggtccccaagcat

SEQ ID NO: 27195 - DNA, 172 bp, Homo sapiens
  MAP TO CHR19.3; EXPRESSED IN FETAL LIVER, SIGNAL = 0.78; EXPRESSED IN BONE MARROW, SIGNAL = 0.85; EST_HUMAN HIT: AL570262.1, EVALUE 4.00e-92; NT HIT: gi16176805, EVALUE 3.00e-92; SWISSPROT HIT: P29315, EVALUE 4.00e-11
caccaaggtctgcagtttacactcggggtacctcaagccctcacacagaaacttcacccctgtattcccaatggggttcttggccaagcacaggtgtgtcagctcccggctgacaaccaacacagcagcaaggtccttgcaattggcttctgtaaggtgacagttttccaac

SEQ ID NO: 27196 - DNA, 384 bp, Homo sapiens
  MAP TO CHR16.3; EXPRESSED IN BONE MARROW, SIGNAL = 2.8; EXPRESSED IN FETAL LIVER, SIGNAL = 5.4; SWISSPROT HIT: P49743, EVALUE 1.20e-01; EST_HUMAN HIT: AW074238.1, EVALUE 0.00e+00; NT HIT: gi16165042, EVALUE 0.00e+00
ctcgtgctcacggattttattacacagatagtggcggcaatggcctcagcccagcccaccctcacctgcttttccagcccacaaagggggacgatcacggcccagcaaaagcgatgctgagaggggaaacagtccagagtccaacagcagaacttgggggaagcggtcggggtggccaggaacataaactatgtataggggccgggggcttctgcccagggctcccctggaccaggacgccaggtagggcagggaacctcagtagtcctccacccagccattctcagagatgaatgcgtcaataacctccttcatagccaagttggggatgagctgttcctgggtcagggggctccgggtcacggggtcaaaatgacccacacg

SEQ ID NO: 27197 - DNA, 202 bp, Homo sapiens
  MAP TO CHR18.3; EXPRESSED IN BONE MARROW, SIGNAL = 3.8; EXPRESSED IN FETAL LIVER, SIGNAL = 2.7; NT HIT: AK024471.1, EVALUE 1.00e-110; EST_HUMAN HIT: AW732427.1, EVALUE 1.00e-110; SWISSPROT HIT: P43616, EVALUE 9.00e-11
ggagattcctgtcaacgtccgattctgcctcgaaggcatggaggagtcaggctctgagggcctagacgagctgatttttgcccggaaagacacattctttaaggatgtggactatgtctgcatttctgacaattactggctgggaaagaagaagccctgcatcacctacggcctcaggggcatttgctactttttcatcgag

SEQ ID NO: 27198 - DNA, 212 bp, Homo sapiens
  MAP TO CHR14.3; EXPRESSED IN BONE MARROW, SIGNAL = 1.7; EXPRESSED IN FETAL LIVER, SIGNAL = 2.1; SWISSPROT HIT: O95433, EVALUE 3.00e-11; EST_HUMAN HIT: BG432594.1, EVALUE 1.00e-116; NT HIT: AF111168.2, EVALUE 1.00e-116
gaaaagcaagccaggaggtgcttgcggccgcttctagtagtttccaggcgctgccgggcggctggcactaagcggtcctgaggctgtggctacggctgctccggagctggtggcgccgcgataggagagccgatggccaagtggggtgagggagacccacgctggatcgtggaggagcgggcggacgccaccaacgtcaacaactggcactg

SEQ ID NO: 27199 - DNA, 361 bp, Homo sapiens
  MAP TO CHR18.3; EXPRESSED IN BONE MARROW, SIGNAL = 0.73; EXPRESSED IN FETAL LIVER, SIGNAL = 0.81; SWISSPROT HIT: P07492, EVALUE 3.00e-05; NT HIT: gi14760770, EVALUE 0.00e+00; EST_HUMAN HIT: BF589155.1, EVALUE 0.00e+00
gttggtagactctctgctccaggttctcaacgtgaaggaaggaacccccagctgaaccagcaatgataatgatggcctctctcaaaagagaaaaacaaaacccctaagagactgcgttctgcaagcatcagttctacggatcatcaacaagatttccttgtgcaaaatatttgactattctgtatctttcatccttgactaaattcgtgattttcaagcagcatcttctggtttaaacttgtttgctgtgaacaattgtcgaaaagagtcttccaattaatgcttttttatatctaggctacctgttggttagattcaaggccccgagctgttaccattcacaataaaagcttaaacacat

SEQ ID NO: 27200 - DNA, 231 bp, Homo sapiens
  MAP TO CHR14.3; EXPRESSED IN FETAL LIVER, SIGNAL =  65; EXPRESSED IN BONE MARROW, SIGNAL =  58; NT HIT: gi15431292, EVALUE 6.00e-85; EST_HUMAN HIT: BG613427.1, EVALUE 4.00e-87; SWISSPROT HIT: Q9CZM2, EVALUE 5.00e-20
taagggaactgggtgttttcggccaccacggcgaacacgaatcctacatataatgtaaccttgtttggccttgtagcccagtcggtgtgctttatcaggccaggtggggcagggagcactgtgaagagcagagagctgacacactgccagcagtggaccctcagaagaaagcgcatgacgtcagactgcttctttctccatagctcctggatgtacttgtatgcacccatc

SEQ ID NO: 27201 - DNA, 524 bp, Homo sapiens
  MAP TO CHR16.3; EXPRESSED IN BONE MARROW, SIGNAL = 0.92; NT HIT: AJ011301.1, EVALUE 1.30e-01; EST_HUMAN HIT: AI819394.1, EVALUE 0.00e+00; SWISSPROT HIT: Q01317, EVALUE 3.70e+00
gggaactgatatgggggcgatcttgatgcgggttgtgtctctcatgcatgataactcagaggacaggctcctcggtagtgcggtagtgctaactctgtgaagtttcttcaccctccttcctagccctggaggcggggtgattcatagctcctgttccaaaggcattcagcagccattcgacctgggaaagaaacagagttttagaaaatacaggccaaatgtagagacgcctgtgattaccaggatgagtatgtcagtgcaggtggcttctgaatttctgtttctgagtttgtttggctgatgcctaaggaaaggggtcccttacagccctgttttataccttagttcttggtggcaacgtgggtgttgctgatctctctgatgtgtttttctgtgcactgaaaacaccagacatgctccgtgacatcctcggagcatctcccatcataatggagtgttcctaacctgacaaagaatagcatattacctccccatctactcaaaataaaattatagtaaaattt

SEQ ID NO: 27202 - DNA, 133 bp, Homo sapiens
  MAP TO CHR14.3; EXPRESSED IN BONE MARROW, SIGNAL = 0.82; EST_HUMAN HIT: BG287320.1, EVALUE 6.60e-01; SWISSPROT HIT: P97594, EVALUE 2.60e+00
tgagatggaaagatggagtttggttaaactatcactgagtgcacaattggcaccacagcccatggggtcactggtacaggtggattcaaagcaagtgaggagtttgattaaaccaacattcttaaatcgcata

SEQ ID NO: 27203 - DNA, 115 bp, Homo sapiens
  MAP TO CHR14.3; EXPRESSED IN BONE MARROW, SIGNAL = 1.6; EST_HUMAN HIT: W48576.1, EVALUE 5.50e-01; SWISSPROT HIT: P37683, EVALUE 6.00e+00
atggaaaaggaattaatcttctcaccctggcgagttttcctgaaactacttatccttagcgtcagcgctgtaagaggtggagccgctcagtcccgcgggtggctgcagacagaag

SEQ ID NO: 27204 - DNA, 118 bp, Homo sapiens
  MAP TO CHR19.3; EXPRESSED IN BONE MARROW, SIGNAL = 9.9; EXPRESSED IN FETAL LIVER, SIGNAL =  10; NT HIT: gi15308165, EVALUE 3.00e-60; SWISSPROT HIT: P04632, EVALUE 3.00e-17; EST_HUMAN HIT: BG771712.1, EVALUE 5.00e-60
cggaacatggcgtccagcctgaccaagcagctgatgaagttgtcaaaatccatgttcccactttcatctgagtagcgtcggatgatcatgttatagagatgctcattcaggtggaacc

SEQ ID NO: 27205 - DNA, 132 bp, Homo sapiens
  MAP TO CHR18.3; EXPRESSED IN BONE MARROW, SIGNAL = 0.99; SWISSPROT HIT: Q00780, EVALUE 6.90e-01
caggctggaattgcatcaacattcatgctgctatccagcttgccgaatttgcttcttttgacagactttatcatggccaggtccagtctcacccggcggtgaaggcggccaccaatgcttggctggaagttg

SEQ ID NO: 27206 - DNA, 188 bp, Homo sapiens
  MAP TO CHR18.3; EXPRESSED IN FETAL LIVER, SIGNAL = 1.3; EXPRESSED IN BONE MARROW, SIGNAL = 1.5; SWISSPROT HIT: Q90477, EVALUE 2.50e+00; EST_HUMAN HIT: AA521146.1, EVALUE 1.00e-101
gtgtgttcatcctcgaggtggtgtgattcagagtgtttcttcatggaagcatggctcgggcacgcagtatgttagcaccaggcaaacacagtcatggactgctgtgactccccagcagacttgggcttcaccagcagaagttgttgaccttaccttggatgaggatagcaggcgtaaatacctactgt

SEQ ID NO: 27207 - DNA, 151 bp, Homo sapiens
  MAP TO CHR18.3; EXPRESSED IN FETAL LIVER, SIGNAL = 1.4; EXPRESSED IN BONE MARROW, SIGNAL = 0.85; SWISSPROT HIT: P50452, EVALUE 4.00e-12; NT HIT: gi11425220, EVALUE 4.00e-17; EST_HUMAN HIT: AW205887.1, EVALUE 1.00e-79
gcactttgttttagtaaaatcggaggtgaagatggagatattcatcgaggttttcagtcacttcttgttgcaattaacagaactgacactgaatatgtgcttagaactgccaacgggctctttggagaaaagtcttatgatttcctcacag

SEQ ID NO: 27208 - DNA, 158 bp, Homo sapiens
  MAP TO CHR18.3; EXPRESSED IN BONE MARROW, SIGNAL = 1.4; NT HIT: M97702.1, EVALUE 5.40e-01; EST_HUMAN HIT: BG390483.1, EVALUE 3.20e+00
ttcagaagctcatggttttggactcctttatgaagtacttaacagcctaaataagaccatttataaagcaggggtaatagatgatagtcatctagcaaagttggggttagtcatcctagtggttcataaaattggaaattttcatcaaaagaagctat

SEQ ID NO: 27209 - DNA, 163 bp, Homo sapiens
  MAP TO CHR16.3; EXPRESSED IN BONE MARROW, SIGNAL = 0.86; EXPRESSED IN FETAL LIVER, SIGNAL =   1; SWISSPROT HIT: O15084, EVALUE 2.00e-02; EST_HUMAN HIT: AI791939.1, EVALUE 6.00e-85; NT HIT: AE008480.1, EVALUE 5.60e-01
tgtctactcgttaccaccaagctgctagtgatagttacctggaacttctaaaagaggctaccaagcgagatctaaatctttcggatgaagacggcatgactcctactctcttggcagcctaccatgggaacttggaagccctagagataatctgcagtagagg

SEQ ID NO: 27210 - DNA, 176 bp, Homo sapiens
  MAP TO CHR16.3; EXPRESSED IN BONE MARROW, SIGNAL = 0.87; SWISSPROT HIT: Q92540, EVALUE 2.90e-01; EST_HUMAN HIT: BF979769.1, EVALUE 2.00e-94
ctcgcttcctcaggcaaggcagcttgaactccccggccgaggacacgaagtgggaccagtcctcgatggcgcgcgtgaagcagggccagtccactcggttgatgcctggcgcgatgggcgccagctttccctcgtggtacctgttgcgaagcttctggcctgtggcggtgatgtcc

SEQ ID NO: 27211 - DNA, 82 bp, Homo sapiens
  MAP TO CHR16.3; EXPRESSED IN BONE MARROW, SIGNAL = 0.79; NT HIT: M76421.1, EVALUE 9.90e-01; EST_HUMAN HIT: AA134514.1, EVALUE 3.60e-01
catgagccttatgaaagatggaagccagaaagttgcacccaagaaaagacaattgatatgaccaggggaactgagaatacag

SEQ ID NO: 27212 - DNA, 340 bp, Homo sapiens
  MAP TO CHR14.3; EXPRESSED IN BONE MARROW, SIGNAL = 1.4; EXPRESSED IN FETAL LIVER, SIGNAL = 0.79; EST_HUMAN HIT: AA134321.1, EVALUE 2.00e-24; SWISSPROT HIT: P28481, EVALUE 9.90e-02; NT HIT: AJ271881.1, EVALUE 2.00e-24
atgcctcactgcctgatggcctggggtctctcaggccctgctgcagccatctgctcacctggcccggaaagcagtgttgcagggccaggacctggcgagggggtcgggcactgggacctagtggaacatggcaaaaagtccaggtcagacaagcacctgtacgaggagtatgtagagaagcccttgaagctggtcctcaaagcaggagggaaccaagtcacccaggtctccaaacgcttgggcttcttaaaaaataaactcgggcttattttaatgaatatcaactggcaccgaggcaggttctgggggaaagaaaggggagaaaacagagaggagtaaa

SEQ ID NO: 27213 - DNA, 427 bp, Homo sapiens
  MAP TO CHR14.3; EXPRESSED IN BONE MARROW, SIGNAL = 0.81; EST_HUMAN HIT: BI829473.1, EVALUE 0.00e+00; SWISSPROT HIT: Q02762, EVALUE 4.70e+00; NT HIT: U52111.2, EVALUE 1.60e+00
tcacagaggaggtctgagtgccaggaccctgggcacagacagcaccctgggctccatgactcggccaagcacgcttaccgagtagcgtctccagtgtgccaccagctcgtcctcggtccccgctttcgccgcaggctgcaggccctcctgggccagcctctgcaggaccatcctgaactcactgagctcagcctccagctgcttaatctgctgctcccaggctcccctggaccggagcaggccccgcagccgctcctcctcctcctcccagagggcgcgcagcttctccagaactttcctcatctcttccagttctccggtgatcttctctgcacccaaaggagaggtgttccgaatgacacccgcagactgctcctccagcgtctccagagactcctcgcccctgggaaaatctttggcaatgtcc

SEQ ID NO: 27214 - DNA, 118 bp, Homo sapiens
  MAP TO CHR18.3; EXPRESSED IN BONE MARROW, SIGNAL = 1.2; SWISSPROT HIT: P40797, EVALUE 1.20e+00; NT HIT: gi8393844, EVALUE 1.50e+00
aagagtactctgcatgttccaggttttccgttgctgtgtttctcccatactcctccaggctgagttcttcctggtctagatgttctatccacatccagctcttctgtggtcttgcttt

SEQ ID NO: 27215 - DNA, 159 bp, Homo sapiens
  MAP TO CHR16.3; EXPRESSED IN BONE MARROW, SIGNAL = 0.81; SWISSPROT HIT: P79255, EVALUE 2.60e+00; NT HIT: AL163203.2, EVALUE 1.40e-01
ttctttcttcaagtcttcactgtcagtgtcttgcaaactgctgaacaccactggatccctcattcctaaagcagaagtggcttgactgaatgtcatcgtagtgggaatcacacacattgggcagaccccaccattggaggctacctcagcagatatcgt

SEQ ID NO: 27216 - DNA, 179 bp, Homo sapiens
  MAP TO CHR16.3; EXPRESSED IN BONE MARROW, SIGNAL = 0.9; SWISSPROT HIT: P41413, EVALUE 5.00e-01; NT HIT: gi14766793, EVALUE 6.30e-01; EST_HUMAN HIT: AW025919.1, EVALUE 6.00e-82
cttgcgcgatcggaaacgcgcttgcacagaaacctgtcaactgtcctcgtcccattgtagggctggcttttaacaatggagtcgcccacaaaaaccaaagcccactccgagagggaggattgagcagggacagctttggtacctgcagcctcagagccagccagaagggcaggatgtcc

SEQ ID NO: 27217 - DNA, 102 bp, Homo sapiens
  MAP TO CHR14.3; EXPRESSED IN BONE MARROW, SIGNAL = 0.73; EXPRESSED IN FETAL LIVER, SIGNAL = 1.2; NT HIT: L15309.1, EVALUE 8.20e-02; EST_HUMAN HIT: BE694257.1, EVALUE 1.20e-01
aacaggaaacacacccaggagactgaaaagcatgatgtaaatgtgaagaacgtggcaagtgggtggcttggcagcccagcagctatactggagcagctgcat

SEQ ID NO: 27218 - DNA, 228 bp, Homo sapiens
  MAP TO CHR14.3; EXPRESSED IN BONE MARROW, SIGNAL = 0.81; SWISSPROT HIT: Q45477, EVALUE 5.80e+00; NT HIT: AF290977.1, EVALUE 8.20e-01; EST_HUMAN HIT: BG945132.1, EVALUE 7.70e-02
atttacttctatgtgactcattctgcattttccacctcacacccagcatttgcaagtttcctatctctgagcagcaattctctgctgctattcgatatcaccattctctgcttatattcttggaagctgttagagcagtttgtacagctgtaccctgtgttttccaatcaagagaggctagggaatatattaatgaactttccacataaatccagtgaacatgcccag

SEQ ID NO: 27219 - DNA, 296 bp, Homo sapiens
  MAP TO CHR18.3; EXPRESSED IN BONE MARROW, SIGNAL = 0.76; EST_HUMAN HIT: AA847055.1, EVALUE 2.00e-03; SWISSPROT HIT: P55289, EVALUE 2.00e-39; NT HIT: gi16306488, EVALUE 0.00e+00
gcttcactctgatgttgataaaggagatggttccatcaaatacatcttgtcaggcgaaggggcaagttccattttcattattgatgagaacactggggatattcatgccaccaagagactggatcgtgaggagcaggcctactacacgctccgagctcaagcgctggataggctcaccaacaaacccgtggagcccgagtcggagtttgtcatcaaaattcaggatatcaacgacaatgaacccaaatttttggatggcccatacacggcaggagttcccgaaatgtctcccgtgg

SEQ ID NO: 27220 - DNA, 479 bp, Homo sapiens
  MAP TO CHR18.3; EXPRESSED IN BONE MARROW, SIGNAL = 0.93; EST_HUMAN HIT: AW293889.1, EVALUE 0.00e+00; SWISSPROT HIT: P16523, EVALUE 1.10e+00; NT HIT: gi15306948, EVALUE 0.00e+00
gaacccaggaagtggtgaatatgattttcgatatatatttgtagaaattgaatcttatcctagaagaactattatcattgaagataatcgatcccaagatgattaaaatagggtttctgatggatgttgaatggcgtggactcgctactccgttcttcacagctgccttccagaatgtgttcaaaagaaagacaagaaggagtgtatggcttataaagtgaatctaatacagtatttgttgcatttaaacaaactagacattttcttacggaaaaattatgaaatacagcatattttatgttctcccattgactcaatcatgacaatatttctgctttaacaccatctttcatgattagaaatgtttgttattggaaatgttacaccatgtaaataaaggaaatagattttagtattgtattcattttatattatagaactgcataatgtctgcagaataaaattaaaactaacaaata

SEQ ID NO: 27221 - DNA, 132 bp, Homo sapiens
  MAP TO CHR16.3; EXPRESSED IN BONE MARROW, SIGNAL = 0.77; SWISSPROT HIT: P38459, EVALUE 2.60e+00; NT HIT: U15422.1, EVALUE 2.00e-68; EST_HUMAN HIT: AA634325.1, EVALUE 2.00e-68
ttagtgttgcgtagaaatcaccatagtaacatgttcctgcaagaagattgacttcatcctagcattttctcctttgggtgaaacacgcaggaacaagccaaggagtgcggtctcattagttggatttccatc

SEQ ID NO: 27222 - DNA, 75 bp, Homo sapiens
  MAP TO CHR18.3; EXPRESSED IN FETAL LIVER, SIGNAL = 1.6; EXPRESSED IN BONE MARROW, SIGNAL = 1.1; EST_HUMAN HIT: T94171.1, EVALUE 3.20e-01
ccttggaaggctaagcagccccgtgctgcttcaacatcatttctagcatgtgggattctgctgcttggtgatcag

SEQ ID NO: 27223 - DNA, 159 bp, Homo sapiens
  MAP TO CHR18.3; EXPRESSED IN FETAL LIVER, SIGNAL = 0.93; EXPRESSED IN BONE MARROW, SIGNAL = 1.2; NT HIT: AB037805.1, EVALUE 2.00e-84; SWISSPROT HIT: Q9P2G3, EVALUE 9.00e-28; EST_HUMAN HIT: AL552067.1, EVALUE 5.00e-30
catactccagctgtagcctcccacaaggtaaatgctgtcatcaagcactgcacagccagggccacttcgaccctccaaaatgggagtttggagtatattccactggtcaccttttgggtcatagcattccacaagcattacatcaaggtgggagaaacc

SEQ ID NO: 27224 - DNA, 140 bp, Homo sapiens
  MAP TO CHR14.3; EXPRESSED IN BONE MARROW, SIGNAL = 1.1; NT HIT: AF009145.1, EVALUE 8.00e-03; SWISSPROT HIT: P19474, EVALUE 1.00e-01
accatgtggtcctggacccagaaactaccagtgcttacctccaagaagcagaatgtaatctgagtgtaatgaacacaggcatgaagatgtctgtgccttccaacccacagaggttctcctacttcagtgtgctggggact

SEQ ID NO: 27225 - DNA, 120 bp, Homo sapiens
  MAP TO CHR14.3; EXPRESSED IN FETAL LIVER, SIGNAL = 1.1; EXPRESSED IN BONE MARROW, SIGNAL =   1; NT HIT: gi14762655, EVALUE 1.60e+00; EST_HUMAN HIT: BG742723.1, EVALUE 3.00e-61
gcacacagtccccagctgccggggggaagatgccaaggggaaggactgttgctggtatgaagcagcccttcgtgatgggaacccaattattgtttatcttcatggcagtgcagaacacag

SEQ ID NO: 27226 - DNA, 83 bp, Homo sapiens
  MAP TO CHR18.3; EXPRESSED IN FETAL LIVER, SIGNAL = 1.6; EXPRESSED IN BONE MARROW, SIGNAL = 1.2; NT HIT: U83179.1, EVALUE 1.00e+00
cataactgctgatacatctgacaactctcctggggcaatgacagccccctcttttgcaaatttaacagctgtgtttgcagggt

SEQ ID NO: 27227 - DNA, 156 bp, Homo sapiens
  MAP TO CHR16.3; EXPRESSED IN BONE MARROW, SIGNAL = 0.66; NT HIT: AL161539.2, EVALUE 5.40e-01; EST_HUMAN HIT: BF690824.1, EVALUE 7.90e-01; SWISSPROT HIT: P80071, EVALUE 4.40e+00
tggaaagtggtttctgccagcaaaatagagctgattggctcttggttgttacaccaatgtgtgcctatggcttagaacagagtgttctagccaaggtgacaaagaagatgtcaaaatcagaagaagatgggactgggtatgtggccaatgacccag

SEQ ID NO: 27228 - DNA, 92 bp, Homo sapiens
  MAP TO CHR18.3; EXPRESSED IN BONE MARROW, SIGNAL =   1; NT HIT: M89943.1, EVALUE 2.90e-01; EST_HUMAN HIT: H73261.1, EVALUE 1.10e-01
ggcaatttttggaagcttgcctgcttactgacacaaaacaataatccaaacagaggacaaaatccagtggaaatttttcacgaaggggtctg

SEQ ID NO: 27229 - DNA, 151 bp, Homo sapiens
  MAP TO CHR16.3; EXPRESSED IN BONE MARROW, SIGNAL = 1.4; SWISSPROT HIT: Q63880, EVALUE 5.00e-18; EST_HUMAN HIT: AL561827.1, EVALUE 8.00e-78; NT HIT: gi14785624, EVALUE 3.00e-79
attctggaagccctgtctttttctatgagttccagcatcgacccagttcttttgcgaagatcaaacctgcctgggtgaaggctgatcatggggccgagggtgcttttgtgttcggaggtcccttcctcatggacgagagctcccgcctggg

SEQ ID NO: 27230 - DNA, 128 bp, Homo sapiens
  MAP TO CHR14.3; EXPRESSED IN BONE MARROW, SIGNAL = 0.95; EST_HUMAN HIT: F05256.1, EVALUE 6.00e-66; NT HIT: AL161555.2, EVALUE 7.00e-03
cccttcagagctgaaagggatggggaagagggtggatgaagaaggtctaatggagaatacacagaagaagcagaagccatggctcctctttttaacaatgacagagaaaggaaaacaatggacatagc

SEQ ID NO: 27231 - DNA, 143 bp, Homo sapiens
  MAP TO CHR16.3; EXPRESSED IN BONE MARROW, SIGNAL = 0.7; NT HIT: X52472.1, EVALUE 3.10e-02; SWISSPROT HIT: Q52741, EVALUE 7.70e+00; EST_HUMAN HIT: BI560067.1, EVALUE 7.10e-01
gggtgcacatgaatctcagtacaagtttccctctcccctattgtgaagtggtcattgcccaagccttacccaatgccatgaccccattatcagaaaagcaggcagctgaccatgaaggcccacccttggctactgctgattga

SEQ ID NO: 27232 - DNA, 430 bp, Homo sapiens
  MAP TO CHR19.3; EXPRESSED IN BONE MARROW, SIGNAL = 2.1; EST_HUMAN HIT: AI091662.1, EVALUE 0.00e+00; NT HIT: gi13630697, EVALUE 0.00e+00; SWISSPROT HIT: P22117, EVALUE 3.70e+00
ggactgtgagccggctcatttctgggctccatcggcacaggaggggccggatctttctccgataaaaccgtcgccctacagacccagctgtccccacgcctctgtcttttgggtcaagtcttaatccctgcacctgagttggtcctccctctgcacccccaccacctcctgcccgtctggcaactggaaagagggagttggcctgattttaagccttttgccgctccggggaccagcagcaatcctgggcagccagtggctcttgtagagaagacttaggatacctctctcactttctgtttcttgccgtccaccccgggccatgccagtgtgtccctctgggtccctccaaaactctggtcagttcaaggatgcccctcccaggctatgcttttctataacttttaaataaaccttggggggtgatgga

SEQ ID NO: 27233 - DNA, 361 bp, Homo sapiens
  MAP TO CHR18.3; EXPRESSED IN BONE MARROW, SIGNAL = 1.6; NT HIT: gi14760932, EVALUE 0.00e+00; EST_HUMAN HIT: BG181215.1, EVALUE 0.00e+00
ttcacccttccaagaaatctgtcgtcaatataatctccattgttgtctccaccagcaagtgccggggatcctgaacccgaatcagaggcagaaccggaagcagaggcaggggcggggcaggttgctgatgaagctggccaggacatagcctctgcccacgagggtgcagagactgaagtggagcaggcactagagcaagagccggaagaaagagcctccctcagtgaaaaagagaggcagaacgagggggtgaacgagagggacaactgctctgcctccagcgtctcgtcctccagcagcacgttggagagggaggagaaggaggacaagctctccagggacaggacaactggtaaatgaa

SEQ ID NO: 27234 - DNA, 141 bp, Homo sapiens
  MAP TO CHR16.3; EXPRESSED IN BONE MARROW, SIGNAL = 0.62; SWISSPROT HIT: P48462, EVALUE 2.60e+00; EST_HUMAN HIT: BG763871.1, EVALUE 2.80e+00
taagggctctgctgaggtccgtgtgcccattttgttctcagggatgcgttcactccgtccttcatgcccacagaagtgccgaccactttcagggtgttgcagtactcagtggccctggatttgccaggtgtggcatcaagc

SEQ ID NO: 27235 - DNA, 122 bp, Homo sapiens
  MAP TO CHR16.3; EXPRESSED IN BONE MARROW, SIGNAL = 0.81; SWISSPROT HIT: P78333, EVALUE 2.00e-15; NT HIT: AF001462.1, EVALUE 8.00e-55
ttatactcagcgtgtggttggaaatggaatcaaagcccagtctggaactcctgaagtcaaagtcaaaggaactgatcctgtgataaatcagattattgataaactgaagcatgttattcagg

SEQ ID NO: 27236 - DNA, 161 bp, Homo sapiens
  MAP TO CHR14.3; EXPRESSED IN BONE MARROW, SIGNAL = 0.81; EXPRESSED IN FETAL LIVER, SIGNAL = 0.83; SWISSPROT HIT: P73625, EVALUE 6.70e-01; NT HIT: M23354.1, EVALUE 3.60e-02
atggtattgcctcagcctactggacagctgctgaagaatcctcaatcatagccatcaacagggcataccatttgagtctgaggtttgtaggaatagccaaagactctattggtggtattagtccaagctttggtgccatagttgctggagcttttgcttaa

SEQ ID NO: 27237 - DNA, 129 bp, Homo sapiens
  MAP TO CHR14.3; EXPRESSED IN BONE MARROW, SIGNAL = 1.3; EXPRESSED IN FETAL LIVER, SIGNAL = 0.78; EST_HUMAN HIT: BI911068.1, EVALUE 6.30e-01; NT HIT: AL391737.1, EVALUE 6.70e+00
gacatgccacacaggtctcctaaaaagtgctgtttgcttggcctctaatgattcttacggctttatcagcacacatggcccatcagctcctagccctcatgcagcctctgcagccctgatgccctgggg

SEQ ID NO: 27238 - DNA, 188 bp, Homo sapiens
  MAP TO CHR14.3; EXPRESSED IN BONE MARROW, SIGNAL = 1.4; EST_HUMAN HIT: BF436802.1, EVALUE 6.20e-02; NT HIT: gi14769251, EVALUE 4.20e-02; SWISSPROT HIT: P55196, EVALUE 2.90e-01
cgtgtgaaaagcttcaccaggttgctgacatttgatcagagccttggaggacaaatagaagctgttcagtggagaaagaggaaggggcatgagaggtggaaagaaaagcaggaacaacaccatcctgtggtggaggagaccaggagaagcccagaaccctggagagaaggccagaaagatgagcggag

SEQ ID NO: 27239 - DNA, 270 bp, Homo sapiens
  MAP TO CHR14.3; EXPRESSED IN BONE MARROW, SIGNAL =   1; SWISSPROT HIT: O53653, EVALUE 8.40e+00; EST_HUMAN HIT: BE513137.1, EVALUE 3.60e-01; NT HIT: M28657.1, EVALUE 2.50e-01
tagttcctcttccggacctggactaggaaatccagaacctataaatgcagaattcctttctggaaatgcgcactctccatatcaccactctgaaaaccccagagctcacttctacataagcaaagctcctaatacaattgggagtcggtctagtgccagctctgtatcccatcactttatctgtagcagagcaaaaaggatccttgacttgcagcttggactttgtgcagcggcatctcttcctgtcccctgcccgtgtaacatgggtag

SEQ ID NO: 27240 - DNA, 263 bp, Homo sapiens
  MAP TO CHR19.3; EXPRESSED IN BONE MARROW, SIGNAL = 0.77; EXPRESSED IN FETAL LIVER, SIGNAL = 0.83; SWISSPROT HIT: Q9Y337, EVALUE 3.00e-34; NT HIT: gi6912643, EVALUE 0.00e+00; EST_HUMAN HIT: BE388198.1, EVALUE 0.00e+00
gagcatgttctcgccaacaatgatgtttcctgtgaccacccctctaacaccgtgccctctgggagcaaccaggacctgggagctggggccggggaagacgcccggtcggatgacagcagcagccgcatcatcaatggatccgactgcgatatgcacacccagccgtggcaggccgcgctgttgctaaggcccaaccagctctactgcggggcggtgttggtgcatccacagtggctgctcacggccgcccactgcaggaagaa

SEQ ID NO: 27241 - DNA, 193 bp, Homo sapiens
  MAP TO CHR16.3; EXPRESSED IN BONE MARROW, SIGNAL = 0.64; SWISSPROT HIT: P13599, EVALUE 2.50e+00; EST_HUMAN HIT: AA074382.1, EVALUE 4.00e+00; NT HIT: AF114156.1, EVALUE 2.70e+00
atcatttctgttgggcttctctcaaggactctcaggctgtccgcccctgggagaaccacactggcccagcttctgccggtgtgtgctagggttccttctcttccatctgcccccacctcctctgttgctttgtctatcctgctggcaccactgaccttaactgcaaatgttcttttaacaaatagaacagctt

SEQ ID NO: 27242 - DNA, 201 bp, Homo sapiens
  MAP TO CHR16.3; EXPRESSED IN FETAL LIVER, SIGNAL = 5.9; EXPRESSED IN BONE MARROW, SIGNAL = 3.2; SWISSPROT HIT: P22695, EVALUE 3.00e-22; NT HIT: gi4507842, EVALUE 1.00e-109; EST_HUMAN HIT: BG745078.1, EVALUE 1.00e-109
ggtgaaatccgagaacagaatggagacagtcttgtccatgctgcttttgtagcagaaagtgctgtcgcgggaagtgcagaggcaaatgcatttagtgttcttcagcatgtcctcggtgctgggccacatgtcaagaggggcagcaacaccaccagccatctgcaccaggctgttgccaaggcaactcagcagccatttgat

SEQ ID NO: 27243 - DNA, 131 bp, Homo sapiens
  MAP TO CHR14.3; EXPRESSED IN BONE MARROW, SIGNAL = 0.68; EST_HUMAN HIT: AW993487.1, EVALUE 9.00e-68; SWISSPROT HIT: O15499, EVALUE 5.20e-01; NT HIT: X82202.1, EVALUE 4.40e-01
cagaatctgctcgaggaagtgtttgttgttgctcaggcagtagaaataggccactttccaagcctcggctgggttgggattggagaacagggctagcattgcccgctcaggatctagatgatccggtgaga

SEQ ID NO: 27244 - DNA, 99 bp, Homo sapiens
  MAP TO CHR16.3; EXPRESSED IN BONE MARROW, SIGNAL = 1.1; SWISSPROT HIT: P87072, EVALUE 2.40e-01; NT HIT: gi14778649, EVALUE 6.00e-49
aaccatgatggcagcattgacttccgagagtatgtgattggcctggctgtcttgtgcaacccttccaacacagaggagatcatccaggtggcatttaag

SEQ ID NO: 27245 - DNA, 78 bp, Homo sapiens
  MAP TO CHR14.3; EXPRESSED IN BONE MARROW, SIGNAL = 0.75; SWISSPROT HIT: P42763, EVALUE 6.30e+00; EST_HUMAN HIT: AL596583.1, EVALUE 3.40e-01; NT HIT: gi15282445, EVALUE 9.30e-01
atgaagaggtaagggagattttgtttttatcatcaggctttttttctcctgctctttcatttccttcttcaaacaaat

SEQ ID NO: 27246 - DNA, 296 bp, Homo sapiens
  MAP TO CHR14.3; EXPRESSED IN BONE MARROW, SIGNAL =   1; EXPRESSED IN FETAL LIVER, SIGNAL = 0.91; SWISSPROT HIT: P01701, EVALUE 2.00e-06; EST_HUMAN HIT: BI771427.1, EVALUE 0.00e+00; NT HIT: X04936.1, EVALUE 0.00e+00
ttgcagaaagcaaggaccaagtgtttcagccttccacagtggcatcttcagagggagctgtggtggaaatcttctgtaatcactctgtgtccaatgcttacaacttcttctggtaccttcacttcccgggatgtgcaccaagactccttgttaaaggctcaaagccttctcagcagggacgatacaacatgacctatgaacggttctcttcatcgctgctcatcctccaggtgcgggaggcagatgctgctgtttactactgtgctgtggaggacacagaggcagggaacccatga

SEQ ID NO: 27247 - DNA, 240 bp, Homo sapiens
  MAP TO CHR14.3; EXPRESSED IN FETAL LIVER, SIGNAL = 0.9; EXPRESSED IN BONE MARROW, SIGNAL = 0.63; SWISSPROT HIT: O14181, EVALUE 4.50e-01; EST_HUMAN HIT: W16503.1, EVALUE 3.20e-01; NT HIT: gi16164232, EVALUE 2.20e-01
ttgagttgcttttgcctctgggcattcctgtgttcaactggggcttttgccaaaaaagccagaacgcccttaatctcctctttcctcatgaaactcacagctttggttcgtcacagatcttgcagatcttggcggtgctctcctactccccagttttgtctcagcaccatatggcttttgacaaagtcaggccacagcttcaacctaaacagcttaacattatcgaaagcccagcccact

SEQ ID NO: 27248 - DNA, 195 bp, Homo sapiens
  MAP TO CHR16.3; EXPRESSED IN BONE MARROW, SIGNAL =   1; SWISSPROT HIT: P26041, EVALUE 1.90e+00; NT HIT: AB067466.1, EVALUE 1.00e-106; EST_HUMAN HIT: BF796354.1, EVALUE 4.00e+00
atgagctgcccacgtggatcctgagcccacaggacctgcgttttggagaaggggtctactatttgactgtggtccctgagtctgacctggagccagcccccggcagggacctcacggttggcatcaccaccttcctgtctcactgtgtgttctgggatgaggtccaggagacttgggacgactcaggatgccagg

SEQ ID NO: 27249 - DNA, 128 bp, Homo sapiens
  MAP TO CHR14.3; EXPRESSED IN BONE MARROW, SIGNAL = 0.84; NT HIT: gi14754508, EVALUE 7.00e-46; EST_HUMAN HIT: BI912572.1, EVALUE 1.00e-45
taaagcagctcagtttgcattgctttctgctggtaagggcgggagaggtggtggtggtgaccgccacaggagtgatggtagagaaggaagatgttctctcgctctctctcctctacatctgacatctt

SEQ ID NO: 27250 - DNA, 331 bp, Homo sapiens
  MAP TO CHR14.3; EXPRESSED IN BONE MARROW, SIGNAL = 0.85; SWISSPROT HIT: Q9X1E3, EVALUE 5.40e+00; NT HIT: U45887.1, EVALUE 1.20e+00
ctgctctgcccactgtgaagggtggcaggaggatggaagacgaggtagtgcttctggaaattcgagatgccaagtccaagcctaggtgcctccctgcctccgaggagcctcccctgatgtcctggtcaccgcggcgctgtgctgtggccaccagcaagaccggcggcaccaaggggccccctagcggcccgaggagttgctgcagccacctgggcccagcatgtccttcccagacacccgcggatgtaggacctttcttggggacccagatcacgtgccaggcactgcgctgggtgccaggccagggaaacaccatctcctggcagccctg

SEQ ID NO: 27251 - DNA, 181 bp, Homo sapiens
  MAP TO CHR14.3; EXPRESSED IN BONE MARROW, SIGNAL = 0.72; SWISSPROT HIT: P54803, EVALUE 6.00e-31; NT HIT: gi15300605, EVALUE 1.00e-97; EST_HUMAN HIT: BE891013.1, EVALUE 5.00e-95
cagttgtagtctcctataatactgattgtgttggatgcatcggcagcccatgtaatgggtctctggttgagaacttggcgtagcgtgaagtgatgctcgccagggtcttcaatatttgtaaaatattcaaatacaccagtttgatcagcaaagtttggagcttcactaaaaaatgggtaat

SEQ ID NO: 27252 - DNA, 165 bp, Homo sapiens
  MAP TO CHR14.3; EXPRESSED IN BONE MARROW, SIGNAL = 0.8; NT HIT: gi14737632, EVALUE 8.90e+00; EST_HUMAN HIT: BF219918.1, EVALUE 5.40e-02; SWISSPROT HIT: P42170, EVALUE 3.40e+00
tgaaagcacagtcaagatagaaagtttggtggtgatctgggtacagaaagacttcctctgtgttatttataagatgcagagtgaatgtttctgtacaatatctgaacaaggtagaagaagtgatgttccgacactctttaattcagtttgtacacaaggctggag

SEQ ID NO: 27253 - DNA, 164 bp, Homo sapiens
  MAP TO CHR16.3; EXPRESSED IN FETAL LIVER, SIGNAL = 0.77; EXPRESSED IN BONE MARROW, SIGNAL = 0.77; NT HIT: AJ310932.1, EVALUE 2.20e+00; EST_HUMAN HIT: N76397.1, EVALUE 8.40e-01; SWISSPROT HIT: Q00978, EVALUE 4.40e+00
ttacaggtcaaagatggcatagatctggtgtccaggagacactcggtgcatggtagctgttgtcatcatagcccatggaggttttgggtgacctccaaagggcagggcttcgggaacatcactgtcttctgctccacggaagttgtctctaactcctgacatgc

SEQ ID NO: 27254 - DNA, 140 bp, Homo sapiens
  MAP TO CHR14.3; EXPRESSED IN BONE MARROW, SIGNAL = 0.65; EST_HUMAN HIT: BG773469.1, EVALUE 4.00e-73; SWISSPROT HIT: P00889, EVALUE 2.00e+00; NT HIT: AL163285.2, EVALUE 4.70e-01
ctgtaaagtacttgttatagtgttgaccttctcggtaacttctactgtaggaagacttcgagttcccctgtgcgttgatctggcagcccatggactcaatcggtcacgacagcggaagtgatctgattcgctggatgatt

SEQ ID NO: 27255 - DNA, 183 bp, Homo sapiens
  MAP TO CHR14.3; EXPRESSED IN BONE MARROW, SIGNAL = 1.3; NT HIT: D78344.1, EVALUE 6.40e-01; SWISSPROT HIT: Q49608, EVALUE 5.60e+00
aatgggaatgggagtgcagggatccagatggctccttgagttacatggcagatgatcacctgaatgcaagacctcatcctggtgaggaggacttcaatggccctggttctccaccttcatgtgggcagcatctgggctgttggcccaatcttgtgaggataaaagcctttgcaaaaagtggtt

SEQ ID NO: 27256 - DNA, 102 bp, Homo sapiens
  MAP TO CHR19.3; EXPRESSED IN FETAL LIVER, SIGNAL = 1.2; EXPRESSED IN BONE MARROW, SIGNAL = 0.62; SWISSPROT HIT: Q90867, EVALUE 7.10e-01; NT HIT: gi14766644, EVALUE 1.00e-50; EST_HUMAN HIT: H57207.1, EVALUE 3.00e-39
ccctggaggaattctgctcgctcaggccaccatggcaacagcctgccttcccccactcagggggtcacgcacagccctgccggggtgaggcccagctgccac

SEQ ID NO: 27257 - DNA, 493 bp, Homo sapiens
  MAP TO CHR16.3; EXPRESSED IN BONE MARROW, SIGNAL = 0.89; SWISSPROT HIT: Q04833, EVALUE 8.90e-01; NT HIT: gi13385711, EVALUE 6.00e-19; EST_HUMAN HIT: AW236968.1, EVALUE 0.00e+00
ctatttacaaggtatgttggccctgggctcccccaccacctcagccccaacgttgccttctggggcagcctcggcctcctcctgtggggcaccctccagcagagcggtgtcttcctccaggaagttgctgagctccgccagctctctacgaacgacactggtggcttggtccagccagcgcacacgccgcaggagggacagcagcaggggccgacggcgctcctggcgcacgctccaggcgttgtgcagctcccggtagcagttgtggcgagcacgctcggccgggtccagggtggccccgcagcccagggggcagcgctgctgggacccttgctggcaatgctgccggtgctctgccagggtcccacgcggcacctgcgaggtgcagccctcgttggggcaggccgttagctcaaaggggcatgagtcctggtgccccttgcgatgggccagggggcatgtcactatgcagccagcgtcggcgttcttgcac

SEQ ID NO: 27258 - DNA, 334 bp, Homo sapiens
  MAP TO CHR16.3; EXPRESSED IN BONE MARROW, SIGNAL = 0.72; SWISSPROT HIT: P42526, EVALUE 7.30e-02; NT HIT: AF260225.1, EVALUE 7.90e-02; EST_HUMAN HIT: BF172395.1, EVALUE 1.20e-01
atgctgattaatgctagaaaggacatgctgatcaatgctagtatgggtatgctggtcaatgttggtatgggcatgctgatcaatgacagtatgggcatgctgatcaaagctaatataagtatgctgatcaatgctagcatgggcatgctgatcaatgctagtatgggggttcttatcaatgctagtataagcctgccgatcaatgctagtacggacgtgcttaccaatactagtatgggtgtgctgatcaatgctagtataaacctgctgatgaacgctagtatgagcatgctaaacaatgctaatatgggcatgccagtcaatgctagcatag

SEQ ID NO: 27259 - DNA, 128 bp, Homo sapiens
  MAP TO CHR19.3; EXPRESSED IN BONE MARROW, SIGNAL = 0.85; SWISSPROT HIT: Q9Y473, EVALUE 2.00e-08; EST_HUMAN HIT: AI073817.1, EVALUE 1.00e-60; NT HIT: gi8923076, EVALUE 4.00e-66
cccagggaggatataagtgtcaaggtctccagcatcacgtcacggtacaggcatctctgagcctcattaagaagactccattcctccagggaaaagtttacagccacatcttcaaaggtcacactgct

SEQ ID NO: 27260 - DNA, 135 bp, Homo sapiens
  MAP TO CHR18.3; EXPRESSED IN BONE MARROW, SIGNAL = 1.3; EXPRESSED IN FETAL LIVER, SIGNAL = 0.95; SWISSPROT HIT: Q9XSE2, EVALUE 3.50e+00; EST_HUMAN HIT: BG828322.1, EVALUE 1.10e-02; NT HIT: AL111694.1, EVALUE 1.10e-01
atgaagaggaaggcccactgtgactccaagcggtcccacctccctgctcatgggaactgccagatgttttacttgtccctttcttctctttttctgacggcttttgatgggttctataagggggacagtgttgag

SEQ ID NO: 27261 - DNA, 489 bp, Homo sapiens
  MAP TO CHR18.3; EXPRESSED IN BONE MARROW, SIGNAL = 0.65; SWISSPROT HIT: Q02388, EVALUE 2.60e-02; EST_HUMAN HIT: AA361740.1, EVALUE 8.00e-47; NT HIT: gi15305528, EVALUE 0.00e+00
cattgtcctccggtgctggggttggctcattctgcagggccaggggcaccaccgctcctgatgggccaggagggccgggggggcccttggggcctggcatgcctggtaccccaggcaagcctggcagtccccgaggtccaggcaccccaggctccccaacggtgccctgaagtccctggaagccaggagggccctgagggccggggagtccctctttgcctggtgggcccggggggcctgggtccccactggagccctgagggccgggcttcccaggggaaccacgggagcctttggggccctgggagcctttagatcctttgccgccacgctctccggggggaccagctggtccaattgggcctctctcacccgcagggccaggtggtccaggctcccccttctctcctttctgtcccttgttgccagttgggccagggggtccctgggatcctctgtcacctcttggacccctggggcccggtggac

SEQ ID NO: 27262 - DNA, 171 bp, Homo sapiens
  MAP TO CHR14.3; EXPRESSED IN BONE MARROW, SIGNAL = 0.7; NT HIT: X76078.1, EVALUE 2.30e+00; SWISSPROT HIT: Q05860, EVALUE 7.50e+00
agtgttaccacggtggttgcagtccactaagggcagttgtgagataccggaagtcaaacccagttttcccttatcacctctttatgtcactgattttcaatttaacagttacagagaaaaatgaatttggctggtttcacgataaaccaaagaaagcacacctgaaggcag

SEQ ID NO: 27263 - DNA, 222 bp, Homo sapiens
  MAP TO CHR18.3; EXPRESSED IN BONE MARROW, SIGNAL = 0.83; NT HIT: AF275873.1, EVALUE 3.10e+00; EST_HUMAN HIT: AI138337.1, EVALUE 1.20e+00
tggagttttccgctagcattgtaatacctgacattttctatgagcatgatcaaggtaaagttgacattgtggaatctgcatggactgtggggtggcaagaagcagaaaagacttttcatccaggttgtgcctttggaagcactgaaaatgttaggactgactttatggtgatgaggatcagacctgctgactcttatatcttgagtcactacccagatgtct

SEQ ID NO: 27264 - DNA, 132 bp, Homo sapiens
  MAP TO CHR18.3; EXPRESSED IN BONE MARROW, SIGNAL = 0.93; SWISSPROT HIT: Q06754, EVALUE 2.00e+00
tgtggttgctttgttctgaatttcatggctctgttgttttaaaccctcttttgcatacattttcagagagaggctgatgattgcaaaccgttggtttttgggaaattggaatgctgccactgtctgaattgc

SEQ ID NO: 27265 - DNA, 165 bp, Homo sapiens
  MAP TO CHR18.3; EXPRESSED IN BONE MARROW, SIGNAL = 0.71; EST_HUMAN HIT: AA280191.1, EVALUE 8.40e-01; SWISSPROT HIT: Q9H3N8, EVALUE 3.00e-27; NT HIT: gi14765641, EVALUE 4.00e-88
cagcatttgagactgacaggtatcgatcatagctgatgaggacaatgttatatacagatgctgtacataacagatagtcagtagtgagccaaaatacacagatttcctttccaaaatcccattcgaacagcgtgtgagggatgtacaaaggaatggagatcacac

SEQ ID NO: 27266 - DNA, 146 bp, Homo sapiens
  MAP TO CHR18.3; EXPRESSED IN BONE MARROW, SIGNAL = 0.97; SWISSPROT HIT: Q64687, EVALUE 8.80e-01; EST_HUMAN HIT: BF968902.1, EVALUE 1.00e-67; NT HIT: gi15304537, EVALUE 8.00e-77
ccttgggaaacatgcggaagatctcctggttgatgtggtagatgccactggtgtccacctcatacttgagctttgtccccaggggagtgttcttctgggtggtgaagagaaaggcaggggcgttgcagcacctggacagagtagac

SEQ ID NO: 27267 - DNA, 115 bp, Homo sapiens
  MAP TO CHR16.3; EXPRESSED IN BONE MARROW, SIGNAL = 0.91; NT HIT: AB007612.1, EVALUE 9.50e-02
gttgacaactgaacgcacagcgctggctcagggagaggcaggaaactcaccagcagaaaagggcttccacacaatgcatctgatttgcccaactgaacgaaactcaacccgaaag

SEQ ID NO: 27268 - DNA, 211 bp, Homo sapiens
  MAP TO CHR14.3; EXPRESSED IN BONE MARROW, SIGNAL = 1.1; NT HIT: M12492.1, EVALUE 7.50e-01; EST_HUMAN HIT: AV707068.1, EVALUE 1.10e+00; SWISSPROT HIT: P15184, EVALUE 1.60e-01
ctcagcaattccacggaggagcaaagcctcctgggcgccatttggagagatagtgagaggcaggcatttgcgtttctgtggggtttggacaggctgtgcagctaccacaggtgggtggtccaaatgatctgcagacagttgaactcctcggggttttgggtcctgggatatgcctaatatttcaaaagcagctccattctggatggttttc

SEQ ID NO: 27269 - DNA, 243 bp, Homo sapiens
  MAP TO CHR18.3; EXPRESSED IN BONE MARROW, SIGNAL = 0.85; NT HIT: gi6681088, EVALUE 2.20e-01; EST_HUMAN HIT: AW975834.1, EVALUE 3.20e-01; SWISSPROT HIT: P22913, EVALUE 3.50e-01
gaagaagcagtttaccaggttcttattcttattctcaatggaccagctgggccagggccggttttcaatgcagactctctcttttgctcttgctgtgtatcggaaggattcccccctggttgcttgtcaggtgcaggctcttggcaacctggagccaagctcagtggaagcgcatgtttccagccacggcatcgccattgacaggaagggctggcatgtatcacttttcagcatccaaccagg

SEQ ID NO: 27270 - DNA, 86 bp, Homo sapiens
  MAP TO CHR14.3; EXPRESSED IN BONE MARROW, SIGNAL = 0.96; NT HIT: gi15922990, EVALUE 2.70e-01; EST_HUMAN HIT: R10111.1, EVALUE 3.90e-01
atagaaccacttggaaattctcatggaacataaaggtattctgcttgctcagaaactccgagggaaaaatgccacttctcttctta

SEQ ID NO: 27271 - DNA, 119 bp, Homo sapiens
  MAP TO CHR18.3; EXPRESSED IN BONE MARROW, SIGNAL = 0.94; NT HIT: AF217204.1, EVALUE 3.90e-01; EST_HUMAN HIT: BI561067.1, EVALUE 1.00e-60
ctgattaggatgctccttattgagcgatttggtgtcccctgtcttccccgctgtggttttggaccggggcctctgctgattgatcttgggaagattttgacaactgtcgttcatcatcc

SEQ ID NO: 27272 - DNA, 114 bp, Homo sapiens
  MAP TO CHR14.3; EXPRESSED IN BONE MARROW, SIGNAL = 1.2; EST_HUMAN HIT: BE896949.1, EVALUE 8.60e+00; SWISSPROT HIT: P43567, EVALUE 7.90e+00; NT HIT: AF016041.1, EVALUE 5.80e+00
tgaaagctgggacctccacgaggctctgagagagctactgcaggactccgttcttcgtttccttcaattgacagtatccagcgggccatactccctaaaggtcacctgggcagg

SEQ ID NO: 27273 - DNA, 157 bp, Homo sapiens
  MAP TO CHR14.3; EXPRESSED IN BONE MARROW, SIGNAL = 1.3; SWISSPROT HIT: P24122, EVALUE 1.00e+01; EST_HUMAN HIT: BF105003.1, EVALUE 3.10e+00
aaaccgaacctagaccacaatggtactggggagaacttgaattggaaaggaccctacagcaagaagaataggtgcttcagaacccactatccatcacagggtccttaccccatccatcatagggtccttactccaaccaagagtaaagagagtaaag

SEQ ID NO: 27274 - DNA, 131 bp, Homo sapiens
  MAP TO CHR16.3; EXPRESSED IN BONE MARROW, SIGNAL =   1; SWISSPROT HIT: Q9V4U7, EVALUE 1.50e+00; NT HIT: AJ296302.1, EVALUE 4.40e-01
actccaacagcaaaacgggggcccacacaggatatgggatccaagagggatttttctgcctgttgtggcctccaaattctccaaataggtccgttcacacaaacaagggtagtttgttctcccagcgacag

SEQ ID NO: 27275 - DNA, 267 bp, Homo sapiens
  MAP TO CHR14.3; EXPRESSED IN FETAL LIVER, SIGNAL = 0.79; EXPRESSED IN BONE MARROW, SIGNAL = 0.85; NT HIT: AB022164.1, EVALUE 9.70e-01; EST_HUMAN HIT: AW976598.1, EVALUE 1.40e+00
tatggagtaaatgtgaactgctgccaagatacagtcaatttaaaggtgacagaagatgatctcacatccaggacttgatcagttattttggccctgagaacaactgatggtttatgatataggctgatattgacataagtggttttgcttgctgatatctgctgtacttctgaatagaacattgctttgttcctaaaacagtagggttggcagtagactctcatttcagtggcattatacatttctttgtactggttgaagtcctgt

SEQ ID NO: 27276 - DNA, 157 bp, Homo sapiens
  MAP TO CHR16.3; EXPRESSED IN BONE MARROW, SIGNAL = 0.71; SWISSPROT HIT: Q11158, EVALUE 1.50e+00; EST_HUMAN HIT: BI764776.1, EVALUE 2.00e-01; NT HIT: gi16164740, EVALUE 2.00e-83
gaggacagcgccatccggtgtgggcagctggacctgcttcaggactggctggctgatttccgaaaatctacctcctcgtccagcgcagccaaccccgaggagctggtggcatttgacgtcgtctgtggagatttcaactttgataactgctcctctg

SEQ ID NO: 27277 - DNA, 76 bp, Homo sapiens
  MAP TO CHR18.3; EXPRESSED IN BONE MARROW, SIGNAL = 1.1; EXPRESSED IN FETAL LIVER, SIGNAL = 0.97; EST_HUMAN HIT: BE541157.1, EVALUE 1.30e+00; SWISSPROT HIT: P27977, EVALUE 8.20e+00
cccttggtgtggtccttttgtacattggtgccttttgggccgtgcttggctggccaatcataccgtgaatttgcat

SEQ ID NO: 27278 - DNA, 101 bp, Homo sapiens
  MAP TO CHR19.3; EXPRESSED IN BONE MARROW, SIGNAL = 0.85; SWISSPROT HIT: O75437, EVALUE 4.00e-12; EST_HUMAN HIT: BF684277.1, EVALUE 6.00e-50; NT HIT: gi15627000, EVALUE 1.00e-37
gtattgctgtctctaagccagacctgatcacctgtctggagcaaggcaaagagccctggaatatggagagacatgagatggtggccaaacccccaggtagg

SEQ ID NO: 27279 - DNA, 184 bp, Homo sapiens
  MAP TO CHR18.3; EXPRESSED IN BONE MARROW, SIGNAL = 0.99; SWISSPROT HIT: Q15849, EVALUE 4.00e-17; NT HIT: AF349446.1, EVALUE 3.00e-95
ctattcaccgctgggggccttctcttcttcaccgcttttcactgtcaggtagtagatgcggttggcctcggggtaggtgactttgctgagtgggagtctgaagatggctgggttgtttgtcgtcaggagcaggaagatgatggtggcaaggcagaaggcccaggtgcctggtggcacgcccacc

SEQ ID NO: 27280 - DNA, 140 bp, Homo sapiens
  MAP TO CHR14.3; EXPRESSED IN BONE MARROW, SIGNAL = 0.7; NT HIT: M94081.1, EVALUE 3.00e-73; EST_HUMAN HIT: BG006370.1, EVALUE 2.80e+00; SWISSPROT HIT: P35367, EVALUE 1.20e+00
ctttaacattgtgcttagccctctttcttctagagagatatggggccatgagctatttacagccgcagtatctcttaaactatgttctgcaatgacttgtgtgtttactctgattttagccacagaatttgttttccatt

SEQ ID NO: 27281 - DNA, 118 bp, Homo sapiens
  MAP TO CHR18.3; EXPRESSED IN BONE MARROW, SIGNAL = 0.72; EST_HUMAN HIT: BI859303.1, EVALUE 1.40e-01; NT HIT: AF191309.1, EVALUE 6.00e+00
gggcagtaaccaaggtggtgagaactggtaagagagtgaaatcaagatccaggaagcttggagaagtaacaaacaggaaagcagctggtgtagatgagggctttggagagtttcagag

SEQ ID NO: 27282 - DNA, 271 bp, Homo sapiens
  MAP TO CHR14.3; EXPRESSED IN BONE MARROW, SIGNAL = 0.62; NT HIT: gi9628433, EVALUE 2.50e-01; SWISSPROT HIT: P04922, EVALUE 8.50e-02; EST_HUMAN HIT: BI833374.1, EVALUE 7.00e-18
aagcagccatgggagacttgccgaggactttgtccaccaagtgatgaaagcatgcaaatgcctccgaatcaaaggtaaatcaaaagaaaatggcagcccgcaagaggaggcggcggtgacagcccgtcagccgtacagccacccgacaggcctggtggcagcgtggaggctgccaagagaaccgcctgaggaggctgccgccaagacagatgtcacggcgaggagggcgcgcttccgtcgctttcggcggggcctcatggagcaggaagtg

SEQ ID NO: 27283 - DNA, 150 bp, Homo sapiens
  MAP TO CHR14.3; EXPRESSED IN BONE MARROW, SIGNAL = 1.1; NT HIT: AB018479.1, EVALUE 1.30e-01; SWISSPROT HIT: P80202, EVALUE 5.80e+00
agatctactcctggatgcgggtacaggacagcatccccagactgtttgtaaagtctcatgtgatacatggagggcaggcctcctcagctgaagagacctggcaaaatcacaataaatcatgtgatgcaggaggagggcacacagcttggt

SEQ ID NO: 27284 - DNA, 325 bp, Homo sapiens
  MAP TO CHR18.3; EXPRESSED IN BONE MARROW, SIGNAL = 0.75; NT HIT: AB040292.1, EVALUE 3.00e-01; EST_HUMAN HIT: BF701290.1, EVALUE 7.00e-03; SWISSPROT HIT: Q61982, EVALUE 3.10e+00
agcaatctccctgcccccaaattggaatctgctgtcaggtgcaagggatttcacaatctcctctcccacctttgtctccagtcttctaggtgatttgctgatctcactgtcctgtgggccggggtatggatgtcctgggagaggggcacagctcaggggcctgacagttaaaacactgacactgatgagagccctttcctcccacacagccaaggctgatgccacagggagccgcagcctcaaacccgctggaggtagagggtggaatgaaggttatgatgaaaggaatgcaaaacatgccttcagacccctgcccagactgaag

SEQ ID NO: 27285 - DNA, 81 bp, Homo sapiens; identical to SEQ ID NO: 21419
  MAP TO CHR18.3; EXPRESSED IN BONE MARROW, SIGNAL = 0.82; EST_HUMAN HIT: BI084863.1, EVALUE 1.00e-37; SWISSPROT HIT: Q99747, EVALUE 6.00e-09; NT HIT: gi14763395, EVALUE 1.00e-37

SEQ ID NO: 27286 - DNA, 108 bp, Homo sapiens
  MAP TO CHR18.3; EXPRESSED IN BONE MARROW, SIGNAL = 1.2; NT HIT: AF203701.1, EVALUE 3.50e-01
gtcctaacgaccgtgatctactctcacttttcacttaatttcaatgactttacatccgtctgttccagcacctgttgtatgaaatctaagttattcttagagataaag

SEQ ID NO: 27287 - DNA, 121 bp, Homo sapiens
  MAP TO CHR16.3; EXPRESSED IN BONE MARROW, SIGNAL = 0.72; NT HIT: gi16178836, EVALUE 1.00e-01; SWISSPROT HIT: P34518, EVALUE 2.70e+00; EST_HUMAN HIT: BF684684.1, EVALUE 1.50e-01
caaagtgggccacacggagctgcagctgtacgagatgtctggattctcccagtcagcaaagagttgggaacagggtggtcacagaggagccaagccagggcagaaagatgtctccattcag

SEQ ID NO: 27288 - DNA, 406 bp, Homo sapiens
  MAP TO CHR14.3; EXPRESSED IN BONE MARROW, SIGNAL = 0.96; SWISSPROT HIT: Q9WUV4, EVALUE 2.00e-06; EST_HUMAN HIT: BI828869.1, EVALUE 0.00e+00; NT HIT: AB026898.1, EVALUE 3.80e-01
tattggatcagcttcatacttgcgggagcagagtaggtagagcttctggttggttagggtgctattgtagtagcagctagtgggtggctgttggtggctcagggagcagaccgtgatggggagggaatcctgggtgagtgtgcagtattcattgtaattctcacagaagctgtcactatacttgcagaacttctggatggccttccaaggggcatgtatcacataatggatctttgggcaatctgaattttgcatcttgcctcgcatataggacatcagaccattacaatagccccggaaaccctttgggtagttaaccctgggatagtcaatgcttaaggtatagaagttcctgctgccaatctgcatcttgatgtccatgaccagagttggccccagaacaagc

SEQ ID NO: 27289 - DNA, 147 bp, Homo sapiens
  MAP TO CHR14.3; EXPRESSED IN BONE MARROW, SIGNAL = 1.4; SWISSPROT HIT: P58106, EVALUE 2.60e+00
aaaggcagagactgggacaatagatatttaataaacacagatactattgacaagtttactaaaacaactattaaatctttaggtttatggaggattcaaaacaattttgtcttagacatgaacctcaccagggacatgagggacaag

SEQ ID NO: 27290 - DNA, 109 bp, Homo sapiens
  MAP TO CHR18.3; EXPRESSED IN BONE MARROW, SIGNAL = 1.2; NT HIT: gi14764388, EVALUE 3.00e-54; EST_HUMAN HIT: BG189543.1, EVALUE 1.00e-51; SWISSPROT HIT: P70211, EVALUE 2.00e-14
cccccacctctgctcccaaggacttgacagtcattactagggaagggaagcctcgtgccgtcattgtgagttggcagcctcccttggaagccaatgggaaaattactgg

SEQ ID NO: 27291 - DNA, 185 bp, Homo sapiens
  MAP TO CHR18.3; EXPRESSED IN BONE MARROW, SIGNAL = 1.5; SWISSPROT HIT: Q14627, EVALUE 2.50e+00
taagtatcagtattagtaagggcatttggaatgtcagaactgcagctggtcagaaatagtacacttctgttcaggaaaatggcagagaatgtgtatgtctcctccaaagctaagacaaattccacagactcttgttttctctgaaggaatagagtgagtacatattgcacattctgactgaaggt

SEQ ID NO: 27292 - DNA, 101 bp, Homo sapiens
  MAP TO CHR14.3; EXPRESSED IN BONE MARROW, SIGNAL = 0.79; EST_HUMAN HIT: BE742441.1, EVALUE 1.90e+00; NT HIT: AF283321.1, EVALUE 3.20e-01
ctgagattaggagacatagagaccttaatatggtgaggagaataaactgccaagaaaattctattcataaattccagaggctggatgtgtttctccagagg

SEQ ID NO: 27293 - DNA, 125 bp, Homo sapiens
  MAP TO CHR16.3; EXPRESSED IN BONE MARROW, SIGNAL = 0.63; NT HIT: Y16275.1, EVALUE 1.60e+00; SWISSPROT HIT: P20154, EVALUE 9.00e-01
gaatttccgtaggttgagatactcaatgcttatctgtgcatcacgcagccggggccccctctgctttggaatggtctcatcggctctgtccagtttcccacagtccttctctctatcttccaagt

SEQ ID NO: 27294 - DNA, 102 bp, Homo sapiens
  MAP TO CHR14.3; EXPRESSED IN BONE MARROW, SIGNAL = 1.7; EST_HUMAN HIT: R54273.1, EVALUE 4.80e-01; NT HIT: AB026497.1, EVALUE 8.20e-02
aagttgatgcccatcttacaaggagggccagaaaaagggaacaaggcacacagaggtatcctcagagctgatggatggctgctggcagatgcccagaaacag

SEQ ID NO: 27295 - DNA, 126 bp, Homo sapiens
  MAP TO CHR14.3; EXPRESSED IN BONE MARROW, SIGNAL = 0.78; EST_HUMAN HIT: AL600341.1, EVALUE 4.00e-02; SWISSPROT HIT: Q9Y2N3, EVALUE 6.00e+00
aggaagtgcctccatggcccacttcttccctatctccatcccagaacccttgcttggagaacttgctgaagaagctgccagcctcagggacagagcactggttctggcctcttcactgacctcacg

SEQ ID NO: 27296 - DNA, 157 bp, Homo sapiens
  MAP TO CHR18.3; EXPRESSED IN BONE MARROW, SIGNAL = 0.89; NT HIT: U19567.1, EVALUE 2.00e-83; SWISSPROT HIT: P29508, EVALUE 5.00e-24; EST_HUMAN HIT: AW382741.1, EVALUE 5.00e-67
aatacatacaagtccatacagatgatgaggcaatacacatcttttcattttgcctcgctggaggatgtacaggccaaggtcctggaaataccatacaaaggcaaagatctaagcatgattgtgttgctgccaaatgaaatcgatggtctccagaagg

SEQ ID NO: 27297 - DNA, 137 bp, Homo sapiens
  MAP TO CHR19.3; EXPRESSED IN BONE MARROW, SIGNAL = 0.93; NT HIT: AE004873.1, EVALUE 1.20e-01; EST_HUMAN HIT: BI830560.1, EVALUE 8.00e-13; SWISSPROT HIT: P00519, EVALUE 2.60e+00
ctggagtccctggctccgggcttccctccgcgtgctgctgctcctccaggtcccccccggtggctctcgcgcgcccccaggcggccacgtcgcggagcagctccgtcacgttgtgttgagtgatctccccggccgtc

SEQ ID NO: 27298 - DNA, 204 bp, Homo sapiens
  MAP TO CHR19.3; EXPRESSED IN BONE MARROW, SIGNAL = 1.1; SWISSPROT HIT: P31695, EVALUE 1.40e+00; NT HIT: gi13518031, EVALUE 4.60e-02; EST_HUMAN HIT: AA733070.1, EVALUE 4.20e+00
ctctccttctggagtttctcccctggcctccagctgcttctgcggacagctcagatctggagtgagagctgcctgccaggggcttttataccagagggtgtctccacccaccttagccacaccctttccctcctttttaatccaatcagattctgatttcattctgccatcattgagattgttactattggacaggtttttacc

SEQ ID NO: 27299 - DNA, 400 bp, Homo sapiens
  MAP TO CHR16.3; EXPRESSED IN BONE MARROW, SIGNAL = 0.68; NT HIT: AL161564.2, EVALUE 1.50e+00; SWISSPROT HIT: Q69014, EVALUE 1.10e+00; EST_HUMAN HIT: BG703513.1, EVALUE 1.40e-01
actacacctctgccattcaaagaggggtcacccaaggaagggacaaccttaaaggtgctggatctcccaccagattccctaaggagtcagactccccactggagtcagactgtacctagcatcaatgctcctctccatcagaaagccaagcaggaagaggcacccaaggcatcatttctggttttgaaacaggttcccttgtagccattctctgatatggagtctttcactttccttcttgaattgttttcatggcagaagcgcatgccctgtgggtaatttatggaagcaatacaggcataaccaagcttgagtcccactctctcctttttgatgagattcccaaactggccctaacaattacaagtgagaaagacgtggccctttctgtctccaggac

SEQ ID NO: 27300 - DNA, 181 bp, Homo sapiens
  MAP TO CHR18.3; EXPRESSED IN BONE MARROW, SIGNAL = 0.77; SWISSPROT HIT: O52340, EVALUE 3.80e-01; EST_HUMAN HIT: AL603335.1, EVALUE 9.30e-01; NT HIT: AJ278435.1, EVALUE 4.10e-02
ttcatcagagtttcttttttgttgttgttgtttcggggaataacttttgaagacacaggacacttgtccatcctggatgttctgccttcacatttcattgtttgcttgctgtttttgatgttaattgtgttcctttcctttatatctttgattctagaagatataactggtgtaatggact

SEQ ID NO: 27301 - DNA, 181 bp, Homo sapiens
  MAP TO CHR16.3; EXPRESSED IN BONE MARROW, SIGNAL = 0.65; SWISSPROT HIT: P96949, EVALUE 1.90e+00
aacgcccctgaaattacattcatatctgtaatcagaattgctaatatctcccctccctccaccatcctggtgtcatctgattttcattcctttgaggtgactaagagtctagtcattaatgtaacacccaccaactttattggaagttaccgtcagaaagatctgtttccaaaaactctgt

SEQ ID NO: 27302 - DNA, 298 bp, Homo sapiens
  MAP TO CHR14.3; EXPRESSED IN BONE MARROW, SIGNAL = 1.1; NT HIT: Z99118.1, EVALUE 4.30e+00; SWISSPROT HIT: P36366, EVALUE 7.80e+00; EST_HUMAN HIT: BG548834.1, EVALUE 6.30e+00
ctgaattttttcattggagattgcttttcttgagcagtggctagatgaccagaataatagactgggaaaaacataatgttccagtttgttgaaaaccaagtcatgaaaaatgggcaatagaagttcttataagtaatttttacaatctgtgtagttccaacccaagatgatgatactgacaagatgatcaagagtccccagatgcccttcagaaccatggacgtgcaggacaggcagcgagccttgattctgttttcttggctgctgttctcagaatgagtctgtgtcccatcgtctg

SEQ ID NO: 27303 - DNA, 137 bp, Homo sapiens
  MAP TO CHR14.3; EXPRESSED IN BONE MARROW, SIGNAL =   1; EST_HUMAN HIT: BE672498.1, EVALUE 6.80e-01; NT HIT: AE004132.1, EVALUE 7.20e+00; SWISSPROT HIT: P27636, EVALUE 4.00e-01
ctgccctgtaaaggctggccctttgccagtgctgagcttggggctagatgtaagggtggttctctcactaaaaggcagtgtgagtttgtgaagatgatcatccgaagaggaaatctgcacatgagactttttaaatc

SEQ ID NO: 27304 - DNA, 482 bp, Homo sapiens
  MAP TO CHR14.3; EXPRESSED IN BONE MARROW, SIGNAL = 1.3; SWISSPROT HIT: P80192, EVALUE 9.00e-73; EST_HUMAN HIT: AA160611.1, EVALUE 4.00e-76; NT HIT: AF251442.1, EVALUE 0.00e+00
cctactgacgtcgtgggatacaactgcaactgctctgagcccctccagccccatctcttcatactcactgttgctggacttaaggtcgcggtggatgatgggaacaattgcctcatcatgtaagtagttcatccctctggcaatctgcacagcccaattcaccaggatgtctgggggaatccttttcccagataacactctattcaaaggtcctccacgagcaaactccatgaccaagcagaggttgggctccttcagacatacccctcttagggcaatgatgttggggtgcttcagcatggcgaagagcttggcctcttggcgaacattctctatggtctggctgatgtcctcatcagggtcgtggcgagctgctttcacagcaacctcatcccctatccagaaagcacgatagaccttcccaaagcccccgatgccaataatctcttccaaggtgagctccgcaaaatcaatttctaaca

SEQ ID NO: 27305 - DNA, 187 bp, Homo sapiens
  MAP TO CHR19.3; EXPRESSED IN FETAL LIVER, SIGNAL =   1; SWISSPROT HIT: P34683, EVALUE 2.90e-01; NT HIT: gi16163207, EVALUE 1.00e-100; EST_HUMAN HIT: AL543219.1, EVALUE 2.00e-85
ccttgaggagggagggagttcagcagaacgctgctgctgctggcactattgcacaggtccgaggagcagaagtgggtataggaggccacaagcaccccaggaggggctgagtggatggtggtcttctgggaattttgagccccaacagcgctgcagctttaggtcgccaccagggttgatgtgagtc

SEQ ID NO: 27306 - DNA, 77 bp, Homo sapiens
  MAP TO CHR18.3; EXPRESSED IN FETAL LIVER, SIGNAL = 0.93; EST_HUMAN HIT: AV711239.1, EVALUE 3.30e-01; NT HIT: AB026584.2, EVALUE 2.30e-01
caaaggaaatactgattatgattcacagcatcttctgcagggagaatttcttcatgtttgtattttgattgtggatc

SEQ ID NO: 27307 - DNA, 102 bp, Homo sapiens
  MAP TO CHR18.3; EXPRESSED IN FETAL LIVER, SIGNAL = 1.3; NT HIT: U59879.1, EVALUE 8.20e-02; EST_HUMAN HIT: BF128329.1, EVALUE 1.90e+00
tgctaagaagaatatgtgcaaaagtaaagaggagagaaatcagaaagatttaagtgaagagaatgatctgttcaagatggtggtgaataggacaccaacaag

SEQ ID NO: 27308 - DNA, 208 bp, Homo sapiens
  MAP TO CHR14.3; EXPRESSED IN FETAL LIVER, SIGNAL = 0.85; SWISSPROT HIT: P45476, EVALUE 3.20e+00; NT HIT: AB040958.1, EVALUE 1.00e-113; EST_HUMAN HIT: BF365425.1, EVALUE 1.00e-80
tgtaggtagtcagactggatagcagtaagcagatggtctttgctgagttcataaaaaacatccgaagtcatgacctgggaaaattcctcacagaggaaatgtaaagcttgtcggtgcacccatttagagccatatggatgagaactccacttgaggatggcaattaaggtatctaatgagatgctctcagcaatgatatcctcacagc

SEQ ID NO: 27309 - DNA, 265 bp, Homo sapiens
  MAP TO CHR19.3; EXPRESSED IN FETAL LIVER, SIGNAL = 0.87; SWISSPROT HIT: P16403, EVALUE 7.10e-01; NT HIT: gi15309008, EVALUE 0.00e+00; EST_HUMAN HIT: AI377385.1, EVALUE 0.00e+00
gggcccaaagctcagtcggacaagtgcgttcctgaccgagatcctcgctgggaggtgctggatgtcaccaagaaggtggtggccagcccccggatcatctccctggccaagcccaaagtgcgcaagggcctcaacgagggatacgacaggcgtcccctcgcctctatgagcttgccacccccaaaagcatcaccagaaaagtgtgatcaacccaggcctggcctctaagacctccgctcccagtaaacaccctcaggcaccctaa

SEQ ID NO: 27310 - DNA, 168 bp, Homo sapiens
  MAP TO CHR14.3; EXPRESSED IN FETAL LIVER, SIGNAL = 0.98; SWISSPROT HIT: P56658, EVALUE 1.50e+00; NT HIT: AL163300.2, EVALUE 1.50e-01
tggtggtggaatgggtctgggatggcaaacgtatgtcctggaactactacctccctgctctggcagcctgtggccccagagacaggctcaagagaatatctgcaaagtttccccacccctgcctaatcccaccccatccccacatcactcaaaacaagacgggtgcag

SEQ ID NO: 27311 - DNA, 252 bp, Homo sapiens
  MAP TO CHR19.3; EXPRESSED IN FETAL LIVER, SIGNAL = 2.8; EST_HUMAN HIT: AV715152.1, EVALUE 0.00e+00; SWISSPROT HIT: Q05315, EVALUE 8.00e-18; NT HIT: gi6325464, EVALUE 0.00e+00
ggtaatggtcaatggccaatcctcttacacctttgaccatagaatcaagcctgaggctgtgaagatggtgcaagtgtggagagatatctccctgaccaaatttaatgtcagctatttaaagagataaccagacttcatgttgccaaggaatccctgtctctacgtgaacttgggattccaaagccagctaacagcatgatcttttctcacttcaatccttactcctgctcattaaaacttaatcaaacttca

SEQ ID NO: 27312 - DNA, 219 bp, Homo sapiens
  MAP TO CHR19.3; EXPRESSED IN FETAL LIVER, SIGNAL = 2.8; SWISSPROT HIT: P36776, EVALUE 3.00e-37; NT HIT: gi14759084, EVALUE 1.00e-120; EST_HUMAN HIT: BG280967.1, EVALUE 1.00e-120
ggaggctccacgctgtttgtggagacatccctgagacggccacaggacaaggatgccaagggtgacaaggatggcagcctggaggtgacaggccagctgggggaggtgatgaaggagagcgcccgcatagcctacaccttcgccagagccttcctcatgcagcacgcccccgccaatgactacctggtgacctcacacatccacctgcatgtgcccgag

SEQ ID NO: 27313 - DNA, 124 bp, Homo sapiens
  MAP TO CHR18.3; EXPRESSED IN FETAL LIVER, SIGNAL = 0.81; EST_HUMAN HIT: AL542317.1, EVALUE 9.50e+00; NT HIT: AE006597.1, EVALUE 4.10e-01
tagacatgccatctgagatgaccttagtagaaataacaatggcaatgataacagctccgcagccttttccctggcataagaaactagttttgtaatgaaaatggaatttctctggggaatagtc

SEQ ID NO: 27314 - DNA, 160 bp, Homo sapiens
  MAP TO CHR18.3; EXPRESSED IN FETAL LIVER, SIGNAL = 1.4; NT HIT: gi14726799, EVALUE 1.40e-01; SWISSPROT HIT: P80193, EVALUE 2.00e+00; EST_HUMAN HIT: AU137542.1, EVALUE 2.10e-01
tcattgagaggcatttacatttgtggtgttgcctccaggataaacaacgatggcaacaacactgaccacaacaacataaacactgctcgcaattgggctgaagataaactgaatcccttccattggttgtggaagaggaataatgcgggtatggaggggt

SEQ ID NO: 27315 - DNA, 175 bp, Homo sapiens
  MAP TO CHR16.3; EXPRESSED IN FETAL LIVER, SIGNAL = 0.96; SWISSPROT HIT: P35373, EVALUE 5.70e+00; EST_HUMAN HIT: AI460158.1, EVALUE 2.30e-01
agcaggctgtggaaagggcacggggtgagcatgtctttatgacattattgatttattctccacctgcagttaaaaaccatgcccagacagacaataaaaataagtacttaaccgtatcgcaagctctgccgactgaaatggattttacacttaaagatacagctgatctgggtga

SEQ ID NO: 27316 - DNA, 296 bp, Homo sapiens
  MAP TO CHR16.3; EXPRESSED IN FETAL LIVER, SIGNAL = 0.86; EST_HUMAN HIT: AI650367.1, EVALUE 0.00e+00; SWISSPROT HIT: P55286, EVALUE 6.00e-53; NT HIT: gi16306538, EVALUE 0.00e+00
cccaaaatggacatttctggcacagtagcatgatagggtccattaagaaactctggtgcattgtcattgatgtcttgaactttaataataaattcagaaggaggctccagaggtttgcttgtctcccagtccactgcttgagctgttagggtatactcagccttttcctcccggtcaagtctttttatagcatggatatctccagttacatcatttatttgaaatatggtcccagctccatcacctgataggatatacttgatttttttgctcccaggatccaggtctgtgtgtag

SEQ ID NO: 27317 - DNA, 128 bp, Homo sapiens
  MAP TO CHR16.3; EXPRESSED IN FETAL LIVER, SIGNAL = 0.76; NT HIT: AB002296.2, EVALUE 6.60e+00; SWISSPROT HIT: P43571, EVALUE 1.50e+00; EST_HUMAN HIT: BG831468.1, EVALUE 1.00e-02
ttgacattttactggccctgggagtggagagaaatgcaggcttcctagtcacacagagaaaagaaatgttttcctctgtgcaaagagagacccaagagacacggtttgaacaagaagtgtgcagataa

SEQ ID NO: 27318 - DNA, 214 bp, Homo sapiens
  MAP TO CHR19.3; EXPRESSED IN FETAL LIVER, SIGNAL = 0.85; NT HIT: gi14785849, EVALUE 2.00e-78; SWISSPROT HIT: P04474, EVALUE 5.60e-01; EST_HUMAN HIT: BI767400.1, EVALUE 3.00e-78
ctgcttcctaggccttggccactgacctcctccatggggcccagctgctccagcccggagctcaccggaggtggggcaaagctgggcttggagctcccactggctgcctcgacctcctctgaactctcagccacgggatccagttcaccctgcaaatgacccccggggccctgctctgagccaggcaggacaggaccttggggtccccaggatc

SEQ ID NO: 27319 - DNA, 231 bp, Homo sapiens
  MAP TO CHR14.3; EXPRESSED IN FETAL LIVER, SIGNAL = 0.79; SWISSPROT HIT: P31111, EVALUE 1.90e-02; EST_HUMAN HIT: BG204575.1, EVALUE 1.00e-127
ttacacaaatctttatctcaagaagaaaatctgaaggatcagtttaactatacccttagtacatatgaagaagctttaaaaaacagagagaacattgtttccatcactcaacaacaaaatgaggaactggctactcaactgcaacaagctctgacagagcgagcaaatatggaattacaacttcaacatgccagagaggcctcccaagtggccaatgaaaaagttcaaaag

SEQ ID NO: 27320 - DNA, 116 bp, Homo sapiens
  MAP TO CHR16.3; EXPRESSED IN FETAL LIVER, SIGNAL = 0.85; EST_HUMAN HIT: AL575478.1, EVALUE 1.00e-57; NT HIT: gi15318267, EVALUE 5.00e-59; SWISSPROT HIT: P80457, EVALUE 4.60e+00
atcgggcagtacatcatgtccctccccctgaatcttgagccatttgtgactcaggaggactctgccttagagttggcattgcacgctggaaagctgccatttcctcctgagcaggg

SEQ ID NO: 27321 - DNA, 159 bp, Homo sapiens
  MAP TO CHR18.3; EXPRESSED IN FETAL LIVER, SIGNAL = 0.98; SWISSPROT HIT: P42223, EVALUE 3.40e+00; NT HIT: gi14763685, EVALUE 3.50e-02; EST_HUMAN HIT: BF434241.1, EVALUE 5.20e-02
tacttcagcatttcttctgatgtatggcccaaattctgcttcagtgagtcttgctcaaaactcatttctttggtgaaccatcctctaatctcatatgaccacaggctctccttagaccgaagctcccagacatggtctttgaaaaatgacatcataatc

SEQ ID NO: 27322 - DNA, 119 bp, Homo sapiens
  MAP TO CHR16.3; EXPRESSED IN FETAL LIVER, SIGNAL = 1.7; NT HIT: AB011116.1, EVALUE 3.00e-60; SWISSPROT HIT: P34111, EVALUE 7.90e+00; EST_HUMAN HIT: AW163026.1, EVALUE 5.00e-60
ctcgtcatccttccattccgagaagtcaatcttgaaggagggcagggagaactgctggctcacccctctcttgtagtggacggtctcggactgtagcgaggggctcttggggctgtatc

SEQ ID NO: 27323 - DNA, 149 bp, Homo sapiens
  MAP TO CHR19.3; EXPRESSED IN FETAL LIVER, SIGNAL = 3.1; SWISSPROT HIT: Q9CDR5, EVALUE 2.60e+00; NT HIT: gi15302005, EVALUE 2.00e-52; EST_HUMAN HIT: BE005931.1, EVALUE 4.00e-52
cagcaggagctggcgggttggttgggggtcccaggcccactcaccatgatgtaggcattcctattaaggaatttgatgaacttctccaggcaccagaagcagcatttgagacaggtcatgaggcacttggcaaacttgttctctgcagc

SEQ ID NO: 27324 - DNA, 368 bp, Homo sapiens
  MAP TO CHR14.3; EXPRESSED IN FETAL LIVER, SIGNAL = 0.87; EST_HUMAN HIT: AW582001.1, EVALUE 5.10e-01; SWISSPROT HIT: P27890, EVALUE 2.90e+00; NT HIT: AF097643.1, EVALUE 1.40e+00
tgttcagcagctatttgagaagcttacccagctgcttggagtttttaaaatctgactaccaaagaagagccataacagccccaacaatcgcactctatggcaagcacgatgaaaaagctgtagagatccttcgttttacctaccacattgttaaagaggcatgtgaaagaaactgtgggaacatgaaagaaaccctgggtgagaaacaagccaagagaaaacctaaagccgcctgtcacttgcgccactcgccgccaaagctgtgggtgctgatagcattattgtttaatctctctgaagaatatgtgggagcagaaagcacaacatccccaagttgttactttgtcacaactttacagaatacataa

SEQ ID NO: 27325 - DNA, 120 bp, Homo sapiens
  MAP TO CHR19.3; EXPRESSED IN FETAL LIVER, SIGNAL = 4.5; SWISSPROT HIT: Q14773, EVALUE 7.00e-16; EST_HUMAN HIT: BF868352.1, EVALUE 3.00e-61; NT HIT: X93093.1, EVALUE 2.00e-61
gcttggagccccgcgcccacagctttggcctccggttccatcgctgcccttgtagggatcctcctcactgtgggcgctgcgtacctatgcaagtgcctagctatgaagtcccaggcgtaa

SEQ ID NO: 27326 - DNA, 193 bp, Homo sapiens
  MAP TO CHR14.3; EXPRESSED IN FETAL LIVER, SIGNAL = 0.88
ttatcctaaatctcctttgtaaaatttgatgcctagtaatggaccacaggatttaatcagctcctgctcttctttcaacagccttaattcttcttctttcttcatgactgagatcactaaagcgaccttaccgtgctcctttgccatcttcctcttctcctcttttcttgcttcttctttttcactctcttgc

SEQ ID NO: 27327 - DNA, 178 bp, Homo sapiens
  MAP TO CHR19.3; EXPRESSED IN FETAL LIVER, SIGNAL =   2; EST_HUMAN HIT: AL527685.1, EVALUE 2.00e-94; SWISSPROT HIT: Q14145, EVALUE 1.00e-30; NT HIT: AF361891.1, EVALUE 8.00e-96
ggcgtctgcgtcctgcacaactgtatctatgctgctgggggctatgatggtcaggaccagctgaacagcgtggagcgctacgatgtggaaacagagacgtggactttcgtagcccccatgaagcaccggcgaagtgccctggggatcactgtccaccaggggagaatctacgtccttg

SEQ ID NO: 27328 - DNA, 122 bp, Homo sapiens
  MAP TO CHR18.3; EXPRESSED IN FETAL LIVER, SIGNAL = 0.78; SWISSPROT HIT: Q90935, EVALUE 3.10e-01; EST_HUMAN HIT: R65677.1, EVALUE 5.90e-01
ctcatatctcccaatcagctggtgttggttaatgccatctccttcagagagaaccagaaaaatgcacttcagaaagaccaaacaaaagcaatggctttcacgttggatgaggtggtctcatg

SEQ ID NO: 27329 - DNA, 212 bp, Homo sapiens
  MAP TO CHR14.3; EXPRESSED IN FETAL LIVER, SIGNAL = 1.2; EST_HUMAN HIT: AU130622.1, EVALUE 2.00e-88; SWISSPROT HIT: P14682, EVALUE 9.50e-01; NT HIT: gi14753315, EVALUE 1.00e-115
ccaactgagttttcatcatcttctaggatgtgacttcgctgtctaggacgacctgaagccatcatgaggtcttcatcatcctcatcatcatttataatcccttttgaaaaagaagggatctcaactgcattgtcatttagaaaatcaccagcattactcatatcatctccatcaaaaagatcattataatccttttccactctgctagatac

SEQ ID NO: 27330 - DNA, 137 bp, Homo sapiens
  MAP TO CHR19.3; EXPRESSED IN FETAL LIVER, SIGNAL = 0.86; SWISSPROT HIT: P05227, EVALUE 1.30e-01; EST_HUMAN HIT: BF771112.1, EVALUE 1.00e-70; NT HIT: gi16175862, EVALUE 7.00e-71
gtgaacgggcagaatgtggtgaaggtcggccaccgacaggtggtgaacatgatccgccaagggggcaacacgctgatggtgaaggtggtgatggtcaccaggcacccggacatggatgaggcagtgcacaagaaagg

SEQ ID NO: 27331 - DNA, 185 bp, Homo sapiens
  MAP TO CHR16.3; EXPRESSED IN FETAL LIVER, SIGNAL =   1; EST_HUMAN HIT: AA758938.1, EVALUE 2.00e-75; SWISSPROT HIT: P20959, EVALUE 8.50e-01; NT HIT: AF399755.1, EVALUE 2.00e-34
gtgaggaagacgtaccaaagcgaagatgttttgtgtttcctcaggatgccaagtttgtggaggaacggagaaagcagctccagaattacctgcgcagcgtcatgaacaaagtcatccagatggtccccgagttcgctgccagccccaagaaggagaccctcatccagctgatgcccttcttcgtg

SEQ ID NO: 27332 - DNA, 469 bp, Homo sapiens
  MAP TO CHR18.3; EXPRESSED IN FETAL LIVER, SIGNAL =  45; EST_HUMAN HIT: AV735692.1, EVALUE 0.00e+00; SWISSPROT HIT: P29316, EVALUE 5.00e-43; NT HIT: U43701.1, EVALUE 0.00e+00
ttagatgatcccaattttgttggcaacatccaaagcattgtaatcaggagccagttgaacatatgccttcttctctccatcaggcctaatcagggtgttgactttggccacatcaatgtcatagagcttcttcacagcctgtttgatttggtgtttgttggctttaacatccacaacgaacacaagtgtgttgctgtcttctatcttcttcatggcggactcagtggtcagcagaaacttgatgatagcatagtggtcaagcttgttctcctgggggcgctctgccgaggatatttgggctgcctctggagtcgccgtgtcgtgggccgccggaaggtgggtgacgtgcagatctttttttgtgtggctgtggacacctttaaacactgccttcttggccttcaaaaccttcgttttggcttcagctttaggagggacaggagcttccttcttcgccttcggcgccatc

SEQ ID NO: 27333 - DNA, 260 bp, Homo sapiens
  MAP TO CHR16.3; EXPRESSED IN FETAL LIVER, SIGNAL = 2.3; NT HIT: gi16164691, EVALUE 0.00e+00; EST_HUMAN HIT: BE880870.1, EVALUE 0.00e+00; SWISSPROT HIT: P14943, EVALUE 3.00e-37
gcactggagacaagcacgcaaccggcaactggggctacctggaccaagtggctgcactacgctgggtccagcagaatatcgcccactttggaggcaaccctgaccgtgtcaccatttttggcgagtctgcgggtggcacgagtgtgtcttcgcttgttgtgtcccccatatcccaaggactcttccacggagccatcatggagagtggcgtggccctcctgcccggcctcattgccagctcagctgatgtcatctccacg

SEQ ID NO: 27334 - DNA, 201 bp, Homo sapiens
  MAP TO CHR18.3; EXPRESSED IN FETAL LIVER, SIGNAL = 1.5; EST_HUMAN HIT: BI551289.1, EVALUE 6.70e-02; NT HIT: gi15304463, EVALUE 7.10e-01; SWISSPROT HIT: O15105, EVALUE 9.50e+00
cggtgcagagcagcggcaggaaaacagaatcatcaggagagagaagttacttcaatttccttgtaaatgagtcatgtaaggctgacatcatagtgacaaatgcaaacttacttcagaaaacaccatcatgggtaatgttcctgaggtggtggtggctggtcaagggagctcaggcggcaggtctgccagactcggtagaaa

SEQ ID NO: 27335 - DNA, 82 bp, Homo sapiens
  MAP TO CHR18.3; EXPRESSED IN FETAL LIVER, SIGNAL = 0.96; NT HIT: AJ223835.1, EVALUE 9.90e-01; EST_HUMAN HIT: BI056251.1, EVALUE 5.70e+00
attttcaacttacgtcagttatgttcacagaatatgaaaattctatgaccacacatgttcggtcagccctgccctttgacag

SEQ ID NO: 27336 - DNA, 171 bp, Homo sapiens
  MAP TO CHR14.3; EXPRESSED IN FETAL LIVER, SIGNAL = 0.94; SWISSPROT HIT: Q13568, EVALUE 4.40e+00; EST_HUMAN HIT: AI125129.1, EVALUE 8.80e-01
attgaagctattaacatgaatattgaccagttacgtgttttatttacatacatctatgttctcccctgtgacctagataagtccagttgttgggcagctgagctctgcagtaatggcccaaaatggacagagcagactcatcctcaaaatcaaaacacggcaaagggatga

SEQ ID NO: 27337 - DNA, 122 bp, Homo sapiens
  MAP TO CHR18.3; EXPRESSED IN FETAL LIVER, SIGNAL = 1.5; NT HIT: gi15304054, EVALUE 5.00e-62; SWISSPROT HIT: O14981, EVALUE 4.60e+00; EST_HUMAN HIT: BF588578.1, EVALUE 8.00e-62
caagtggtttgagtatctgaagccactcattaagatactcaacaagacctaatgcatctgggatgttgtccccttctgaaacaaatttcagcagaactgccatttggatttctttagaacag

SEQ ID NO: 27338 - DNA, 211 bp, Homo sapiens
  MAP TO CHR14.3; EXPRESSED IN FETAL LIVER, SIGNAL = 0.9; NT HIT: U19488.1, EVALUE 1.90e-01; SWISSPROT HIT: Q9HNI0, EVALUE 3.70e-01; EST_HUMAN HIT: BI334371.1, EVALUE 2.80e-01
cttccttttactaccggggaccaactacccaaccagttgctatcaggaatagctttcagagcatcaagacagttggctattcttctagatccaaacaccgtgcaggcagtagttgacgtggaaagaggccacccagtcctgcagttccagattttaaagggagccagggatgatcagtgggatctccctcccagtgggctgagagaggcag

SEQ ID NO: 27339 - DNA, 145 bp, Homo sapiens
  MAP TO CHR19.3; EXPRESSED IN FETAL LIVER, SIGNAL =  24; SWISSPROT HIT: P27797, EVALUE 2.00e-26; EST_HUMAN HIT: BF734458.1, EVALUE 5.00e-76; NT HIT: M32294.1, EVALUE 3.00e-76
ctgccagaggtccaggcccagcacgccaaagttatcataggcatagatactgggatcgggagaatactcggggttgtcaatttctgggtggatccaagtgcccttgtaatctgggttgtcgatctgccggggcttccactcaccc

SEQ ID NO: 27340 - DNA, 168 bp, Homo sapiens
  MAP TO CHR18.3; EXPRESSED IN FETAL LIVER, SIGNAL =   1; NT HIT: AF107304.1, EVALUE 5.80e-01; SWISSPROT HIT: P70865, EVALUE 5.70e+00
tgatagctgttgccctgccgaagggggacatgttgccagccatgacaaaacaaggctccagcgtcactcttactcctccaaaggatgactggagaacatttacattcatcctggtttatgattcctccatctcttcagccttcaaattaatttaccagaaaaactaaa

SEQ ID NO: 27341 - DNA, 235 bp, Homo sapiens
  MAP TO CHR14.3; EXPRESSED IN FETAL LIVER, SIGNAL = 1.7; EST_HUMAN HIT: BE872532.1, EVALUE 8.00e-76; SWISSPROT HIT: P30352, EVALUE 3.00e-05; NT HIT: AF419331.1, EVALUE 5.00e-76
gaatgtggccgatgacaccaggtatgaagatttacagtgtgaacttggtcattatggtcctatagttgatgtgtatgttccgcttgatttctacattcgctgtccaagaggatttgcttatattcaatttgaggatgtttgtgatgctgaagatgcttacataatttggacagaaagtggatttgtggatggcagattaaaatacagtttgcctagggggatcagaagacactaa

SEQ ID NO: 27342 - DNA, 209 bp, Homo sapiens
  MAP TO CHR14.3; EXPRESSED IN FETAL LIVER, SIGNAL = 0.9; NT HIT: gi15300468, EVALUE 1.00e-113; SWISSPROT HIT: O88799, EVALUE 9.40e+00; EST_HUMAN HIT: BG014579.1, EVALUE 1.00e-110
cccttccttctaccatgattatagtagcagtttattgtcctgtgatagctgctgttttcattgttctgaagatggtcaactatcgactacacagagcacttgatgctggagaagttgtagataggactgcaaatgagttcacggatcagcgaaccaaagctgaacaaggcaactgttcaaccaggagaaaagacagcaatggaccgagg

SEQ ID NO: 27343 - DNA, 151 bp, Homo sapiens
  MAP TO CHR16.3; EXPRESSED IN FETAL LIVER, SIGNAL = 1.5; SWISSPROT HIT: O22609, EVALUE 5.80e+00; NT HIT: gi13627342, EVALUE 9.00e-80; EST_HUMAN HIT: AA653810.1, EVALUE 1.00e-79
gaccatggacctgcactcttgtccgaagccgattgtatttgtgttgcacacgtttttatcggccaaagtcactcgtatgggactgcttgtatgagcaacaaaaaatcagaaaagagccttgactgtcacaagaaatatttccacctcaaaa

SEQ ID NO: 27344 - DNA, 105 bp, Homo sapiens
  MAP TO CHR14.3; EXPRESSED IN FETAL LIVER, SIGNAL = 0.91; SWISSPROT HIT: P39572, EVALUE 3.60e+00; EST_HUMAN HIT: BG036245.1, EVALUE 7.70e+00; NT HIT: AE004034.1, EVALUE 3.40e-01
tgaatcaaaaagatataatgaccatagagttcaactgcaaaatcacaggaagcaagaagaaggccactttccacaccagctgctgcaattggagggatgtttgat

SEQ ID NO: 27345 - DNA, 246 bp, Homo sapiens
  MAP TO CHR18.3; EXPRESSED IN FETAL LIVER, SIGNAL = 0.85; SWISSPROT HIT: P97680, EVALUE 1.40e+00; EST_HUMAN HIT: BF525680.1, EVALUE 5.10e+00
ccaggtgctgtctcttgcctgtctcttcattttccaggatggcaaagtcctgagcaaatgtaaaggcctccagaggtggccgtgagggatcacttgcttcccgggatggctggtgggggacagcctctgcaggcaggcccggggggttcccatccttgctccaggcagcaccactcctgagtctgtgtgatctggggttgtgttccttcatctcccgccccaattccacctccatctttctaaggt

SEQ ID NO: 27346 - DNA, 356 bp, Homo sapiens
  MAP TO CHR14.3; EXPRESSED IN FETAL LIVER, SIGNAL =  28; SWISSPROT HIT: P08185, EVALUE 4.00e-29; EST_HUMAN HIT: BI962629.1, EVALUE 0.00e+00; NT HIT: J02943.1, EVALUE 0.00e+00
tcagagtcgcaatgacatttattaaaagatgcctaaagttagacacaactctggttggagggagaagaacttggaggagattgggggaaacctcccgctctccaaaacatttctgtgggatccctggttcccaaagtcagacagtgctgaggctctgggtgggtggtctcttacactgggttcataaccctcgccaggaaaaggctgctccaggtgaagtggtcgaagatcatgatgatgaagggctggttgaaacgcaagatgataggcttggacgtcaggtttagggtgaccccagtggagccagctgtgtccacaccctcctcattgagttgcagcacagctttatggaccac

SEQ ID NO: 27347 - DNA, 264 bp, Homo sapiens
  MAP TO CHR19.3; EXPRESSED IN FETAL LIVER, SIGNAL = 3.1; NT HIT: gi14767206, EVALUE 0.00e+00; SWISSPROT HIT: Q04499, EVALUE 2.10e-02; EST_HUMAN HIT: BI761466.1, EVALUE 0.00e+00
gtcactgcccctggtctgggcaaggggcagttggtgaacttgctgcctccagagaaccttccctggtgtggaggcagccagggacccaggatgctccggacctgttacgtgctctgttcccaagctggtcccccctccaggggctggcagtccctgagctttgatggcggggccttccaccttaagggcacaggagagctgacacgggccttgctggttctccggctgtgtgcctggcccccactcgtcactcacgggctgttg

SEQ ID NO: 27348 - DNA, 96 bp, Homo sapiens
  MAP TO CHR14.3; EXPRESSED IN FETAL LIVER, SIGNAL = 1.1; EST_HUMAN HIT: BF513706.1, EVALUE 1.10e-01; NT HIT: gi14751707, EVALUE 3.00e-01
tggccaaatgacagaaaatataacatgaatatatttttgaatgaatcaaatgaagaagagctagatttaattgggttatggagtttaaggagatgg

SEQ ID NO: 27349 - DNA, 166 bp, Homo sapiens
  MAP TO CHR19.3; EXPRESSED IN FETAL LIVER, SIGNAL = 2.3; SWISSPROT HIT: O94913, EVALUE 1.50e+00; NT HIT: gi14758013, EVALUE 4.00e-88; EST_HUMAN HIT: BG426938.1, EVALUE 1.00e-46
caggtgtgtgtgacagtgcaacttgtagctccagcgtctctgctgcttcccctgccttcacctcctaaccaagcggtacctgcctgagaacaagggccgcggagggacgtgagcgcctgagcctcgcctggaaattcaccagcaagaaggcagaaacagccatgag

SEQ ID NO: 27350 - DNA, 168 bp, Homo sapiens
  MAP TO CHR18.3; EXPRESSED IN FETAL LIVER, SIGNAL =   1; NT HIT: AF064560.1, EVALUE 5.80e-01; EST_HUMAN HIT: AV688208.1, EVALUE 2.20e-01
ggaaaaagcagatcccgctaacagaggcagggcatgaccaggaagactggatgggagaacgaactagagaaacaagactccaggatgggcctggtaagcttgggctagaggatgagaagagacgacgtcccccaaatgcagatactatgcgcgtgtgcacgagcagag

SEQ ID NO: 27351 - DNA, 105 bp, Homo sapiens
  MAP TO CHR19.3; EXPRESSED IN FETAL LIVER, SIGNAL =   1; SWISSPROT HIT: Q9NSA1, EVALUE 3.00e-13; NT HIT: AB006136.1, EVALUE 2.00e-52
ggtctcctgcagctgaaagccttgaagccgggagttattcaaatcttgggagtcaagacatccaggttcctgtgccagcggccagatggggccctgtatggatcg

SEQ ID NO: 27352 - DNA, 189 bp, Homo sapiens
  MAP TO CHR19.3; EXPRESSED IN FETAL LIVER, SIGNAL = 1.8; EST_HUMAN HIT: AL536244.1, EVALUE 1.00e-102; SWISSPROT HIT: Q9NXH9, EVALUE 8.00e-29; NT HIT: gi13632544, EVALUE 1.00e-102
ccgggcatctgcttggctcggctgtaccaggtgggccacgtcattgagctggacattccggcgtatgagatccacagcccgggtggaggcatcgtttgcaaccacagatctgagcccaggcacctctagggcaaatcgaatggaacgtaggcctgaagctgccaggccttccagcacatgcaggccttc

SEQ ID NO: 27353 - DNA, 130 bp, Homo sapiens
  MAP TO CHR18.3; EXPRESSED IN FETAL LIVER, SIGNAL = 1.1; NT HIT: gi13376817, EVALUE 1.00e-66; EST_HUMAN HIT: AI767468.1, EVALUE 4.00e-64; SWISSPROT HIT: P38601, EVALUE 2.00e+00
cctttttcacatactcggtttcttcaataatgtgagcggacgtagactcatacaaggcagaattatcttccatcttatcccttgggggaatttctgtggtcactgtcactgttgtcattgtgaattctgg

SEQ ID NO: 27354 - DNA, 215 bp, Homo sapiens
  MAP TO CHR18.3; EXPRESSED IN FETAL LIVER, SIGNAL = 0.98; SWISSPROT HIT: O61998, EVALUE 7.60e-01
tttgctgatctccttcctgtccacttttttctgtttctcattttctaggctgattgctttatttctgtgcagatgtttcaggaacctgatgcagtgtagatcacaggggttataccagtataaaataaataagcctctgatgtcatttttcccacacaaacagcatatagtattattactctccattaccctgtgagcgaaatccttgttggttc

SEQ ID NO: 27355 - DNA, 116 bp, Homo sapiens
  MAP TO CHR14.3; EXPRESSED IN FETAL LIVER, SIGNAL = 1.7; SWISSPROT HIT: P47784, EVALUE 9.00e-14; NT HIT: X55989.1, EVALUE 1.00e-56; EST_HUMAN HIT: BF902198.1, EVALUE 1.00e-38
ggcgatggaaaaaccaaaatacttttcttcttgcaacttttgctaatgtagttaatgtttgtggtaacccaactataacctgccctcataacagaactctcaacaattgtcatcat

SEQ ID NO: 27356 - DNA, 193 bp, Homo sapiens
  MAP TO CHR16.3; EXPRESSED IN FETAL LIVER, SIGNAL = 0.95; EST_HUMAN HIT: BE074921.1, EVALUE 2.00e-39; NT HIT: gi14778798, EVALUE 1.00e-104; SWISSPROT HIT: P08619, EVALUE 4.90e-01
gctgtcctggaatctcctcggggatgaggcagctgccgagctggcccaggtgctgccgcagatgggccggctgaagagagtggagtatgaggggccgggggaggaatgggacgggctaaagggggacctacatcccgggaacaccaagaggccactgggtcagtcccctgcctcccagaaagcccttccttga

SEQ ID NO: 27357 - DNA, 129 bp, Homo sapiens
  MAP TO CHR19.3; EXPRESSED IN FETAL LIVER, SIGNAL =  23; EST_HUMAN HIT: BG568102.1, EVALUE 2.00e-31; NT HIT: AF309489.1, EVALUE 2.00e-31; SWISSPROT HIT: P81172, EVALUE 6.00e-06
cctgttgtgggaaaacagagccactggtcaggctggcgaggaggaggaggagcaggaggcaagcggcccagatctgggagctcagtgccatcgtgccgtctgtctggctgtcccactgctgggtcttga

SEQ ID NO: 27358 - DNA, 195 bp, Homo sapiens
  MAP TO CHR16.3; EXPRESSED IN FETAL LIVER, SIGNAL = 0.97; EST_HUMAN HIT: AW951611.1, EVALUE 1.00e-105; NT HIT: M60331.1, EVALUE 1.00e-106; SWISSPROT HIT: P07987, EVALUE 4.30e+00
tgacttttcaacatttattgacaggcggcattgttccttagcaggctcctgatttttattggatggtggcattttcaagatgtggcaagaggatcttgaagtctggtaacattctcaggcaggagtttggtggatgtgctattttgtgcaattagtgtcttctacatctcggtctgtacctggggcggcagcacc

SEQ ID NO: 27359 - DNA, 148 bp, Homo sapiens
  MAP TO CHR19.3; EXPRESSED IN FETAL LIVER, SIGNAL = 2.4; SWISSPROT HIT: Q16617, EVALUE 8.00e-23; EST_HUMAN HIT: BI522166.1, EVALUE 8.00e-78; NT HIT: S69115.1, EVALUE 5.00e-78
ggctacatccacgtgacgcagaccttcagcattatggctgttctgtgggccctggtgtccgtgagcttcctggtcctgtcctgcttcccctcactgttccccccaggccacggcccgcttgtctcaaccaccgcagcctttgctgcag

SEQ ID NO: 27360 - DNA, 128 bp, Homo sapiens
  MAP TO CHR19.3; EXPRESSED IN FETAL LIVER, SIGNAL = 3.6; NT HIT: gi14754700, EVALUE 4.00e-66; SWISSPROT HIT: Q15928, EVALUE 7.00e-14; EST_HUMAN HIT: AL599939.1, EVALUE 6.00e-66
ccagagaaacaaggttccagtagttctccaacatcacgtccctgtataagatcctctgagcagggtccaggcatttccactcctcctgagagaattctatggccacatccctaaatgtcaaccgtacc

SEQ ID NO: 27361 - DNA, 136 bp, Homo sapiens
  MAP TO CHR18.3; EXPRESSED IN FETAL LIVER, SIGNAL = 1.1; NT HIT: gi14762692, EVALUE 7.00e-71; EST_HUMAN HIT: BG827178.1, EVALUE 1.00e-70; SWISSPROT HIT: P22059, EVALUE 9.00e-07
ctgcatcctttccacaggatcagagagtgaactggccttgtggatgaggtaagtatgctccatgtattcagttaggcgctgtaggaagctcagaggctcattaaatataactggcatcgtgatcttggatagttcc

SEQ ID NO: 27362 - DNA, 120 bp, Homo sapiens
  MAP TO CHR14.3; EXPRESSED IN FETAL LIVER, SIGNAL = 5.7; SWISSPROT HIT: Q99538, EVALUE 6.00e-19; NT HIT: gi15300641, EVALUE 2.00e-61; EST_HUMAN HIT: AA633608.1, EVALUE 8.00e-59
ccacgtccgaatcttccatccagttgacgctgtaccagtcccccaggtacgtggacctcttctcatcatagtaacaggcgtaggacgactctctggggttggcagcagtagttgcataaa

SEQ ID NO: 27363 - DNA, 128 bp, Homo sapiens
  MAP TO CHR19.3; EXPRESSED IN FETAL LIVER, SIGNAL = 1.2; NT HIT: gi13236592, EVALUE 4.00e-66; EST_HUMAN HIT: AW296228.1, EVALUE 6.00e-66; SWISSPROT HIT: Q13360, EVALUE 1.00e-12
ccagtgaggccaggttcctgcagttctccagcatcacgtccctgtacagtgtcctttgggcagggtccagcaatgcccactcctcctgggtgaactccacggccacatcctcaaaggtcaccaagccc

SEQ ID NO: 27364 - DNA, 150 bp, Homo sapiens
  MAP TO CHR14.3; EXPRESSED IN FETAL LIVER, SIGNAL = 0.78; SWISSPROT HIT: Q63014, EVALUE 7.70e+00; NT HIT: AF080258.1, EVALUE 2.00e+00; EST_HUMAN HIT: BF104924.1, EVALUE 3.00e+00
tggtttcccctgctttgcttcctgtttatcagtgcttcaaggtcacctttcgatatgggcagtgttcagcttattctaagtctccctctattaataatggctcttatgactcctaccccttagcttggcagggtccccctctcaccttct

SEQ ID NO: 27365 - DNA, 139 bp, Homo sapiens
  MAP TO CHR16.3; EXPRESSED IN FETAL LIVER, SIGNAL = 0.81; EST_HUMAN HIT: R17294.1, EVALUE 4.40e-02; SWISSPROT HIT: P22219, EVALUE 7.70e+00; NT HIT: gi16165127, EVALUE 3.00e-02
caatgaacatcacaaaatctttctgctggaagagctagttctggtcactgtgatacctgggctgtcatttgctttaaaacctggattggttagaatgaatagatttgtctttgccgatgaaacaaatgtcaaactttaa

SEQ ID NO: 27366 - DNA, 191 bp, Homo sapiens
  MAP TO CHR18.3; EXPRESSED IN FETAL LIVER, SIGNAL = 1.9; NT HIT: gi7706676, EVALUE 1.00e-103; EST_HUMAN HIT: BI596553.1, EVALUE 1.00e-103; SWISSPROT HIT: Q13336, EVALUE 8.00e-25
cctgtcctggctgagcaagagggccatcagagtggagaccactgttcccagccagccagtgagagcccaccaggggttctgaacaagaagtcctaccagaatcaggattccactgacggggttgttgacgaacaccacttgggatatgccccggagaatccagtcaatgaactggagcaccacgggtttgt

SEQ ID NO: 27367 - DNA, 108 bp, Homo sapiens
  MAP TO CHR14.3; EXPRESSED IN FETAL LIVER, SIGNAL = 1.3; NT HIT: gi16190364, EVALUE 1.00e-53; EST_HUMAN HIT: AA487359.1, EVALUE 2.00e-53
ctcttgaaatttgttcctgaaaaaagtgacattgacctattggaggaacataaacacgaactggatcggatggccaaggctgataggttcctttttgagatgagccgg

SEQ ID NO: 27368 - DNA, 188 bp, Homo sapiens
  MAP TO CHR14.3; EXPRESSED IN FETAL LIVER, SIGNAL = 0.96; EST_HUMAN HIT: AA248533.1, EVALUE 3.00e-16; SWISSPROT HIT: P07393, EVALUE 5.60e+00; NT HIT: AL163284.2, EVALUE 5.00e-08
ctgcctttgaacatgattgagtgtttccatgagaaaggtagctacgtggaaggtgagatccctaggccgatcaaacttctgaatgccatcaaggccgatcaaacttctgaatgccatcaaggaggtctgaatgacccaagaatcattgttctttggaaaaacaagttcattaatcttgtgggcagccc

SEQ ID NO: 27369 - DNA, 94 bp, Homo sapiens
  MAP TO CHR18.3; EXPRESSED IN FETAL LIVER, SIGNAL = 0.89; EST_HUMAN HIT: AW195307.1, EVALUE 8.00e-46; SWISSPROT HIT: Q06136, EVALUE 4.00e-06; NT HIT: gi14761879, EVALUE 4.00e-25
gataagctgctgcaggcaaagaaagaaattgaaatgcactctattaatgacaaacaggtaaatctctgtcttcagaatgcattttctgtataac

SEQ ID NO: 27370 - DNA, 251 bp, Homo sapiens
  MAP TO CHR18.3; EXPRESSED IN FETAL LIVER, SIGNAL =   1; EST_HUMAN HIT: BG201304.1, EVALUE 0.00e+00; SWISSPROT HIT: P46923, EVALUE 5.50e+00; NT HIT: AF227507.1, EVALUE 3.60e+00
caatggttgatttttgcgatactaagataaaggaccaggttgacaataaggtattcttcggtctctctgatccacaccagctccacgtgcactcttccttccgcatcaacgtagtccacgttgtatgtctgtcccaagaagctagagctgtcagagggtgtggcaggcgatctcaggcacaccggggaactgaaacaccaaaagggtttcccatgttcatccaaaagagttacgtccatcatggaacaact

SEQ ID NO: 27371 - DNA, 127 bp, Homo sapiens
  MAP TO CHR14.3; EXPRESSED IN FETAL LIVER, SIGNAL = 0.99; NT HIT: AB009808.1, EVALUE 1.10e-01; EST_HUMAN HIT: BE218603.1, EVALUE 2.00e-65; SWISSPROT HIT: P05883, EVALUE 3.50e+00
ccgcagccggatgtcggagccggagctgctccccacccggcctcgcccgcgggcgacaaaaccgtccctctggccacgggagagcatcgccttgccaaaatcaactcgcattttcatgtattcaaat

SEQ ID NO: 27372 - DNA, 161 bp, Homo sapiens
  MAP TO CHR16.3; EXPRESSED IN FETAL LIVER, SIGNAL = 2.7; NT HIT: gi13648792, EVALUE 1.00e-85; EST_HUMAN HIT: BG035243.1, EVALUE 1.00e-85; SWISSPROT HIT: P32557, EVALUE 7.60e+00
gaccctttggctttgctgagagaggactcagatgatagtgacgaatgtctggcagtgaggacacattttggcattcttgctgactctgacagagtgattctgatggacttgtatttaaattgtatgtgttttactctttgaaaataaatctataaaaccaa

SEQ ID NO: 27373 - DNA, 181 bp, Homo sapiens
  MAP TO CHR14.3; EXPRESSED IN FETAL LIVER, SIGNAL = 0.93; NT HIT: AY051789.1, EVALUE 4.10e-02; SWISSPROT HIT: P27619, EVALUE 9.90e-02; EST_HUMAN HIT: AL581158.1, EVALUE 9.30e-01
ttccccacagggctgctgcacctgctccgcccagctggggttcaacaggaggtcatggtcccgctcatgttcaaagtgcagggctccgagcccccagccagcccagaggaggcctcccctgtttcccaggacgctctgcggtgatgccaaggtcccgggccacctcctcaggcgctccatt

SEQ ID NO: 27374 - DNA, 186 bp, Homo sapiens
  MAP TO CHR14.3; EXPRESSED IN FETAL LIVER, SIGNAL = 0.92; SWISSPROT HIT: P16726, EVALUE 5.60e+00
ttctggagtttatgtggaaatgctctgaccccaaaacgaggtgtctttggtaagacgggtgaccttcagacaatactgtgcctagcctgtgcaagggatgaattaacatattctggtgcactcaatggggatatatatgtttggaaaggaatcaatcttatacgaacaatacaaggagcccatgct

SEQ ID NO: 27375 - DNA, 190 bp, Homo sapiens
  MAP TO CHR18.3; EXPRESSED IN FETAL LIVER, SIGNAL = 0.94; SWISSPROT HIT: P10676, EVALUE 1.90e+00; NT HIT: D25542.1, EVALUE 6.70e-01
tggctgactcgaagaatgtgagattaaaaattagaagggaaagtatgaaggtgggtaaacgggtcctggaaaaccacgatcttattgaaagtatgactgagaaaatggacaaaagtagtagaggattcagcgataatgtaaagatcaaggaattgaaagccctgaagacaaagactagattcagcagcag

SEQ ID NO: 27376 - DNA, 211 bp, Homo sapiens
  MAP TO CHR14.3; EXPRESSED IN FETAL LIVER, SIGNAL = 1.5; SWISSPROT HIT: O60610, EVALUE 7.20e+00; EST_HUMAN HIT: BF969590.1, EVALUE 1.00e-115; NT HIT: AB014566.1, EVALUE 1.00e-115
ctcaaagaacaacgtgaaagggaacgtaaaatgagaaaagctaaagagaatagtgaagaaagcggagagtttgatgaccttgtttcagctttacgctcaggagaagtgtttgacaaagacctttctaaattgaaacggaatcgcaaacgtattaccaaccagatgactgacagcagcagagagagaccaatcacaaaacttaatttctaat

SEQ ID NO: 27377 - DNA, 251 bp, Homo sapiens
  MAP TO CHR14.3; EXPRESSED IN FETAL LIVER, SIGNAL =  76; SWISSPROT HIT: P41051, EVALUE 4.00e-43; NT HIT: gi12732288, EVALUE 1.00e-125; EST_HUMAN HIT: AV752265.1, EVALUE 1.00e-122
taacggtggagctggagagtattgtgccttctccaagctgcccggcaagaactaccaataatgtggtggaacttatggccctttccaaggccacggctctttcggcctgcagatgtcagcccacgcatctccctgtgcttgtggactggtttggtgatccactgggtgtcaggatttcttctgatagctttatggaatggattaatgaggataacctcaaaaaatttgtatgtggaatcttcaccaaccca

SEQ ID NO: 27378 - DNA, 201 bp, Homo sapiens
  MAP TO CHR18.3; EXPRESSED IN FETAL LIVER, SIGNAL = 1.1; EST_HUMAN HIT: BF790352.1, EVALUE 1.00e-109; SWISSPROT HIT: O86164, EVALUE 2.50e+00
actgttctgctgataaccttccccgttgtcatagctatttcattgccaaccaactccatcacatggttgttgatatcgtcatataaagccattgcaaggactctggaaactgccgccaatgaccaatttctgactaaccagccaccttttctctctcttagctccacgtcagcactgagaccagactcgagcacccctgtc

SEQ ID NO: 27379 - DNA, 275 bp, Homo sapiens
  MAP TO CHR14.3; EXPRESSED IN FETAL LIVER, SIGNAL =   3; NT HIT: gi14748336, EVALUE 0.00e+00; EST_HUMAN HIT: AV681541.1, EVALUE 0.00e+00; SWISSPROT HIT: Q9UK55, EVALUE 1.00e-50
cctggttttcatgtttctgagccatgtctccaccaagtctgtggtcaggtagtcttcaagggcgaggtggtcacccattttctccatgaggaccaccagcatggtggcatttccttggtagggcagtttgaggacatgacaacgaaaattcttgtcaaaggtggaggcaaacttgcctgcaccgtacatcatgggcaccttaatggtcttgtacttgtccaggtggaaagtgtcgacttcggtgaagacagggtcaaatggggtcaaccatttcc

SEQ ID NO: 27380 - DNA, 253 bp, Homo sapiens
  MAP TO CHR18.3; EXPRESSED IN FETAL LIVER, SIGNAL = 1.5; NT HIT: AL115840.1, EVALUE 2.30e-01; EST_HUMAN HIT: BE840049.1, EVALUE 2.20e-02; SWISSPROT HIT: P36177, EVALUE 9.60e-01
catcccagtgccatggcggagaccctgcccgtgggcgtcccgctgacccccacccagagcccagacatggatttgatggcgatgggcttgttctccagggaacctgcctgtttgaagttggatgcaaggcaggaaactgagggagacaccgagcgtcctccaatgggggtgcattcaaaagctgtgatgatagtcactggagaggcagcggagaaattggaaataaggaacaagattgcagagactcttttat

SEQ ID NO: 27381 - DNA, 158 bp, Homo sapiens
  MAP TO CHR16.3; EXPRESSED IN FETAL LIVER, SIGNAL = 0.86; EST_HUMAN HIT: AV709774.1, EVALUE 4.00e-83; SWISSPROT HIT: O95822, EVALUE 1.00e-26; NT HIT: gi14775545, EVALUE 2.00e-83
gggctgaggctgtgcatcctgtaaaaaactggatggacatgaagcgccgcgttgggccctacagaaggtgttacttcttttctcactgttcgacccctggggagcccctggtcgttttgcacgtggcactgactggtgacatctccagcaacatccag

SEQ ID NO: 27382 - DNA, 398 bp, Homo sapiens
  MAP TO CHR18.3; EXPRESSED IN FETAL LIVER, SIGNAL = 2.7; NT HIT: gi14773376, EVALUE 3.00e-94; SWISSPROT HIT: P42587, EVALUE 4.30e+00; EST_HUMAN HIT: BG760457.1, EVALUE 4.00e-94
aaccgcagcgaagccgaagcgttagcccggaacgagggcggactggaaagccggagcggggccgagcgagccgccccaaaaggctgccgcttcatcccagcgaaaaccgccggccaggccaagcgcggcgagggaagaggagagacggctccggcagcggaaccgcccgacgctggagaagacaaaccggccgtggagtggtgcctggaggagctggtcttcggcgatgtcgaggacgacgaggacacgctgctgcggcgtctgcggggtccgtgggttcaaggacatgaagacttgggagactcagaagcggagaatgaagcaaaaggtaattgtgcacctcaaaagaagccaatttgggtggatgaagaagatgaagatgaggaaatggttgacat

SEQ ID NO: 27383 - DNA, 104 bp, Homo sapiens
  MAP TO CHR18.3; EXPRESSED IN FETAL LIVER, SIGNAL =   1; NT HIT: AL161495.2, EVALUE 1.30e+00; EST_HUMAN HIT: BG506498.1, EVALUE 1.20e-01; SWISSPROT HIT: P33251, EVALUE 3.60e+00
tgatcctcccaacggctctgggaagtggataaatgacgaacataatcaggatatgggcagttatgattaggggctcccactcatggaatttgaggacaaggcct

SEQ ID NO: 27384 - DNA, 134 bp, Homo sapiens
  MAP TO CHR18.3; EXPRESSED IN FETAL LIVER, SIGNAL = 0.93; NT HIT: gi14783625, EVALUE 1.80e+00; EST_HUMAN HIT: BI763715.1, EVALUE 1.70e-01; SWISSPROT HIT: P08912, EVALUE 7.80e+00
caaatcttaggaattctacttctgaggcttcctctggcactctctttcacttccttcagaatatgatggcagtgcatgctgatctcctcatttccatccttcttgatggtcagggcacacttaacacttactcc

SEQ ID NO: 27385 - DNA, 194 bp, Homo sapiens
  MAP TO CHR16.3; EXPRESSED IN FETAL LIVER, SIGNAL = 0.84; SWISSPROT HIT: P97085, EVALUE 7.30e+00
tactctgtagcataagtgttgctatgcacagttaactggtctccaagattcccttcccacacggtggccctttgttttccagtgaagcctcctaccttgtcgattgtatatctgtttacattcacaccgttcttagcattctgcggagagccaagcactgctcttgctaccagggaacaggtgtgggtagaatc

SEQ ID NO: 27386 - DNA, 184 bp, Homo sapiens
  MAP TO CHR19.3; EXPRESSED IN FETAL LIVER, SIGNAL = 4.8; NT HIT: gi14766190, EVALUE 5.00e-97; EST_HUMAN HIT: BF725861.1, EVALUE 8.00e-97; SWISSPROT HIT: P13284, EVALUE 5.00e-31
gacaggcaatctatacctgcgggggcccctgaagaagtccaatgcaccgcttgtcaatgtgaccctctactatgaagcactgtgcggtggctgccgagccttcctgatccgggagctcttcccaacatggctgttggtcatggagatcctcaatgtcaccctggtgccctacggaaacgcacag

SEQ ID NO: 27387 - DNA, 88 bp, Homo sapiens
  MAP TO CHR14.3; EXPRESSED IN FETAL LIVER, SIGNAL = 0.99; NT HIT: AF142707.1, EVALUE 1.10e+00; EST_HUMAN HIT: AA813312.1, EVALUE 1.60e+00
cataatcttgctttctgttatctgtccatagaggttccatatttaaatcatgagtggctactgtgaaacctttatgcacatttaaaat

SEQ ID NO: 27388 - DNA, 129 bp, Homo sapiens
  MAP TO CHR16.3; EXPRESSED IN FETAL LIVER, SIGNAL = 0.84; SWISSPROT HIT: Q10836, EVALUE 6.90e-01; NT HIT: U13658.1, EVALUE 6.70e+00; EST_HUMAN HIT: AI720375.1, EVALUE 1.60e-01
cattttggagcaatttgctggagtcaaagaaaacagtgaaatttccacaaccaacttcaaagcccccaaatcctgtatcggtggaggggagtctggtagcaacaccacaggggccgtttttcaaagagg

SEQ ID NO: 27389 - DNA, 204 bp, Homo sapiens
  MAP TO CHR19.3; EXPRESSED IN FETAL LIVER, SIGNAL =  40; SWISSPROT HIT: P81172, EVALUE 2.00e-18; NT HIT: AF131292.1, EVALUE 1.00e-111; EST_HUMAN HIT: BG568102.1, EVALUE 1.00e-111
tggaaaacaaaagaaccagccattttattccaagacctatgttctggggcagcaggaataaataaggaagggaggggacgggggcagggcaggtaggttctacgtcttgcagcacatcccacactttgatcgatgacagcagccgcagcagaaaatgcagatggggaagtgggtgtctcgcctccttcgcctctggaacatggg

SEQ ID NO: 27390 - DNA, 259 bp, Homo sapiens
  MAP TO CHR14.3; EXPRESSED IN FETAL LIVER, SIGNAL = 0.85; SWISSPROT HIT: P53214, EVALUE 3.90e-01; NT HIT: gi16162286, EVALUE 0.00e+00; EST_HUMAN HIT: BG776973.1, EVALUE 0.00e+00
aatggaaacagactgtaatcccatggagctaagcagtatgtcaggatttgaagaaggttcagagctgaacggttttgaaggaactgacatgaaagacatgaggctcgaagctgaagcagttgtaaatgatgttctctttgctgttaacaacatgtttgtctcgaaaagcctgcggtgtgcggatgatgtggcctatatcaatgtggaaacaaaggaaagaaacagatattgcctagaactcactgaagcagggctcaag

SEQ ID NO: 27391 - DNA, 158 bp, Homo sapiens
  MAP TO CHR14.3; EXPRESSED IN FETAL LIVER, SIGNAL = 0.95; NT HIT: gi14751080, EVALUE 6.00e-84; SWISSPROT HIT: P54201, EVALUE 7.60e+00; EST_HUMAN HIT: AL552961.1, EVALUE 9.00e-84
gattaactatgaggagagcatgatggtgcgtttgagcgtcagtaagcgagagaaaggacggcgaaaacgagcaaatgtcatgagctcacaacttcattcccttacacacttcagtgacatcagtgctttgacagggggaactgttcatcttgatgagg

SEQ ID NO: 27392 - DNA, 212 bp, Homo sapiens
  MAP TO CHR16.3; EXPRESSED IN FETAL LIVER, SIGNAL = 1.1; NT HIT: AJ296920.1, EVALUE 1.20e-02; SWISSPROT HIT: Q9WV08, EVALUE 1.40e-01; EST_HUMAN HIT: AI809326.1, EVALUE 1.10e+00
attcatcagcttctatgaggcagtaaaagtgaactctgctgcgactcaccttgtgggcttcccggttctcctggcaactgttcagttatggaacctgctgcgtcatagccccaggctgcgggtcatcagcaggacactgagccgagcctgggacgaggtggtgggctttctgctgatcatcctaatcctgctgacaggctatgccattgccg

SEQ ID NO: 27393 - DNA, 141 bp, Homo sapiens
  MAP TO CHR8.3; EXPRESSED IN FETAL LIVER, SIGNAL = 0.97; EST_HUMAN HIT: AV692868.1, EVALUE 2.00e-72; NT HIT: M77180.1, EVALUE 7.00e-74; SWISSPROT HIT: P00918, EVALUE 2.00e-22
ctaacttcgatcctcgtggcctccttcctgaatccttggattactggacctacccaggctcactgaccacccctcctcttctggaatgtgtgacctggattgtgctcaaggaacccatcagcgtcagcagcgagcaggttt

SEQ ID NO: 27394 - DNA, 211 bp, Homo sapiens
  MAP TO CHR19.3; EXPRESSED IN FETAL LIVER, SIGNAL = 0.63; NT HIT: AF030201.1, EVALUE 1.00e-115; SWISSPROT HIT: P15498, EVALUE 9.00e-30; EST_HUMAN HIT: AL557286.1, EVALUE 1.00e-111
ccatggagctgtggcgccaatgcacccactggctcatccagtgccgggtgctgccgcccagccaccgcgtgacctgggatggggctcaggtgtgtgaactggcccaggccctccgggatggtgtccttctgtgtcagctgcttaacaacctgctaccccatgccatcaacctgcgtgaggtcaacctgcgcccccagatgtcccaggtgag

SEQ ID NO: 27395 - DNA, 170 bp, Homo sapiens
  MAP TO CHR1.3; EXPRESSED IN FETAL LIVER, SIGNAL = 0.61; NT HIT: gi4758895, EVALUE 6.00e-69; SWISSPROT HIT: O75381, EVALUE 9.00e-20; EST_HUMAN HIT: BE206758.1, EVALUE 8.00e-69
ctcttctccccagggctgacagatgaagagattgatatggccttccagcagtcgggcactgctgccgatgagccttcgtccttgggcccagccacacaggtggttcctgtccagccccctcacctcatatctcagccatacagtaagtcacccgctcaaactcctgctta

SEQ ID NO: 27396 - DNA, 138 bp, Homo sapiens
  MAP TO CHR1.3; EXPRESSED IN FETAL LIVER, SIGNAL = 1.8; NT HIT: U11311.1, EVALUE 5.00e-72; SWISSPROT HIT: P22307, EVALUE 5.00e-20; EST_HUMAN HIT: BI458985.1, EVALUE 3.00e-68
ttccaggaaggggaacagtttgtgaagaaaatcggtggtatttttgccttcaaggtgaaagatggccctgggggtaaagaggccacctgggtggtggatgtgaagaatggcaaaggatcagtgcttcctaactcaggt

SEQ ID NO: 27397 - DNA, 110 bp, Homo sapiens
  MAP TO CHR11.3; EXPRESSED IN FETAL LIVER, SIGNAL = 0.4; EST_HUMAN HIT: BG742786.1, EVALUE 3.00e-55; NT HIT: Y08409.1, EVALUE 2.00e-55; SWISSPROT HIT: Q92748, EVALUE 1.00e-03
gagctggacctggaagcccagttccacctgcacttctccagcctccatcacatcctcatgcacctcaccgagaaagcccaggaggtgacaaggaaataccaggaaatgac

SEQ ID NO: 27398 - DNA, 109 bp, Homo sapiens
  MAP TO CHR1.3; EXPRESSED IN FETAL LIVER, SIGNAL = 0.65; NT HIT: U73192.1, EVALUE 7.00e-55; SWISSPROT HIT: P07645, EVALUE 3.50e+00; EST_HUMAN HIT: AA021348.1, EVALUE 1.00e-54
agtctatccttccaaccacatggtcctcctaatgtgagtatccaagcatggctgaggccttctaagccacttcagcctaatcccactctttcccccatcctggcttaag

SEQ ID NO: 27399 - DNA, 173 bp, Homo sapiens
  MAP TO CHR15.3; EXPRESSED IN FETAL LIVER, SIGNAL = 0.52; NT HIT: AF068760.1, EVALUE 7.00e-81; SWISSPROT HIT: O60566, EVALUE 1.00e-28; EST_HUMAN HIT: BF036136.1, EVALUE 1.00e-80
tgtcttacaggtatcttctcaacctgtcccatgggacttttatatcaacctcaagttaaaggaacgtttaaatgaagattttgatcatttttgcagctgttatcaatatcaagatggctgtattgtttggcaccaatatataaactgcttcacccttcaggtctgtaatacta

SEQ ID NO: 27400 - DNA, 480 bp, Homo sapiens
  MAP TO CHR2.3; EXPRESSED IN FETAL LIVER, SIGNAL = 4.7; NT HIT: gi15298025, EVALUE 0.00e+00; SWISSPROT HIT: Q61572, EVALUE 2.20e-01; EST_HUMAN HIT: AL533175.1, EVALUE 0.00e+00
tctcccctgcaggcttcctcagcaccttcaagcccccagcctacgaggatgtggttcaccgcccaggcacaccaccccccccttatactgtggccccaggccgccccttgactgcttccagtgaacaaacctgctgttcctcctcatccagctgccctgcccactttgaaggaacaaatgtggaaggtgtttcctcccaccagagtgccccccctcatcaggagggtgagcccggggcaggggtgacccctgcctccacacccccctcctgccgctatcgccgtttaactggcgactccggtattgagctctgcccttgtcctgcctccggtgagggtgagccagtcaaggaggtgagggttagtgccaccctgccagatctggaggactactccccgtgtgcactacccccagagtctgtaccgcagatctttcccatggggctgtcttccagtgaaggggacatcccataagtagttt

SEQ ID NO: 27401 - protein, 68 aa, Homo sapiens
  MAP TO AL023656.8; EXPRESSED IN HEART, SIGNAL = 3.6; EXPRESSED IN PLACENTA, SIGNAL = 2.1; EXPRESSED IN BONE MARROW, SIGNAL = 1.4; EXPRESSED IN LUNG, SIGNAL = 1.9; EXPRESSED IN ADULT LIVER, SIGNAL = 1.9; EXPRESSED IN HELA, SIGNAL = 1.6; EXPRESSED IN BRAIN, SIGNAL =   2; EXPRESSED IN FETAL LIVER, SIGNAL = 1.8; SWISSPROT HIT: Q9P2N7, EVALUE 4.00e-05
NKWISRSPMLQRRVYHSMAAVQRKLYVLGGNDLDYNNDRILVRHIDSYNIDTDQWTRCNFNLLTGKYL

SEQ ID NO: 27402 - protein, 17 aa, Homo sapiens
  MAP TO AL023656.8; EXPRESSED IN HEART, SIGNAL = 3.6; EXPRESSED IN PLACENTA, SIGNAL = 2.1; EXPRESSED IN BONE MARROW, SIGNAL = 1.4; EXPRESSED IN LUNG, SIGNAL = 1.9; EXPRESSED IN ADULT LIVER, SIGNAL = 1.9; EXPRESSED IN HELA, SIGNAL = 1.6; EXPRESSED IN BRAIN, SIGNAL =   2; EXPRESSED IN FETAL LIVER, SIGNAL = 1.8
LPFHGCCTKEALCSWRQ

SEQ ID NO: 27403 - protein, 26 aa, Homo sapiens
  MAP TO AL096794.3; EXPRESSED IN FETAL LIVER, SIGNAL = 0.88; EXPRESSED IN BONE MARROW, SIGNAL = 0.89; EXPRESSED IN PLACENTA, SIGNAL =   1; EXPRESSED IN BRAIN, SIGNAL =   1; EXPRESSED IN LUNG, SIGNAL = 0.96; EXPRESSED IN ADULT LIVER, SIGNAL = 0.88; EXPRESSED IN HELA, SIGNAL = 0.78
PLQMKVSLKGKTVGRTFYGGFSLSLF

SEQ ID NO: 27404 - protein, 44 aa, Homo sapiens
  MAP TO AL049647.7; EXPRESSED IN FETAL LIVER, SIGNAL = 0.63; EXPRESSED IN BONE MARROW, SIGNAL = 0.69; EXPRESSED IN BRAIN, SIGNAL = 0.69; EXPRESSED IN PLACENTA, SIGNAL = 0.86; EXPRESSED IN LUNG, SIGNAL = 0.84; EXPRESSED IN ADULT LIVER, SIGNAL = 0.95; SWISSPROT HIT: P54643, EVALUE 2.20e+00
CCLLSKLCQSVLGLFHNPLSICPGQTLLHCVSASYISPETISPS

SEQ ID NO: 27405 - protein, 86 aa, Homo sapiens
  MAP TO CHR22_19.0; EXPRESSED IN BONE MARROW, SIGNAL = 1.8; EXPRESSED IN BRAIN, SIGNAL = 1.8; EXPRESSED IN HELA, SIGNAL = 1.3; EXPRESSED IN HEART, SIGNAL = 1.8; EXPRESSED IN FETAL LIVER, SIGNAL = 1.8; EXPRESSED IN LUNG, SIGNAL = 1.9; EXPRESSED IN PLACENTA, SIGNAL = 1.8; SWISSPROT HIT: Q10289, EVALUE 5.10e+00
QSTGPLRKQAAIHDTAKDVRLLEAQSASRFRVPQRTQARLIQGKRFEETARDVDTRPRKVAWAHTFSSRGKTKGKDLFFFSLKLKL

SEQ ID NO: 27406 - protein, 18 aa, Homo sapiens
  MAP TO CHR22_19.0; EXPRESSED IN BONE MARROW, SIGNAL = 1.8; EXPRESSED IN BRAIN, SIGNAL = 1.8; EXPRESSED IN HELA, SIGNAL = 1.3; EXPRESSED IN HEART, SIGNAL = 1.8; EXPRESSED IN FETAL LIVER, SIGNAL = 1.8; EXPRESSED IN LUNG, SIGNAL = 1.9; EXPRESSED IN PLACENTA, SIGNAL = 1.8
EHWAPAKTGGYSRHCKRC

SEQ ID NO: 27407 - protein, 34 aa, Homo sapiens
  MAP TO AC018667.5; EXPRESSED IN BONE MARROW, SIGNAL = 2.4; EXPRESSED IN BRAIN, SIGNAL = 2.2; EXPRESSED IN HELA, SIGNAL = 0.88; EXPRESSED IN HEART, SIGNAL = 1.9; EXPRESSED IN PLACENTA, SIGNAL = 2.5; EXPRESSED IN LUNG, SIGNAL = 2.4; EXPRESSED IN FETAL LIVER, SIGNAL = 2.2; EXPRESSED IN ADULT LIVER, SIGNAL = 2.2
CGLTLITTVFIRGRSSIIIRRDVMMKIDSRVMQP

SEQ ID NO: 27408 - protein, 30 aa, Homo sapiens
  MAP TO AL137861.1; EXPRESSED IN HELA, SIGNAL = 0.5; EXPRESSED IN FETAL LIVER, SIGNAL = 0.79; EXPRESSED IN BONE MARROW, SIGNAL = 0.83; EXPRESSED IN PLACENTA, SIGNAL =   1; EXPRESSED IN LUNG, SIGNAL = 0.99; EXPRESSED IN BRAIN, SIGNAL = 0.74; EXPRESSED IN ADULT LIVER, SIGNAL =   1
GWCPLKMWLCTSPGRSVRAWMMLRGPSTGT

SEQ ID NO: 27409 - protein, 50 aa, Homo sapiens
  MAP TO CHR22_212.0; EXPRESSED IN HELA, SIGNAL = 3.3; EXPRESSED IN FETAL LIVER, SIGNAL = 2.4; EXPRESSED IN LUNG, SIGNAL = 3.9; EXPRESSED IN BONE MARROW, SIGNAL = 2.8; EXPRESSED IN BRAIN, SIGNAL = 2.1; EXPRESSED IN HEART, SIGNAL = 1.8
TPTKKGKREREKRRRRRRRRRRRRRRRRRRRRRRRRRRGRGRGRGGRGRR

SEQ ID NO: 27410 - protein, 99 aa, Homo sapiens
  MAP TO CHR22_212.0; EXPRESSED IN HELA, SIGNAL = 3.3; EXPRESSED IN FETAL LIVER, SIGNAL = 2.4; EXPRESSED IN LUNG, SIGNAL = 3.9; EXPRESSED IN BONE MARROW, SIGNAL = 2.8; EXPRESSED IN BRAIN, SIGNAL = 2.1; EXPRESSED IN HEART, SIGNAL = 1.8
HPQRRERERERKEEEEGGGGGEGEGEEEGEEEGEGEGGEGEEEEEEEEEDEEEEEEKEEEEEEKLVYFELQEFLMHLFLYYPLYFFLSECDLKQIISNP

SEQ ID NO: 27411 - protein, 50 aa, Homo sapiens
  MAP TO AC004845.2; EXPRESSED IN BRAIN, SIGNAL = 0.56; EXPRESSED IN BONE MARROW, SIGNAL = 0.57; EXPRESSED IN PLACENTA, SIGNAL = 0.66; EXPRESSED IN LUNG, SIGNAL = 0.59; EXPRESSED IN ADULT LIVER, SIGNAL = 0.64
LMMQAHDNSVIVTIIIIIIIIIIISSQQIVIEHLLYAGQVYFACFTLLSP

SEQ ID NO: 27412 - protein, 25 aa, Homo sapiens
  MAP TO AC004845.2; EXPRESSED IN BRAIN, SIGNAL = 0.56; EXPRESSED IN BONE MARROW, SIGNAL = 0.57; EXPRESSED IN PLACENTA, SIGNAL = 0.66; EXPRESSED IN LUNG, SIGNAL = 0.59; EXPRESSED IN ADULT LIVER, SIGNAL = 0.64
RLMTTVSSSPSSSSSSSSSSYHHSK

SEQ ID NO: 27413 - protein, 77 aa, Homo sapiens
  MAP TO CHR22_105.0; EXPRESSED IN HELA, SIGNAL = 1.1; EXPRESSED IN PLACENTA, SIGNAL = 1.9; EXPRESSED IN FETAL LIVER, SIGNAL =   2; EXPRESSED IN LUNG, SIGNAL = 1.8; EXPRESSED IN ADULT LIVER, SIGNAL = 1.9; EXPRESSED IN BONE MARROW, SIGNAL = 2.1; EXPRESSED IN BRAIN, SIGNAL =   2; EXPRESSED IN HEART, SIGNAL =   2; SWISSPROT HIT: Q9VHB6, EVALUE 9.00e+00
SFPVLTRRICTFCLHSLRICWIRACFPGRNASTRALLLVAGRIPLLSLNLQRPPGYSQLLILVDQQATKEGILDPDK

SEQ ID NO: 27414 - protein, 32 aa, Homo sapiens
  MAP TO CHR22_105.0; EXPRESSED IN HELA, SIGNAL = 1.1; EXPRESSED IN PLACENTA, SIGNAL = 1.9; EXPRESSED IN FETAL LIVER, SIGNAL =   2; EXPRESSED IN LUNG, SIGNAL = 1.8; EXPRESSED IN ADULT LIVER, SIGNAL = 1.9; EXPRESSED IN BONE MARROW, SIGNAL = 2.1; EXPRESSED IN BRAIN, SIGNAL =   2; EXPRESSED IN HEART, SIGNAL =   2
KDTSAEPESAKTTRLLSAPHTGGPAGHKGGDT

SEQ ID NO: 27415 - protein, 41 aa, Homo sapiens
  MAP TO AL136162.4; EXPRESSED IN BRAIN, SIGNAL = 1.1; EXPRESSED IN FETAL LIVER, SIGNAL = 0.94; EXPRESSED IN PLACENTA, SIGNAL = 0.99; EXPRESSED IN LUNG, SIGNAL = 0.86; EXPRESSED IN BONE MARROW, SIGNAL = 0.75; EXPRESSED IN ADULT LIVER, SIGNAL = 0.85
LANDDSNDEAFHQLEHILHPRISTWYPHRRALTMWLEEQRK

SEQ ID NO: 27416 - protein, 57 aa, Homo sapiens
  MAP TO AL133330.5; EXPRESSED IN BRAIN, SIGNAL =   2; EXPRESSED IN HEART, SIGNAL = 1.7; EXPRESSED IN HELA, SIGNAL = 1.2; EXPRESSED IN PLACENTA, SIGNAL = 1.3; EXPRESSED IN FETAL LIVER, SIGNAL = 1.6; EXPRESSED IN BONE MARROW, SIGNAL = 1.9; SWISSPROT HIT: Q09575, EVALUE 6.10e+00
GIQMKQKARRLMISRGLESFAKSWLRKYIHHFRTHTTSILCLTFPGLELQITCWRHV

SEQ ID NO: 27417 - protein, 39 aa, Homo sapiens
  MAP TO AL133553.2; EXPRESSED IN BRAIN, SIGNAL = 1.6; EXPRESSED IN HEART, SIGNAL = 1.5; EXPRESSED IN HELA, SIGNAL = 0.94; EXPRESSED IN ADULT LIVER, SIGNAL = 4.2; EXPRESSED IN FETAL LIVER, SIGNAL = 1.8; EXPRESSED IN PLACENTA, SIGNAL = 1.8; EXPRESSED IN LUNG, SIGNAL = 1.8; EXPRESSED IN BONE MARROW, SIGNAL = 1.6; SWISSPROT HIT: P21128, EVALUE 6.00e-09
LSCKGRCFESFERGRECDCDAQCKKYDKCCPDYESFCAE

SEQ ID NO: 27418 - protein, 64 aa, Homo sapiens
  MAP TO AL133553.2; EXPRESSED IN BRAIN, SIGNAL = 1.6; EXPRESSED IN HEART, SIGNAL = 1.5; EXPRESSED IN HELA, SIGNAL = 0.94; EXPRESSED IN ADULT LIVER, SIGNAL = 4.2; EXPRESSED IN FETAL LIVER, SIGNAL = 1.8; EXPRESSED IN PLACENTA, SIGNAL = 1.8; EXPRESSED IN LUNG, SIGNAL = 1.8; EXPRESSED IN BONE MARROW, SIGNAL = 1.6; SWISSPROT HIT: P35381, EVALUE 3.50e+00
SFPVKAAALSPSREGGSVTATPNVRSMTSAVPIMRVSVQKVSITVPTNASQYSQICAPTLASLI

SEQ ID NO: 27419 - protein, 24 aa, Homo sapiens
  MAP TO CHR22_127.0; EXPRESSED IN PLACENTA, SIGNAL = 0.48; EXPRESSED IN HELA, SIGNAL = 0.75; EXPRESSED IN BRAIN, SIGNAL = 0.77; EXPRESSED IN FETAL LIVER, SIGNAL = 0.61; EXPRESSED IN BONE MARROW, SIGNAL = 0.7
ECQPSRKHEENQNKACHNPIAQNY

SEQ ID NO: 27420 - protein, 144 aa, Homo sapiens
  MAP TO CHR22_233.0; EXPRESSED IN BONE MARROW, SIGNAL =  19; EXPRESSED IN HEART, SIGNAL =  10; EXPRESSED IN LUNG, SIGNAL =  15; EXPRESSED IN BRAIN, SIGNAL =  15; EXPRESSED IN PLACENTA, SIGNAL =  16; EXPRESSED IN HELA, SIGNAL =  14; EXPRESSED IN FETAL LIVER, SIGNAL =  16; SWISSPROT HIT: Q03965, EVALUE 2.20e+00
PREPTATPAAGTLPLSSSGKPGGLRTGSAVAEHRQVSKLPVGLTRTLPGSGPHVAPCAPSLGSKAWTTDAEQFDCLIMPRASISPAADMTTSAQYFSEKGKLKPKPVFMDRCTMAGMLQEGVSLGPRVPTCQGWALCVESVHQE

SEQ ID NO: 27421 - protein, 149 aa, Homo sapiens
  MAP TO AC012360.2; EXPRESSED IN HELA, SIGNAL = 0.87; EXPRESSED IN BRAIN, SIGNAL = 1.2; EXPRESSED IN FETAL LIVER, SIGNAL = 1.1; EXPRESSED IN HEART, SIGNAL = 1.2; EXPRESSED IN PLACENTA, SIGNAL = 1.6; EXPRESSED IN LUNG, SIGNAL = 1.5; EXPRESSED IN BONE MARROW, SIGNAL = 1.2; EXPRESSED IN ADULT LIVER, SIGNAL = 1.4; SWISSPROT HIT: P34992, EVALUE 8.00e-14
MACNSTSLEAYTYLLLNTSNASDSGSTQLPAPLRISLAIVMLLMTVVGFLGNTVVCIIVYQRPAMRSAINLLLATLAFSDIMLSLCCMPFTAVTLITVRWHFGDHFCRLSATLYWFFVLEGVAILLIISVDRFLIIVQRQDKLNPRRAK

SEQ ID NO: 27422 - protein, 63 aa, Homo sapiens
  MAP TO AF235095.1; EXPRESSED IN HEART, SIGNAL = 1.2; EXPRESSED IN BONE MARROW, SIGNAL = 0.99; EXPRESSED IN LUNG, SIGNAL = 0.98; EXPRESSED IN HELA, SIGNAL = 0.96; EXPRESSED IN BRAIN, SIGNAL = 1.1; EXPRESSED IN ADULT LIVER, SIGNAL = 0.69; EXPRESSED IN FETAL LIVER, SIGNAL = 0.94
FLVLSLEFANWQLLTYFSLQTHCVWPAGRLCIVENSEVSGRGMSLAVRNLYVRDHLRRALFSH

SEQ ID NO: 27423 - protein, 53 aa, Homo sapiens
  MAP TO AL133266.3; EXPRESSED IN BRAIN, SIGNAL = 1.6; EXPRESSED IN HELA, SIGNAL = 1.4; EXPRESSED IN FETAL LIVER, SIGNAL = 1.3; EXPRESSED IN BONE MARROW, SIGNAL = 1.5; EXPRESSED IN HEART, SIGNAL = 1.3; SWISSPROT HIT: O95696, EVALUE 8.10e+00
LVDCLRDLGPTDWQLACLVCKTLWNFSENITNASSCFGNEDTNTLLLLLSSFL

SEQ ID NO: 27424 - protein, 59 aa, Homo sapiens
  MAP TO CHR22_229.0; EXPRESSED IN BONE MARROW, SIGNAL = 2.2; EXPRESSED IN BRAIN, SIGNAL = 1.8; EXPRESSED IN HELA, SIGNAL = 3.3; EXPRESSED IN LUNG, SIGNAL =   1; EXPRESSED IN FETAL LIVER, SIGNAL = 1.8; EXPRESSED IN PLACENTA, SIGNAL =   1
DDDDGDYGDNDDGDDGDDDNDDGDDGDDGDVDDGDDGDDDDGDGGDDGDGDDGGDDTPV

SEQ ID NO: 27425 - protein, 40 aa, Homo sapiens
  MAP TO AF168787.1; EXPRESSED IN PLACENTA, SIGNAL = 1.1; EXPRESSED IN LUNG, SIGNAL = 1.2; EXPRESSED IN ADULT LIVER, SIGNAL = 1.3; EXPRESSED IN HELA, SIGNAL = 2.4; EXPRESSED IN BRAIN, SIGNAL =   1; EXPRESSED IN FETAL LIVER, SIGNAL = 1.2; SWISSPROT HIT: O60931, EVALUE 2.00e-17
EQFLLKYPNGVNPVNSNDVFFSLHAVVLTLIIIVQCCLYE

SEQ ID NO: 27426 - protein, 32 aa, Homo sapiens
  MAP TO AF168787.1; EXPRESSED IN PLACENTA, SIGNAL = 1.1; EXPRESSED IN LUNG, SIGNAL = 1.2; EXPRESSED IN ADULT LIVER, SIGNAL = 1.3; EXPRESSED IN HELA, SIGNAL = 2.4; EXPRESSED IN BRAIN, SIGNAL =   1; EXPRESSED IN FETAL LIVER, SIGNAL = 1.2
CPTSLPTWRGGPAAPHHPASPTHQTGAVSPQI

SEQ ID NO: 27427 - protein, 26 aa, Homo sapiens
  MAP TO CHR22_218.0; EXPRESSED IN HEART, SIGNAL = 1.1; EXPRESSED IN BONE MARROW, SIGNAL = 1.5; EXPRESSED IN PLACENTA, SIGNAL = 0.66; EXPRESSED IN LUNG, SIGNAL = 0.68; EXPRESSED IN BRAIN, SIGNAL = 1.3; EXPRESSED IN HELA, SIGNAL =   2; EXPRESSED IN FETAL LIVER, SIGNAL = 1.3
PLDFLYLSGISGYPAPALHDQQDWRG

SEQ ID NO: 27428 - protein, 83 aa, Homo sapiens
  MAP TO CHR22_218.0; EXPRESSED IN HEART, SIGNAL = 1.1; EXPRESSED IN BONE MARROW, SIGNAL = 1.5; EXPRESSED IN PLACENTA, SIGNAL = 0.66; EXPRESSED IN LUNG, SIGNAL = 0.68; EXPRESSED IN BRAIN, SIGNAL = 1.3; EXPRESSED IN HELA, SIGNAL =   2; EXPRESSED IN FETAL LIVER, SIGNAL = 1.3; SWISSPROT HIT: O43731, EVALUE 1.00e-43
LWTFSIYLESVAILPQLFMISKTGEAETITTHYLFFLGLYRALYLANWIRRYQTENFYDQIAVVSGVVQTIFYCDFFYLYVTK

SEQ ID NO: 27429 - protein, 26 aa, Homo sapiens
  MAP TO CHR22_29.0; EXPRESSED IN BRAIN, SIGNAL =   2; EXPRESSED IN HELA, SIGNAL = 1.7; EXPRESSED IN HEART, SIGNAL =   2; EXPRESSED IN LUNG, SIGNAL = 1.9; EXPRESSED IN BONE MARROW, SIGNAL = 1.9
CGTASFLCRRSTALTQLLWSSVSSGI

SEQ ID NO: 27430 - protein, 80 aa, Homo sapiens
  MAP TO AC013624.4; EXPRESSED IN BONE MARROW, SIGNAL = 1.9; EXPRESSED IN LUNG, SIGNAL = 2.9; EXPRESSED IN BRAIN, SIGNAL = 1.1; EXPRESSED IN PLACENTA, SIGNAL = 1.7; EXPRESSED IN ADULT LIVER, SIGNAL = 3.6; EXPRESSED IN HELA, SIGNAL = 0.75; SWISSPROT HIT: P04933, EVALUE 1.50e+00
EDMGEEDHGEEDGSTGFSPWILETPSKAPPLRTVRSLEDEGKVRKHIKTQKKIANQNAVHLNKRILRKNKVGDGEEEKRK

SEQ ID NO: 27431 - protein, 21 aa, Homo sapiens
  MAP TO AC013624.4; EXPRESSED IN BONE MARROW, SIGNAL = 1.9; EXPRESSED IN LUNG, SIGNAL = 2.9; EXPRESSED IN BRAIN, SIGNAL = 1.1; EXPRESSED IN PLACENTA, SIGNAL = 1.7; EXPRESSED IN ADULT LIVER, SIGNAL = 3.6; EXPRESSED IN HELA, SIGNAL = 0.75
RTWEKKIMGKKMAPQAFLHGF

SEQ ID NO: 27432 - protein, 41 aa, Homo sapiens
  MAP TO AC016729.5; EXPRESSED IN BONE MARROW, SIGNAL = 0.76; EXPRESSED IN BRAIN, SIGNAL = 0.55; EXPRESSED IN PLACENTA, SIGNAL = 0.53; EXPRESSED IN HELA, SIGNAL = 1.5; EXPRESSED IN FETAL LIVER, SIGNAL = 0.65
DKLISNNDGGIFDDPPALSEAGVMLPEQPAHDDMDEDDNVS

SEQ ID NO: 27433 - protein, 23 aa, Homo sapiens
  MAP TO AC016729.5; EXPRESSED IN BONE MARROW, SIGNAL = 0.76; EXPRESSED IN BRAIN, SIGNAL = 0.55; EXPRESSED IN PLACENTA, SIGNAL = 0.53; EXPRESSED IN HELA, SIGNAL = 1.5; EXPRESSED IN FETAL LIVER, SIGNAL = 0.65
MTNLLVIMMAVSLMIPLPSLRQG

SEQ ID NO: 27434 - protein, 57 aa, Homo sapiens
  MAP TO AL160168.1; EXPRESSED IN FETAL LIVER, SIGNAL =   1; EXPRESSED IN PLACENTA, SIGNAL = 1.1; EXPRESSED IN ADULT LIVER, SIGNAL = 1.5; EXPRESSED IN BRAIN, SIGNAL = 1.2; SWISSPROT HIT: Q55179, EVALUE 3.60e+00
CVSEWSNKAREFRIYKDPVRDGEGTFKIAKQAAAYYIPQYFYLSKDQVLQSQHATTN

SEQ ID NO: 27435 - protein, 18 aa, Homo sapiens
  MAP TO AL160168.1; EXPRESSED IN FETAL LIVER, SIGNAL =   1; EXPRESSED IN PLACENTA, SIGNAL = 1.1; EXPRESSED IN ADULT LIVER, SIGNAL = 1.5; EXPRESSED IN BRAIN, SIGNAL = 1.2
VSVNGAIKPENSGYIKIQ

SEQ ID NO: 27436 - protein, 45 aa, Homo sapiens
  MAP TO AC018692.5; EXPRESSED IN ADULT LIVER, SIGNAL = 0.45; EXPRESSED IN BONE MARROW, SIGNAL = 0.44; EXPRESSED IN BRAIN, SIGNAL = 0.38; EXPRESSED IN FETAL LIVER, SIGNAL = 0.39; EXPRESSED IN PLACENTA, SIGNAL = 0.51; SWISSPROT HIT: P18503, EVALUE 4.40e-01
KYPEGPQLRLREQSPDSPTLNGHELYASWGFSACPVTLDNVLALD

SEQ ID NO: 27437 - protein, 19 aa, Homo sapiens
  MAP TO AC018692.5; EXPRESSED IN ADULT LIVER, SIGNAL = 0.45; EXPRESSED IN BONE MARROW, SIGNAL = 0.44; EXPRESSED IN BRAIN, SIGNAL = 0.38; EXPRESSED IN FETAL LIVER, SIGNAL = 0.39; EXPRESSED IN PLACENTA, SIGNAL = 0.51
STLKAPSSDSESRAQTLLL

SEQ ID NO: 27438 - protein, 19 aa, Homo sapiens
  MAP TO CHR22_49.0; EXPRESSED IN BONE MARROW, SIGNAL = 1.2; EXPRESSED IN BRAIN, SIGNAL = 0.97; EXPRESSED IN HELA, SIGNAL = 1.4; EXPRESSED IN HEART, SIGNAL = 1.7; EXPRESSED IN LUNG, SIGNAL = 0.53
SRGRLRWELLSHVFCGLFP

SEQ ID NO: 27439 - protein, 110 aa, Homo sapiens
  MAP TO CHR22_49.0; EXPRESSED IN BONE MARROW, SIGNAL = 1.2; EXPRESSED IN BRAIN, SIGNAL = 0.97; EXPRESSED IN HELA, SIGNAL = 1.4; EXPRESSED IN HEART, SIGNAL = 1.7; EXPRESSED IN LUNG, SIGNAL = 0.53; SWISSPROT HIT: P98066, EVALUE 2.00e-10
LVGACGGNYSAMSSVVYSPDFPDTYATGRVCYWTIRVPGASHIHFSFPLFDIRDSADMVELLDGYTHRVLARFHGRSRPPLSFNVSLDFVILYFFSDRINQAQGFAVLYQ

SEQ ID NO: 27440 - protein, 52 aa, Homo sapiens
  MAP TO CHR22_136.0; EXPRESSED IN PLACENTA, SIGNAL = 0.41; EXPRESSED IN FETAL LIVER, SIGNAL = 0.58; EXPRESSED IN BRAIN, SIGNAL = 0.75; EXPRESSED IN HELA, SIGNAL = 0.7; SWISSPROT HIT: Q10233, EVALUE 2.80e+00
LHIPEAGELVHKEGVLFDDGIENILGDESQRHSQDSRMVQLPILALKALHPL

SEQ ID NO: 27441 - protein, 44 aa, Homo sapiens
  MAP TO AC018691.5; EXPRESSED IN BONE MARROW, SIGNAL = 0.43; EXPRESSED IN BRAIN, SIGNAL = 0.48; EXPRESSED IN PLACENTA, SIGNAL = 0.56; EXPRESSED IN LUNG, SIGNAL = 0.51; EXPRESSED IN ADULT LIVER, SIGNAL = 0.47
SDIDQITAIFDVKLLDFTIKGSNYTFRLLLIASNTNPHPRETHL

SEQ ID NO: 27442 - protein, 41 aa, Homo sapiens
  MAP TO AC021252.3; EXPRESSED IN BONE MARROW, SIGNAL = 1.4; EXPRESSED IN LUNG, SIGNAL =   2; EXPRESSED IN ADULT LIVER, SIGNAL =   2; EXPRESSED IN BRAIN, SIGNAL = 0.87; EXPRESSED IN FETAL LIVER, SIGNAL = 1.4
LIGNRDKGAEEEVYQHRDEPVKQIQNVGQSTAGVPNPWAVA

SEQ ID NO: 27443 - protein, 21 aa, Homo sapiens
  MAP TO AL138967.2; EXPRESSED IN BRAIN, SIGNAL = 0.71; EXPRESSED IN LUNG, SIGNAL = 0.78; EXPRESSED IN ADULT LIVER, SIGNAL = 0.77; EXPRESSED IN FETAL LIVER, SIGNAL = 0.72; EXPRESSED IN PLACENTA, SIGNAL = 0.72; EXPRESSED IN BONE MARROW, SIGNAL = 0.71
CRVENPKLLSILRIRKNCPRP

SEQ ID NO: 27444 - protein, 69 aa, Homo sapiens
  MAP TO AC021635.3; EXPRESSED IN FETAL LIVER, SIGNAL = 0.58; EXPRESSED IN BONE MARROW, SIGNAL = 0.65; EXPRESSED IN PLACENTA, SIGNAL = 0.74; EXPRESSED IN LUNG, SIGNAL = 0.7; EXPRESSED IN ADULT LIVER, SIGNAL = 0.73; EXPRESSED IN BRAIN, SIGNAL = 0.57; SWISSPROT HIT: P17513, EVALUE 4.50e+00
LKKQASLEKPGNDLESPLINNIDQTLHRVATTASVIYKIWEHRSHHPSSKKIKHCKLKKKSKEEGARRY

SEQ ID NO: 27445 - protein, 44 aa, Homo sapiens
  MAP TO CHR22_145.0; EXPRESSED IN HELA, SIGNAL = 2.1; EXPRESSED IN BRAIN, SIGNAL = 0.79; EXPRESSED IN LUNG, SIGNAL = 0.7; EXPRESSED IN PLACENTA, SIGNAL = 0.71; EXPRESSED IN ADULT LIVER, SIGNAL = 0.75; EXPRESSED IN BONE MARROW, SIGNAL = 0.92; SWISSPROT HIT: P46593, EVALUE 4.90e+00
VSAQRATPRDKPPVPSSLASVPDPHLLLPGDFSATRAGPGLSTA

SEQ ID NO: 27446 - protein, 42 aa, Homo sapiens
  MAP TO CHR22_83.0; EXPRESSED IN BONE MARROW, SIGNAL = 0.95; EXPRESSED IN BRAIN, SIGNAL = 0.93; EXPRESSED IN HELA, SIGNAL = 2.3; EXPRESSED IN LUNG, SIGNAL = 0.83; EXPRESSED IN PLACENTA, SIGNAL = 0.95; EXPRESSED IN ADULT LIVER, SIGNAL = 0.8; SWISSPROT HIT: O35787, EVALUE 3.80e+00
PLPFDDSHPLPQGVWGVAGNPPARAGPGDCPAHRGLRHDAAF

SEQ ID NO: 27447 - protein, 48 aa, Homo sapiens
  MAP TO CHR22_83.0; EXPRESSED IN BONE MARROW, SIGNAL = 0.95; EXPRESSED IN BRAIN, SIGNAL = 0.93; EXPRESSED IN HELA, SIGNAL = 2.3; EXPRESSED IN LUNG, SIGNAL = 0.83; EXPRESSED IN PLACENTA, SIGNAL = 0.95; EXPRESSED IN ADULT LIVER, SIGNAL = 0.8; SWISSPROT HIT: P55194, EVALUE 3.00e-15
HSPSMTATHFPRVYGVSLATHLQELGREIALPIEACVMMLLSEGMKEE

SEQ ID NO: 27448 - protein, 95 aa, Homo sapiens
  MAP TO AC015956.3; EXPRESSED IN BONE MARROW, SIGNAL = 0.87; EXPRESSED IN BRAIN, SIGNAL = 1.1; EXPRESSED IN HELA, SIGNAL = 0.79; EXPRESSED IN ADULT LIVER, SIGNAL = 0.74
EGYAAFQEDSSGDEAESPSKMKRSKGIHVFKKPSFSKKKEKDFKIKEKPKEEKHKEEKHKEEKHKEKKSKDLTAADVVKQWKEKKKKKKPIQEPE

SEQ ID NO: 27449 - protein, 21 aa, Homo sapiens
  MAP TO AC015956.3; EXPRESSED IN BONE MARROW, SIGNAL = 0.87; EXPRESSED IN BRAIN, SIGNAL = 1.1; EXPRESSED IN HELA, SIGNAL = 0.79; EXPRESSED IN ADULT LIVER, SIGNAL = 0.74
LKAMQPFRKIALEMRQKVLLK

SEQ ID NO: 27450 - protein, 72 aa, Homo sapiens
  MAP TO CHR22_180.0; EXPRESSED IN BONE MARROW, SIGNAL = 0.55; EXPRESSED IN HELA, SIGNAL = 0.61; EXPRESSED IN BRAIN, SIGNAL = 0.62; EXPRESSED IN FETAL LIVER, SIGNAL = 0.49; SWISSPROT HIT: Q10707, EVALUE 1.20e+00
GNQDGKEAGGQVRIPATAGPPEGHASPQGTSGSCGLLLSVPNVKLQQKQNCHETKPPIEIGYAEALWLWTEF

SEQ ID NO: 27451 - protein, 21 aa, Homo sapiens
  MAP TO CHR22_180.0; EXPRESSED IN BONE MARROW, SIGNAL = 0.55; EXPRESSED IN HELA, SIGNAL = 0.61; EXPRESSED IN BRAIN, SIGNAL = 0.62; EXPRESSED IN FETAL LIVER, SIGNAL = 0.49; SWISSPROT HIT: Q64355, EVALUE 2.30e+00
RKPRWEGGRGPGPYSCNSRTS

SEQ ID NO: 27452 - protein, 26 aa, Homo sapiens
  MAP TO AC021619.3; EXPRESSED IN PLACENTA, SIGNAL = 1.2; EXPRESSED IN LUNG, SIGNAL = 1.1; EXPRESSED IN FETAL LIVER, SIGNAL = 1.1; EXPRESSED IN ADULT LIVER, SIGNAL = 1.1; EXPRESSED IN BONE MARROW, SIGNAL = 1.2; EXPRESSED IN BRAIN, SIGNAL = 1.1; EXPRESSED IN HELA, SIGNAL = 0.57
PPTAMQHSNEEQIRSEEQPEPIVYKK

SEQ ID NO: 27453 - protein, 32 aa, Homo sapiens
  MAP TO AL136317.2; EXPRESSED IN BONE MARROW, SIGNAL = 0.44; EXPRESSED IN BRAIN, SIGNAL = 0.52; EXPRESSED IN ADULT LIVER, SIGNAL = 0.3
SIIFLILCMIYRSRVGGFSISMVLPLHYHDIL

SEQ ID NO: 27454 - protein, 43 aa, Homo sapiens
  MAP TO AL080245.14; EXPRESSED IN BONE MARROW, SIGNAL = 0.69; EXPRESSED IN PLACENTA, SIGNAL = 0.84; EXPRESSED IN LUNG, SIGNAL = 0.71; EXPRESSED IN HELA, SIGNAL = 0.6; EXPRESSED IN BRAIN, SIGNAL = 0.78; EXPRESSED IN FETAL LIVER, SIGNAL = 0.67; SWISSPROT HIT: P54697, EVALUE 4.00e-02
NPRHQGKDRAATFEELCHNYAHERLQLLFYQRTFVSTLQRYQE

SEQ ID NO: 27455 - protein, 48 aa, Homo sapiens
  MAP TO AC013613.3; EXPRESSED IN HELA, SIGNAL = 1.5; EXPRESSED IN HEART, SIGNAL =   6; EXPRESSED IN PLACENTA, SIGNAL =   1; EXPRESSED IN BONE MARROW, SIGNAL = 0.55; EXPRESSED IN BRAIN, SIGNAL = 0.48; SWISSPROT HIT: P38694, EVALUE 1.70e+00
CSLWTISSISMASSGICVEILTTPRSASASHKPLLSSQPIPATAYYTS

SEQ ID NO: 27456 - protein, 23 aa, Homo sapiens
  MAP TO AC021609.3; EXPRESSED IN FETAL LIVER, SIGNAL = 1.8; EXPRESSED IN BONE MARROW, SIGNAL = 1.9; EXPRESSED IN BRAIN, SIGNAL =   2; EXPRESSED IN PLACENTA, SIGNAL = 2.2; EXPRESSED IN LUNG, SIGNAL = 2.3; EXPRESSED IN ADULT LIVER, SIGNAL = 1.8
RHPHRALLKVPASTCLLCTPGCC

SEQ ID NO: 27457 - protein, 24 aa, Homo sapiens
  MAP TO AL136128.2; EXPRESSED IN HELA, SIGNAL = 1.6; EXPRESSED IN BRAIN, SIGNAL = 2.4; EXPRESSED IN FETAL LIVER, SIGNAL = 2.1; EXPRESSED IN BONE MARROW, SIGNAL = 2.8; EXPRESSED IN HEART, SIGNAL = 2.1; EXPRESSED IN ADULT LIVER, SIGNAL = 1.4
CTKRLTLLTRLLTQHPLFSLWIRE

SEQ ID NO: 27458 - protein, 105 aa, Homo sapiens
  MAP TO CHR22_151.0; EXPRESSED IN BONE MARROW, SIGNAL =  22; EXPRESSED IN BRAIN, SIGNAL = 0.69; EXPRESSED IN LUNG, SIGNAL =  11; EXPRESSED IN FETAL LIVER, SIGNAL = 0.99; SWISSPROT HIT: P15814, EVALUE 4.00e-53
QPKATPSVTLFLPSSEELQANKATLVCLMNDFYLGILTVTWKADGTPITQGVEMTTPSKQSNSKYMASSYLSLTPEQWRSRRSYSCQVMHEGSTAEKTVAPAECS

SEQ ID NO: 27459 - protein, 29 aa, Homo sapiens
  MAP TO CHR22_151.0; EXPRESSED IN BONE MARROW, SIGNAL =  22; EXPRESSED IN BRAIN, SIGNAL = 0.69; EXPRESSED IN LUNG, SIGNAL =  11; EXPRESSED IN FETAL LIVER, SIGNAL = 0.99
VSPRPPPRSLCSCRPLRSSKPTRPHWCVS

SEQ ID NO: 27460 - protein, 25 aa, Homo sapiens
  MAP TO CHR22_104.0; EXPRESSED IN PLACENTA, SIGNAL =   3; EXPRESSED IN HELA, SIGNAL = 8.1; EXPRESSED IN BRAIN, SIGNAL = 5.9; EXPRESSED IN FETAL LIVER, SIGNAL = 5.9
SCVQRCWHDDDTAPASEAKGHSFTS

SEQ ID NO: 27461 - protein, 48 aa, Homo sapiens
  MAP TO AL160313.1; EXPRESSED IN PLACENTA, SIGNAL = 1.1; EXPRESSED IN BONE MARROW, SIGNAL = 0.45; EXPRESSED IN LUNG, SIGNAL = 0.55; EXPRESSED IN BRAIN, SIGNAL = 0.67; EXPRESSED IN FETAL LIVER, SIGNAL = 0.77; SWISSPROT HIT: P51704, EVALUE 4.80e+00
MRCMGDTTLALDHLAVCMPALGNVGSDVVAFAGLVMEAGASSLVELDP

SEQ ID NO: 27462 - protein, 41 aa, Homo sapiens
  MAP TO AL136317.2; EXPRESSED IN BRAIN, SIGNAL = 1.9; EXPRESSED IN HEART, SIGNAL = 1.5; EXPRESSED IN HELA, SIGNAL = 0.76; EXPRESSED IN PLACENTA, SIGNAL =   2; EXPRESSED IN LUNG, SIGNAL = 1.6; EXPRESSED IN ADULT LIVER, SIGNAL = 1.5; EXPRESSED IN FETAL LIVER, SIGNAL = 1.7; EXPRESSED IN BONE MARROW, SIGNAL = 1.7; SWISSPROT HIT: P54891, EVALUE 3.80e+00
FSPRVVSRSSYPIGEGVSKVKTAEKEKKPRMTPSHSLQMKE

SEQ ID NO: 27463 - protein, 54 aa, Homo sapiens
  MAP TO AL031602.14; EXPRESSED IN HELA, SIGNAL = 1.6; EXPRESSED IN LUNG, SIGNAL = 3.3; EXPRESSED IN FETAL LIVER, SIGNAL = 3.1; EXPRESSED IN PLACENTA, SIGNAL = 3.5; EXPRESSED IN ADULT LIVER, SIGNAL = 3.1; EXPRESSED IN BONE MARROW, SIGNAL =   3; EXPRESSED IN BRAIN, SIGNAL = 2.7; EXPRESSED IN HEART, SIGNAL = 2.2; SWISSPROT HIT: P50636, EVALUE 3.00e-26
PSGCTFWGKKPWSRKKKILWQLGTLIGAPVGISLIAGIAIPAMVIGIPVYVGRK

SEQ ID NO: 27464 - protein, 30 aa, Homo sapiens
  MAP TO AL138499.1; EXPRESSED IN FETAL LIVER, SIGNAL = 0.97; EXPRESSED IN BONE MARROW, SIGNAL = 0.89; EXPRESSED IN BRAIN, SIGNAL = 1.1; EXPRESSED IN PLACENTA, SIGNAL =   1; EXPRESSED IN LUNG, SIGNAL = 1.3; EXPRESSED IN ADULT LIVER, SIGNAL = 1.3
LKGKEEQMNTMKAVLEEKEKDLANTGKWLQ

SEQ ID NO: 27465 - protein, 31 aa, Homo sapiens
  MAP TO CHR22_88.0; EXPRESSED IN BRAIN, SIGNAL = 0.45; EXPRESSED IN PLACENTA, SIGNAL = 0.56; EXPRESSED IN HELA, SIGNAL = 0.6; EXPRESSED IN BONE MARROW, SIGNAL = 0.42
SLWFSEAQKLVDSPPALERHAVVAAQQSLVQ

SEQ ID NO: 27466 - protein, 60 aa, Homo sapiens
  MAP TO CHR22_153.0; EXPRESSED IN BONE MARROW, SIGNAL = 0.43; EXPRESSED IN BRAIN, SIGNAL = 0.32; EXPRESSED IN HELA, SIGNAL =   2; EXPRESSED IN FETAL LIVER, SIGNAL = 0.38; SWISSPROT HIT: P49994, EVALUE 3.60e+00
HLKTEEELSEEKQILNEMLEVVEQRDSLVALLEEQRLREREEDKDLEAAMLSKGFSLNWS

SEQ ID NO: 27467 - protein, 24 aa, Homo sapiens
  MAP TO CHR22_153.0; EXPRESSED IN BONE MARROW, SIGNAL = 0.43; EXPRESSED IN BRAIN, SIGNAL = 0.32; EXPRESSED IN HELA, SIGNAL =   2; EXPRESSED IN FETAL LIVER, SIGNAL = 0.38
ARELELEDRQSRLQQELRERMAVE

SEQ ID NO: 27468 - protein, 24 aa, Homo sapiens
  MAP TO CHR22_153.0; EXPRESSED IN BONE MARROW, SIGNAL = 0.43; EXPRESSED IN BRAIN, SIGNAL = 0.32; EXPRESSED IN HELA, SIGNAL =   2; EXPRESSED IN FETAL LIVER, SIGNAL = 0.38; SWISSPROT HIT: O75638, EVALUE 6.80e+00
PGAGAGRPAESTAAGAPGTHGSGR

SEQ ID NO: 27469 - protein, 55 aa, Homo sapiens
  MAP TO AL137062.3; EXPRESSED IN ADULT LIVER, SIGNAL = 1.1; EXPRESSED IN BONE MARROW, SIGNAL = 1.2; EXPRESSED IN BRAIN, SIGNAL = 1.1; EXPRESSED IN HELA, SIGNAL = 0.68; EXPRESSED IN PLACENTA, SIGNAL = 1.2; EXPRESSED IN FETAL LIVER, SIGNAL =   1; EXPRESSED IN LUNG, SIGNAL = 1.2; SWISSPROT HIT: Q07108, EVALUE 2.00e-06
TWSKHAKPVACSGDWLGVRDKCFYFSDDTRNWTASKIFCSLQKAELAQIDTQEDM

SEQ ID NO: 27470 - protein, 18 aa, Homo sapiens
  MAP TO AL137062.3; EXPRESSED IN ADULT LIVER, SIGNAL = 1.1; EXPRESSED IN BONE MARROW, SIGNAL = 1.2; EXPRESSED IN BRAIN, SIGNAL = 1.1; EXPRESSED IN HELA, SIGNAL = 0.68; EXPRESSED IN PLACENTA, SIGNAL = 1.2; EXPRESSED IN FETAL LIVER, SIGNAL =   1; EXPRESSED IN LUNG, SIGNAL = 1.2
PHGPSMLNLWHVQGTGLE

SEQ ID NO: 27471 - protein, 19 aa, Homo sapiens
  MAP TO AL137008.1; EXPRESSED IN BONE MARROW, SIGNAL = 0.94; EXPRESSED IN BRAIN, SIGNAL = 1.1; EXPRESSED IN HELA, SIGNAL = 0.81; EXPRESSED IN FETAL LIVER, SIGNAL = 0.89; EXPRESSED IN ADULT LIVER, SIGNAL = 0.33
PLLMVYPVWKLQKIQTSYT

SEQ ID NO: 27472 - protein, 33 aa, Homo sapiens
  MAP TO AL136084.2; EXPRESSED IN HELA, SIGNAL = 3.1; EXPRESSED IN FETAL LIVER, SIGNAL = 1.5; EXPRESSED IN LUNG, SIGNAL = 1.1; EXPRESSED IN BONE MARROW, SIGNAL = 1.6; EXPRESSED IN BRAIN, SIGNAL = 1.8
ARALTRLQTPGIREAGLSQMFLPLIGRKTRIHP

SEQ ID NO: 27473 - protein, 41 aa, Homo sapiens
  MAP TO AL160236.1; EXPRESSED IN BRAIN, SIGNAL = 0.75; EXPRESSED IN HELA, SIGNAL = 0.51; EXPRESSED IN FETAL LIVER, SIGNAL = 0.84; EXPRESSED IN PLACENTA, SIGNAL =   1; EXPRESSED IN LUNG, SIGNAL = 0.75; SWISSPROT HIT: P38793, EVALUE 2.40e-02
QVMIDKNPGITSAVNKINNIDNMYRNFQMEVLSGEQNMMTK

SEQ ID NO: 27474 - protein, 27 aa, Homo sapiens
  MAP TO AL136304.2; EXPRESSED IN HEART, SIGNAL = 2.1; EXPRESSED IN HELA, SIGNAL =   2; EXPRESSED IN BRAIN, SIGNAL = 2.5; EXPRESSED IN PLACENTA, SIGNAL = 2.5; EXPRESSED IN FETAL LIVER, SIGNAL = 2.2; EXPRESSED IN ADULT LIVER, SIGNAL = 1.6; SWISSPROT HIT: Q92935, EVALUE 8.80e+00
VPGWWENSATGNSGCPWGPAYMPILMS

SEQ ID NO: 27475 - protein, 79 aa, Homo sapiens
  MAP TO CHR22_53.0; EXPRESSED IN FETAL LIVER, SIGNAL = 0.64; EXPRESSED IN LUNG, SIGNAL = 0.82; EXPRESSED IN BRAIN, SIGNAL = 0.64; EXPRESSED IN PLACENTA, SIGNAL = 0.74; EXPRESSED IN ADULT LIVER, SIGNAL = 0.74; SWISSPROT HIT: Q9KNU5, EVALUE 3.50e+00
HPPAPSWEIQHPHECGAQGHQLFHLLSARPVAPALHPQLTQQGLECAAALLEPVARVGGWEEDSRWQATGWGVQPEAHS

SEQ ID NO: 27476 - protein, 28 aa, Homo sapiens
  MAP TO CHR21_34.0; EXPRESSED IN HELA, SIGNAL = 3.9; EXPRESSED IN BRAIN, SIGNAL = 1.5; EXPRESSED IN LUNG, SIGNAL = 1.2; EXPRESSED IN HEART, SIGNAL = 1.4; EXPRESSED IN BONE MARROW, SIGNAL = 1.6
GLEKNQVKKSSTTSLKCGLGTWVALMAQ

SEQ ID NO: 27477 - protein, 48 aa, Homo sapiens
  MAP TO CHR22_220.0; EXPRESSED IN BRAIN, SIGNAL = 1.3; EXPRESSED IN LUNG, SIGNAL = 0.69; EXPRESSED IN HELA, SIGNAL = 1.9; EXPRESSED IN ADULT LIVER, SIGNAL = 0.73; EXPRESSED IN FETAL LIVER, SIGNAL = 1.1; EXPRESSED IN BONE MARROW, SIGNAL = 1.2; EXPRESSED IN PLACENTA, SIGNAL = 0.63; SWISSPROT HIT: P36672, EVALUE 6.30e+00
MLIEALLSFTNVPLKISGRRRSCNTFRTFGLTPLIPLILMANANLGSA

SEQ ID NO: 27478 - protein, 40 aa, Homo sapiens
  MAP TO AL138478.1; EXPRESSED IN BONE MARROW, SIGNAL = 0.83; EXPRESSED IN LUNG, SIGNAL = 1.3; EXPRESSED IN ADULT LIVER, SIGNAL = 1.2; EXPRESSED IN BRAIN, SIGNAL = 0.81; EXPRESSED IN FETAL LIVER, SIGNAL = 0.61
RKSSSSWRMSLMKGSGAPLRPGWMMWSSFGKCSDTQVMCS

SEQ ID NO: 27479 - protein, 55 aa, Homo sapiens
  MAP TO AL137025.2; EXPRESSED IN BRAIN, SIGNAL = 5.2; EXPRESSED IN HELA, SIGNAL = 3.6; EXPRESSED IN BONE MARROW, SIGNAL =   5; EXPRESSED IN HEART, SIGNAL = 4.5; EXPRESSED IN LUNG, SIGNAL =   6; EXPRESSED IN ADULT LIVER, SIGNAL = 5.3; SWISSPROT HIT: P19711, EVALUE 2.80e+00
WSLDCSTLLRAMRGSCHRNKPNPALGGSVPKVGAGPEMTWTCMPGPQRSLGTFCS

SEQ ID NO: 27480 - protein, 19 aa, Homo sapiens
  MAP TO Z98044.13; EXPRESSED IN ADULT LIVER, SIGNAL = 0.73; EXPRESSED IN BONE MARROW, SIGNAL = 0.8; EXPRESSED IN BRAIN, SIGNAL = 0.74; EXPRESSED IN HELA, SIGNAL = 0.6; EXPRESSED IN PLACENTA, SIGNAL =   1; EXPRESSED IN FETAL LIVER, SIGNAL = 0.7; EXPRESSED IN LUNG, SIGNAL =   1
LRGGQGRQELHKWVPGKSR

SEQ ID NO: 27481 - protein, 52 aa, Homo sapiens
  MAP TO AL135932.1; EXPRESSED IN FETAL LIVER, SIGNAL =   5; EXPRESSED IN BONE MARROW, SIGNAL =   6; EXPRESSED IN BRAIN, SIGNAL = 6.1; EXPRESSED IN HEART, SIGNAL = 4.8; EXPRESSED IN PLACENTA, SIGNAL = 4.7; EXPRESSED IN HELA, SIGNAL = 6.2; SWISSPROT HIT: Q9ZD49, EVALUE 8.10e+00
LVLEVQSDIVSGSKLAVHKPVAIFGEEKQVTEPEEKQMQEDPLTTENASSEI

SEQ ID NO: 27482 - protein, 31 aa, Homo sapiens
  MAP TO AF168787.1; EXPRESSED IN BONE MARROW, SIGNAL =   8; EXPRESSED IN PLACENTA, SIGNAL =  14; EXPRESSED IN ADULT LIVER, SIGNAL =  30; EXPRESSED IN BRAIN, SIGNAL =  13; EXPRESSED IN LUNG, SIGNAL = 9.9; EXPRESSED IN FETAL LIVER, SIGNAL = 9.6
NGMGLWFSVTFPWMRTCLPVTVTTSLTSTGS

SEQ ID NO: 27483 - protein, 40 aa, Homo sapiens
  MAP TO CHR22_81.0; EXPRESSED IN BONE MARROW, SIGNAL = 0.46; EXPRESSED IN PLACENTA, SIGNAL = 0.67; EXPRESSED IN LUNG, SIGNAL = 0.53; EXPRESSED IN ADULT LIVER, SIGNAL = 0.6; EXPRESSED IN BRAIN, SIGNAL = 0.6; EXPRESSED IN FETAL LIVER, SIGNAL = 0.57; SWISSPROT HIT: Q14934, EVALUE 4.90e+00
LPKPWLQGGHEAGGRGPDGAPAHLCGHGETSGASAPQHPL

SEQ ID NO: 27484 - protein, 78 aa, Homo sapiens
  MAP TO CHR22_81.0; EXPRESSED IN BONE MARROW, SIGNAL = 0.46; EXPRESSED IN PLACENTA, SIGNAL = 0.67; EXPRESSED IN LUNG, SIGNAL = 0.53; EXPRESSED IN ADULT LIVER, SIGNAL = 0.6; EXPRESSED IN BRAIN, SIGNAL = 0.6; EXPRESSED IN FETAL LIVER, SIGNAL = 0.57; SWISSPROT HIT: Q12432, EVALUE 5.90e+00
DCPNHGFKVGMKLEAVDLMEPRLICVATVKRVVHRLLSIHFDGWDSEYDQWVDCESPDIYPVGWCELTGYQLQPPVAA

SEQ ID NO: 27485 - protein, 50 aa, Homo sapiens
  MAP TO AL136128.2; EXPRESSED IN HELA, SIGNAL = 1.5; EXPRESSED IN FETAL LIVER, SIGNAL = 2.9; EXPRESSED IN HEART, SIGNAL = 2.9; EXPRESSED IN LUNG, SIGNAL = 2.9; EXPRESSED IN BONE MARROW, SIGNAL = 2.9; EXPRESSED IN PLACENTA, SIGNAL = 3.6; EXPRESSED IN BRAIN, SIGNAL =   3; SWISSPROT HIT: P54197, EVALUE 4.30e-01
GTATTLWSTKTQKSTIERKARHPPSATLSATLSPTQRSTGSQRELLSTRK

SEQ ID NO: 27486 - protein, 38 aa, Homo sapiens
  MAP TO AL133476.4; EXPRESSED IN BRAIN, SIGNAL =   1; EXPRESSED IN HELA, SIGNAL = 1.4; EXPRESSED IN FETAL LIVER, SIGNAL = 1.1; EXPRESSED IN BONE MARROW, SIGNAL = 1.3; EXPRESSED IN PLACENTA, SIGNAL = 0.76; EXPRESSED IN LUNG, SIGNAL = 0.99; EXPRESSED IN ADULT LIVER, SIGNAL = 0.91
MFAGVLSAGNDEFRVMLNMLACTTFSSKAELFEYRHGE

SEQ ID NO: 27487 - protein, 85 aa, Homo sapiens
  MAP TO CHR22_207.0; EXPRESSED IN FETAL LIVER, SIGNAL = 1.8; EXPRESSED IN PLACENTA, SIGNAL = 0.91; EXPRESSED IN HELA, SIGNAL = 3.5; EXPRESSED IN ADULT LIVER, SIGNAL =   1; EXPRESSED IN LUNG, SIGNAL = 1.2; EXPRESSED IN HEART, SIGNAL = 1.4; EXPRESSED IN BONE MARROW, SIGNAL =   2; EXPRESSED IN BRAIN, SIGNAL = 1.9; SWISSPROT HIT: P97347, EVALUE 1.40e-01
VPRLHQNREEGGPGHHRKVLHTPGQRLPHEQARVQGDRHYPQQEAPQQDSRLCHASDEMDSERPSKRYLHQAAGGGERKERQLCS

SEQ ID NO: 27488 - protein, 65 aa, Homo sapiens
  MAP TO CHR22_181.0; EXPRESSED IN BRAIN, SIGNAL = 0.91; EXPRESSED IN HELA, SIGNAL = 1.6; EXPRESSED IN FETAL LIVER, SIGNAL = 0.88; EXPRESSED IN HEART, SIGNAL = 1.4; EXPRESSED IN BONE MARROW, SIGNAL = 0.97; EXPRESSED IN LUNG, SIGNAL =   4; EXPRESSED IN ADULT LIVER, SIGNAL = 1.3; SWISSPROT HIT: P35625, EVALUE 7.00e-38
IKSCYYLPCFVTSKNECLWTDMLSNFGYPGYQSKHYACIRQKGGYCSWYRGWAPPDKSIINATDP

SEQ ID NO: 27489 - protein, 47 aa, Homo sapiens
  MAP TO CHR22_181.0; EXPRESSED IN BRAIN, SIGNAL = 0.91; EXPRESSED IN HELA, SIGNAL = 1.6; EXPRESSED IN FETAL LIVER, SIGNAL = 0.88; EXPRESSED IN HEART, SIGNAL = 1.4; EXPRESSED IN BONE MARROW, SIGNAL = 0.97; EXPRESSED IN LUNG, SIGNAL =   4; EXPRESSED IN ADULT LIVER, SIGNAL = 1.3
QVLLLPALLCDFQERVSLDRHALQFRLPWLPVQTLRLHPAEGRLLQL

SEQ ID NO: 27490 - protein, 26 aa, Homo sapiens
  MAP TO CHR22_83.0; EXPRESSED IN PLACENTA, SIGNAL =   2; EXPRESSED IN LUNG, SIGNAL = 1.7; EXPRESSED IN BONE MARROW, SIGNAL = 2.5; EXPRESSED IN ADULT LIVER, SIGNAL =   2; EXPRESSED IN HELA, SIGNAL = 6.2; EXPRESSED IN BRAIN, SIGNAL = 1.8; EXPRESSED IN FETAL LIVER, SIGNAL = 2.1; EXPRESSED IN HEART, SIGNAL = 1.6
HTTMANKVETLKEEEEELKRKVEQCR

SEQ ID NO: 27491 - protein, 22 aa, Homo sapiens
  MAP TO CHR22_83.0; EXPRESSED IN PLACENTA, SIGNAL =   2; EXPRESSED IN LUNG, SIGNAL = 1.7; EXPRESSED IN BONE MARROW, SIGNAL = 2.5; EXPRESSED IN ADULT LIVER, SIGNAL =   2; EXPRESSED IN HELA, SIGNAL = 6.2; EXPRESSED IN BRAIN, SIGNAL = 1.8; EXPRESSED IN FETAL LIVER, SIGNAL = 2.1; EXPRESSED IN HEART, SIGNAL = 1.6
GQQGGDAEGGGGGAEEESGAMQ

SEQ ID NO: 27492 - protein, 40 aa, Homo sapiens
  MAP TO AC020550.2; EXPRESSED IN PLACENTA, SIGNAL = 1.4; EXPRESSED IN LUNG, SIGNAL = 1.3; EXPRESSED IN BONE MARROW, SIGNAL = 1.4; EXPRESSED IN ADULT LIVER, SIGNAL = 1.3; EXPRESSED IN HELA, SIGNAL = 0.75; EXPRESSED IN BRAIN, SIGNAL = 1.2; EXPRESSED IN FETAL LIVER, SIGNAL = 1.2; SWISSPROT HIT: P34349, EVALUE 6.00e-06
NETFLCHRFTKFVMKYNLMSKDNLIVPILEEEVQNSVSGE

SEQ ID NO: 27493 - protein, 48 aa, Homo sapiens
  MAP TO AL078623.28; EXPRESSED IN BONE MARROW, SIGNAL = 1.5; EXPRESSED IN BRAIN, SIGNAL = 1.8; EXPRESSED IN HEART, SIGNAL = 1.5; EXPRESSED IN FETAL LIVER, SIGNAL = 1.3; EXPRESSED IN PLACENTA, SIGNAL = 2.1; EXPRESSED IN LUNG, SIGNAL = 1.8; EXPRESSED IN ADULT LIVER, SIGNAL = 1.8
RRKKRRRRGRRRREEEKEKRRKRKEEEEEEEKEEKKKKRRKRRRQWLM

SEQ ID NO: 27494 - protein, 43 aa, Homo sapiens
  MAP TO AC022263.3; EXPRESSED IN BONE MARROW, SIGNAL = 3.3; EXPRESSED IN HELA, SIGNAL = 2.1; EXPRESSED IN BRAIN, SIGNAL = 3.4; EXPRESSED IN HEART, SIGNAL = 2.8; EXPRESSED IN FETAL LIVER, SIGNAL = 2.5; EXPRESSED IN PLACENTA, SIGNAL = 3.4; EXPRESSED IN ADULT LIVER, SIGNAL = 2.7
DTDESFFCSLSQFRLVSVICIRPPAALGPISVQLDVLILVTLD

SEQ ID NO: 27495 - protein, 43 aa, Homo sapiens
  MAP TO AL136312.1; EXPRESSED IN BONE MARROW, SIGNAL = 0.74; EXPRESSED IN BRAIN, SIGNAL = 0.66; EXPRESSED IN FETAL LIVER, SIGNAL = 0.66; EXPRESSED IN PLACENTA, SIGNAL = 0.74; EXPRESSED IN LUNG, SIGNAL = 0.73
AMDRYQSVARGLWTPAIEDTVVYVNYNNSTHQLPSQANDWIAN

SEQ ID NO: 27496 - protein, 25 aa, Homo sapiens
  MAP TO AL158093.3; EXPRESSED IN LUNG, SIGNAL = 2.1; EXPRESSED IN HEART, SIGNAL =   2; EXPRESSED IN BONE MARROW, SIGNAL = 1.8; EXPRESSED IN ADULT LIVER, SIGNAL = 2.5; EXPRESSED IN PLACENTA, SIGNAL = 1.5; EXPRESSED IN BRAIN, SIGNAL = 2.1; EXPRESSED IN HELA, SIGNAL = 1.6; EXPRESSED IN FETAL LIVER, SIGNAL = 2.2
IFKTWYLLWLEGMFVAGVGRFPVYV

SEQ ID NO: 27497 - protein, 26 aa, Homo sapiens
  MAP TO AL158093.3; EXPRESSED IN LUNG, SIGNAL = 2.1; EXPRESSED IN HEART, SIGNAL =   2; EXPRESSED IN BONE MARROW, SIGNAL = 1.8; EXPRESSED IN ADULT LIVER, SIGNAL = 2.5; EXPRESSED IN PLACENTA, SIGNAL = 1.5; EXPRESSED IN BRAIN, SIGNAL = 2.1; EXPRESSED IN HELA, SIGNAL = 1.6; EXPRESSED IN FETAL LIVER, SIGNAL = 2.2
YFQNMVPFMARRHVCGGCWQVPCLCL

SEQ ID NO: 27498 - protein, 105 aa, Homo sapiens
  MAP TO AC016763.5; EXPRESSED IN BRAIN, SIGNAL = 4.8; EXPRESSED IN HELA, SIGNAL =   2; EXPRESSED IN FETAL LIVER, SIGNAL = 4.7; EXPRESSED IN BONE MARROW, SIGNAL = 4.3; EXPRESSED IN PLACENTA, SIGNAL = 6.1; EXPRESSED IN ADULT LIVER, SIGNAL = 4.4; EXPRESSED IN LUNG, SIGNAL = 4.7; SWISSPROT HIT: P23085, EVALUE 1.90e+00
HDPVLKQIDPEMLNSFSSSSQTIDFSSNFSRTNASSKHCENRLSLSEILSNIRSCRLQCFQPRLLNLQDSDSEECTSRKPGQTVNNKRVSAASVALLNTSKNGIS

SEQ ID NO: 27499 - protein, 38 aa, Homo sapiens
  MAP TO AL121993.2; EXPRESSED IN BONE MARROW, SIGNAL = 1.3; EXPRESSED IN BRAIN, SIGNAL =   1; EXPRESSED IN HELA, SIGNAL = 1.4; EXPRESSED IN PLACENTA, SIGNAL = 1.4; EXPRESSED IN LUNG, SIGNAL = 1.4; EXPRESSED IN ADULT LIVER, SIGNAL = 1.4; SWISSPROT HIT: Q9UNX4, EVALUE 2.00e-16
IEDPEEPDPKKIKGSSPGIQDTLEAEDGAFETDEAPED

SEQ ID NO: 27500 - protein, 37 aa, Homo sapiens
  MAP TO AL121993.2; EXPRESSED IN BONE MARROW, SIGNAL = 1.3; EXPRESSED IN BRAIN, SIGNAL =   1; EXPRESSED IN HELA, SIGNAL = 1.4; EXPRESSED IN PLACENTA, SIGNAL = 1.4; EXPRESSED IN LUNG, SIGNAL = 1.4; EXPRESSED IN ADULT LIVER, SIGNAL = 1.4
LKTRKNQTPRKSKDLLLEYKILLRQRMVPLRRMKPLR

SEQ ID NO: 27501 - protein, 59 aa, Homo sapiens
  MAP TO CHR21_2.0; EXPRESSED IN FETAL LIVER, SIGNAL = 1.2; EXPRESSED IN BONE MARROW, SIGNAL = 1.3; EXPRESSED IN LUNG, SIGNAL = 0.89; EXPRESSED IN ADULT LIVER, SIGNAL = 0.76; EXPRESSED IN HELA, SIGNAL = 3.6; EXPRESSED IN BRAIN, SIGNAL = 1.3; SWISSPROT HIT: P10220, EVALUE 1.60e+00
IGLLWATETGPDDFSAPGQPCHPGPVLHRTWRQKQPGSWQALFRRQQAGPPGCCVANTT

SEQ ID NO: 27502 - protein, 25 aa, Homo sapiens
  MAP TO CHR22_206.0; EXPRESSED IN BRAIN, SIGNAL = 0.87; EXPRESSED IN HELA, SIGNAL =   1; EXPRESSED IN FETAL LIVER, SIGNAL = 0.84; EXPRESSED IN PLACENTA, SIGNAL = 1.1; EXPRESSED IN BONE MARROW, SIGNAL = 0.94; EXPRESSED IN LUNG, SIGNAL = 1.1; EXPRESSED IN ADULT LIVER, SIGNAL =   2
GHAAARHHLAHSRSGRLRQLPAQVV

SEQ ID NO: 27503 - protein, 55 aa, Homo sapiens
  MAP TO CHR22_206.0; EXPRESSED IN BRAIN, SIGNAL = 0.87; EXPRESSED IN HELA, SIGNAL =   1; EXPRESSED IN FETAL LIVER, SIGNAL = 0.84; EXPRESSED IN PLACENTA, SIGNAL = 1.1; EXPRESSED IN BONE MARROW, SIGNAL = 0.94; EXPRESSED IN LUNG, SIGNAL = 1.1; EXPRESSED IN ADULT LIVER, SIGNAL =   2; SWISSPROT HIT: Q9BZC7, EVALUE 2.50e-01
PCSSPPPPGTQQEWTTSPASSASGLRWPLWQKSSCTLRFLPFSCPGCLAGQPPMQ

SEQ ID NO: 27504 - protein, 17 aa, Homo sapiens
  MAP TO CHR22_20.0; EXPRESSED IN BRAIN, SIGNAL = 0.72; EXPRESSED IN HELA, SIGNAL = 0.59; EXPRESSED IN LUNG, SIGNAL = 0.63; EXPRESSED IN FETAL LIVER, SIGNAL = 0.63; EXPRESSED IN PLACENTA, SIGNAL = 0.74
PAFKSLWPKTELQNGKE

SEQ ID NO: 27505 - protein, 122 aa, Homo sapiens
  MAP TO AL136304.2; EXPRESSED IN FETAL LIVER, SIGNAL = 0.81; EXPRESSED IN BONE MARROW, SIGNAL = 0.77; EXPRESSED IN BRAIN, SIGNAL = 0.73; EXPRESSED IN PLACENTA, SIGNAL = 1.1; EXPRESSED IN LUNG, SIGNAL = 1.2; SWISSPROT HIT: Q14999, EVALUE 2.00e-12
MVLGQIEDHRRTHQPINIPFFDVFLRYLCQGSCLLPCCSTSPHLCLFPLYTLPDRDHHPFPLAPRLQCGSEGGQVLGEGGGVLQPAPGQQADGPQPQDLLGVQRQRRLPLHHPAHAPGHPHQ

SEQ ID NO: 27506 - protein, 29 aa, Homo sapiens
  MAP TO AL136304.2; EXPRESSED IN FETAL LIVER, SIGNAL = 0.81; EXPRESSED IN BONE MARROW, SIGNAL = 0.77; EXPRESSED IN BRAIN, SIGNAL = 0.73; EXPRESSED IN PLACENTA, SIGNAL = 1.1; EXPRESSED IN LUNG, SIGNAL = 1.2
RKSHCCMVSPSSVFPCVSPCSFCPCAPSL

SEQ ID NO: 27507 - protein, 117 aa, Homo sapiens
  MAP TO AL138722.2; EXPRESSED IN BRAIN, SIGNAL = 1.9; EXPRESSED IN HELA, SIGNAL = 0.87; EXPRESSED IN FETAL LIVER, SIGNAL = 1.1; EXPRESSED IN BONE MARROW, SIGNAL = 1.3; EXPRESSED IN HEART, SIGNAL = 1.3; EXPRESSED IN LUNG, SIGNAL = 1.3; EXPRESSED IN ADULT LIVER, SIGNAL = 1.3
TSALWHTVWRSVTWLAARSKQPGTTPSRSSSSWLALISSPAPCLRSTSRVPVTSWAMGIRSSMHFCPSVRSPSWRPSSWTTRGGRRSSCSAMDPYLSTWPASPSSSWLPAVLPPQPF

SEQ ID NO: 27508 - protein, 47 aa, Homo sapiens
  MAP TO AC013614.4; EXPRESSED IN BONE MARROW, SIGNAL = 1.8; EXPRESSED IN BRAIN, SIGNAL =   2; EXPRESSED IN HEART, SIGNAL = 1.8; EXPRESSED IN HELA, SIGNAL = 1.4; EXPRESSED IN PLACENTA, SIGNAL = 2.1; EXPRESSED IN LUNG, SIGNAL =   2; EXPRESSED IN ADULT LIVER, SIGNAL = 1.8; EXPRESSED IN FETAL LIVER, SIGNAL = 1.6
ASSPSELSLPLPSSSPSAPSPFSSLASPPPHTEPSASFCSPSGPSSP

SEQ ID NO: 27509 - protein, 65 aa, Homo sapiens
  MAP TO U82695.2; EXPRESSED IN BONE MARROW, SIGNAL = 3.6; EXPRESSED IN LUNG, SIGNAL = 8.8; EXPRESSED IN BRAIN, SIGNAL = 4.1; EXPRESSED IN ADULT LIVER, SIGNAL = 8.9; EXPRESSED IN FETAL LIVER, SIGNAL = 7.5; EXPRESSED IN HEART, SIGNAL = 2.8; SWISSPROT HIT: P21810, EVALUE 7.00e-35
VVYLHSNNITKVGVNDFCPMGFGVKRAYYNGISLFNNPVPYWEVQPATFRCVTDRLAIQFGNYKK

SEQ ID NO: 27510 - protein, 79 aa, Homo sapiens
  MAP TO AL031283.26; EXPRESSED IN BRAIN, SIGNAL = 0.59; EXPRESSED IN PLACENTA, SIGNAL = 0.61; EXPRESSED IN ADULT LIVER, SIGNAL = 0.58; EXPRESSED IN LUNG, SIGNAL = 0.58; EXPRESSED IN FETAL LIVER, SIGNAL = 0.42; SWISSPROT HIT: P39922, EVALUE 3.00e-03
DEIILLLGKEVSRLSDYEIESKYKDVIIANLQNEVAELSQKVSETTTSRQNEKEISQKCQVLDEDIDAKQKEIQSLKSQ

SEQ ID NO: 27511 - protein, 26 aa, Homo sapiens
  MAP TO CHR22_130.0; EXPRESSED IN BRAIN, SIGNAL = 0.58; EXPRESSED IN PLACENTA, SIGNAL = 0.54; EXPRESSED IN LUNG, SIGNAL = 0.67; EXPRESSED IN ADULT LIVER, SIGNAL = 0.67; EXPRESSED IN FETAL LIVER, SIGNAL = 0.45; EXPRESSED IN BONE MARROW, SIGNAL = 0.52
MCPTWLHHSLVVYVLRRHKTSINARK

SEQ ID NO: 27512 - protein, 17 aa, Homo sapiens
  MAP TO CHR22_130.0; EXPRESSED IN BRAIN, SIGNAL = 0.58; EXPRESSED IN PLACENTA, SIGNAL = 0.54; EXPRESSED IN LUNG, SIGNAL = 0.67; EXPRESSED IN ADULT LIVER, SIGNAL = 0.67; EXPRESSED IN FETAL LIVER, SIGNAL = 0.45; EXPRESSED IN BONE MARROW, SIGNAL = 0.52
EKSEGKKEAQDRTQAAQ

SEQ ID NO: 27513 - protein, 17 aa, Homo sapiens
  MAP TO CHR22_91.0; EXPRESSED IN BRAIN, SIGNAL = 0.93; EXPRESSED IN PLACENTA, SIGNAL = 1.5; EXPRESSED IN LUNG, SIGNAL = 1.1; EXPRESSED IN HELA, SIGNAL = 0.58; EXPRESSED IN ADULT LIVER, SIGNAL = 1.1; EXPRESSED IN FETAL LIVER, SIGNAL = 1.2; EXPRESSED IN BONE MARROW, SIGNAL = 0.77
SMIRIMAKMRYILLKMK

SEQ ID NO: 27514 - protein, 33 aa, Homo sapiens
  MAP TO CHR21_7.0; EXPRESSED IN LUNG, SIGNAL = 0.98; EXPRESSED IN BONE MARROW, SIGNAL = 1.5; EXPRESSED IN ADULT LIVER, SIGNAL = 0.93; EXPRESSED IN HELA, SIGNAL = 3.7; EXPRESSED IN BRAIN, SIGNAL = 1.4; EXPRESSED IN FETAL LIVER, SIGNAL = 1.4
KNPCFEIRGTFGKHFLHPAGCGSVFPAKSCQDA

SEQ ID NO: 27515 - protein, 30 aa, Homo sapiens
  MAP TO AL139144.1; EXPRESSED IN BONE MARROW, SIGNAL = 1.8; EXPRESSED IN HEART, SIGNAL = 1.9; EXPRESSED IN PLACENTA, SIGNAL = 2.4; EXPRESSED IN BRAIN, SIGNAL = 1.8; EXPRESSED IN LUNG, SIGNAL = 2.3; EXPRESSED IN ADULT LIVER, SIGNAL = 2.1; EXPRESSED IN FETAL LIVER, SIGNAL = 1.6
HVQCGVVTTPRFPRSKTVKAPKEYASAGEE

SEQ ID NO: 27516 - protein, 37 aa, Homo sapiens
  MAP TO AL137071.3; EXPRESSED IN HEART, SIGNAL = 1.9; EXPRESSED IN BONE MARROW, SIGNAL = 2.5; EXPRESSED IN PLACENTA, SIGNAL = 2.2; EXPRESSED IN LUNG, SIGNAL = 2.3; EXPRESSED IN ADULT LIVER, SIGNAL = 2.4; EXPRESSED IN HELA, SIGNAL =   2; EXPRESSED IN BRAIN, SIGNAL = 2.3; EXPRESSED IN FETAL LIVER, SIGNAL = 2.6; SWISSPROT HIT: P49906, EVALUE 6.50e+00
QKSKESVARMMRTVSGCSRYTDSISQALSRIALVLVV

SEQ ID NO: 27517 - protein, 35 aa, Homo sapiens
  MAP TO CHR21_60.0; EXPRESSED IN HELA, SIGNAL = 4.7; EXPRESSED IN FETAL LIVER, SIGNAL = 1.5; EXPRESSED IN LUNG, SIGNAL = 0.84; EXPRESSED IN ADULT LIVER, SIGNAL = 0.29; EXPRESSED IN BONE MARROW, SIGNAL = 1.7; EXPRESSED IN BRAIN, SIGNAL = 1.7
FILDKSHCYIYKFIDLKGNQNISPQNVAELKKQSQ

SEQ ID NO: 27518 - protein, 31 aa, Homo sapiens
  MAP TO CHR22_10.0; EXPRESSED IN BONE MARROW, SIGNAL = 1.7; EXPRESSED IN HELA, SIGNAL = 1.4; EXPRESSED IN BRAIN, SIGNAL =   2; EXPRESSED IN PLACENTA, SIGNAL = 2.4; EXPRESSED IN LUNG, SIGNAL = 1.9; EXPRESSED IN ADULT LIVER, SIGNAL = 1.9
MQKGPMRAHTGHLRSVGLSPEPVAPWKSVVK

SEQ ID NO: 27519 - protein, 104 aa, Homo sapiens
  MAP TO AL137068.1; EXPRESSED IN PLACENTA, SIGNAL = 5.4; EXPRESSED IN LUNG, SIGNAL = 5.3; EXPRESSED IN ADULT LIVER, SIGNAL = 5.1; EXPRESSED IN BONE MARROW, SIGNAL = 6.3; EXPRESSED IN BRAIN, SIGNAL = 4.9; EXPRESSED IN HELA, SIGNAL = 3.9; EXPRESSED IN FETAL LIVER, SIGNAL = 5.2; EXPRESSED IN HEART, SIGNAL = 4.4
ADSGGDSQEESELDDQEEPPFVPPPGYMMYTVLPDGSPVPQGMALYAPPPPLPNNSRPLTPGTVVYGPPPAGAPMVYGPPPPNFSIPFIPMGVLHCNVPEHHNL

SEQ ID NO: 27520 - protein, 28 aa, Homo sapiens
  MAP TO AL137068.1; EXPRESSED IN PLACENTA, SIGNAL = 5.4; EXPRESSED IN LUNG, SIGNAL = 5.3; EXPRESSED IN ADULT LIVER, SIGNAL = 5.1; EXPRESSED IN BONE MARROW, SIGNAL = 6.3; EXPRESSED IN BRAIN, SIGNAL = 4.9; EXPRESSED IN HELA, SIGNAL = 3.9; EXPRESSED IN FETAL LIVER, SIGNAL = 5.2; EXPRESSED IN HEART, SIGNAL = 4.4
MQTVEEIVRKRVSWMTKKNPHLCLLLDT

SEQ ID NO: 27521 - protein, 62 aa, Homo sapiens
  MAP TO AL136231.3; EXPRESSED IN FETAL LIVER, SIGNAL = 1.7; EXPRESSED IN HEART, SIGNAL = 1.3; EXPRESSED IN PLACENTA, SIGNAL = 2.3; EXPRESSED IN LUNG, SIGNAL = 2.4; EXPRESSED IN BONE MARROW, SIGNAL = 1.6; EXPRESSED IN BRAIN, SIGNAL = 1.5; EXPRESSED IN ADULT LIVER, SIGNAL =   2
VIKEPDERIVLRSDSSSCLDSSQFGKSSSSKQGDADFHGKASFATYQHSTSPGPLDQPLLRE

SEQ ID NO: 27522 - protein, 17 aa, Homo sapiens
  MAP TO AL137019.1; EXPRESSED IN BONE MARROW, SIGNAL = 0.6; EXPRESSED IN BRAIN, SIGNAL = 0.66; EXPRESSED IN LUNG, SIGNAL = 0.61; EXPRESSED IN FETAL LIVER, SIGNAL = 0.65; EXPRESSED IN PLACENTA, SIGNAL = 0.8
LSRKLREKILRIIIMVF

SEQ ID NO: 27523 - protein, 41 aa, Homo sapiens
  MAP TO AC011580.4; EXPRESSED IN FETAL LIVER, SIGNAL = 0.96; EXPRESSED IN BONE MARROW, SIGNAL = 0.85; EXPRESSED IN BRAIN, SIGNAL = 0.94; EXPRESSED IN LUNG, SIGNAL = 1.2; EXPRESSED IN HELA, SIGNAL = 0.64; EXPRESSED IN PLACENTA, SIGNAL = 0.92; EXPRESSED IN ADULT LIVER, SIGNAL = 1.1
VVPVVGVTTFFCNDSVFGVVIDGFVVVTTSELLAASKTPEK

SEQ ID NO: 27524 - protein, 28 aa, Homo sapiens
  MAP TO AL138478.1; EXPRESSED IN FETAL LIVER, SIGNAL = 0.5; EXPRESSED IN BONE MARROW, SIGNAL = 0.53; EXPRESSED IN BRAIN, SIGNAL = 0.6; EXPRESSED IN LUNG, SIGNAL = 0.59; EXPRESSED IN ADULT LIVER, SIGNAL = 0.67; EXPRESSED IN PLACENTA, SIGNAL = 0.7
DMWTQTHRENTMWRLELCCQNLRDYQKL

SEQ ID NO: 27525 - protein, 67 aa, Homo sapiens
  MAP TO CHR22_162.0; EXPRESSED IN FETAL LIVER, SIGNAL = 0.76; EXPRESSED IN BRAIN, SIGNAL = 1.6; EXPRESSED IN PLACENTA, SIGNAL = 1.4; EXPRESSED IN LUNG, SIGNAL = 1.2; EXPRESSED IN ADULT LIVER, SIGNAL = 0.96; SWISSPROT HIT: P52377, EVALUE 4.90e+00
GPGCAGLPAVPDWRRLGPLLPGLHGPQPGLQHALRALRGAHWAGSRRYGRHLPAAGQHLRHRAPGLP

SEQ ID NO: 27526 - protein, 72 aa, Homo sapiens
  MAP TO CHR22_162.0; EXPRESSED IN FETAL LIVER, SIGNAL = 0.76; EXPRESSED IN BRAIN, SIGNAL = 1.6; EXPRESSED IN PLACENTA, SIGNAL = 1.4; EXPRESSED IN LUNG, SIGNAL = 1.2; EXPRESSED IN ADULT LIVER, SIGNAL = 0.96; SWISSPROT HIT: O43759, EVALUE 6.00e-37
AGQAVLAFQRYQIGADSALFSQDYMDPSQDSSMPYAPYVEPTGPDPAGMGGTYQQPANTFDTEPQGYQSQGY

SEQ ID NO: 27527 - protein, 19 aa, Homo sapiens
  MAP TO CHR22_210.0; EXPRESSED IN HELA, SIGNAL = 2.8; EXPRESSED IN FETAL LIVER, SIGNAL = 1.6; EXPRESSED IN PLACENTA, SIGNAL = 0.92; EXPRESSED IN LUNG, SIGNAL = 0.73; EXPRESSED IN ADULT LIVER, SIGNAL = 0.84; EXPRESSED IN BONE MARROW, SIGNAL = 1.6; EXPRESSED IN BRAIN, SIGNAL = 1.3
NGHMACKREGGSRCASLLF

SEQ ID NO: 27528 - protein, 75 aa, Homo sapiens
  MAP TO U82695.2; EXPRESSED IN FETAL LIVER, SIGNAL = 2.7; EXPRESSED IN PLACENTA, SIGNAL = 4.4; EXPRESSED IN ADULT LIVER, SIGNAL =   3; EXPRESSED IN LUNG, SIGNAL = 3.9; EXPRESSED IN BONE MARROW, SIGNAL = 3.5; EXPRESSED IN BRAIN, SIGNAL = 3.8; EXPRESSED IN HELA, SIGNAL = 2.8; EXPRESSED IN HEART, SIGNAL = 3.2; SWISSPROT HIT: Q16720, EVALUE 7.00e-13
LVWEALQDVTLIILEVAAIVSLGLSFYAPPGEESEGKARGPGLEGGRGMGLEMRDGHRMVMSPPLLPFCPPHSLW

SEQ ID NO: 27529 - protein, 90 aa, Homo sapiens
  MAP TO U82695.2; EXPRESSED IN FETAL LIVER, SIGNAL = 2.7; EXPRESSED IN PLACENTA, SIGNAL = 4.4; EXPRESSED IN ADULT LIVER, SIGNAL =   3; EXPRESSED IN LUNG, SIGNAL = 3.9; EXPRESSED IN BONE MARROW, SIGNAL = 3.5; EXPRESSED IN BRAIN, SIGNAL = 3.8; EXPRESSED IN HELA, SIGNAL = 2.8; EXPRESSED IN HEART, SIGNAL = 3.2; SWISSPROT HIT: Q16720, EVALUE 1.00e-23
CGNVSGGAEDEGEAEAGWIEGAAILLSVICVVLVTAFNDWSKEKQFRGLQSRIEQEQKFTVIRNGQLLQVPVAALVVGDIAQVKYGECPG

SEQ ID NO: 27530 - protein, 26 aa, Homo sapiens
  MAP TO AL136140.2; EXPRESSED IN BRAIN, SIGNAL = 0.96; EXPRESSED IN PLACENTA, SIGNAL = 1.2; EXPRESSED IN LUNG, SIGNAL = 1.1; EXPRESSED IN ADULT LIVER, SIGNAL = 0.88; EXPRESSED IN FETAL LIVER, SIGNAL = 0.8; EXPRESSED IN BONE MARROW, SIGNAL = 0.79
GRVVQHPAHTDWQGGGGHSDGGLQNH

SEQ ID NO: 27531 - protein, 43 aa, Homo sapiens
  MAP TO AL133476.4; EXPRESSED IN PLACENTA, SIGNAL = 1.3; EXPRESSED IN LUNG, SIGNAL = 1.3; EXPRESSED IN BONE MARROW, SIGNAL = 0.82; EXPRESSED IN BRAIN, SIGNAL = 0.93; EXPRESSED IN FETAL LIVER, SIGNAL = 0.92
AKLGNSSVSPNVGHLVLKYLCPAVRAVLEDGLKAFVLDVIIGQ

SEQ ID NO: 27532 - protein, 50 aa, Homo sapiens
  MAP TO AJ132411.1; EXPRESSED IN BRAIN, SIGNAL = 0.8; EXPRESSED IN FETAL LIVER, SIGNAL = 1.2; EXPRESSED IN ADULT LIVER, SIGNAL = 0.87; EXPRESSED IN PLACENTA, SIGNAL = 1.1; EXPRESSED IN LUNG, SIGNAL = 0.93; EXPRESSED IN BONE MARROW, SIGNAL = 1.4
AHDCMSSTVVPGVYLLHFSSSQQPCKVPANFLSCFEDGKTKAESHKVTHL

SEQ ID NO: 27533 - protein, 49 aa, Homo sapiens
  MAP TO AJ132411.1; EXPRESSED IN BRAIN, SIGNAL = 0.8; EXPRESSED IN FETAL LIVER, SIGNAL = 1.2; EXPRESSED IN ADULT LIVER, SIGNAL = 0.87; EXPRESSED IN PLACENTA, SIGNAL = 1.1; EXPRESSED IN LUNG, SIGNAL = 0.93; EXPRESSED IN BONE MARROW, SIGNAL = 1.4
LMTACQAQLCQVSTCSISPPPSSPAKCPPIFSPVLKMGKLKQRATRSLT

SEQ ID NO: 27534 - protein, 47 aa, Homo sapiens
  MAP TO AC016683.4; EXPRESSED IN PLACENTA, SIGNAL = 0.48; EXPRESSED IN LUNG, SIGNAL = 0.54; EXPRESSED IN BRAIN, SIGNAL = 0.37; EXPRESSED IN ADULT LIVER, SIGNAL = 0.54; EXPRESSED IN BONE MARROW, SIGNAL = 0.44; SWISSPROT HIT: Q9V3S0, EVALUE 1.70e+00
FLIQAWTLHWKHQRVVFLPTFHQHQSSAGPASPLTERALKVNVTEST

SEQ ID NO: 27535 - protein, 26 aa, Homo sapiens
  MAP TO AL137070.3; EXPRESSED IN BRAIN, SIGNAL = 0.58; EXPRESSED IN LUNG, SIGNAL = 0.84; EXPRESSED IN ADULT LIVER, SIGNAL = 0.89; EXPRESSED IN BONE MARROW, SIGNAL = 0.6; EXPRESSED IN PLACENTA, SIGNAL = 0.89
CAAGPALPAPLTALHPPPASQEATAA

SEQ ID NO: 27536 - protein, 24 aa, Homo sapiens
  MAP TO AC013779.3; EXPRESSED IN FETAL LIVER, SIGNAL = 5.5; EXPRESSED IN BONE MARROW, SIGNAL = 4.6; EXPRESSED IN HEART, SIGNAL = 5.2; EXPRESSED IN PLACENTA, SIGNAL = 6.2; EXPRESSED IN LUNG, SIGNAL = 6.1; EXPRESSED IN ADULT LIVER, SIGNAL = 8.3; EXPRESSED IN HELA, SIGNAL = 5.3; EXPRESSED IN BRAIN, SIGNAL = 5.7
ERKELINKSNSELEKGGKPSPPEV

SEQ ID NO: 27537 - protein, 61 aa, Homo sapiens
  MAP TO AL137785.2; EXPRESSED IN FETAL LIVER, SIGNAL =   1; EXPRESSED IN BONE MARROW, SIGNAL = 1.2; EXPRESSED IN HEART, SIGNAL = 1.2; EXPRESSED IN LUNG, SIGNAL = 1.4; EXPRESSED IN PLACENTA, SIGNAL = 1.2; EXPRESSED IN ADULT LIVER, SIGNAL = 1.2; EXPRESSED IN HELA, SIGNAL = 0.67; EXPRESSED IN BRAIN, SIGNAL = 1.1; SWISSPROT HIT: Q04616, EVALUE 4.60e+00
MRYREEAGTPKKARVGCGNSGMEPASWRVSFEAGKEKSKRRPQRTGGLQDAHWRGLCVTSK

SEQ ID NO: 27538 - protein, 29 aa, Homo sapiens
  MAP TO AL136371.1; EXPRESSED IN FETAL LIVER, SIGNAL = 0.94; EXPRESSED IN BONE MARROW, SIGNAL = 0.87; EXPRESSED IN LUNG, SIGNAL = 0.83; EXPRESSED IN ADULT LIVER, SIGNAL = 0.79; EXPRESSED IN PLACENTA, SIGNAL =   1; EXPRESSED IN HELA, SIGNAL = 0.55; EXPRESSED IN BRAIN, SIGNAL = 0.92
SVKEESLKLSQNVSTIYFPIIFMHFLVQI

SEQ ID NO: 27539 - protein, 20 aa, Homo sapiens
  MAP TO AL031602.14; EXPRESSED IN BONE MARROW, SIGNAL = 2.8; EXPRESSED IN BRAIN, SIGNAL = 2.8; EXPRESSED IN LUNG, SIGNAL = 3.2; EXPRESSED IN PLACENTA, SIGNAL =   3; EXPRESSED IN ADULT LIVER, SIGNAL = 2.4; EXPRESSED IN FETAL LIVER, SIGNAL = 2.3; SWISSPROT HIT: Q9NV58, EVALUE 8.00e-01
ECNNMEIQVDIEAKPSHYQL

SEQ ID NO: 27540 - protein, 66 aa, Homo sapiens
  MAP TO AL133266.3; EXPRESSED IN HELA, SIGNAL = 1.6; EXPRESSED IN BRAIN, SIGNAL = 2.7; EXPRESSED IN FETAL LIVER, SIGNAL = 2.6; EXPRESSED IN BONE MARROW, SIGNAL =   3; EXPRESSED IN LUNG, SIGNAL = 3.4; EXPRESSED IN ADULT LIVER, SIGNAL = 3.1; EXPRESSED IN PLACENTA, SIGNAL = 3.3
VPSAGSAFPEAGGPTRRAAQGAEAAVRGRGRAHQADSCAGQHCHPPGRGPGAGRQPGDSGPAPDHA

SEQ ID NO: 27541 - protein, 75 aa, Homo sapiens
  MAP TO AL136450.1; EXPRESSED IN BRAIN, SIGNAL =   5; EXPRESSED IN PLACENTA, SIGNAL = 7.3; EXPRESSED IN ADULT LIVER, SIGNAL = 5.7; EXPRESSED IN BONE MARROW, SIGNAL = 6.4; EXPRESSED IN LUNG, SIGNAL = 5.8; EXPRESSED IN HELA, SIGNAL =   4; EXPRESSED IN FETAL LIVER, SIGNAL = 5.1; EXPRESSED IN HEART, SIGNAL = 4.7; SWISSPROT HIT: Q06457, EVALUE 8.10e-01
SQRTTQAAGGNVTSCLGSTSSPFVIFPEIVRNGDPSTWVKNSTALISTIPGTYVGVANPVPASLLLNKDPNLGLN

SEQ ID NO: 27542 - protein, 44 aa, Homo sapiens
  MAP TO AF235096.1; EXPRESSED IN PLACENTA, SIGNAL = 1.3; EXPRESSED IN LUNG, SIGNAL =   1; EXPRESSED IN BRAIN, SIGNAL = 0.99; EXPRESSED IN HEART, SIGNAL =   4; EXPRESSED IN ADULT LIVER, SIGNAL = 1.1; EXPRESSED IN FETAL LIVER, SIGNAL =   1; EXPRESSED IN BONE MARROW, SIGNAL = 0.96
VQSTGEGEAQRYFDHALTLRNTILFLRHNKDLVAQTAQPDQPNY

SEQ ID NO: 27543 - protein, 18 aa, Homo sapiens
  MAP TO AF235096.1; EXPRESSED IN PLACENTA, SIGNAL = 1.3; EXPRESSED IN LUNG, SIGNAL =   1; EXPRESSED IN BRAIN, SIGNAL = 0.99; EXPRESSED IN HEART, SIGNAL =   4; EXPRESSED IN ADULT LIVER, SIGNAL = 1.1; EXPRESSED IN FETAL LIVER, SIGNAL =   1; EXPRESSED IN BONE MARROW, SIGNAL = 0.96
FRALVKEKHRDILIMHLL

SEQ ID NO: 27544 - protein, 27 aa, Homo sapiens
  MAP TO CHR21_68.0; EXPRESSED IN BONE MARROW, SIGNAL = 1.4; EXPRESSED IN LUNG, SIGNAL = 0.65; EXPRESSED IN BRAIN, SIGNAL = 1.4; EXPRESSED IN HELA, SIGNAL = 3.9; EXPRESSED IN FETAL LIVER, SIGNAL = 1.2
QQWQWSFTEGCSPTRQSSPCSHLLHIQ

SEQ ID NO: 27545 - protein, 29 aa, Homo sapiens
  MAP TO AC011985.3; EXPRESSED IN LUNG, SIGNAL = 1.1; EXPRESSED IN BRAIN, SIGNAL = 0.91
QRRNLADTALIKRSKLTSPVMGLINSMVV

SEQ ID NO: 27546 - protein, 22 aa, Homo sapiens
  MAP TO AL138995.1; EXPRESSED IN BONE MARROW, SIGNAL =  10; EXPRESSED IN PLACENTA, SIGNAL =  11; EXPRESSED IN LUNG, SIGNAL =  10; EXPRESSED IN BRAIN, SIGNAL = 9.1; EXPRESSED IN HELA, SIGNAL = 5.6; EXPRESSED IN FETAL LIVER, SIGNAL =  10
IGSTLRNNTLQEMKEAGLGRGR

SEQ ID NO: 27547 - protein, 49 aa, Homo sapiens
  MAP TO CHR22_228.0; EXPRESSED IN BONE MARROW, SIGNAL =   2; EXPRESSED IN BRAIN, SIGNAL = 1.8; EXPRESSED IN PLACENTA, SIGNAL = 1.1; EXPRESSED IN ADULT LIVER, SIGNAL = 1.3; EXPRESSED IN FETAL LIVER, SIGNAL =   2; EXPRESSED IN LUNG, SIGNAL = 1.1; EXPRESSED IN HEART, SIGNAL = 1.6; EXPRESSED IN HELA, SIGNAL = 3.4; SWISSPROT HIT: P18405, EVALUE 2.80e+00
RLPRWRSVLGRRPAPLHPITFPARPGWLWRTFPNTLLSQRRKPLQPQLW

SEQ ID NO: 27548 - protein, 49 aa, Homo sapiens
  MAP TO AC020698.2; EXPRESSED IN BRAIN, SIGNAL = 0.74; EXPRESSED IN HELA, SIGNAL = 0.55; EXPRESSED IN FETAL LIVER, SIGNAL = 0.79; EXPRESSED IN LUNG, SIGNAL = 0.83; EXPRESSED IN BONE MARROW, SIGNAL = 0.75; EXPRESSED IN PLACENTA, SIGNAL = 0.95; EXPRESSED IN ADULT LIVER, SIGNAL = 0.87
WLERSDSMGSICLRLVCTVLPTCTSAAARPAPPSPSCWATGYAFGMSRR

SEQ ID NO: 27549 - protein, 45 aa, Homo sapiens
  MAP TO AL133378.4; EXPRESSED IN HELA, SIGNAL = 1.5; EXPRESSED IN BRAIN, SIGNAL = 2.6; EXPRESSED IN FETAL LIVER, SIGNAL =   2; EXPRESSED IN BONE MARROW, SIGNAL = 2.5; EXPRESSED IN HEART, SIGNAL = 2.5; EXPRESSED IN LUNG, SIGNAL = 2.8; EXPRESSED IN PLACENTA, SIGNAL = 2.5; EXPRESSED IN ADULT LIVER, SIGNAL = 2.4
WNVYTMAGAGAAILNLEVDIENLVWQKKKSVRRKLVPNDQELPTF

SEQ ID NO: 27550 - protein, 28 aa, Homo sapiens
  MAP TO CHR21_33.0; EXPRESSED IN BONE MARROW, SIGNAL = 1.5; EXPRESSED IN LUNG, SIGNAL = 1.1; EXPRESSED IN ADULT LIVER, SIGNAL = 1.1; EXPRESSED IN PLACENTA, SIGNAL = 0.95; EXPRESSED IN BRAIN, SIGNAL = 1.6; EXPRESSED IN HELA, SIGNAL = 4.2; EXPRESSED IN FETAL LIVER, SIGNAL = 1.5; SWISSPROT HIT: P32645, EVALUE 8.70e+00
SSAAPATSQDCQDQLHAAENQSHPLLQK

SEQ ID NO: 27551 - protein, 96 aa, Homo sapiens
  MAP TO CHR22_33.0; EXPRESSED IN FETAL LIVER, SIGNAL = 1.5; EXPRESSED IN BONE MARROW, SIGNAL = 1.6; EXPRESSED IN BRAIN, SIGNAL = 1.6; EXPRESSED IN HEART, SIGNAL = 1.6; EXPRESSED IN LUNG, SIGNAL = 2.1; EXPRESSED IN ADULT LIVER, SIGNAL = 1.7; SWISSPROT HIT: Q12114, EVALUE 1.60e+00
MPTTPVKAKRVSTFQEFESNTSDAWDAGEDDDELLAMAAESLNSEVVMETANRVLRNHSQRQGRPTLQEGPGLQQKPRPEAEPPSPPSGDLRLVKS

SEQ ID NO: 27552 - protein, 32 aa, Homo sapiens
  MAP TO CHR22_106.0; EXPRESSED IN BONE MARROW, SIGNAL = 1.8; EXPRESSED IN PLACENTA, SIGNAL = 1.8; EXPRESSED IN LUNG, SIGNAL =   2; EXPRESSED IN ADULT LIVER, SIGNAL = 1.8; EXPRESSED IN HELA, SIGNAL = 1.9; EXPRESSED IN BRAIN, SIGNAL = 2.2; EXPRESSED IN FETAL LIVER, SIGNAL = 1.8; SWISSPROT HIT: P11274, EVALUE 8.00e-12
MNAIAGTLKLYFRELPEPLFTDEFYPSFAEGI

SEQ ID NO: 27553 - protein, 30 aa, Homo sapiens
  MAP TO AL139152.1; EXPRESSED IN HEART, SIGNAL = 7.7; EXPRESSED IN PLACENTA, SIGNAL =  10; EXPRESSED IN ADULT LIVER, SIGNAL = 9.2; EXPRESSED IN BONE MARROW, SIGNAL =  11; EXPRESSED IN HELA, SIGNAL = 2.7; EXPRESSED IN FETAL LIVER, SIGNAL = 8.5; EXPRESSED IN LUNG, SIGNAL =  12; EXPRESSED IN BRAIN, SIGNAL = 9.3
VNFCLTQSSLPTPSIHTLSLTDTSNLVFLP

SEQ ID NO: 27554 - protein, 33 aa, Homo sapiens
  MAP TO AL121830.11; EXPRESSED IN BRAIN, SIGNAL = 1.3; EXPRESSED IN FETAL LIVER, SIGNAL = 1.2; EXPRESSED IN LUNG, SIGNAL = 1.2; EXPRESSED IN BONE MARROW, SIGNAL = 1.3; SWISSPROT HIT: Q57768, EVALUE 2.30e+00
LQLFSFLATISIIPVLMATVVREKGKSPWEAVA

SEQ ID NO: 27555 - protein, 33 aa, Homo sapiens
  MAP TO CHR22_3.0; EXPRESSED IN FETAL LIVER, SIGNAL = 2.5; EXPRESSED IN BONE MARROW, SIGNAL = 2.5; EXPRESSED IN BRAIN, SIGNAL = 2.5; EXPRESSED IN HEART, SIGNAL = 2.2; EXPRESSED IN LUNG, SIGNAL = 2.6; EXPRESSED IN HELA, SIGNAL = 0.9; EXPRESSED IN PLACENTA, SIGNAL = 2.8; EXPRESSED IN ADULT LIVER, SIGNAL = 2.5
PRGSSTLPAVLSGSINPSWDGTQCDKSPVTIVE

SEQ ID NO: 27556 - protein, 29 aa, Homo sapiens
  MAP TO CHR22_3.0; EXPRESSED IN FETAL LIVER, SIGNAL = 2.5; EXPRESSED IN BONE MARROW, SIGNAL = 2.5; EXPRESSED IN BRAIN, SIGNAL = 2.5; EXPRESSED IN HEART, SIGNAL = 2.2; EXPRESSED IN LUNG, SIGNAL = 2.6; EXPRESSED IN HELA, SIGNAL = 0.9; EXPRESSED IN PLACENTA, SIGNAL = 2.8; EXPRESSED IN ADULT LIVER, SIGNAL = 2.5; SWISSPROT HIT: Q02910, EVALUE 5.10e+00
IPEVLAPFPLYSQDPSTPAGMAPSVTSPR

SEQ ID NO: 27557 - protein, 46 aa, Homo sapiens
  MAP TO CHR22_12.0; EXPRESSED IN BONE MARROW, SIGNAL = 0.85; EXPRESSED IN HEART, SIGNAL = 1.4; EXPRESSED IN BRAIN, SIGNAL = 0.87; EXPRESSED IN PLACENTA, SIGNAL = 1.1; EXPRESSED IN ADULT LIVER, SIGNAL = 1.1; EXPRESSED IN HELA, SIGNAL = 1.6; EXPRESSED IN LUNG, SIGNAL = 0.9; EXPRESSED IN FETAL LIVER, SIGNAL = 0.86; SWISSPROT HIT: O19025, EVALUE 3.40e-01
AQGPPGWPACPHWLHGTAGILGAAEPAERPEHCGPGLEWRWEDHLL

SEQ ID NO: 27558 - protein, 66 aa, Homo sapiens
  MAP TO CHR22_12.0; EXPRESSED IN BONE MARROW, SIGNAL = 0.85; EXPRESSED IN HEART, SIGNAL = 1.4; EXPRESSED IN BRAIN, SIGNAL = 0.87; EXPRESSED IN PLACENTA, SIGNAL = 1.1; EXPRESSED IN ADULT LIVER, SIGNAL = 1.1; EXPRESSED IN HELA, SIGNAL = 1.6; EXPRESSED IN LUNG, SIGNAL = 0.9; EXPRESSED IN FETAL LIVER, SIGNAL = 0.86; SWISSPROT HIT: Q27991, EVALUE 3.00e-07
VPKGRRDGLPAHIGSMAQRAYWALLNQRRDQSIVALGWSGAGKTTCCEQVLEHLVGMAGSVDGRVS

SEQ ID NO: 27559 - protein, 58 aa, Homo sapiens
  MAP TO AL137859.2; EXPRESSED IN FETAL LIVER, SIGNAL = 0.68; EXPRESSED IN BONE MARROW, SIGNAL = 0.67; EXPRESSED IN BRAIN, SIGNAL = 0.8; EXPRESSED IN HELA, SIGNAL = 0.66; EXPRESSED IN PLACENTA, SIGNAL = 0.78; EXPRESSED IN ADULT LIVER, SIGNAL = 0.82; SWISSPROT HIT: P37160, EVALUE 4.70e+00
PRAIDGGPKGEPPGLLDHRSIIFEPADGGRWIPRDFAVQFCCLAQRRGDVIHWFIEGQ

SEQ ID NO: 27560 - protein, 72 aa, Homo sapiens
  MAP TO CHR21_73.0; EXPRESSED IN HELA, SIGNAL = 3.7; EXPRESSED IN BRAIN, SIGNAL = 1.3; EXPRESSED IN PLACENTA, SIGNAL = 0.63; EXPRESSED IN LUNG, SIGNAL = 0.72; EXPRESSED IN ADULT LIVER, SIGNAL = 0.78; EXPRESSED IN FETAL LIVER, SIGNAL = 1.3; EXPRESSED IN BONE MARROW, SIGNAL = 1.2; SWISSPROT HIT: Q15269, EVALUE 4.00e-35
RCWAATTTEGLLIYSLDTRVLFDPFELDTSVTPGRVREALRQQDFTRAILMALRLNESKLVQEALEAVPRGE

SEQ ID NO: 27561 - protein, 22 aa, Homo sapiens
  MAP TO CHR21_73.0; EXPRESSED IN HELA, SIGNAL = 3.7; EXPRESSED IN BRAIN, SIGNAL = 1.3; EXPRESSED IN PLACENTA, SIGNAL = 0.63; EXPRESSED IN LUNG, SIGNAL = 0.72; EXPRESSED IN ADULT LIVER, SIGNAL = 0.78; EXPRESSED IN FETAL LIVER, SIGNAL = 1.3; EXPRESSED IN BONE MARROW, SIGNAL = 1.2
ALLGGHHHGGTPHLLPGHPRAL

SEQ ID NO: 27562 - protein, 77 aa, Homo sapiens
  MAP TO CHR22_227.0; EXPRESSED IN BONE MARROW, SIGNAL = 1.8; EXPRESSED IN BRAIN, SIGNAL = 1.6; EXPRESSED IN HEART, SIGNAL = 1.2; EXPRESSED IN LUNG, SIGNAL = 1.1; EXPRESSED IN PLACENTA, SIGNAL =   1; EXPRESSED IN ADULT LIVER, SIGNAL = 1.1; EXPRESSED IN HELA, SIGNAL = 3.2; EXPRESSED IN FETAL LIVER, SIGNAL = 1.7; SWISSPROT HIT: P54276, EVALUE 1.60e+00
LMPDRELEVSDLELGSSKAFSASQHAQPPSSRDLMPGRRLASQMPGSNWESRMPGRSFCRKMPDFESKGKCRMPERC

SEQ ID NO: 27563 - protein, 62 aa, Homo sapiens
  MAP TO AF239614.1; EXPRESSED IN BONE MARROW, SIGNAL = 1.9; EXPRESSED IN PLACENTA, SIGNAL =   2; EXPRESSED IN LUNG, SIGNAL =   2; EXPRESSED IN ADULT LIVER, SIGNAL =   2; EXPRESSED IN HELA, SIGNAL = 1.4; EXPRESSED IN BRAIN, SIGNAL =   2; SWISSPROT HIT: P54296, EVALUE 6.00e-34
VPSHPYGITLLNCDGHSMTLGWKVPKFSGGSPILGYYLDKREVHHKNWHEVNSSPSKPTILT

SEQ ID NO: 27564 - protein, 18 aa, Homo sapiens
  MAP TO AF239614.1; EXPRESSED IN BONE MARROW, SIGNAL = 1.9; EXPRESSED IN PLACENTA, SIGNAL =   2; EXPRESSED IN LUNG, SIGNAL =   2; EXPRESSED IN ADULT LIVER, SIGNAL =   2; EXPRESSED IN HELA, SIGNAL = 1.4; EXPRESSED IN BRAIN, SIGNAL =   2
PSRPILMGLRSSTVTATP

SEQ ID NO: 27565 - protein, 42 aa, Homo sapiens
  MAP TO CHR22_8.0; EXPRESSED IN BONE MARROW, SIGNAL = 1.8; EXPRESSED IN LUNG, SIGNAL = 1.7; EXPRESSED IN BRAIN, SIGNAL = 1.7; EXPRESSED IN ADULT LIVER, SIGNAL = 1.6; EXPRESSED IN HELA, SIGNAL =   2; EXPRESSED IN FETAL LIVER, SIGNAL = 1.8
MAEHSTRLTVGFNNWQIILLLQCGMFNGRSRKKRIINQAGRK

SEQ ID NO: 27566 - protein, 47 aa, Homo sapiens
  MAP TO CHR22_12.0; EXPRESSED IN BONE MARROW, SIGNAL = 3.5; EXPRESSED IN PLACENTA, SIGNAL = 4.1; EXPRESSED IN HELA, SIGNAL =  13; EXPRESSED IN HEART, SIGNAL = 3.2; EXPRESSED IN ADULT LIVER, SIGNAL = 3.9; EXPRESSED IN BRAIN, SIGNAL = 3.7; EXPRESSED IN FETAL LIVER, SIGNAL =   4; EXPRESSED IN LUNG, SIGNAL = 3.8; SWISSPROT HIT: P05659, EVALUE 8.80e-02
EKIRATFTVLRAFGSVSMAHSRSATRFSMVMSLDFNATGRITAAQLQ

SEQ ID NO: 27567 - protein, 47 aa, Homo sapiens
  MAP TO CHR22_12.0; EXPRESSED IN BONE MARROW, SIGNAL = 3.5; EXPRESSED IN PLACENTA, SIGNAL = 4.1; EXPRESSED IN HELA, SIGNAL =  13; EXPRESSED IN HEART, SIGNAL = 3.2; EXPRESSED IN ADULT LIVER, SIGNAL = 3.9; EXPRESSED IN BRAIN, SIGNAL = 3.7; EXPRESSED IN FETAL LIVER, SIGNAL =   4; EXPRESSED IN LUNG, SIGNAL = 3.8
GEDPSHLHCPPGLRLCVHGPQPQCHPVLHGDVAGLQRYRPHHSCSAP

SEQ ID NO: 27568 - protein, 19 aa, Homo sapiens
  MAP TO CHR22_12.0; EXPRESSED IN BONE MARROW, SIGNAL = 3.5; EXPRESSED IN PLACENTA, SIGNAL = 4.1; EXPRESSED IN HELA, SIGNAL =  13; EXPRESSED IN HEART, SIGNAL = 3.2; EXPRESSED IN ADULT LIVER, SIGNAL = 3.9; EXPRESSED IN BRAIN, SIGNAL = 3.7; EXPRESSED IN FETAL LIVER, SIGNAL =   4; EXPRESSED IN LUNG, SIGNAL = 3.8; SWISSPROT HIT: P98164, EVALUE 8.80e+00
GPWKRWTCVRWQWQHLGHQ

SEQ ID NO: 27569 - protein, 69 aa, Homo sapiens
  MAP TO CHR22_47.0; EXPRESSED IN FETAL LIVER, SIGNAL = 1.9; EXPRESSED IN HEART, SIGNAL = 1.4; EXPRESSED IN ADULT LIVER, SIGNAL = 2.1; EXPRESSED IN BONE MARROW, SIGNAL = 1.7; EXPRESSED IN BRAIN, SIGNAL = 1.5; EXPRESSED IN HELA, SIGNAL = 1.4; EXPRESSED IN PLACENTA, SIGNAL = 1.6; EXPRESSED IN LUNG, SIGNAL = 1.9; SWISSPROT HIT: P15272, EVALUE 5.40e+00
MVSGLAQGCAGGRWQVAESERESWSNKCQSSHNSPGIALVENSNAHCLLPEVVGVQGCRCAGLLVCGVA

SEQ ID NO: 27570 - protein, 53 aa, Homo sapiens
  MAP TO AL096764.11; EXPRESSED IN BONE MARROW, SIGNAL = 3.5; EXPRESSED IN BRAIN, SIGNAL =   3; EXPRESSED IN HEART, SIGNAL = 2.9; EXPRESSED IN HELA, SIGNAL = 1.5; EXPRESSED IN PLACENTA, SIGNAL =   4; EXPRESSED IN LUNG, SIGNAL = 3.7; EXPRESSED IN ADULT LIVER, SIGNAL = 3.6; EXPRESSED IN FETAL LIVER, SIGNAL = 3.1
VLYEILYKDVFVVDEEELKTAIKLFRSGSKKNRNNAVTGSEDAHTDYKSSNQN

SEQ ID NO: 27571 - protein, 43 aa, Homo sapiens
  MAP TO CHR22_38.0; EXPRESSED IN FETAL LIVER, SIGNAL = 1.6; EXPRESSED IN BONE MARROW, SIGNAL = 1.6; EXPRESSED IN LUNG, SIGNAL = 1.6; EXPRESSED IN HEART, SIGNAL = 1.6; EXPRESSED IN HELA, SIGNAL = 1.5; EXPRESSED IN BRAIN, SIGNAL = 1.5; EXPRESSED IN PLACENTA, SIGNAL = 1.8; EXPRESSED IN ADULT LIVER, SIGNAL = 1.9
ARQQEECHALPPTSSLLRGALDARWGSSCVFDNGTQSDKKTLV

SEQ ID NO: 27572 - protein, 41 aa, Homo sapiens
  MAP TO CHR22_38.0; EXPRESSED IN FETAL LIVER, SIGNAL = 1.6; EXPRESSED IN BONE MARROW, SIGNAL = 1.6; EXPRESSED IN LUNG, SIGNAL = 1.6; EXPRESSED IN HEART, SIGNAL = 1.6; EXPRESSED IN HELA, SIGNAL = 1.5; EXPRESSED IN BRAIN, SIGNAL = 1.5; EXPRESSED IN PLACENTA, SIGNAL = 1.8; EXPRESSED IN ADULT LIVER, SIGNAL = 1.9
LASKKSATLCRQHHPSSGVPWMHAGGAAVCLIMEHSLIKKP

SEQ ID NO: 27573 - protein, 83 aa, Homo sapiens
  MAP TO CHR21_61.0; EXPRESSED IN BRAIN, SIGNAL = 1.1; EXPRESSED IN HELA, SIGNAL = 3.3; EXPRESSED IN FETAL LIVER, SIGNAL = 1.2; EXPRESSED IN BONE MARROW, SIGNAL = 1.2; EXPRESSED IN PLACENTA, SIGNAL = 0.67; EXPRESSED IN LUNG, SIGNAL = 0.85; EXPRESSED IN ADULT LIVER, SIGNAL = 0.83; SWISSPROT HIT: P20591, EVALUE 6.00e-35
SKIEDIRAEQEREGEKLIRLHFQMEQIVYCQDQVYRGALQKVREKELEEEKKKKSWDFGAFQSSSATDSSMEEIFQHLMAYHQ

SEQ ID NO: 27574 - protein, 42 aa, Homo sapiens
  MAP TO AF235096.1; EXPRESSED IN PLACENTA, SIGNAL = 0.94; EXPRESSED IN LUNG, SIGNAL = 0.78; EXPRESSED IN ADULT LIVER, SIGNAL = 0.93; EXPRESSED IN BONE MARROW, SIGNAL = 0.64; EXPRESSED IN BRAIN, SIGNAL = 0.77; EXPRESSED IN HELA, SIGNAL = 0.57; EXPRESSED IN FETAL LIVER, SIGNAL = 0.67
TPSVNLLGLTCRYPTFNICSRTHAISTYDLLHPVDFVIVSFA

SEQ ID NO: 27575 - protein, 26 aa, Homo sapiens
  MAP TO AL137183.1; EXPRESSED IN BONE MARROW, SIGNAL = 3.1; EXPRESSED IN HELA, SIGNAL = 1.2; EXPRESSED IN BRAIN, SIGNAL = 2.9; EXPRESSED IN HEART, SIGNAL = 2.8; EXPRESSED IN PLACENTA, SIGNAL = 3.4; EXPRESSED IN LUNG, SIGNAL = 3.3; EXPRESSED IN FETAL LIVER, SIGNAL = 3.3; EXPRESSED IN ADULT LIVER, SIGNAL = 3.3
YTLEKKETREMDEKIEKGNHMRHMRE

SEQ ID NO: 27576 - protein, 21 aa, Homo sapiens
  MAP TO AL137183.1; EXPRESSED IN BONE MARROW, SIGNAL = 3.1; EXPRESSED IN HELA, SIGNAL = 1.2; EXPRESSED IN BRAIN, SIGNAL = 2.9; EXPRESSED IN HEART, SIGNAL = 2.8; EXPRESSED IN PLACENTA, SIGNAL = 3.4; EXPRESSED IN LUNG, SIGNAL = 3.3; EXPRESSED IN FETAL LIVER, SIGNAL = 3.3; EXPRESSED IN ADULT LIVER, SIGNAL = 3.3
VIHLRKKRQERWMKKLKKETI

SEQ ID NO: 27577 - protein, 22 aa, Homo sapiens
  MAP TO CHR22_14.0; EXPRESSED IN LUNG, SIGNAL = 0.97; EXPRESSED IN BONE MARROW, SIGNAL =   1; EXPRESSED IN PLACENTA, SIGNAL =   1; EXPRESSED IN HELA, SIGNAL = 0.55; EXPRESSED IN BRAIN, SIGNAL = 0.93; EXPRESSED IN FETAL LIVER, SIGNAL = 1.1
GNRDICCIWLLEKHKEIMDKCQ

SEQ ID NO: 27578 - protein, 68 aa, Homo sapiens
  MAP TO AC024326.2; EXPRESSED IN BRAIN, SIGNAL = 0.53; EXPRESSED IN FETAL LIVER, SIGNAL = 0.58; EXPRESSED IN PLACENTA, SIGNAL = 0.46; EXPRESSED IN ADULT LIVER, SIGNAL = 0.53; SWISSPROT HIT: P48960, EVALUE 2.00e-04
GIKDYNILTRITQLGIIISLICLAICIFTFWFFSEIQSTRTTIHKNLCCSLFLAELVFLVGINTNTNK

SEQ ID NO: 27579 - protein, 31 aa, Homo sapiens
  MAP TO CHR22_234.0; EXPRESSED IN BONE MARROW, SIGNAL = 3.7; EXPRESSED IN BRAIN, SIGNAL = 2.9; EXPRESSED IN HELA, SIGNAL = 5.1; EXPRESSED IN FETAL LIVER, SIGNAL = 3.2; EXPRESSED IN LUNG, SIGNAL = 2.4; EXPRESSED IN PLACENTA, SIGNAL = 2.2; EXPRESSED IN ADULT LIVER, SIGNAL = 2.3
TCRTFRVLKGAAKITALSGGAVSRPQRWRWR

SEQ ID NO: 27580 - protein, 67 aa, Homo sapiens
  MAP TO CHR22_26.0; EXPRESSED IN HELA, SIGNAL = 3.3; EXPRESSED IN BRAIN, SIGNAL = 3.4; EXPRESSED IN ADULT LIVER, SIGNAL = 4.3; EXPRESSED IN LUNG, SIGNAL = 3.8; EXPRESSED IN FETAL LIVER, SIGNAL = 3.7; EXPRESSED IN BONE MARROW, SIGNAL = 3.5; EXPRESSED IN HEART, SIGNAL = 2.8
RGWGWRLSSTSGLLIQSVMPVEWNPNENSRHGSSGEHPDGQFPVNGHTPMCREGNRSLGLTEAPRPC

SEQ ID NO: 27581 - protein, 26 aa, Homo sapiens
  MAP TO CHR22_26.0; EXPRESSED IN HELA, SIGNAL = 3.3; EXPRESSED IN BRAIN, SIGNAL = 3.4; EXPRESSED IN ADULT LIVER, SIGNAL = 4.3; EXPRESSED IN LUNG, SIGNAL = 3.8; EXPRESSED IN FETAL LIVER, SIGNAL = 3.7; EXPRESSED IN BONE MARROW, SIGNAL = 3.5; EXPRESSED IN HEART, SIGNAL = 2.8
KGMGLEVEFHFRAVDSVSHARGMEPQ

SEQ ID NO: 27582 - protein, 63 aa, Homo sapiens
  MAP TO AL136450.1; EXPRESSED IN FETAL LIVER, SIGNAL = 4.8; EXPRESSED IN HEART, SIGNAL = 4.9; EXPRESSED IN PLACENTA, SIGNAL = 6.8; EXPRESSED IN BONE MARROW, SIGNAL = 5.1; EXPRESSED IN LUNG, SIGNAL = 6.5; EXPRESSED IN ADULT LIVER, SIGNAL = 6.3; EXPRESSED IN BRAIN, SIGNAL = 5.5; SWISSPROT HIT: P03300, EVALUE 7.90e+00
SHLPVVVIVIVVADGGGKLNSMSEDKRSRGWWEVAPGSLGLASLFMTKTKPGPWMALACPEEK

SEQ ID NO: 27583 - protein, 57 aa, Homo sapiens
  MAP TO AJ239319.2; EXPRESSED IN HELA, SIGNAL =   6; EXPRESSED IN FETAL LIVER, SIGNAL =  11; EXPRESSED IN HEART, SIGNAL =  10; EXPRESSED IN BONE MARROW, SIGNAL =  12; EXPRESSED IN LUNG, SIGNAL =  11; EXPRESSED IN ADULT LIVER, SIGNAL = 9.4; EXPRESSED IN BRAIN, SIGNAL =  11; SWISSPROT HIT: O15294, EVALUE 3.00e-29
AMWLGYPGTSGALFMDYIITDQETSPAEVAEQYSEKLAYMPHTFFIGDHANMFPHLK

SEQ ID NO: 27584 - protein, 54 aa, Homo sapiens
  MAP TO AJ239319.2; EXPRESSED IN HELA, SIGNAL =   6; EXPRESSED IN FETAL LIVER, SIGNAL =  11; EXPRESSED IN HEART, SIGNAL =  10; EXPRESSED IN BONE MARROW, SIGNAL =  12; EXPRESSED IN LUNG, SIGNAL =  11; EXPRESSED IN ADULT LIVER, SIGNAL = 9.4; EXPRESSED IN BRAIN, SIGNAL =  11; SWISSPROT HIT: P31327, EVALUE 4.70e+00
CGWDTLGRVVRFSWIILSLIRKLRQLKLLSSIPRNWLICPTLFLLVIMLICSLT

SEQ ID NO: 27585 - protein, 71 aa, Homo sapiens
  MAP TO AL139158.1; EXPRESSED IN HELA, SIGNAL = 0.74; EXPRESSED IN FETAL LIVER, SIGNAL = 0.79; EXPRESSED IN PLACENTA, SIGNAL =   1; EXPRESSED IN LUNG, SIGNAL = 0.9; EXPRESSED IN ADULT LIVER, SIGNAL = 0.99; EXPRESSED IN BRAIN, SIGNAL = 0.73; SWISSPROT HIT: Q09345, EVALUE 2.00e+00
TRRPEPDASALPPPSRSTWDGRVLVAVAVLSSPTPGAATAGPRGLETTNGSLLMGCLPPPVCQPVLLHTGR

SEQ ID NO: 27586 - protein, 52 aa, Homo sapiens
  MAP TO AL139158.1; EXPRESSED IN HELA, SIGNAL = 0.74; EXPRESSED IN FETAL LIVER, SIGNAL = 0.79; EXPRESSED IN PLACENTA, SIGNAL =   1; EXPRESSED IN LUNG, SIGNAL = 0.9; EXPRESSED IN ADULT LIVER, SIGNAL = 0.99; EXPRESSED IN BRAIN, SIGNAL = 0.73
QGGQSRMPAPFLPHPAAPGMGVCSSLSPCSRLPLLEQPQQVPGAWRQQMAPC

SEQ ID NO: 27587 - protein, 32 aa, Homo sapiens
  MAP TO CHR22_99.0; EXPRESSED IN PLACENTA, SIGNAL = 1.6; EXPRESSED IN ADULT LIVER, SIGNAL = 0.83; EXPRESSED IN HELA, SIGNAL = 2.3; EXPRESSED IN FETAL LIVER, SIGNAL = 1.4; EXPRESSED IN LUNG, SIGNAL = 1.2; EXPRESSED IN HEART, SIGNAL = 1.4; EXPRESSED IN BONE MARROW, SIGNAL = 1.4; EXPRESSED IN BRAIN, SIGNAL = 1.6
VVSSVKEVTVDHLLLTLLLEPDTLPGAHEKFN

SEQ ID NO: 27588 - protein, 20 aa, Homo sapiens
  MAP TO CHR22_99.0; EXPRESSED IN PLACENTA, SIGNAL = 1.6; EXPRESSED IN ADULT LIVER, SIGNAL = 0.83; EXPRESSED IN HELA, SIGNAL = 2.3; EXPRESSED IN FETAL LIVER, SIGNAL = 1.4; EXPRESSED IN LUNG, SIGNAL = 1.2; EXPRESSED IN HEART, SIGNAL = 1.4; EXPRESSED IN BONE MARROW, SIGNAL = 1.4; EXPRESSED IN BRAIN, SIGNAL = 1.6
CKQCEGSDRGSFASHSSSRA

SEQ ID NO: 27589 - protein, 29 aa, Homo sapiens
  MAP TO CHR21_11.0; EXPRESSED IN BONE MARROW, SIGNAL = 1.4; EXPRESSED IN BRAIN, SIGNAL = 1.3; EXPRESSED IN HELA, SIGNAL =   3; EXPRESSED IN LUNG, SIGNAL = 0.74; EXPRESSED IN PLACENTA, SIGNAL = 0.69; EXPRESSED IN ADULT LIVER, SIGNAL = 0.73; EXPRESSED IN FETAL LIVER, SIGNAL = 1.4
EGQGVPPSAIRKLGDQESQWCNSDGVQRH

SEQ ID NO: 27590 - protein, 32 aa, Homo sapiens
  MAP TO CHR22_73.0; EXPRESSED IN BRAIN, SIGNAL = 0.73; EXPRESSED IN HELA, SIGNAL = 1.6; EXPRESSED IN LUNG, SIGNAL = 0.75; EXPRESSED IN PLACENTA, SIGNAL = 0.93; EXPRESSED IN ADULT LIVER, SIGNAL = 0.61; EXPRESSED IN FETAL LIVER, SIGNAL = 0.91
MWRGGKVTSFESETRGLQSRLCYLRYQPGQVS

SEQ ID NO: 27591 - protein, 39 aa, Homo sapiens
  MAP TO CHR22_73.0; EXPRESSED IN BRAIN, SIGNAL = 0.73; EXPRESSED IN HELA, SIGNAL = 1.6; EXPRESSED IN LUNG, SIGNAL = 0.75; EXPRESSED IN PLACENTA, SIGNAL = 0.93; EXPRESSED IN ADULT LIVER, SIGNAL = 0.61; EXPRESSED IN FETAL LIVER, SIGNAL = 0.91
QCGEVEKSQALSQKHVGCSPDSATYAISLDKFLDHSELI

SEQ ID NO: 27592 - protein, 43 aa, Homo sapiens
  MAP TO AL096771.11; EXPRESSED IN BONE MARROW, SIGNAL = 4.1; EXPRESSED IN BRAIN, SIGNAL = 5.2; EXPRESSED IN HEART, SIGNAL = 4.4; EXPRESSED IN FETAL LIVER, SIGNAL = 4.7; EXPRESSED IN PLACENTA, SIGNAL =   6; EXPRESSED IN LUNG, SIGNAL = 5.4; EXPRESSED IN ADULT LIVER, SIGNAL =   6; SWISSPROT HIT: Q99715, EVALUE 6.00e-19
IVVPGNTRMVHLERLIPDTLYSVNLVALYSDGEGNPSPAQGRT

SEQ ID NO: 27593 - protein, 38 aa, Homo sapiens
  MAP TO AC024066.3; EXPRESSED IN FETAL LIVER, SIGNAL = 1.5; EXPRESSED IN BRAIN, SIGNAL = 1.6; EXPRESSED IN HEART, SIGNAL = 1.4; EXPRESSED IN LUNG, SIGNAL = 1.5; EXPRESSED IN HELA, SIGNAL = 0.93; EXPRESSED IN PLACENTA, SIGNAL = 1.6; EXPRESSED IN ADULT LIVER, SIGNAL = 1.3
WQPQIISMTSLLWTPFWVCGPLTSVSCLSSVGIIPLLY

SEQ ID NO: 27594 - protein, 29 aa, Homo sapiens
  MAP TO CHR21_16.0; EXPRESSED IN BRAIN, SIGNAL = 1.5; EXPRESSED IN PLACENTA, SIGNAL = 0.69; EXPRESSED IN LUNG, SIGNAL = 0.7; EXPRESSED IN HELA, SIGNAL = 2.7; EXPRESSED IN ADULT LIVER, SIGNAL = 0.85; EXPRESSED IN BONE MARROW, SIGNAL = 1.6
NSIEFEFIMEYNHIIAPSFVDWIVADTKG

SEQ ID NO: 27595 - protein, 37 aa, Homo sapiens
  MAP TO CHR22_132.0; EXPRESSED IN HELA, SIGNAL = 1.5; EXPRESSED IN BRAIN, SIGNAL = 1.4; EXPRESSED IN FETAL LIVER, SIGNAL = 1.3; EXPRESSED IN BONE MARROW, SIGNAL = 1.4; EXPRESSED IN HEART, SIGNAL = 1.3; EXPRESSED IN ADULT LIVER, SIGNAL = 1.3; SWISSPROT HIT: P55342, EVALUE 1.70e+00
HFAISAGPETHLPTAAATSGDQQNGLATSPVRSPHKI

SEQ ID NO: 27596 - protein, 86 aa, Homo sapiens
  MAP TO AC015938.3; EXPRESSED IN BRAIN, SIGNAL = 1.5; EXPRESSED IN HELA, SIGNAL = 0.93; EXPRESSED IN FETAL LIVER, SIGNAL = 1.7; EXPRESSED IN HEART, SIGNAL = 1.5; EXPRESSED IN LUNG, SIGNAL = 1.3; EXPRESSED IN BONE MARROW, SIGNAL = 1.4; EXPRESSED IN ADULT LIVER, SIGNAL = 1.5
PPKASKPELVGERQGRGEWEEEREPKEAGQGLAAPGTPFYKDRGGTSCSTEEIFPKVRVVVSYFKWPLFITILLGSLSLQMMIKDS

SEQ ID NO: 27597 - protein, 23 aa, Homo sapiens
  MAP TO CHR21_32.0; EXPRESSED IN PLACENTA, SIGNAL =   1; EXPRESSED IN FETAL LIVER, SIGNAL = 1.7; EXPRESSED IN LUNG, SIGNAL = 1.1; EXPRESSED IN ADULT LIVER, SIGNAL = 1.2; EXPRESSED IN BONE MARROW, SIGNAL = 1.7; EXPRESSED IN HELA, SIGNAL = 3.4; EXPRESSED IN BRAIN, SIGNAL = 1.4
WVEVPSRQPCVSQGDRPGTDSSL

SEQ ID NO: 27598 - protein, 61 aa, Homo sapiens
  MAP TO AL160058.2; EXPRESSED IN HELA, SIGNAL = 0.97; EXPRESSED IN FETAL LIVER, SIGNAL = 0.99; EXPRESSED IN LUNG, SIGNAL =   1; EXPRESSED IN ADULT LIVER, SIGNAL = 1.1; EXPRESSED IN BRAIN, SIGNAL =   1; EXPRESSED IN BONE MARROW, SIGNAL = 0.96; EXPRESSED IN PLACENTA, SIGNAL = 1.2; EXPRESSED IN HEART, SIGNAL = 1.1; SWISSPROT HIT: Q04650, EVALUE 8.00e-32
RAVSPKSVCEGCQRVILDRFLLRLNDSFWHEQCVQCASCKEPLETTCFYRDKKLYCKYDYE

SEQ ID NO: 27599 - protein, 117 aa, Homo sapiens
  MAP TO CHR22_102.0; EXPRESSED IN FETAL LIVER, SIGNAL = 0.92; EXPRESSED IN LUNG, SIGNAL = 1.1; EXPRESSED IN PLACENTA, SIGNAL = 0.98; EXPRESSED IN BONE MARROW, SIGNAL =   1; EXPRESSED IN BRAIN, SIGNAL =   1; EXPRESSED IN HELA, SIGNAL = 0.71; SWISSPROT HIT: Q07960, EVALUE 2.00e-05
YKKNLKALYVVHPTSFIKVLWNILKPLIRYASLWERTSLGLEVSPLRVHGTAFPIHASWRARLQGACVSGAPYPPWGLRGVTRPAQVMDRSAVPAFGTCGVCTWCLKAPLCLSPHTV

SEQ ID NO: 27600 - protein, 29 aa, Homo sapiens
  MAP TO CHR22_102.0; EXPRESSED IN FETAL LIVER, SIGNAL = 0.92; EXPRESSED IN LUNG, SIGNAL = 1.1; EXPRESSED IN PLACENTA, SIGNAL = 0.98; EXPRESSED IN BONE MARROW, SIGNAL =   1; EXPRESSED IN BRAIN, SIGNAL =   1; EXPRESSED IN HELA, SIGNAL = 0.71
VQEELEGPLRGAPHQLHQGPVEHLEAPHQ

SEQ ID NO: 27601 - protein, 30 aa, Homo sapiens
  MAP TO AC018715.3; EXPRESSED IN LUNG, SIGNAL =   2; EXPRESSED IN PLACENTA, SIGNAL = 2.2; EXPRESSED IN ADULT LIVER, SIGNAL = 2.1; EXPRESSED IN HELA, SIGNAL = 1.3; EXPRESSED IN FETAL LIVER, SIGNAL = 2.1; EXPRESSED IN HEART, SIGNAL = 1.8; EXPRESSED IN BONE MARROW, SIGNAL = 2.1; EXPRESSED IN BRAIN, SIGNAL =   2
RDTVYEAENEASPDTESAGVLILKFTAYTT

SEQ ID NO: 27602 - protein, 131 aa, Homo sapiens
  MAP TO CHR21_4.0; EXPRESSED IN FETAL LIVER, SIGNAL = 1.9; EXPRESSED IN LUNG, SIGNAL = 1.3; EXPRESSED IN BONE MARROW, SIGNAL = 1.9; EXPRESSED IN HEART, SIGNAL = 1.5; EXPRESSED IN BRAIN, SIGNAL = 1.6; EXPRESSED IN HELA, SIGNAL = 4.3; EXPRESSED IN PLACENTA, SIGNAL = 1.1; EXPRESSED IN ADULT LIVER, SIGNAL = 1.5; SWISSPROT HIT: P26371, EVALUE 7.90e+00
MGTSGDHDDSFMKMLRSKMGKCCRHCFPCCRGSGTSNVGTSGDHENSFMKMLRSKMGKWCCHCFPCCRGSGKSNVGAWGDYDHSAFMEPRYHIRREDLDKLHRAAWWGKVPRKDLIVMLRDTDMNKRDKEK

SEQ ID NO: 27603 - protein, 43 aa, Homo sapiens
  MAP TO CHR21_4.0; EXPRESSED IN FETAL LIVER, SIGNAL = 1.9; EXPRESSED IN LUNG, SIGNAL = 1.3; EXPRESSED IN BONE MARROW, SIGNAL = 1.9; EXPRESSED IN HEART, SIGNAL = 1.5; EXPRESSED IN BRAIN, SIGNAL = 1.6; EXPRESSED IN HELA, SIGNAL = 4.3; EXPRESSED IN PLACENTA, SIGNAL = 1.1; EXPRESSED IN ADULT LIVER, SIGNAL = 1.5
GHFWRPRRLLYEDAQEQDGQVLPPLLPLLQGERHEQRGHFWRP

SEQ ID NO: 27604 - protein, 75 aa, Homo sapiens
  MAP TO AL133543.2; EXPRESSED IN ADULT LIVER, SIGNAL = 1.1; EXPRESSED IN FETAL LIVER, SIGNAL = 0.73; EXPRESSED IN PLACENTA, SIGNAL = 0.91; EXPRESSED IN LUNG, SIGNAL = 0.88; EXPRESSED IN BONE MARROW, SIGNAL = 0.65; EXPRESSED IN BRAIN, SIGNAL = 0.67; EXPRESSED IN HELA, SIGNAL = 0.99; SWISSPROT HIT: P15924, EVALUE 7.00e-40
TTTEITHHGTCQDVNHNKVIETNRENDKQETWMLMELQKIRRQIEHCEGRMTLKNLPLADQGSSHHITVKINELK

SEQ ID NO: 27605 - protein, 20 aa, Homo sapiens
  MAP TO AL139224.1; EXPRESSED IN BRAIN, SIGNAL = 0.76; EXPRESSED IN FETAL LIVER, SIGNAL = 1.1; EXPRESSED IN LUNG, SIGNAL =   1; EXPRESSED IN BONE MARROW, SIGNAL = 1.1; EXPRESSED IN ADULT LIVER, SIGNAL = 1.3
WWPRCSSAPSVSGLGCRIRR

SEQ ID NO: 27606 - protein, 79 aa, Homo sapiens
  MAP TO CHR22_81.0; EXPRESSED IN HELA, SIGNAL = 2.3; EXPRESSED IN BRAIN, SIGNAL = 1.3; EXPRESSED IN FETAL LIVER, SIGNAL = 1.1; EXPRESSED IN PLACENTA, SIGNAL = 1.1; EXPRESSED IN ADULT LIVER, SIGNAL =   1
RPHLQNQWRKRKMTTWSCLVAMIVSGVITAVWAVRAAPIWRSQVKQKMRIGKQGNCRPPRCICSALGLLAPWMAVVLSQ

SEQ ID NO: 27607 - protein, 55 aa, Homo sapiens
  MAP TO AC013718.3; EXPRESSED IN FETAL LIVER, SIGNAL = 1.3; EXPRESSED IN BONE MARROW, SIGNAL = 1.4; EXPRESSED IN BRAIN, SIGNAL = 1.2; EXPRESSED IN HEART, SIGNAL = 1.2; EXPRESSED IN LUNG, SIGNAL = 1.3; EXPRESSED IN HELA, SIGNAL = 0.66; EXPRESSED IN PLACENTA, SIGNAL = 1.6; EXPRESSED IN ADULT LIVER, SIGNAL = 1.4; SWISSPROT HIT: O35099, EVALUE 7.30e-01
TQKYNTLLNLERINMPGTSCPTTKAAGLATEGSPTPCLVPEQSVILSGSTGLKEN

SEQ ID NO: 27608 - protein, 21 aa, Homo sapiens
  MAP TO CHR22_192.0; EXPRESSED IN PLACENTA, SIGNAL = 1.6; EXPRESSED IN LUNG, SIGNAL = 1.4; EXPRESSED IN BONE MARROW, SIGNAL = 1.6; EXPRESSED IN ADULT LIVER, SIGNAL = 1.5; EXPRESSED IN BRAIN, SIGNAL = 1.3; EXPRESSED IN HELA, SIGNAL = 1.2; EXPRESSED IN FETAL LIVER, SIGNAL = 1.8
CCLSCCCCPLHNGVARKWIWC

SEQ ID NO: 27609 - protein, 75 aa, Homo sapiens
  MAP TO CHR22_227.0; EXPRESSED IN LUNG, SIGNAL = 1.1; EXPRESSED IN BONE MARROW, SIGNAL =   2; EXPRESSED IN HELA, SIGNAL = 3.9; EXPRESSED IN BRAIN, SIGNAL = 1.9; EXPRESSED IN HEART, SIGNAL = 1.2; EXPRESSED IN FETAL LIVER, SIGNAL = 2.8; EXPRESSED IN PLACENTA, SIGNAL = 1.5; EXPRESSED IN ADULT LIVER, SIGNAL = 1.3
FVGPNVNTVGNLRPAQSAAGDGDEVQSVHSQRQDCQATGSLSNGENNEKNAFTTYQQETKNTTTPQSVYFLGVNK

SEQ ID NO: 27610 - protein, 93 aa, Homo sapiens
  MAP TO AL109804.24; EXPRESSED IN BRAIN, SIGNAL = 0.85; EXPRESSED IN HELA, SIGNAL = 0.73; EXPRESSED IN BONE MARROW, SIGNAL = 0.75; EXPRESSED IN LUNG, SIGNAL = 0.46; SWISSPROT HIT: Q62230, EVALUE 9.00e-35
LTAFLETQAGLVGILHCSVVSEPLATLVLSHGGHILASTSGDSDHSPRFSGTSGPNSLRLEIRDLEETDSGEYKCSATNSLGNATSTLDFHAN

SEQ ID NO: 27611 - protein, 67 aa, Homo sapiens
  MAP TO CHR22_230.0; EXPRESSED IN BONE MARROW, SIGNAL = 1.9; EXPRESSED IN HELA, SIGNAL = 3.7; EXPRESSED IN BRAIN, SIGNAL = 1.4; EXPRESSED IN HEART, SIGNAL = 1.3; EXPRESSED IN PLACENTA, SIGNAL = 0.99; EXPRESSED IN LUNG, SIGNAL = 0.98; EXPRESSED IN ADULT LIVER, SIGNAL = 1.1; EXPRESSED IN FETAL LIVER, SIGNAL = 1.6; SWISSPROT HIT: Q07869, EVALUE 3.00e-32
IRFGRMPRSEKAKLKAEILTCEHDIEDSETADLKSLAKRIYEAYLKNFNMNKVKARVILSGKASNNP

SEQ ID NO: 27612 - protein, 39 aa, Homo sapiens
  MAP TO AL133268.4; EXPRESSED IN HELA, SIGNAL = 1.3; EXPRESSED IN BRAIN, SIGNAL = 1.8; EXPRESSED IN LUNG, SIGNAL = 2.1; EXPRESSED IN FETAL LIVER, SIGNAL = 1.5; EXPRESSED IN BONE MARROW, SIGNAL = 1.5; EXPRESSED IN ADULT LIVER, SIGNAL = 1.3
IHSRVDVIRHVVKNGLLWDELYIGFQTRLQRDPDIYHHL

SEQ ID NO: 27613 - protein, 61 aa, Homo sapiens
  MAP TO AL121993.2; EXPRESSED IN BRAIN, SIGNAL = 2.9; EXPRESSED IN LUNG, SIGNAL = 3.1; EXPRESSED IN ADULT LIVER, SIGNAL = 3.5; EXPRESSED IN BONE MARROW, SIGNAL = 2.6; EXPRESSED IN HEART, SIGNAL = 2.5; SWISSPROT HIT: P22806, EVALUE 2.10e+00
VQDSVGGKVNTSSVASAAINNAKSSLFGFHLLPSSVKFGVLKEGHTYATVVKLKNVGVDFC

SEQ ID NO: 27614 - protein, 71 aa, Homo sapiens
  MAP TO AC019287.3; EXPRESSED IN HEART, SIGNAL = 9.9; EXPRESSED IN HELA, SIGNAL = 4.7; EXPRESSED IN BRAIN, SIGNAL =  11; EXPRESSED IN PLACENTA, SIGNAL =  13; EXPRESSED IN ADULT LIVER, SIGNAL =  13; EXPRESSED IN FETAL LIVER, SIGNAL =  13; EXPRESSED IN BONE MARROW, SIGNAL =  14; EXPRESSED IN LUNG, SIGNAL =  13
LIHVLRKNKVLENGLDIYFHFLLSGQLFWAVPICFSILLHFPCAQEANLYRQHERTHLSFRVHLDMAVEKH

SEQ ID NO: 27615 - protein, 37 aa, Homo sapiens
  MAP TO AC022619.3; EXPRESSED IN BRAIN, SIGNAL = 1.5; EXPRESSED IN HELA, SIGNAL = 0.79; EXPRESSED IN HEART, SIGNAL = 1.3; EXPRESSED IN PLACENTA, SIGNAL = 1.6; EXPRESSED IN ADULT LIVER, SIGNAL = 1.2; EXPRESSED IN FETAL LIVER, SIGNAL = 1.3; SWISSPROT HIT: Q22307, EVALUE 6.50e+00
CRASTCSWPPLASWSAWPRLQLASSQWLLQMGCCSHQ

SEQ ID NO: 27616 - protein, 175 aa, Homo sapiens
  MAP TO AC013648.3; EXPRESSED IN FETAL LIVER, SIGNAL = 1.6; EXPRESSED IN LUNG, SIGNAL = 1.4; EXPRESSED IN PLACENTA, SIGNAL = 1.6; EXPRESSED IN ADULT LIVER, SIGNAL = 1.4; EXPRESSED IN HELA, SIGNAL = 1.2; EXPRESSED IN HEART, SIGNAL = 1.2; EXPRESSED IN BONE MARROW, SIGNAL = 1.7; EXPRESSED IN BRAIN, SIGNAL = 1.6; SWISSPROT HIT: Q9Z671, EVALUE 2.40e+00
LLGSCPSSTPTGWVPLGKWLPSPSLSFHICYPPWGLSGRVWAEQEGKLRPESGLPAIALGLAVGRLWPDSCPFPWHHPVPRICCGSGVAGAPGSSRGAGVAPAGGPSGLWGALGSPGRATWREWEGAGGQGVEGLAAIWEAERWGWPSSVCAGWGCVQVGAAGALSGGGAVSECK

SEQ ID NO: 27617 - protein, 55 aa, Homo sapiens
  MAP TO AL121830.11; EXPRESSED IN HEART, SIGNAL = 1.4; EXPRESSED IN BRAIN, SIGNAL = 1.3; EXPRESSED IN PLACENTA, SIGNAL = 1.1; EXPRESSED IN ADULT LIVER, SIGNAL = 1.2; EXPRESSED IN HELA, SIGNAL = 0.59; EXPRESSED IN FETAL LIVER, SIGNAL = 1.1; EXPRESSED IN BONE MARROW, SIGNAL = 1.1; EXPRESSED IN LUNG, SIGNAL = 1.1; SWISSPROT HIT: P33464, EVALUE 2.10e+00
GKLETVKWAFTWPLSFVLYFTVPNCNKPRWEKWFMVTFASSTLWIAAFSYMMVWM

SEQ ID NO: 27618 - protein, 30 aa, Homo sapiens
  MAP TO AC020588.4; EXPRESSED IN FETAL LIVER, SIGNAL = 0.45; EXPRESSED IN BRAIN, SIGNAL = 0.32; SWISSPROT HIT: P33173, EVALUE 1.00e-05
QDIVFKCLGENILQNAFDGYNACIFAYGQT

SEQ ID NO: 27619 - protein, 31 aa, Homo sapiens
  MAP TO AC020588.4; EXPRESSED IN FETAL LIVER, SIGNAL = 0.45; EXPRESSED IN BRAIN, SIGNAL = 0.32
VKILFSSALERISCRMLLMATMHVSLPMDRL

SEQ ID NO: 27620 - protein, 46 aa, Homo sapiens
  MAP TO AL139227.1; EXPRESSED IN HELA, SIGNAL = 3.9; EXPRESSED IN BRAIN, SIGNAL = 1.5; EXPRESSED IN FETAL LIVER, SIGNAL = 1.6; EXPRESSED IN LUNG, SIGNAL = 1.5; EXPRESSED IN PLACENTA, SIGNAL = 1.3; SWISSPROT HIT: Q99439, EVALUE 6.00e-09
CASQSGMTMYGTRRHLYSPKNHILPPWTTRPSASRWVQTSAPATWA

SEQ ID NO: 27621 - protein, 45 aa, Homo sapiens
  MAP TO AB017651.1; EXPRESSED IN FETAL LIVER, SIGNAL = 0.78; EXPRESSED IN BONE MARROW, SIGNAL = 0.86; EXPRESSED IN PLACENTA, SIGNAL = 1.1; EXPRESSED IN ADULT LIVER, SIGNAL = 0.88; EXPRESSED IN BRAIN, SIGNAL = 0.88; EXPRESSED IN LUNG, SIGNAL = 0.93; SWISSPROT HIT: P30022, EVALUE 2.90e+00
QKLDSPPPPSTPRLLGRAINSTPAIPPDWRLKNRISASGNTAASL

SEQ ID NO: 27622 - protein, 64 aa, Homo sapiens
  MAP TO CHR22_150.0; EXPRESSED IN PLACENTA, SIGNAL = 1.5; EXPRESSED IN HELA, SIGNAL = 1.5; EXPRESSED IN BRAIN, SIGNAL = 1.5; EXPRESSED IN LUNG, SIGNAL =   2; EXPRESSED IN FETAL LIVER, SIGNAL = 1.1; EXPRESSED IN ADULT LIVER, SIGNAL = 1.8; EXPRESSED IN BONE MARROW, SIGNAL = 1.4; SWISSPROT HIT: P04843, EVALUE 2.70e+00
LWNFELEKDDLGYLAEEASKRQSVQEEAEHKSSGNLQPDNVIEKKKPFSGEKFKLPTEICLMKS

SEQ ID NO: 27623 - protein, 65 aa, Homo sapiens
  MAP TO AL135926.3; EXPRESSED IN HEART, SIGNAL = 1.6; EXPRESSED IN BONE MARROW, SIGNAL = 1.7; EXPRESSED IN BRAIN, SIGNAL = 1.8; EXPRESSED IN HELA, SIGNAL = 1.1; EXPRESSED IN FETAL LIVER, SIGNAL = 1.6; EXPRESSED IN LUNG, SIGNAL = 1.2; SWISSPROT HIT: Q09332, EVALUE 7.80e+00
LMSPYIYANIPKSRKIQNQKHFWSQAFWARDIQTVLIQKEERRRRKKEEEERRKKKAEEDIKNVI

SEQ ID NO: 27624 - protein, 52 aa, Homo sapiens
  MAP TO CHR22_208.0; EXPRESSED IN BONE MARROW, SIGNAL = 5.2; EXPRESSED IN BRAIN, SIGNAL = 3.7; EXPRESSED IN PLACENTA, SIGNAL = 3.5; EXPRESSED IN ADULT LIVER, SIGNAL = 3.4; EXPRESSED IN HELA, SIGNAL = 7.4; EXPRESSED IN LUNG, SIGNAL = 3.6; EXPRESSED IN FETAL LIVER, SIGNAL = 4.1; EXPRESSED IN HEART, SIGNAL = 3.2; SWISSPROT HIT: Q19954, EVALUE 1.60e+00
SDCTQTVLPDCTQTVLPDCTQTVLPDCTQTVLLGCTQTVLSDCTQTVLSDCT

SEQ ID NO: 27625 - protein, 36 aa, Homo sapiens
  MAP TO AL139022.1; EXPRESSED IN BRAIN, SIGNAL = 2.5; EXPRESSED IN HELA, SIGNAL = 1.7; EXPRESSED IN LUNG, SIGNAL =   2; SWISSPROT HIT: P52164, EVALUE 4.00e-15
ADKRAHHNALERKRRDHIKDSFHSLRDSVPSLQGEK

SEQ ID NO: 27626 - protein, 35 aa, Homo sapiens
  MAP TO AL139022.1; EXPRESSED IN BRAIN, SIGNAL = 2.5; EXPRESSED IN HELA, SIGNAL = 1.7; EXPRESSED IN LUNG, SIGNAL =   2
LTNGLIIMHWNENVGTTSKTAFTVCGTQSHHSKER

SEQ ID NO: 27627 - protein, 24 aa, Homo sapiens
  MAP TO AC012661.4; EXPRESSED IN HELA, SIGNAL = 0.82; EXPRESSED IN FETAL LIVER, SIGNAL = 1.2; EXPRESSED IN BRAIN, SIGNAL = 1.2; EXPRESSED IN ADULT LIVER, SIGNAL = 0.98; EXPRESSED IN BONE MARROW, SIGNAL =   1; EXPRESSED IN LUNG, SIGNAL =   1; EXPRESSED IN PLACENTA, SIGNAL = 1.1; EXPRESSED IN HEART, SIGNAL = 1.1
GEDMTPNIAENVHPSMMLLLIARG

SEQ ID NO: 27628 - protein, 26 aa, Homo sapiens
  MAP TO AL133476.4; EXPRESSED IN BRAIN, SIGNAL = 1.2; EXPRESSED IN HELA, SIGNAL = 0.72; EXPRESSED IN LUNG, SIGNAL = 1.9; EXPRESSED IN FETAL LIVER, SIGNAL = 1.6; EXPRESSED IN PLACENTA, SIGNAL = 1.8; EXPRESSED IN ADULT LIVER, SIGNAL =   2; SWISSPROT HIT: P11369, EVALUE 6.00e-04
MANRYMTRCSTSLIIREMQIKTTMKP

SEQ ID NO: 27629 - protein, 28 aa, Homo sapiens
  MAP TO AL136140.2; EXPRESSED IN BRAIN, SIGNAL = 2.2; EXPRESSED IN ADULT LIVER, SIGNAL = 2.1; EXPRESSED IN PLACENTA, SIGNAL = 2.2; EXPRESSED IN LUNG, SIGNAL =   2; EXPRESSED IN FETAL LIVER, SIGNAL = 2.2; EXPRESSED IN BONE MARROW, SIGNAL =   2
HLGLTHCPLLPVICLLEPIFSPQLHNKH

SEQ ID NO: 27630 - protein, 65 aa, Homo sapiens
  MAP TO CHR22_115.0; EXPRESSED IN BRAIN, SIGNAL = 0.96; EXPRESSED IN PLACENTA, SIGNAL = 1.1; EXPRESSED IN HELA, SIGNAL = 0.56; EXPRESSED IN LUNG, SIGNAL = 1.1; EXPRESSED IN ADULT LIVER, SIGNAL = 1.3; EXPRESSED IN FETAL LIVER, SIGNAL = 0.87; EXPRESSED IN BONE MARROW, SIGNAL = 0.84; SWISSPROT HIT: O35375, EVALUE 3.00e-03
LNLSNSDILTIYDGDEVMPHILGQYLGNSGPQKLYSSTPDLTIQFHSDPAGLIFGKGQGFIMNYI

SEQ ID NO: 27631 - protein, 70 aa, Homo sapiens
  MAP TO AL138788.1; EXPRESSED IN ADULT LIVER, SIGNAL =   1; EXPRESSED IN FETAL LIVER, SIGNAL =   1; EXPRESSED IN PLACENTA, SIGNAL = 1.1; EXPRESSED IN LUNG, SIGNAL = 0.99; EXPRESSED IN BONE MARROW, SIGNAL =   1; EXPRESSED IN HELA, SIGNAL = 0.74; EXPRESSED IN BRAIN, SIGNAL =   1; SWISSPROT HIT: P46901, EVALUE 4.00e-03
IKIELKHAQQKLLDSTKMCSSLTAEYKHCQQKIKELELEVLKHTQSIKSQNNLQEKLVQEKSKVADAEEK

SEQ ID NO: 27632 - protein, 44 aa, Homo sapiens
  MAP TO CHR22_52.0; EXPRESSED IN FETAL LIVER, SIGNAL = 1.4; EXPRESSED IN HEART, SIGNAL = 1.4; EXPRESSED IN HELA, SIGNAL = 1.3; EXPRESSED IN ADULT LIVER, SIGNAL = 2.1; EXPRESSED IN PLACENTA, SIGNAL = 1.8; EXPRESSED IN LUNG, SIGNAL = 1.9; EXPRESSED IN BONE MARROW, SIGNAL = 1.3; EXPRESSED IN BRAIN, SIGNAL = 1.3; SWISSPROT HIT: P11274, EVALUE 1.00e-19
NKDVSVMMSEMDVNAIAGTLKLYFRELPEPLFTDEFYPNFAEGI

SEQ ID NO: 27633 - protein, 69 aa, Homo sapiens
  MAP TO CHR21_4.0; EXPRESSED IN FETAL LIVER, SIGNAL = 1.5; EXPRESSED IN BONE MARROW, SIGNAL = 1.9; EXPRESSED IN PLACENTA, SIGNAL = 0.88; EXPRESSED IN LUNG, SIGNAL = 0.9; EXPRESSED IN BRAIN, SIGNAL = 1.6; EXPRESSED IN HELA, SIGNAL = 3.9; EXPRESSED IN ADULT LIVER, SIGNAL =   1; SWISSPROT HIT: Q15149, EVALUE 9.00e-04
HKKEEDLLRENSVLQEEIAMLRLELDETKHQNQLRENKILEEIESVKEKTDKLLRAMQLNEEALTKTNI

SEQ ID NO: 27634 - protein, 45 aa, Homo sapiens
  MAP TO CHR22_91.0; EXPRESSED IN BONE MARROW, SIGNAL = 0.85; EXPRESSED IN PLACENTA, SIGNAL = 0.92; EXPRESSED IN BRAIN, SIGNAL =   1; EXPRESSED IN LUNG, SIGNAL = 1.1; EXPRESSED IN ADULT LIVER, SIGNAL = 1.3; EXPRESSED IN FETAL LIVER, SIGNAL = 0.8
KRWQGVREEVPLCCEPQQRCTSPGQRGDIDLAQRKQRFSHWHQDP

SEQ ID NO: 27635 - protein, 65 aa, Homo sapiens
  MAP TO AL138895.4; EXPRESSED IN BONE MARROW, SIGNAL = 0.88; EXPRESSED IN PLACENTA, SIGNAL = 0.91; EXPRESSED IN BRAIN, SIGNAL = 0.72; EXPRESSED IN ADULT LIVER, SIGNAL = 0.61; EXPRESSED IN FETAL LIVER, SIGNAL = 0.86; SWISSPROT HIT: Q02113, EVALUE 5.20e+00
TTGYRQGYGQDSNLLWPLSVPYVIQEWEREESKEPFSKYLLRIYCGLILGLNTGHREIKELWLRP

SEQ ID NO: 27636 - protein, 18 aa, Homo sapiens
  MAP TO AL138895.4; EXPRESSED IN BONE MARROW, SIGNAL = 0.88; EXPRESSED IN PLACENTA, SIGNAL = 0.91; EXPRESSED IN BRAIN, SIGNAL = 0.72; EXPRESSED IN ADULT LIVER, SIGNAL = 0.61; EXPRESSED IN FETAL LIVER, SIGNAL = 0.86
APLATGRAMGKTATFSGP

SEQ ID NO: 27637 - protein, 29 aa, Homo sapiens
  MAP TO CHR22_16.0; EXPRESSED IN ADULT LIVER, SIGNAL = 1.3; EXPRESSED IN BONE MARROW, SIGNAL = 0.93; EXPRESSED IN LUNG, SIGNAL =   1; EXPRESSED IN BRAIN, SIGNAL =   1; EXPRESSED IN HELA, SIGNAL = 1.3
MQKEFQEGQTAAGAGESLEAGMDTDQPRP

SEQ ID NO: 27638 - protein, 30 aa, Homo sapiens
  MAP TO AC025753.1; EXPRESSED IN PLACENTA, SIGNAL = 0.83; EXPRESSED IN LUNG, SIGNAL = 0.68; EXPRESSED IN HELA, SIGNAL = 1.3; EXPRESSED IN BRAIN, SIGNAL = 0.56; EXPRESSED IN ADULT LIVER, SIGNAL = 0.61; EXPRESSED IN FETAL LIVER, SIGNAL = 0.72; EXPRESSED IN BONE MARROW, SIGNAL = 0.62
TAVMTIKGDESFKVHDTVLAVDPEGTSHCT

SEQ ID NO: 27639 - protein, 51 aa, Homo sapiens
  MAP TO AL137008.1; EXPRESSED IN FETAL LIVER, SIGNAL = 0.46; EXPRESSED IN LUNG, SIGNAL = 0.88; EXPRESSED IN BRAIN, SIGNAL = 0.65; SWISSPROT HIT: O94833, EVALUE 1.00e-24
FPTSRLEMSAVADIFDRDGDGYIDYYEFVAALHPNKDAYKPITDADKIEDE

SEQ ID NO: 27640 - protein, 20 aa, Homo sapiens
  MAP TO AL133406.3; EXPRESSED IN PLACENTA, SIGNAL = 1.9; EXPRESSED IN LUNG, SIGNAL = 1.7; EXPRESSED IN ADULT LIVER, SIGNAL = 1.5; EXPRESSED IN HELA, SIGNAL = 1.2; EXPRESSED IN HEART, SIGNAL = 1.4; EXPRESSED IN BONE MARROW, SIGNAL = 1.3; EXPRESSED IN BRAIN, SIGNAL = 1.4; EXPRESSED IN FETAL LIVER, SIGNAL = 1.3
CCMTVSWMNCSISHSKARPE

SEQ ID NO: 27641 - protein, 45 aa, Homo sapiens
  MAP TO AL136099.2; EXPRESSED IN BONE MARROW, SIGNAL = 0.72; EXPRESSED IN LUNG, SIGNAL = 0.98; EXPRESSED IN ADULT LIVER, SIGNAL = 1.1; EXPRESSED IN BRAIN, SIGNAL = 0.8; EXPRESSED IN HELA, SIGNAL = 0.69; EXPRESSED IN PLACENTA, SIGNAL = 1.2; SWISSPROT HIT: Q57971, EVALUE 6.40e+00
TSHTHIPCSIASMRKSLQLSCSSLTPRTGCPAQCLLHRRCLMSIC

SEQ ID NO: 27642 - protein, 89 aa, Homo sapiens
  MAP TO CHR22_219.0; EXPRESSED IN FETAL LIVER, SIGNAL = 1.2; EXPRESSED IN BONE MARROW, SIGNAL = 1.3; EXPRESSED IN PLACENTA, SIGNAL = 0.72; EXPRESSED IN ADULT LIVER, SIGNAL = 0.85; EXPRESSED IN BRAIN, SIGNAL = 1.2; EXPRESSED IN HELA, SIGNAL = 2.3; EXPRESSED IN LUNG, SIGNAL = 0.7; SWISSPROT HIT: P07090, EVALUE 8.10e+00
EICPSCWKPTSGDDSVCHSASYSADPLRVSSQDKLDEMAESSQANFEGNFESLDLVEFAKKQPWWCKLFRQESGPSPKSEGWQPSRSLG

SEQ ID NO: 27643 - protein, 82 aa, Homo sapiens
  MAP TO AC023120.3; EXPRESSED IN HELA, SIGNAL = 5.1; EXPRESSED IN FETAL LIVER, SIGNAL =   8; EXPRESSED IN HEART, SIGNAL = 7.9; EXPRESSED IN LUNG, SIGNAL = 8.2; EXPRESSED IN BONE MARROW, SIGNAL = 8.4; EXPRESSED IN BRAIN, SIGNAL = 7.2; EXPRESSED IN ADULT LIVER, SIGNAL = 7.5; SWISSPROT HIT: Q9Y5X4, EVALUE 8.00e-41
VILLEEAWSELFLLGAIQWSLPLDSCPLLAPPEASAAGGAQGRLTLASMETRVLQETISRFRALAVDPTEFACMKALVLFKP

SEQ ID NO: 27644 - protein, 32 aa, Homo sapiens
  MAP TO AC023120.3; EXPRESSED IN HELA, SIGNAL = 5.1; EXPRESSED IN FETAL LIVER, SIGNAL =   8; EXPRESSED IN HEART, SIGNAL = 7.9; EXPRESSED IN LUNG, SIGNAL = 8.2; EXPRESSED IN BONE MARROW, SIGNAL = 8.4; EXPRESSED IN BRAIN, SIGNAL = 7.2; EXPRESSED IN ADULT LIVER, SIGNAL = 7.5; SWISSPROT HIT: P55567, EVALUE 3.90e+00
AGSRWPAWRRVSCRKLSLGSGHWRWTPRSLPA

SEQ ID NO: 27645 - protein, 40 aa, Homo sapiens
  MAP TO AL080248.7; EXPRESSED IN HELA, SIGNAL = 2.6; EXPRESSED IN FETAL LIVER, SIGNAL = 2.2; EXPRESSED IN PLACENTA, SIGNAL = 1.8; EXPRESSED IN LUNG, SIGNAL = 2.3; EXPRESSED IN ADULT LIVER, SIGNAL = 2.7; EXPRESSED IN BONE MARROW, SIGNAL = 1.6; EXPRESSED IN BRAIN, SIGNAL = 1.2; SWISSPROT HIT: Q96528, EVALUE 4.90e+00
HRGVDKHVEEAARVQPAKEKGVEADPSPGVPTGNHPCWNL

SEQ ID NO: 27646 - protein, 39 aa, Homo sapiens
  MAP TO AC022117.2; EXPRESSED IN HELA, SIGNAL = 0.52; EXPRESSED IN BRAIN, SIGNAL = 0.68; EXPRESSED IN FETAL LIVER, SIGNAL = 0.61; EXPRESSED IN BONE MARROW, SIGNAL = 0.55; EXPRESSED IN PLACENTA, SIGNAL = 0.58; EXPRESSED IN LUNG, SIGNAL = 0.46; EXPRESSED IN ADULT LIVER, SIGNAL = 0.52
LEREMIKPSTVIIMKTWRAYTFQAFSHMLPGIILTTTLK

SEQ ID NO: 27647 - protein, 67 aa, Homo sapiens
  MAP TO CHR22_5.0; EXPRESSED IN BONE MARROW, SIGNAL = 0.77; EXPRESSED IN PLACENTA, SIGNAL = 0.93; EXPRESSED IN HELA, SIGNAL = 0.53; EXPRESSED IN BRAIN, SIGNAL = 0.71; EXPRESSED IN ADULT LIVER, SIGNAL = 1.4; EXPRESSED IN LUNG, SIGNAL = 1.1; EXPRESSED IN FETAL LIVER, SIGNAL = 0.83; SWISSPROT HIT: Q9ZCN6, EVALUE 1.60e+00
CTHSNYKINKLTVKQPQVGPSGGIPEEGTVITGDDSSMHVIASEALPVGQDVEVEDSDIDEPDPVEA

SEQ ID NO: 27648 - protein, 31 aa, Homo sapiens
  MAP TO AL135932.1; EXPRESSED IN BRAIN, SIGNAL = 0.61; EXPRESSED IN FETAL LIVER, SIGNAL = 0.76; EXPRESSED IN ADULT LIVER, SIGNAL = 0.57; EXPRESSED IN BONE MARROW, SIGNAL = 0.58; EXPRESSED IN PLACENTA, SIGNAL = 0.66; EXPRESSED IN LUNG, SIGNAL = 0.7
TFHLVSNPDLVLAVSMTKTRNEVCGYPVIVQ

SEQ ID NO: 27649 - protein, 38 aa, Homo sapiens
  MAP TO AL135932.1; EXPRESSED IN BRAIN, SIGNAL = 0.61; EXPRESSED IN FETAL LIVER, SIGNAL = 0.76; EXPRESSED IN ADULT LIVER, SIGNAL = 0.57; EXPRESSED IN BONE MARROW, SIGNAL = 0.58; EXPRESSED IN PLACENTA, SIGNAL = 0.66; EXPRESSED IN LUNG, SIGNAL = 0.7
ACMELRGNTVLSGTEGDLIWSCYFVMWLILFSQGPFTL

SEQ ID NO: 27650 - protein, 74 aa, Homo sapiens
  MAP TO AL139021.1; EXPRESSED IN LUNG, SIGNAL = 0.44; EXPRESSED IN PLACENTA, SIGNAL = 0.49; EXPRESSED IN BRAIN, SIGNAL = 0.4; EXPRESSED IN FETAL LIVER, SIGNAL = 0.49; SWISSPROT HIT: P36417, EVALUE 1.60e-02
VQSDLEAKVNSVTELLSKLQETDKHLQRVTEQQTSIQRKQEKLHCHDHEKQMNVFMEQHIRHLEKLQQQQIDIQ

SEQ ID NO: 27651 - protein, 79 aa, Homo sapiens
  MAP TO AL137795.2; EXPRESSED IN HELA, SIGNAL = 2.2; EXPRESSED IN LUNG, SIGNAL = 4.4; EXPRESSED IN ADULT LIVER, SIGNAL = 4.9; EXPRESSED IN BONE MARROW, SIGNAL = 3.7; EXPRESSED IN BRAIN, SIGNAL = 3.5; EXPRESSED IN FETAL LIVER, SIGNAL = 3.7; EXPRESSED IN PLACENTA, SIGNAL = 5.1; EXPRESSED IN HEART, SIGNAL = 3.6
WQPWFQRSLGLWEEKAIVSLAKRSKELSPPPSPPFSSPLLLPSPPPLSSLPSLPPLHFPLSWSSSSSSSPYSFSSSSSS

SEQ ID NO: 27652 - protein, 25 aa, Homo sapiens
  MAP TO CHR22_35.0; EXPRESSED IN HELA, SIGNAL = 1.2; EXPRESSED IN PLACENTA, SIGNAL = 1.6; EXPRESSED IN ADULT LIVER, SIGNAL = 1.5; EXPRESSED IN LUNG, SIGNAL = 1.3; EXPRESSED IN BONE MARROW, SIGNAL = 1.2; EXPRESSED IN BRAIN, SIGNAL = 1.2
MWPKHIFGRESGQPKAELDFWEFLP

SEQ ID NO: 27653 - protein, 73 aa, Homo sapiens
  MAP TO AC024066.3; EXPRESSED IN BONE MARROW, SIGNAL = 1.2; EXPRESSED IN HEART, SIGNAL = 1.2; EXPRESSED IN PLACENTA, SIGNAL = 1.3; EXPRESSED IN LUNG, SIGNAL = 1.3; EXPRESSED IN ADULT LIVER, SIGNAL = 1.3; EXPRESSED IN HELA, SIGNAL = 0.95; EXPRESSED IN BRAIN, SIGNAL = 1.3; EXPRESSED IN FETAL LIVER, SIGNAL = 1.3; SWISSPROT HIT: P45052, EVALUE 1.40e-01
MNSMTSAVPVANSVLVVAPHNGYPVTPGIMSHVPLYPNSQPQVHLVPGNPPSLVSNVNGQPVQKALKEGKTLG

SEQ ID NO: 27654 - protein, 26 aa, Homo sapiens
  MAP TO AL137009.2; EXPRESSED IN FETAL LIVER, SIGNAL = 3.8; EXPRESSED IN BONE MARROW, SIGNAL = 3.7; EXPRESSED IN HEART, SIGNAL = 2.9; EXPRESSED IN BRAIN, SIGNAL = 2.8; EXPRESSED IN LUNG, SIGNAL = 3.9; EXPRESSED IN ADULT LIVER, SIGNAL = 4.7; SWISSPROT HIT: P33908, EVALUE 3.00e-09
LIFSDDDLLPLEHWIFNSEAHLLPIL

SEQ ID NO: 27655 - protein, 84 aa, Homo sapiens
  MAP TO AC022263.3; EXPRESSED IN PLACENTA, SIGNAL = 1.4; EXPRESSED IN BONE MARROW, SIGNAL = 1.3; EXPRESSED IN HEART, SIGNAL = 1.4; EXPRESSED IN ADULT LIVER, SIGNAL = 1.5; EXPRESSED IN BRAIN, SIGNAL = 1.5; EXPRESSED IN HELA, SIGNAL = 0.62; EXPRESSED IN FETAL LIVER, SIGNAL = 1.1; SWISSPROT HIT: Q58618, EVALUE 1.80e+00
HDSFDGSGQSQLETFWKGFTMVDATKNIYDSPEEVKIAALIGVCKKLILTLINDFEGFKTLAEEVTTVVVKIARELELQVEPED

SEQ ID NO: 27656 - protein, 22 aa, Homo sapiens
  MAP TO AC022263.3; EXPRESSED IN PLACENTA, SIGNAL = 1.4; EXPRESSED IN BONE MARROW, SIGNAL = 1.3; EXPRESSED IN HEART, SIGNAL = 1.4; EXPRESSED IN ADULT LIVER, SIGNAL = 1.5; EXPRESSED IN BRAIN, SIGNAL = 1.5; EXPRESSED IN HELA, SIGNAL = 0.62; EXPRESSED IN FETAL LIVER, SIGNAL = 1.1
VMIPLMDLGKVNWKPSGKDSLW

SEQ ID NO: 27657 - protein, 35 aa, Homo sapiens
  MAP TO AC011225.5; EXPRESSED IN BONE MARROW, SIGNAL = 0.42; EXPRESSED IN BRAIN, SIGNAL = 0.49; EXPRESSED IN PLACENTA, SIGNAL = 0.63; EXPRESSED IN LUNG, SIGNAL = 0.71; EXPRESSED IN ADULT LIVER, SIGNAL = 0.67; EXPRESSED IN FETAL LIVER, SIGNAL = 0.5
MRALRMKLHFRLHRSCSPVLSASQYAWRGTAFLTS

SEQ ID NO: 27658 - protein, 28 aa, Homo sapiens
  MAP TO AC018678.5; EXPRESSED IN BONE MARROW, SIGNAL = 0.84; EXPRESSED IN LUNG, SIGNAL = 0.88; EXPRESSED IN BRAIN, SIGNAL = 0.93; EXPRESSED IN ADULT LIVER, SIGNAL = 7.7; EXPRESSED IN FETAL LIVER, SIGNAL =   7
KKTKLKANFKLNLHKQLSSLPSEEPLLN

SEQ ID NO: 27659 - protein, 55 aa, Homo sapiens
  MAP TO AC022579.3; EXPRESSED IN FETAL LIVER, SIGNAL = 3.6; EXPRESSED IN HEART, SIGNAL = 3.1; EXPRESSED IN PLACENTA, SIGNAL = 3.7; EXPRESSED IN LUNG, SIGNAL = 3.5; EXPRESSED IN BONE MARROW, SIGNAL = 3.6; EXPRESSED IN HELA, SIGNAL = 1.9; EXPRESSED IN BRAIN, SIGNAL = 3.2; EXPRESSED IN ADULT LIVER, SIGNAL = 3.7; SWISSPROT HIT: O67108, EVALUE 3.60e+00
LIDGTNITMEDEHMWLIPFSPGLDHVVTIRLDRAESIAGLRFWNYNKSPEDTYRG

SEQ ID NO: 27660 - protein, 38 aa, Homo sapiens
  MAP TO AC021609.3; EXPRESSED IN PLACENTA, SIGNAL = 0.48; EXPRESSED IN LUNG, SIGNAL = 0.67; EXPRESSED IN BONE MARROW, SIGNAL = 0.45; EXPRESSED IN BRAIN, SIGNAL = 0.68; SWISSPROT HIT: Q08462, EVALUE 4.00e-16
EPERQYMHIGTMVEFAFALVGKLDAINKHSFNDFKLRV

SEQ ID NO: 27661 - protein, 19 aa, Homo sapiens
  MAP TO AC021609.3; EXPRESSED IN PLACENTA, SIGNAL = 0.48; EXPRESSED IN LUNG, SIGNAL = 0.67; EXPRESSED IN BONE MARROW, SIGNAL = 0.45; EXPRESSED IN BRAIN, SIGNAL = 0.68
SPSGSTCTLAPWWSLLLPW

SEQ ID NO: 27662 - protein, 49 aa, Homo sapiens
  MAP TO AC015833.3; EXPRESSED IN HELA, SIGNAL = 1.1; EXPRESSED IN BRAIN, SIGNAL = 1.4; EXPRESSED IN FETAL LIVER, SIGNAL = 1.5; EXPRESSED IN HEART, SIGNAL = 1.2; EXPRESSED IN LUNG, SIGNAL = 1.3; EXPRESSED IN BONE MARROW, SIGNAL = 1.4; EXPRESSED IN PLACENTA, SIGNAL = 1.7
ADSRVNNGYVLHSQTDPETNLGFVLLLLVMVVVMVEVHMCVYFKREEMT

SEQ ID NO: 27663 - protein, 28 aa, Homo sapiens
  MAP TO AC015833.3; EXPRESSED IN HELA, SIGNAL = 1.1; EXPRESSED IN BRAIN, SIGNAL = 1.4; EXPRESSED IN FETAL LIVER, SIGNAL = 1.5; EXPRESSED IN HEART, SIGNAL = 1.2; EXPRESSED IN LUNG, SIGNAL = 1.3; EXPRESSED IN BONE MARROW, SIGNAL = 1.4; EXPRESSED IN PLACENTA, SIGNAL = 1.7
LTPESTMAMFYIPKLTLKQTWALCCCCW

SEQ ID NO: 27664 - protein, 63 aa, Homo sapiens
  MAP TO AL135786.2; EXPRESSED IN BONE MARROW, SIGNAL = 1.3; EXPRESSED IN PLACENTA, SIGNAL = 1.3; EXPRESSED IN LUNG, SIGNAL = 1.3; EXPRESSED IN ADULT LIVER, SIGNAL = 1.9; EXPRESSED IN BRAIN, SIGNAL = 0.99; EXPRESSED IN HELA, SIGNAL = 1.7; EXPRESSED IN FETAL LIVER, SIGNAL = 1.5; SWISSPROT HIT: P29279, EVALUE 4.60e+00
HPLPGSLMKTGMCSEACGMVMTARTSGSSRSCDTEKSGGSLVTPLHQGHRTSFWLVLVCWRQT

SEQ ID NO: 27665 - protein, 70 aa, Homo sapiens
  MAP TO AL137798.1; EXPRESSED IN BRAIN, SIGNAL = 0.77; EXPRESSED IN PLACENTA, SIGNAL = 0.67; EXPRESSED IN ADULT LIVER, SIGNAL = 1.4; EXPRESSED IN FETAL LIVER, SIGNAL = 0.56; EXPRESSED IN BONE MARROW, SIGNAL = 0.7; SWISSPROT HIT: P41516, EVALUE 7.70e+00
NLQESEEEEVPQESWDEGYSTLSIPPEMLASYKSYSGTFHSLEEQQVCMAVDIGGEYSIVKVIKLQFMAQ

SEQ ID NO: 27666 - protein, 41 aa, Homo sapiens
  MAP TO AL137798.1; EXPRESSED IN BRAIN, SIGNAL = 0.77; EXPRESSED IN PLACENTA, SIGNAL = 0.67; EXPRESSED IN ADULT LIVER, SIGNAL = 1.4; EXPRESSED IN FETAL LIVER, SIGNAL = 0.56; EXPRESSED IN BONE MARROW, SIGNAL = 0.7
ICRSLKRRKSPRSPGMKVIRLSQFLLKCWPRTSLTAAHFTH

SEQ ID NO: 27667 - protein, 41 aa, Homo sapiens
  MAP TO AL132765.16; EXPRESSED IN BONE MARROW, SIGNAL = 1.5; EXPRESSED IN LUNG, SIGNAL = 2.3; EXPRESSED IN HELA, SIGNAL = 3.4; EXPRESSED IN PLACENTA, SIGNAL =   2; EXPRESSED IN HEART, SIGNAL = 2.3; EXPRESSED IN ADULT LIVER, SIGNAL = 2.3; EXPRESSED IN BRAIN, SIGNAL = 1.7; EXPRESSED IN FETAL LIVER, SIGNAL = 2.1
LEERRRRRRRRRRRRRGRGRGRGRRRRQRKRRRRGGGGGRG

SEQ ID NO: 27668 - protein, 34 aa, Homo sapiens
  MAP TO AL035464.20; EXPRESSED IN FETAL LIVER, SIGNAL = 0.47; EXPRESSED IN LUNG, SIGNAL = 0.67; EXPRESSED IN BONE MARROW, SIGNAL = 0.46; EXPRESSED IN BRAIN, SIGNAL = 0.41; SWISSPROT HIT: P77882, EVALUE 3.50e-01
VIKRLQKEIQELKDELAMVTGEQRTEALTEAELL

SEQ ID NO: 27669 - protein, 58 aa, Homo sapiens
  MAP TO CHR22_82.0; EXPRESSED IN BONE MARROW, SIGNAL = 2.6; EXPRESSED IN ADULT LIVER, SIGNAL = 2.3; EXPRESSED IN HELA, SIGNAL = 5.5; EXPRESSED IN PLACENTA, SIGNAL = 2.2; EXPRESSED IN LUNG, SIGNAL = 2.3; EXPRESSED IN BRAIN, SIGNAL = 2.2; EXPRESSED IN FETAL LIVER, SIGNAL = 2.4; EXPRESSED IN HEART, SIGNAL = 1.9; SWISSPROT HIT: P06473, EVALUE 8.00e+00
EPKMWIFMGKFSICRTFEGQAQLACQSPFATASVINNKHTTGNDSTRHLSSAHCVPAP

SEQ ID NO: 27670 - protein, 34 aa, Homo sapiens
  MAP TO CHR22_82.0; EXPRESSED IN BONE MARROW, SIGNAL = 2.6; EXPRESSED IN ADULT LIVER, SIGNAL = 2.3; EXPRESSED IN HELA, SIGNAL = 5.5; EXPRESSED IN PLACENTA, SIGNAL = 2.2; EXPRESSED IN LUNG, SIGNAL = 2.3; EXPRESSED IN BRAIN, SIGNAL = 2.2; EXPRESSED IN FETAL LIVER, SIGNAL = 2.4; EXPRESSED IN HEART, SIGNAL = 1.9; SWISSPROT HIT: P79005, EVALUE 1.30e+00
NQKCGFLWESFQFVEHLRAKHNSLANHPLQLLAS

SEQ ID NO: 27671 - protein, 49 aa, Homo sapiens
  MAP TO AC022263.3; EXPRESSED IN HELA, SIGNAL = 0.54; EXPRESSED IN BRAIN, SIGNAL = 1.2; EXPRESSED IN ADULT LIVER, SIGNAL = 5.1
ARATPTASRVLSHSSHLQVLQKSRLPRWLCIFQRCLASSPSRAMSSWPK

SEQ ID NO: 27672 - protein, 35 aa, Homo sapiens
  MAP TO AL034373.13; EXPRESSED IN FETAL LIVER, SIGNAL = 1.5; EXPRESSED IN BONE MARROW, SIGNAL = 1.5; EXPRESSED IN HEART, SIGNAL = 1.6; EXPRESSED IN LUNG, SIGNAL = 1.9; EXPRESSED IN ADULT LIVER, SIGNAL = 1.8; EXPRESSED IN BRAIN, SIGNAL = 1.4; EXPRESSED IN PLACENTA, SIGNAL = 1.7
SNILFLSTICDVIRMAFAFHTSINILITQVIFKKF

SEQ ID NO: 27673 - protein, 36 aa, Homo sapiens
  MAP TO AL138781.2; EXPRESSED IN BRAIN, SIGNAL = 0.98; EXPRESSED IN FETAL LIVER, SIGNAL = 0.94; EXPRESSED IN BONE MARROW, SIGNAL = 0.95; EXPRESSED IN HEART, SIGNAL = 1.1; EXPRESSED IN LUNG, SIGNAL = 1.4; EXPRESSED IN ADULT LIVER, SIGNAL = 1.3; EXPRESSED IN PLACENTA, SIGNAL = 1.6
DKKAPSSVNRVIAAPKKSMPVALSSVQPTLIATWEL

SEQ ID NO: 27674 - protein, 92 aa, Homo sapiens
  MAP TO AL133408.3; EXPRESSED IN BONE MARROW, SIGNAL = 2.4; EXPRESSED IN LUNG, SIGNAL = 0.97; EXPRESSED IN PLACENTA, SIGNAL = 1.3; EXPRESSED IN BRAIN, SIGNAL =   3; EXPRESSED IN HELA, SIGNAL =   2; EXPRESSED IN FETAL LIVER, SIGNAL = 2.5; EXPRESSED IN HEART, SIGNAL = 2.4
VALGCAHLAEAQGLWASMWGASLLGKEGHHWCHFCHASSDVGSDRTVGADFPRRVEQDFSLAICPFATSTAAACPLSHCEGSKTSCNQVSMY

SEQ ID NO: 27675 - protein, 103 aa, Homo sapiens
  MAP TO AL160314.1; EXPRESSED IN BRAIN, SIGNAL = 0.89; EXPRESSED IN HELA, SIGNAL = 2.3; EXPRESSED IN FETAL LIVER, SIGNAL = 0.95; EXPRESSED IN HEART, SIGNAL = 1.1; EXPRESSED IN PLACENTA, SIGNAL = 0.96; EXPRESSED IN LUNG, SIGNAL =   1; EXPRESSED IN ADULT LIVER, SIGNAL = 1.1; SWISSPROT HIT: P03344, EVALUE 7.00e-03
WGPVITAEIQDIGVENIPNLQVTKLPPGSCPHCKQEGHWNSECPSLPHEEGPPPPSGPSQPQPHQPTQQGGPAERGQGQGQAQAPLTLFLDYDRASESHPLDD

SEQ ID NO: 27676 - protein, 46 aa, Homo sapiens
  MAP TO AL138788.1; EXPRESSED IN PLACENTA, SIGNAL = 0.97; EXPRESSED IN LUNG, SIGNAL = 0.89; EXPRESSED IN BRAIN, SIGNAL =   1; EXPRESSED IN HELA, SIGNAL = 0.82; EXPRESSED IN FETAL LIVER, SIGNAL = 0.72; SWISSPROT HIT: P23801, EVALUE 4.90e+00
VLYMDKENKQLQENSLRLTQQIGFLERIIRSIHIRRGEVRCVLPIG

SEQ ID NO: 27677 - protein, 26 aa, Homo sapiens
  MAP TO AL133349.2; EXPRESSED IN BONE MARROW, SIGNAL = 0.68; EXPRESSED IN BRAIN, SIGNAL = 0.86; EXPRESSED IN HELA, SIGNAL = 0.56; EXPRESSED IN FETAL LIVER, SIGNAL = 0.7; EXPRESSED IN LUNG, SIGNAL = 0.56; EXPRESSED IN ADULT LIVER, SIGNAL = 0.57
ECSLKNLEKWMKIRRKNRTRIYENSN

SEQ ID NO: 27678 - protein, 21 aa, Homo sapiens
  MAP TO AL160237.1; EXPRESSED IN HELA, SIGNAL = 1.1; EXPRESSED IN BRAIN, SIGNAL = 0.65; EXPRESSED IN LUNG, SIGNAL = 0.52; EXPRESSED IN FETAL LIVER, SIGNAL = 0.52; EXPRESSED IN BONE MARROW, SIGNAL = 0.46
GPRSHQQREAAERGLGCGHAL

SEQ ID NO: 27679 - protein, 41 aa, Homo sapiens
  MAP TO AC023120.3; EXPRESSED IN FETAL LIVER, SIGNAL = 0.75; EXPRESSED IN PLACENTA, SIGNAL = 0.45; EXPRESSED IN LUNG, SIGNAL = 0.48; EXPRESSED IN ADULT LIVER, SIGNAL = 0.91; EXPRESSED IN BONE MARROW, SIGNAL = 0.5; EXPRESSED IN BRAIN, SIGNAL = 0.88; SWISSPROT HIT: Q9QY06, EVALUE 2.00e-03
DFVSHFHVLLPRNIIPSKFNIQDFFRKINLNPDNYQVGKTM

SEQ ID NO: 27680 - protein, 18 aa, Homo sapiens
  MAP TO CHR22_0.0; EXPRESSED IN FETAL LIVER, SIGNAL =  11; EXPRESSED IN HEART, SIGNAL = 9.7; EXPRESSED IN PLACENTA, SIGNAL =  15; EXPRESSED IN ADULT LIVER, SIGNAL =  15; EXPRESSED IN BONE MARROW, SIGNAL =  12; EXPRESSED IN BRAIN, SIGNAL = 9.8
PGLWVLHHLPPAPLGKAA

SEQ ID NO: 27681 - protein, 56 aa, Homo sapiens
  MAP TO CHR22_0.0; EXPRESSED IN FETAL LIVER, SIGNAL =  11; EXPRESSED IN HEART, SIGNAL = 9.7; EXPRESSED IN PLACENTA, SIGNAL =  15; EXPRESSED IN ADULT LIVER, SIGNAL =  15; EXPRESSED IN BONE MARROW, SIGNAL =  12; EXPRESSED IN BRAIN, SIGNAL = 9.8; SWISSPROT HIT: Q63572, EVALUE 3.60e+00
AWTLGSAPSPACPARKSRMTETGMVPSPLSPGFAALTLSCPSAWTSTLGPHSSASC

SEQ ID NO: 27682 - protein, 49 aa, Homo sapiens
  MAP TO AL139135.2; EXPRESSED IN HELA, SIGNAL = 1.3; EXPRESSED IN BRAIN, SIGNAL = 1.3; EXPRESSED IN FETAL LIVER, SIGNAL = 1.9; EXPRESSED IN BONE MARROW, SIGNAL = 2.2; EXPRESSED IN ADULT LIVER, SIGNAL = 2.3; SWISSPROT HIT: P70213, EVALUE 1.00e-07
KSREQAWEWILMVWEDGGRNIESDQAELIDLDPLSRDSAFNVAAQGVKK

SEQ ID NO: 27683 - protein, 41 aa, Homo sapiens
  MAP TO AL136361.2; EXPRESSED IN HEART, SIGNAL = 3.6; EXPRESSED IN ADULT LIVER, SIGNAL = 4.5; EXPRESSED IN PLACENTA, SIGNAL = 4.5; EXPRESSED IN BONE MARROW, SIGNAL = 3.3; EXPRESSED IN BRAIN, SIGNAL = 3.2; EXPRESSED IN LUNG, SIGNAL = 4.2; EXPRESSED IN HELA, SIGNAL = 1.8; EXPRESSED IN FETAL LIVER, SIGNAL = 3.8; SWISSPROT HIT: Q9D952, EVALUE 2.90e+00
LREDPLSRTELCPLKIQMLESKPPVTQSVNVFEEVFKEVMK

SEQ ID NO: 27684 - protein, 24 aa, Homo sapiens
  MAP TO AL136361.2; EXPRESSED IN HEART, SIGNAL = 3.6; EXPRESSED IN ADULT LIVER, SIGNAL = 4.5; EXPRESSED IN PLACENTA, SIGNAL = 4.5; EXPRESSED IN BONE MARROW, SIGNAL = 3.3; EXPRESSED IN BRAIN, SIGNAL = 3.2; EXPRESSED IN LUNG, SIGNAL = 4.2; EXPRESSED IN HELA, SIGNAL = 1.8; EXPRESSED IN FETAL LIVER, SIGNAL = 3.8
FEKTRCHGLSCVLLKFRCWSPNPQ

SEQ ID NO: 27685 - protein, 30 aa, Homo sapiens
  MAP TO AL137071.3; EXPRESSED IN HELA, SIGNAL = 3.9; EXPRESSED IN BRAIN, SIGNAL = 3.6; EXPRESSED IN FETAL LIVER, SIGNAL =   3; EXPRESSED IN HEART, SIGNAL =   3; EXPRESSED IN LUNG, SIGNAL =   1; EXPRESSED IN BONE MARROW, SIGNAL =   4
LETKSKALWGCFIIISKRDRELFNLSSQRH

SEQ ID NO: 27686 - protein, 73 aa, Homo sapiens
  MAP TO AL137790.1; EXPRESSED IN FETAL LIVER, SIGNAL = 0.79; EXPRESSED IN PLACENTA, SIGNAL = 1.2; EXPRESSED IN LUNG, SIGNAL = 1.1; EXPRESSED IN ADULT LIVER, SIGNAL = 1.1; EXPRESSED IN BRAIN, SIGNAL = 0.78; SWISSPROT HIT: Q9R244, EVALUE 2.60e+00
IQSAEAGWEWQVTQRQGWEFEGEGEGRRTVAEAEEAAWRAMLQLGAQKGHQVPPVGVTTESGQRLPEGRASLA

SEQ ID NO: 27687 - protein, 20 aa, Homo sapiens
  MAP TO CHR22_174.0; EXPRESSED IN FETAL LIVER, SIGNAL = 0.62; EXPRESSED IN BONE MARROW, SIGNAL = 0.76; EXPRESSED IN HELA, SIGNAL = 0.69; EXPRESSED IN BRAIN, SIGNAL = 0.76
YCSTRWCPQPAPCHWQCSPG

SEQ ID NO: 27688 - protein, 65 aa, Homo sapiens
  MAP TO CHR22_174.0; EXPRESSED IN FETAL LIVER, SIGNAL = 0.62; EXPRESSED IN BONE MARROW, SIGNAL = 0.76; EXPRESSED IN HELA, SIGNAL = 0.69; EXPRESSED IN BRAIN, SIGNAL = 0.76; SWISSPROT HIT: P03186, EVALUE 1.30e-02
DTAAPDGAHNLPPAIGSAAQVNAPKLLPDVGSAATESAPNQPPAMGSDSRDSAPKQTLALGSDAR

SEQ ID NO: 27689 - protein, 25 aa, Homo sapiens
  MAP TO AL138889.2; EXPRESSED IN HELA, SIGNAL = 1.3; EXPRESSED IN FETAL LIVER, SIGNAL = 1.9; EXPRESSED IN LUNG, SIGNAL =   2; EXPRESSED IN PLACENTA, SIGNAL = 2.2; EXPRESSED IN HEART, SIGNAL = 1.9; EXPRESSED IN BRAIN, SIGNAL = 2.3; EXPRESSED IN ADULT LIVER, SIGNAL = 1.8; EXPRESSED IN BONE MARROW, SIGNAL = 1.9
MASIEGVWTLSAFLELGSEWTWVPL

SEQ ID NO: 27690 - protein, 56 aa, Homo sapiens
  MAP TO CHR22_22.0; EXPRESSED IN PLACENTA, SIGNAL = 3.4; EXPRESSED IN ADULT LIVER, SIGNAL = 3.6; EXPRESSED IN BONE MARROW, SIGNAL = 2.7; EXPRESSED IN LUNG, SIGNAL =   3; EXPRESSED IN BRAIN, SIGNAL = 2.8; EXPRESSED IN FETAL LIVER, SIGNAL = 3.5; SWISSPROT HIT: Q12772, EVALUE 5.00e-28
SPLVKAIFHACRAMHASLPGKADGQQSSFCHCERASGHLWSSLNVSGATSDPALNH

SEQ ID NO: 27691 - protein, 50 aa, Homo sapiens
  MAP TO CHR22_22.0; EXPRESSED IN PLACENTA, SIGNAL = 3.4; EXPRESSED IN ADULT LIVER, SIGNAL = 3.6; EXPRESSED IN BONE MARROW, SIGNAL = 2.7; EXPRESSED IN LUNG, SIGNAL =   3; EXPRESSED IN BRAIN, SIGNAL = 2.8; EXPRESSED IN FETAL LIVER, SIGNAL = 3.5; SWISSPROT HIT: Q13635, EVALUE 8.20e+00
EPPGEGHLPCLQSHACLTPWESRWAAEFLLPLREGQWPPMEQPQRQWGHL

SEQ ID NO: 27692 - protein, 50 aa, Homo sapiens
  MAP TO CHR22_93.0; EXPRESSED IN BRAIN, SIGNAL = 0.48; EXPRESSED IN FETAL LIVER, SIGNAL = 0.73; EXPRESSED IN BONE MARROW, SIGNAL = 0.64; EXPRESSED IN PLACENTA, SIGNAL = 0.81; EXPRESSED IN ADULT LIVER, SIGNAL = 0.92; EXPRESSED IN LUNG, SIGNAL = 0.81
EGNSARGRGGPSGQGRSRGRSGRRPGRGRSTEGPAICSPALPACWARSPS

SEQ ID NO: 27693 - protein, 18 aa, Homo sapiens
  MAP TO CHR22_174.0; EXPRESSED IN LUNG, SIGNAL = 0.46; EXPRESSED IN FETAL LIVER, SIGNAL = 0.79; EXPRESSED IN PLACENTA, SIGNAL = 0.58; EXPRESSED IN BRAIN, SIGNAL = 0.74; EXPRESSED IN HELA, SIGNAL = 1.4
GQLVSQGQIRVTGRHGRD

SEQ ID NO: 27694 - protein, 48 aa, Homo sapiens
  MAP TO AL133402.2; EXPRESSED IN FETAL LIVER, SIGNAL = 5.6; EXPRESSED IN BONE MARROW, SIGNAL = 5.8; EXPRESSED IN HEART, SIGNAL = 4.9; EXPRESSED IN HELA, SIGNAL = 5.8; EXPRESSED IN BRAIN, SIGNAL = 6.1; EXPRESSED IN LUNG, SIGNAL = 5.8; EXPRESSED IN ADULT LIVER, SIGNAL = 5.7; EXPRESSED IN PLACENTA, SIGNAL = 5.5; SWISSPROT HIT: Q9Y493, EVALUE 6.30e+00
RGDEDTDTHRGKTGQGHREKMLSTSQGERPQEKPTLPTPGSQISIFQN

SEQ ID NO: 27695 - protein, 48 aa, Homo sapiens
  MAP TO AL133402.2; EXPRESSED IN FETAL LIVER, SIGNAL = 5.6; EXPRESSED IN BONE MARROW, SIGNAL = 5.8; EXPRESSED IN HEART, SIGNAL = 4.9; EXPRESSED IN HELA, SIGNAL = 5.8; EXPRESSED IN BRAIN, SIGNAL = 6.1; EXPRESSED IN LUNG, SIGNAL = 5.8; EXPRESSED IN ADULT LIVER, SIGNAL = 5.7; EXPRESSED IN PLACENTA, SIGNAL = 5.5
EEMRTQTRTEGRPGKDTGRRCCPQAKERGLRRNQPCPHLGLRYLSSRM

SEQ ID NO: 27696 - protein, 33 aa, Homo sapiens
  MAP TO AL135783.6; EXPRESSED IN HELA, SIGNAL = 0.51; EXPRESSED IN FETAL LIVER, SIGNAL = 0.62; EXPRESSED IN LUNG, SIGNAL = 0.68; EXPRESSED IN PLACENTA, SIGNAL = 0.91; EXPRESSED IN ADULT LIVER, SIGNAL = 0.81; EXPRESSED IN BRAIN, SIGNAL = 0.75
LENHCYHKPGTNLSQMGMGNICSLKHKNSSSRF

SEQ ID NO: 27697 - protein, 51 aa, Homo sapiens
  MAP TO AL137846.1; EXPRESSED IN BONE MARROW, SIGNAL = 2.9; EXPRESSED IN HEART, SIGNAL = 2.8; EXPRESSED IN PLACENTA, SIGNAL = 3.5; EXPRESSED IN BRAIN, SIGNAL = 2.7; EXPRESSED IN ADULT LIVER, SIGNAL = 1.9; EXPRESSED IN HELA, SIGNAL =   3; EXPRESSED IN FETAL LIVER, SIGNAL = 2.4; SWISSPROT HIT: Q16983, EVALUE 3.00e-04
VACVAVTVAMHFLFLVAFSWMLVEGLLLWRKVVAVSMHPGPGMRLYHATGW

SEQ ID NO: 27698 - protein, 23 aa, Homo sapiens
  MAP TO AL137846.1; EXPRESSED IN BONE MARROW, SIGNAL = 2.9; EXPRESSED IN HEART, SIGNAL = 2.8; EXPRESSED IN PLACENTA, SIGNAL = 3.5; EXPRESSED IN BRAIN, SIGNAL = 2.7; EXPRESSED IN ADULT LIVER, SIGNAL = 1.9; EXPRESSED IN HELA, SIGNAL =   3; EXPRESSED IN FETAL LIVER, SIGNAL = 2.4
CTSSFWWHSPGCWWRGCCCGGRW

SEQ ID NO: 27699 - protein, 65 aa, Homo sapiens
  MAP TO CHR21_61.0; EXPRESSED IN HELA, SIGNAL = 2.6; EXPRESSED IN HEART, SIGNAL = 1.2; EXPRESSED IN LUNG, SIGNAL =   1; EXPRESSED IN BRAIN, SIGNAL = 1.6; EXPRESSED IN PLACENTA, SIGNAL = 0.81; EXPRESSED IN ADULT LIVER, SIGNAL = 0.95; EXPRESSED IN FETAL LIVER, SIGNAL = 1.7; EXPRESSED IN BONE MARROW, SIGNAL = 1.8; SWISSPROT HIT: P20591, EVALUE 3.00e-32
ILTKPDLVDKGTEDKVVDVVRNLVFHLKKGYMIVKCRGQQEIQDQLSLSEALQREKIFFENHPYF

SEQ ID NO: 27700 - protein, 54 aa, Homo sapiens
  MAP TO AC020582.3; EXPRESSED IN BRAIN, SIGNAL = 1.1; EXPRESSED IN PLACENTA, SIGNAL = 1.1; EXPRESSED IN LUNG, SIGNAL = 1.2; EXPRESSED IN FETAL LIVER, SIGNAL = 1.3; EXPRESSED IN BONE MARROW, SIGNAL = 1.4; SWISSPROT HIT: Q13428, EVALUE 4.30e-01
KPAGQQSDYAVSEPVWITMAKQKQKSFKAHISVKELKTKSNAGADAETKEPKYE

SEQ ID NO: 27701 - protein, 17 aa, Homo sapiens
  MAP TO AC020582.3; EXPRESSED IN BRAIN, SIGNAL = 1.1; EXPRESSED IN PLACENTA, SIGNAL = 1.1; EXPRESSED IN LUNG, SIGNAL = 1.2; EXPRESSED IN FETAL LIVER, SIGNAL = 1.3; EXPRESSED IN BONE MARROW, SIGNAL = 1.4
ESLLVNSQIMLSQSRFG

SEQ ID NO: 27702 - protein, 25 aa, Homo sapiens
  MAP TO CHR21_22.0; EXPRESSED IN BRAIN, SIGNAL = 1.1; EXPRESSED IN LUNG, SIGNAL = 0.63; EXPRESSED IN PLACENTA, SIGNAL = 0.73; EXPRESSED IN ADULT LIVER, SIGNAL = 0.75; EXPRESSED IN HELA, SIGNAL = 2.9; EXPRESSED IN FETAL LIVER, SIGNAL = 1.2; EXPRESSED IN BONE MARROW, SIGNAL = 1.3
GEEGSNGKQSRKPCQLHSCEGTARL

SEQ ID NO: 27703 - protein, 58 aa, Homo sapiens
  MAP TO CHR21_74.0; EXPRESSED IN PLACENTA, SIGNAL = 0.75; EXPRESSED IN BRAIN, SIGNAL = 1.2; EXPRESSED IN LUNG, SIGNAL = 0.76; EXPRESSED IN HELA, SIGNAL = 2.8; EXPRESSED IN FETAL LIVER, SIGNAL = 1.1; EXPRESSED IN BONE MARROW, SIGNAL = 1.1; SWISSPROT HIT: O43918, EVALUE 2.00e-29
ETLHLKEKEGCPQAFHALLSWLLTQDSTAILDFWRVLFKDYNLERYGRLQPILDSFPK

SEQ ID NO: 27704 - protein, 57 aa, Homo sapiens
  MAP TO CHR21_74.0; EXPRESSED IN PLACENTA, SIGNAL = 0.75; EXPRESSED IN BRAIN, SIGNAL = 1.2; EXPRESSED IN LUNG, SIGNAL = 0.76; EXPRESSED IN HELA, SIGNAL = 2.8; EXPRESSED IN FETAL LIVER, SIGNAL = 1.1; EXPRESSED IN BONE MARROW, SIGNAL = 1.1; SWISSPROT HIT: Q63959, EVALUE 5.60e-01
DASSEGKGGLPPGLPRPPVLAADPGLHSHPGLLEGAVQGLQPGALWPAAAHPGQLPQ

SEQ ID NO: 27705 - protein, 67 aa, Homo sapiens
  MAP TO AL139100.1; EXPRESSED IN FETAL LIVER, SIGNAL = 0.72; EXPRESSED IN BONE MARROW, SIGNAL = 0.77; EXPRESSED IN BRAIN, SIGNAL = 0.73; EXPRESSED IN PLACENTA, SIGNAL = 0.86; EXPRESSED IN LUNG, SIGNAL =   1; EXPRESSED IN ADULT LIVER, SIGNAL = 0.83
ITPPAPSAQQSWAQAFGGSQGNSNSSSSRLSQYFEKFDVKESSYHLLISRLDLHICDDSQSREPGTP

SEQ ID NO: 27706 - protein, 24 aa, Homo sapiens
  MAP TO AL139100.1; EXPRESSED IN FETAL LIVER, SIGNAL = 0.72; EXPRESSED IN BONE MARROW, SIGNAL = 0.77; EXPRESSED IN BRAIN, SIGNAL = 0.73; EXPRESSED IN PLACENTA, SIGNAL = 0.86; EXPRESSED IN LUNG, SIGNAL =   1; EXPRESSED IN ADULT LIVER, SIGNAL = 0.83
HLVAARATATAAAAASASTLRNLM

SEQ ID NO: 27707 - protein, 36 aa, Homo sapiens
  MAP TO AC011636.3; EXPRESSED IN BONE MARROW, SIGNAL = 0.41; EXPRESSED IN PLACENTA, SIGNAL = 0.46; EXPRESSED IN ADULT LIVER, SIGNAL = 0.43; EXPRESSED IN BRAIN, SIGNAL = 0.4
FYVNKSMVGSERSILETVCEWEAGSHLHHLPFTLLQ

SEQ ID NO: 27708 - protein, 78 aa, Homo sapiens
  MAP TO AL138726.2; EXPRESSED IN ADULT LIVER, SIGNAL = 1.3; EXPRESSED IN BRAIN, SIGNAL = 0.46; SWISSPROT HIT: O00624, EVALUE 2.00e-37
ASVYQWSPETQGIIFSSINYGIILTLIPSGYLAGIFGAKKMLGAGLLISSLLTLFTPLAADFGVILVIMVRTVQGMAQ

SEQ ID NO: 27709 - protein, 21 aa, Homo sapiens
  MAP TO AL138726.2; EXPRESSED IN ADULT LIVER, SIGNAL = 1.3; EXPRESSED IN BRAIN, SIGNAL = 0.46
PLCINGAQKLRVSSLAPSTMG

SEQ ID NO: 27710 - protein, 27 aa, Homo sapiens
  MAP TO AC023123.3; EXPRESSED IN PLACENTA, SIGNAL = 0.53; EXPRESSED IN BONE MARROW, SIGNAL = 0.6; EXPRESSED IN BRAIN, SIGNAL = 0.53; EXPRESSED IN FETAL LIVER, SIGNAL = 0.48
YQHLKRLNMRIKQNESQKGYEKVGQYD

SEQ ID NO: 27711 - protein, 56 aa, Homo sapiens
  MAP TO CHR21_65.0; EXPRESSED IN FETAL LIVER, SIGNAL = 1.7; EXPRESSED IN LUNG, SIGNAL = 0.9; EXPRESSED IN ADULT LIVER, SIGNAL = 0.96; EXPRESSED IN BONE MARROW, SIGNAL = 1.8; EXPRESSED IN PLACENTA, SIGNAL = 0.91; EXPRESSED IN HELA, SIGNAL = 3.9; EXPRESSED IN BRAIN, SIGNAL = 1.9; SWISSPROT HIT: Q28793, EVALUE 3.30e-01
NRGWHGRAQPAFQSLHSHSLPQPPYSPGGVPVPEKKQSCCQSCRPCGSGHRAQPRQ

SEQ ID NO: 27712 - protein, 22 aa, Homo sapiens
  MAP TO AL138837.1; EXPRESSED IN LUNG, SIGNAL = 3.4; EXPRESSED IN FETAL LIVER, SIGNAL = 0.98; EXPRESSED IN PLACENTA, SIGNAL = 1.7; EXPRESSED IN ADULT LIVER, SIGNAL = 1.1; EXPRESSED IN BONE MARROW, SIGNAL = 1.7; EXPRESSED IN BRAIN, SIGNAL = 1.1
EFIICWRRETRIWIMVSLRYIS

SEQ ID NO: 27713 - protein, 59 aa, Homo sapiens
  MAP TO CHR22_145.0; EXPRESSED IN BRAIN, SIGNAL = 0.63; EXPRESSED IN PLACENTA, SIGNAL = 1.1; EXPRESSED IN ADULT LIVER, SIGNAL = 1.1; EXPRESSED IN LUNG, SIGNAL = 0.85; EXPRESSED IN FETAL LIVER, SIGNAL = 0.75; EXPRESSED IN BONE MARROW, SIGNAL = 0.59
AILHAERQLLYRSWFMWHQQAAARHQEQEWQTVACAHHRHGRLKKAFCLWRESAQGLRT

SEQ ID NO: 27714 - protein, 37 aa, Homo sapiens
  MAP TO CHR22_83.0; EXPRESSED IN FETAL LIVER, SIGNAL = 0.46; EXPRESSED IN BONE MARROW, SIGNAL = 0.45; EXPRESSED IN BRAIN, SIGNAL = 0.44; EXPRESSED IN ADULT LIVER, SIGNAL = 0.75; SWISSPROT HIT: Q9UJY5, EVALUE 5.00e-15
VMKVKLQPPSGTELPAFNPIVHPSAITQVLLLANPQK

SEQ ID NO: 27715 - protein, 62 aa, Homo sapiens
  MAP TO CHR22_147.0; EXPRESSED IN BRAIN, SIGNAL = 0.28; EXPRESSED IN HELA, SIGNAL = 1.1; EXPRESSED IN ADULT LIVER, SIGNAL = 0.56; EXPRESSED IN BONE MARROW, SIGNAL = 0.43; SWISSPROT HIT: O59430, EVALUE 6.10e+00
MAPALSHKLFPAWVPARRAGLRGVTSMVQPSDGQLERTSTKCSRLPRPLRTRIKSALPILKT

SEQ ID NO: 27716 - protein, 44 aa, Homo sapiens
  MAP TO AL138839.1; EXPRESSED IN BRAIN, SIGNAL = 0.63; EXPRESSED IN FETAL LIVER, SIGNAL = 0.77; EXPRESSED IN PLACENTA, SIGNAL = 0.83; EXPRESSED IN LUNG, SIGNAL = 0.78; EXPRESSED IN BONE MARROW, SIGNAL = 0.7
IKELRFKDISNLFKVTEPKCASNPKTQALSSKPGCLIVLIMTVI

SEQ ID NO: 27717 - protein, 29 aa, Homo sapiens
  MAP TO AL137795.2; EXPRESSED IN BRAIN, SIGNAL = 0.86; EXPRESSED IN PLACENTA, SIGNAL = 0.59; EXPRESSED IN FETAL LIVER, SIGNAL = 0.46; EXPRESSED IN BONE MARROW, SIGNAL = 0.48
MKSRESCSRPLVSAMLQLSVNVCQRCTWK

SEQ ID NO: 27718 - protein, 53 aa, Homo sapiens
  MAP TO AL137013.2; EXPRESSED IN PLACENTA, SIGNAL = 7.2; EXPRESSED IN FETAL LIVER, SIGNAL = 7.4; EXPRESSED IN LUNG, SIGNAL = 8.7; EXPRESSED IN ADULT LIVER, SIGNAL = 6.9; EXPRESSED IN BONE MARROW, SIGNAL =   8; EXPRESSED IN BRAIN, SIGNAL = 7.1; EXPRESSED IN HELA, SIGNAL = 5.9; EXPRESSED IN HEART, SIGNAL = 6.3; SWISSPROT HIT: P18562, EVALUE 3.00e-14
EAMEQGLRDCCRSIRIGKILIQSDEETQRAKVYYAKFPPDIYRRKVLLMYPIL

SEQ ID NO: 27719 - protein, 20 aa, Homo sapiens
  MAP TO AL137013.2; EXPRESSED IN PLACENTA, SIGNAL = 7.2; EXPRESSED IN FETAL LIVER, SIGNAL = 7.4; EXPRESSED IN LUNG, SIGNAL = 8.7; EXPRESSED IN ADULT LIVER, SIGNAL = 6.9; EXPRESSED IN BONE MARROW, SIGNAL =   8; EXPRESSED IN BRAIN, SIGNAL = 7.1; EXPRESSED IN HELA, SIGNAL = 5.9; EXPRESSED IN HEART, SIGNAL = 6.3
VRQWNKVYETAVDPYELERS

SEQ ID NO: 27720 - protein, 32 aa, Homo sapiens
  MAP TO AC011676.4; EXPRESSED IN PLACENTA, SIGNAL = 1.4; EXPRESSED IN LUNG, SIGNAL = 1.3; EXPRESSED IN HELA, SIGNAL = 1.1; EXPRESSED IN BRAIN, SIGNAL = 1.3; EXPRESSED IN ADULT LIVER, SIGNAL = 1.3; EXPRESSED IN FETAL LIVER, SIGNAL = 1.3; EXPRESSED IN BONE MARROW, SIGNAL = 1.4
AQRSQKGTRGDRPGSSPWGAQGTGCPQPLLGK

SEQ ID NO: 27721 - protein, 32 aa, Homo sapiens
  MAP TO AC011676.4; EXPRESSED IN PLACENTA, SIGNAL = 1.4; EXPRESSED IN LUNG, SIGNAL = 1.3; EXPRESSED IN HELA, SIGNAL = 1.1; EXPRESSED IN BRAIN, SIGNAL = 1.3; EXPRESSED IN ADULT LIVER, SIGNAL = 1.3; EXPRESSED IN FETAL LIVER, SIGNAL = 1.3; EXPRESSED IN BONE MARROW, SIGNAL = 1.4
CPEESKRHKGRQAWLQPLGCPRHWVPTAPPRE

SEQ ID NO: 27722 - protein, 64 aa, Homo sapiens
  MAP TO AL137793.1; EXPRESSED IN BRAIN, SIGNAL = 2.7; EXPRESSED IN HELA, SIGNAL = 1.4; EXPRESSED IN FETAL LIVER, SIGNAL = 2.1; EXPRESSED IN HEART, SIGNAL = 2.4; EXPRESSED IN BONE MARROW, SIGNAL = 2.4; SWISSPROT HIT: Q9T1Q7, EVALUE 4.60e+00
NLKNLQEGQRVDLDATQPAIEKLGPPSQGQGHTSAITTHKQRSMYELGQDTRNYLMIAPEEAAA

SEQ ID NO: 27723 - protein, 123 aa, Homo sapiens
  MAP TO AC012580.3; EXPRESSED IN BRAIN, SIGNAL = 5.9; EXPRESSED IN HELA, SIGNAL = 5.6; EXPRESSED IN PLACENTA, SIGNAL = 5.1; EXPRESSED IN ADULT LIVER, SIGNAL = 8.6; EXPRESSED IN FETAL LIVER, SIGNAL = 5.4; EXPRESSED IN LUNG, SIGNAL =   7; SWISSPROT HIT: O33228, EVALUE 4.90e+00
LDLENKENMEPKELQQEHKDNGHCKQMGWRDTLLSYRKNSVVAKIKHKPNLLELSTVSNGDLLVGLAISGPKALCAFQDIPSVFTLPKNHMLAIQPLRPSCADDRLELLMLGSEFAMDKMPGP

SEQ ID NO: 27724 - protein, 46 aa, Homo sapiens
  MAP TO CHR22_153.0; EXPRESSED IN ADULT LIVER, SIGNAL = 0.66; EXPRESSED IN FETAL LIVER, SIGNAL = 0.39; EXPRESSED IN LUNG, SIGNAL = 0.46; EXPRESSED IN BONE MARROW, SIGNAL = 0.53; EXPRESSED IN BRAIN, SIGNAL = 0.49; SWISSPROT HIT: Q61670, EVALUE 8.90e-02
QHWSDSPSDADRELRLPCPAEGEAELELRVSEDEEKLPASPKHQER

SEQ ID NO: 27725 - protein, 43 aa, Homo sapiens
  MAP TO AL137157.2; EXPRESSED IN BRAIN, SIGNAL = 0.85; EXPRESSED IN FETAL LIVER, SIGNAL = 0.59; EXPRESSED IN BONE MARROW, SIGNAL = 0.82; EXPRESSED IN PLACENTA, SIGNAL = 0.78; EXPRESSED IN ADULT LIVER, SIGNAL = 0.77; SWISSPROT HIT: P35408, EVALUE 8.40e+00
ICTLPVVEKVSVDPVNTVHTPSLSYLVSQNLDIFTKVPVNIEL

SEQ ID NO: 27726 - protein, 30 aa, Homo sapiens
  MAP TO AL137071.3; EXPRESSED IN BRAIN, SIGNAL = 0.65; EXPRESSED IN FETAL LIVER, SIGNAL = 0.57; EXPRESSED IN PLACENTA, SIGNAL = 0.61; EXPRESSED IN LUNG, SIGNAL = 0.58; EXPRESSED IN ADULT LIVER, SIGNAL = 0.69; EXPRESSED IN BONE MARROW, SIGNAL = 0.62; SWISSPROT HIT: P08548, EVALUE 7.00e-05
PENAFDKIHYPFIIKTLKEIGIEGYFLNII

SEQ ID NO: 27727 - protein, 81 aa, Homo sapiens
  MAP TO AC013648.3; EXPRESSED IN ADULT LIVER, SIGNAL = 0.41; EXPRESSED IN BRAIN, SIGNAL = 0.46
PSSRLDLTGPHFESSILSPCEDVTLTKYQVTVPRAALAPELALEIPSGSQADIPLPKTECSTDLQPPEGVPTSQAESHSGP

SEQ ID NO: 27728 - protein, 63 aa, Homo sapiens
  MAP TO CHR22_166.0; EXPRESSED IN FETAL LIVER, SIGNAL = 0.85; EXPRESSED IN BONE MARROW, SIGNAL = 0.63; EXPRESSED IN LUNG, SIGNAL = 0.79; EXPRESSED IN BRAIN, SIGNAL = 0.69; EXPRESSED IN PLACENTA, SIGNAL =   1; EXPRESSED IN ADULT LIVER, SIGNAL = 0.73; SWISSPROT HIT: P32927, EVALUE 2.00e-34
DLLEPVSCDLSDDMPWSACPHPRCVPRRCVIPCQSFVVTDVDYFSFQPDRPLGTRLTVTLTQH

SEQ ID NO: 27729 - protein, 41 aa, Homo sapiens
  MAP TO CHR22_108.0; EXPRESSED IN PLACENTA, SIGNAL = 0.75; EXPRESSED IN HELA, SIGNAL = 1.6; EXPRESSED IN BRAIN, SIGNAL = 1.3; EXPRESSED IN FETAL LIVER, SIGNAL = 1.1; EXPRESSED IN HEART, SIGNAL = 1.1
DLVGRSLRAPPGCLFFLHLALLTLLSLHHHSNSKTGPRPGS

SEQ ID NO: 27730 - protein, 50 aa, Homo sapiens
  MAP TO AC017112.5; EXPRESSED IN PLACENTA, SIGNAL = 0.55; EXPRESSED IN BRAIN, SIGNAL = 0.57; EXPRESSED IN LUNG, SIGNAL = 0.6; EXPRESSED IN FETAL LIVER, SIGNAL = 0.49; EXPRESSED IN BONE MARROW, SIGNAL = 0.48
KNRRKKRHRCTTQNYSVFHRHKNVNPTTPQQTLSVVHGCIPDAQNTAWNT

SEQ ID NO: 27731 - protein, 19 aa, Homo sapiens
  MAP TO CHR21_70.0; EXPRESSED IN FETAL LIVER, SIGNAL = 1.8; EXPRESSED IN BONE MARROW, SIGNAL = 2.1; EXPRESSED IN LUNG, SIGNAL = 0.98; EXPRESSED IN HEART, SIGNAL = 1.5; EXPRESSED IN HELA, SIGNAL = 4.1; EXPRESSED IN PLACENTA, SIGNAL = 0.99; EXPRESSED IN BRAIN, SIGNAL = 1.8
GKEDVLADLDLHAGSRTPE

SEQ ID NO: 27732 - protein, 19 aa, Homo sapiens
  MAP TO CHR21_70.0; EXPRESSED IN FETAL LIVER, SIGNAL = 1.8; EXPRESSED IN BONE MARROW, SIGNAL = 2.1; EXPRESSED IN LUNG, SIGNAL = 0.98; EXPRESSED IN HEART, SIGNAL = 1.5; EXPRESSED IN HELA, SIGNAL = 4.1; EXPRESSED IN PLACENTA, SIGNAL = 0.99; EXPRESSED IN BRAIN, SIGNAL = 1.8
WGKRTFLRTLTSMPAAGPR

SEQ ID NO: 27733 - protein, 55 aa, Homo sapiens
  MAP TO AL136457.1; EXPRESSED IN HELA, SIGNAL = 0.77; EXPRESSED IN FETAL LIVER, SIGNAL = 1.3; EXPRESSED IN ADULT LIVER, SIGNAL = 1.4; EXPRESSED IN BONE MARROW, SIGNAL = 1.3; EXPRESSED IN LUNG, SIGNAL = 1.3; EXPRESSED IN BRAIN, SIGNAL = 1.2; SWISSPROT HIT: P08547, EVALUE 2.00e-04
HDLNKHFIKDVQIKNEQMEKCSRSYVIREMQIETTRYLYTQVRMIKFITLTTPNA

SEQ ID NO: 27734 - protein, 26 aa, Homo sapiens
  MAP TO CHR22_203.0; EXPRESSED IN HELA, SIGNAL = 2.3; EXPRESSED IN FETAL LIVER, SIGNAL = 2.1; EXPRESSED IN HEART, SIGNAL = 2.1; EXPRESSED IN PLACENTA, SIGNAL = 1.1; EXPRESSED IN LUNG, SIGNAL = 0.84; EXPRESSED IN ADULT LIVER, SIGNAL = 0.72; EXPRESSED IN BRAIN, SIGNAL = 1.8
HGLQRVYAPLLPALAEHAGHRPVRGM

SEQ ID NO: 27735 - protein, 159 aa, Homo sapiens [sequence omitted]

SEQ ID NO: 27736 - protein, 23 aa, Homo sapiens
  MAP TO CHR22_116.0; EXPRESSED IN HELA, SIGNAL = 3.9; EXPRESSED IN BRAIN, SIGNAL = 7.6; EXPRESSED IN FETAL LIVER, SIGNAL = 7.8; EXPRESSED IN HEART, SIGNAL = 6.3; EXPRESSED IN ADULT LIVER, SIGNAL = 7.4; EXPRESSED IN BONE MARROW, SIGNAL = 8.7; EXPRESSED IN PLACENTA, SIGNAL = 7.7; EXPRESSED IN LUNG, SIGNAL = 7.3
MVMMKTLTSYSEKNLLMSQLKCQ

SEQ ID NO: 27737 - protein, 22 aa, Homo sapiens
  MAP TO CHR22_116.0; EXPRESSED IN HELA, SIGNAL = 3.9; EXPRESSED IN BRAIN, SIGNAL = 7.6; EXPRESSED IN FETAL LIVER, SIGNAL = 7.8; EXPRESSED IN HEART, SIGNAL = 6.3; EXPRESSED IN ADULT LIVER, SIGNAL = 7.4; EXPRESSED IN BONE MARROW, SIGNAL = 8.7; EXPRESSED IN PLACENTA, SIGNAL = 7.7; EXPRESSED IN LUNG, SIGNAL = 7.3
GYDENPDQLLREEPTDVSAEVP

SEQ ID NO: 27738 - protein, 71 aa, Homo sapiens
  MAP TO CHR22_174.0; EXPRESSED IN BONE MARROW, SIGNAL =  28; EXPRESSED IN BRAIN, SIGNAL = 1.2; EXPRESSED IN HEART, SIGNAL = 1.2; EXPRESSED IN FETAL LIVER, SIGNAL = 1.5; EXPRESSED IN LUNG, SIGNAL =  20; EXPRESSED IN HELA, SIGNAL = 0.99; EXPRESSED IN ADULT LIVER, SIGNAL = 7.7; EXPRESSED IN PLACENTA, SIGNAL = 1.4; SWISSPROT HIT: P49907, EVALUE 3.20e-01
EWLLPGSCDGGLEGKQHPCHPGYGSHQGLQTEQQVHSQKRPEPDTPSMEVPQQLQLPGHTQRERCGEDSGP

SEQ ID NO: 27739 - protein, 40 aa, Homo sapiens
  MAP TO AL136317.2; EXPRESSED IN BONE MARROW, SIGNAL = 1.6; EXPRESSED IN PLACENTA, SIGNAL = 1.9; EXPRESSED IN LUNG, SIGNAL = 1.7; EXPRESSED IN ADULT LIVER, SIGNAL =   2; EXPRESSED IN BRAIN, SIGNAL = 1.5; EXPRESSED IN HELA, SIGNAL = 0.82; EXPRESSED IN FETAL LIVER, SIGNAL = 1.6
KPFCLSVSMEVSSRSLSIWKQLPRSRRRNLYFSREQRCLP

SEQ ID NO: 27740 - protein, 59 aa, Homo sapiens
  MAP TO AC021009.3; EXPRESSED IN PLACENTA, SIGNAL = 1.7; EXPRESSED IN BONE MARROW, SIGNAL = 1.5; EXPRESSED IN ADULT LIVER, SIGNAL = 1.4; EXPRESSED IN LUNG, SIGNAL = 1.6; EXPRESSED IN BRAIN, SIGNAL =   2; EXPRESSED IN FETAL LIVER, SIGNAL = 1.5; EXPRESSED IN HEART, SIGNAL = 1.7; SWISSPROT HIT: O00744, EVALUE 1.90e-01
WSRCPGQTPSPAPRTTWTWGPSHCRSFPCRLKMSQMLKQNPQKKVLLLQKRSLQGPLWS

SEQ ID NO: 27741 - protein, 19 aa, Homo sapiens
  MAP TO CHR22_231.0; EXPRESSED IN HELA, SIGNAL = 3.1; EXPRESSED IN BRAIN, SIGNAL = 1.5; EXPRESSED IN FETAL LIVER, SIGNAL = 1.6; EXPRESSED IN HEART, SIGNAL = 1.3; EXPRESSED IN LUNG, SIGNAL =   1; EXPRESSED IN BONE MARROW, SIGNAL = 1.8; EXPRESSED IN ADULT LIVER, SIGNAL = 0.93; EXPRESSED IN PLACENTA, SIGNAL = 1.1
AGVSSRCPICTSHYSGVRK

SEQ ID NO: 27742 - protein, 44 aa, Homo sapiens
  MAP TO CHR21_72.0; EXPRESSED IN BONE MARROW, SIGNAL = 1.6; EXPRESSED IN LUNG, SIGNAL = 0.83; EXPRESSED IN PLACENTA, SIGNAL = 0.77; EXPRESSED IN HELA, SIGNAL =   3; EXPRESSED IN BRAIN, SIGNAL = 1.6; EXPRESSED IN FETAL LIVER, SIGNAL = 1.4; SWISSPROT HIT: Q10415, EVALUE 4.90e+00
ENAGTPWSTFQERLQSRIFAVGGEEGSARLCLLHPPEHRRGQPG

SEQ ID NO: 27743 - protein, 70 aa, Homo sapiens
  MAP TO CHR21_72.0; EXPRESSED IN BONE MARROW, SIGNAL = 1.6; EXPRESSED IN LUNG, SIGNAL = 0.83; EXPRESSED IN PLACENTA, SIGNAL = 0.77; EXPRESSED IN HELA, SIGNAL =   3; EXPRESSED IN BRAIN, SIGNAL = 1.6; EXPRESSED IN FETAL LIVER, SIGNAL = 1.4; SWISSPROT HIT: P72821, EVALUE 2.60e+00
RTLGPPGAPFKNDSKAGYLQWEERKGVPGCVFFIPLNTGGGSLAEGLTPGGKAHLVKNCSLTDVMMKTNG

SEQ ID NO: 27744 - protein, 49 aa, Homo sapiens
  MAP TO CHR22_121.0; EXPRESSED IN FETAL LIVER, SIGNAL = 1.7; EXPRESSED IN BONE MARROW, SIGNAL = 1.5; EXPRESSED IN HEART, SIGNAL = 1.6; EXPRESSED IN LUNG, SIGNAL = 1.5; EXPRESSED IN BRAIN, SIGNAL = 1.6; EXPRESSED IN ADULT LIVER, SIGNAL = 1.5; EXPRESSED IN HELA, SIGNAL = 0.97; EXPRESSED IN PLACENTA, SIGNAL = 1.8
SDLRAEAGCALGPHRSQSLGLPAGPSSSLPARLAGQCQLLRQTHPSSPA

SEQ ID NO: 27745 - protein, 49 aa, Homo sapiens
  MAP TO CHR22_121.0; EXPRESSED IN FETAL LIVER, SIGNAL = 1.7; EXPRESSED IN BONE MARROW, SIGNAL = 1.5; EXPRESSED IN HEART, SIGNAL = 1.6; EXPRESSED IN LUNG, SIGNAL = 1.5; EXPRESSED IN BRAIN, SIGNAL = 1.6; EXPRESSED IN ADULT LIVER, SIGNAL = 1.5; EXPRESSED IN HELA, SIGNAL = 0.97; EXPRESSED IN PLACENTA, SIGNAL = 1.8; SWISSPROT HIT: P07383, EVALUE 2.30e-02
LISELKLAVPWGHIAAKAWGSLQGPPVLCLHGWLDNASSFDRLIPLLPQ

SEQ ID NO: 27746 - protein, 49 aa, Homo sapiens
  MAP TO AC016672.4; EXPRESSED IN BONE MARROW, SIGNAL = 5.5; EXPRESSED IN PLACENTA, SIGNAL = 5.5; EXPRESSED IN LUNG, SIGNAL =   5; EXPRESSED IN BRAIN, SIGNAL = 5.2; EXPRESSED IN HELA, SIGNAL = 2.4; EXPRESSED IN FETAL LIVER, SIGNAL = 5.2; SWISSPROT HIT: Q09363, EVALUE 3.70e+00
DHHHRGQKECCFCERIVLNLTTSYAKQHAWHTQSQKPRLPHCLTQKVHQ

SEQ ID NO: 27747 - protein, 51 aa, Homo sapiens
  MAP TO AC018691.5; EXPRESSED IN FETAL LIVER, SIGNAL = 2.8; EXPRESSED IN HEART, SIGNAL = 2.9; EXPRESSED IN PLACENTA, SIGNAL = 4.1; EXPRESSED IN ADULT LIVER, SIGNAL = 3.2; EXPRESSED IN BONE MARROW, SIGNAL =   3; EXPRESSED IN LUNG, SIGNAL =   4; EXPRESSED IN BRAIN, SIGNAL = 3.2; SWISSPROT HIT: P47976, EVALUE 1.30e+00
ATGTWNISTVGQAQLKNKKRSLETRFNISLHSTPSNPTKTSITIYSTSITF

SEQ ID NO: 27748 - protein, 41 aa, Homo sapiens
  MAP TO AL138895.4; EXPRESSED IN PLACENTA, SIGNAL = 0.64; EXPRESSED IN BRAIN, SIGNAL = 0.62; EXPRESSED IN LUNG, SIGNAL = 1.2; EXPRESSED IN BONE MARROW, SIGNAL = 0.82
EDYHRLLTKYAEAENTIDQLRLGAKVPGRDGVEAWAQVPEE

SEQ ID NO: 27749 - protein, 40 aa, Homo sapiens
  MAP TO AL138895.4; EXPRESSED IN PLACENTA, SIGNAL = 0.64; EXPRESSED IN BRAIN, SIGNAL = 0.62; EXPRESSED IN LUNG, SIGNAL = 1.2; EXPRESSED IN BONE MARROW, SIGNAL = 0.82; SWISSPROT HIT: P36165, EVALUE 1.70e+00
KTTTGSSPSTLRPRTPLTSYASGPRYQAGMGWRHGPKSPR

SEQ ID NO: 27750 - protein, 33 aa, Homo sapiens
  MAP TO AL137145.3; EXPRESSED IN LUNG, SIGNAL =  12; EXPRESSED IN HEART, SIGNAL = 2.5; EXPRESSED IN ADULT LIVER, SIGNAL = 9.1; EXPRESSED IN BONE MARROW, SIGNAL = 5.1; EXPRESSED IN BRAIN, SIGNAL = 3.7
MAFTKMLIMIWTVKSRLRWSQMEMRNLLGIGTK

SEQ ID NO: 27751 - protein, 33 aa, Homo sapiens
  MAP TO AC021010.3; EXPRESSED IN BRAIN, SIGNAL = 0.6; EXPRESSED IN FETAL LIVER, SIGNAL = 0.45; EXPRESSED IN PLACENTA, SIGNAL = 0.67; EXPRESSED IN ADULT LIVER, SIGNAL = 0.46; EXPRESSED IN LUNG, SIGNAL = 0.54
LQAFGIFCDIVHMTIGQFSITSKPREFLDILHV

SEQ ID NO: 27752 - protein, 90 aa, Homo sapiens
  MAP TO AC018586.3; EXPRESSED IN HELA, SIGNAL = 0.77; EXPRESSED IN FETAL LIVER, SIGNAL = 1.3; EXPRESSED IN PLACENTA, SIGNAL = 1.9; EXPRESSED IN ADULT LIVER, SIGNAL = 1.6; EXPRESSED IN LUNG, SIGNAL =   2; EXPRESSED IN BONE MARROW, SIGNAL = 1.8; EXPRESSED IN BRAIN, SIGNAL = 1.7; EXPRESSED IN HEART, SIGNAL = 1.8
ERSENTGEDFVSSLGYQLSYSWIGHQLELRGLCSKALLLGDICRHTLGQKGTCCLEGKDPVMATFITCLLKNPCALNNKHQYPGTTSRAL

SEQ ID NO: 27753 - protein, 22 aa, Homo sapiens
  MAP TO AC018586.3; EXPRESSED IN HELA, SIGNAL = 0.77; EXPRESSED IN FETAL LIVER, SIGNAL = 1.3; EXPRESSED IN PLACENTA, SIGNAL = 1.9; EXPRESSED IN ADULT LIVER, SIGNAL = 1.6; EXPRESSED IN LUNG, SIGNAL =   2; EXPRESSED IN BONE MARROW, SIGNAL = 1.8; EXPRESSED IN BRAIN, SIGNAL = 1.7; EXPRESSED IN HEART, SIGNAL = 1.8
RGARILGRTLSRVLDTSSATAG

SEQ ID NO: 27754 - protein, 45 aa, Homo sapiens
  MAP TO AL121993.2; EXPRESSED IN ADULT LIVER, SIGNAL = 1.4; EXPRESSED IN BRAIN, SIGNAL = 1.3; EXPRESSED IN LUNG, SIGNAL = 1.3; EXPRESSED IN HELA, SIGNAL = 1.2; EXPRESSED IN FETAL LIVER, SIGNAL = 1.3; EXPRESSED IN BONE MARROW, SIGNAL = 1.3; EXPRESSED IN HEART, SIGNAL = 1.4; SWISSPROT HIT: Q9UNX4, EVALUE 2.00e-21
GHHQEIWCLAVSPSGDYVVSSSHDKSLRLWERTREPLILEEEREM

SEQ ID NO: 27755 - protein, 34 aa, Homo sapiens
  MAP TO AL136381.1; EXPRESSED IN BONE MARROW, SIGNAL =   8; EXPRESSED IN ADULT LIVER, SIGNAL = 7.1; EXPRESSED IN PLACENTA, SIGNAL = 7.2; EXPRESSED IN LUNG, SIGNAL = 7.3; EXPRESSED IN BRAIN, SIGNAL = 7.2; EXPRESSED IN HELA, SIGNAL = 4.4; EXPRESSED IN FETAL LIVER, SIGNAL = 7.4; SWISSPROT HIT: Q16513, EVALUE 2.00e-12
NNRLKALQKQLDIELKVKQGAENMIQMYSNGSSK

SEQ ID NO: 27756 - protein, 51 aa, Homo sapiens
  MAP TO AL035457.13; EXPRESSED IN FETAL LIVER, SIGNAL = 0.53; EXPRESSED IN BRAIN, SIGNAL = 0.5; EXPRESSED IN PLACENTA, SIGNAL = 0.67; EXPRESSED IN LUNG, SIGNAL = 0.49
ACDLEGLIRVHLVWAPVSRDVDGERCRPWDAAGPAEEAAGMAVLRDGHSWR

SEQ ID NO: 27757 - protein, 84 aa, Homo sapiens
  MAP TO AJ239319.2; EXPRESSED IN FETAL LIVER, SIGNAL = 0.73; EXPRESSED IN ADULT LIVER, SIGNAL = 0.65; EXPRESSED IN BRAIN, SIGNAL = 1.1; SWISSPROT HIT: O15294, EVALUE 1.00e-45
ILKRVPNSVLWLLRFPAVGEPNIQQYAQNMGLPQNRIIFSPVAPKEEHVRRGQLADVCLDTPLCNGHTTGMDVLWAGTPMVTMP

SEQ ID NO: 27758 - protein, 27 aa, Homo sapiens
  MAP TO AL139149.1; EXPRESSED IN BRAIN, SIGNAL = 0.59; EXPRESSED IN LUNG, SIGNAL = 0.75; EXPRESSED IN FETAL LIVER, SIGNAL = 0.7; EXPRESSED IN BONE MARROW, SIGNAL = 0.62
YMIISSANSESLASSLPRSSSTPLNRS

SEQ ID NO: 27759 - protein, 76 aa, Homo sapiens
  MAP TO AL121830.11; EXPRESSED IN BRAIN, SIGNAL =   1; EXPRESSED IN LUNG, SIGNAL =   1; EXPRESSED IN PLACENTA, SIGNAL = 0.99; EXPRESSED IN HEART, SIGNAL = 1.3; EXPRESSED IN BONE MARROW, SIGNAL = 0.93; EXPRESSED IN ADULT LIVER, SIGNAL = 0.88; EXPRESSED IN HELA, SIGNAL = 0.8; EXPRESSED IN FETAL LIVER, SIGNAL = 0.94
VVILISLAAQWSRQTLLRPKRCKVEVCQKEQQCPFFLLPFFNMNLVAGAAAAILGPLGKGQGKCRATAPPTSGALI

SEQ ID NO: 27760 - protein, 20 aa, Homo sapiens
  MAP TO CHR22_181.0; EXPRESSED IN LUNG, SIGNAL =   2; EXPRESSED IN BRAIN, SIGNAL = 1.9; EXPRESSED IN ADULT LIVER, SIGNAL = 1.8; EXPRESSED IN HELA, SIGNAL = 0.73; EXPRESSED IN FETAL LIVER, SIGNAL = 1.4; EXPRESSED IN BONE MARROW, SIGNAL = 1.5
PCRRWDLPQRMPQGMFLLGA

SEQ ID NO: 27761 - protein, 21 aa, Homo sapiens
  MAP TO AL139141.1; EXPRESSED IN BRAIN, SIGNAL = 0.65; EXPRESSED IN FETAL LIVER, SIGNAL = 0.58; EXPRESSED IN ADULT LIVER, SIGNAL = 0.61; EXPRESSED IN LUNG, SIGNAL = 0.61; SWISSPROT HIT: P53776, EVALUE 2.00e-06
MQLADRCFSRAGSVYCKEDFF

SEQ ID NO: 27762 - protein, 17 aa, Homo sapiens
  MAP TO AL139141.1; EXPRESSED IN BRAIN, SIGNAL = 0.65; EXPRESSED IN FETAL LIVER, SIGNAL = 0.58; EXPRESSED IN ADULT LIVER, SIGNAL = 0.61; EXPRESSED IN LUNG, SIGNAL = 0.61
RFPSALAATSTSWTSSS

SEQ ID NO: 27763 - protein, 20 aa, Homo sapiens
  MAP TO AC015930.3; EXPRESSED IN PLACENTA, SIGNAL = 0.75; EXPRESSED IN BRAIN, SIGNAL = 0.69; EXPRESSED IN ADULT LIVER, SIGNAL = 0.81; EXPRESSED IN FETAL LIVER, SIGNAL = 0.54; EXPRESSED IN BONE MARROW, SIGNAL = 0.7
WEGGTGRGRNGRRTSQLMKT

SEQ ID NO: 27764 - protein, 66 aa, Homo sapiens
  MAP TO CHR22_110.0; EXPRESSED IN BRAIN, SIGNAL = 0.72; EXPRESSED IN PLACENTA, SIGNAL = 0.74; EXPRESSED IN LUNG, SIGNAL = 0.74; EXPRESSED IN ADULT LIVER, SIGNAL = 0.68; SWISSPROT HIT: P22147, EVALUE 1.30e+00
LPKGGITSYPQKPEPQVPRCNPHPKLAAGACPLPLPWGLAKPCELQGQPPWRVTAGEVLHFFHYLH

SEQ ID NO: 27765 - protein, 37 aa, Homo sapiens
  MAP TO AL136987.1; EXPRESSED IN BRAIN, SIGNAL = 0.89; EXPRESSED IN HELA, SIGNAL = 0.64; EXPRESSED IN LUNG, SIGNAL =   1; EXPRESSED IN ADULT LIVER, SIGNAL = 1.3; EXPRESSED IN FETAL LIVER, SIGNAL = 0.89; EXPRESSED IN PLACENTA, SIGNAL = 1.1; EXPRESSED IN BONE MARROW, SIGNAL = 0.82
QTAQYDPFSLDLVGVYKKKVNCNSQTHVTWVLSMWME

SEQ ID NO: 27766 - protein, 27 aa, Homo sapiens
  MAP TO AL133543.2; EXPRESSED IN BRAIN, SIGNAL = 1.8; EXPRESSED IN HELA, SIGNAL = 2.7; EXPRESSED IN FETAL LIVER, SIGNAL = 1.9; EXPRESSED IN PLACENTA, SIGNAL = 2.2; EXPRESSED IN LUNG, SIGNAL = 2.4; EXPRESSED IN BONE MARROW, SIGNAL =   2; EXPRESSED IN ADULT LIVER, SIGNAL =   2
GRVVTVVLQCGVRSMWTALGEAVLFYA

SEQ ID NO: 27767 - protein, 97 aa, Homo sapiens
  MAP TO AL137846.1; EXPRESSED IN PLACENTA, SIGNAL = 6.7; EXPRESSED IN LUNG, SIGNAL = 6.5; EXPRESSED IN BONE MARROW, SIGNAL = 5.8; EXPRESSED IN ADULT LIVER, SIGNAL = 5.9; EXPRESSED IN HELA, SIGNAL =   3; EXPRESSED IN BRAIN, SIGNAL = 5.6; EXPRESSED IN FETAL LIVER, SIGNAL = 4.6; EXPRESSED IN HEART, SIGNAL = 4.7
LKMNIDETFAILKCTNLILCRTTFKIKSCGGIKISIQRLYLSIKIQKRLYFSIKIQKRLYFSVKIQKRLYFSVTMANLNSLSMFLSSHLIVRFFCPQ

SEQ ID NO: 27768 - protein, 44 aa, Homo sapiens
  MAP TO AC013341.3; EXPRESSED IN FETAL LIVER, SIGNAL = 0.54; EXPRESSED IN PLACENTA, SIGNAL = 0.57; EXPRESSED IN BONE MARROW, SIGNAL = 0.46; EXPRESSED IN BRAIN, SIGNAL = 0.56
TPKLPDSHRSGLSPVIELVARTGISLFISSFSFFVKIIVRHFYV

SEQ ID NO: 27769 - protein, 42 aa, Homo sapiens
  MAP TO AL137843.1; EXPRESSED IN BONE MARROW, SIGNAL = 0.88; EXPRESSED IN BRAIN, SIGNAL = 1.2; EXPRESSED IN HELA, SIGNAL = 0.93; EXPRESSED IN HEART, SIGNAL = 1.3; EXPRESSED IN FETAL LIVER, SIGNAL = 0.83; EXPRESSED IN PLACENTA, SIGNAL = 1.2; EXPRESSED IN LUNG, SIGNAL = 0.83
MNLEADVGKMAKKDIRSLVSPQNHQCKQPHICKNNFRRAKET

SEQ ID NO: 27770 - protein, 57 aa, Homo sapiens
  MAP TO AL137178.3; EXPRESSED IN BONE MARROW, SIGNAL = 0.43; EXPRESSED IN BRAIN, SIGNAL = 0.44; EXPRESSED IN FETAL LIVER, SIGNAL = 0.42; EXPRESSED IN PLACENTA, SIGNAL = 0.47; SWISSPROT HIT: P34919, EVALUE 4.70e+00
WSGNQGVEMEVVPLNSLSMIQLAKSVLLTPKTLGYVGPELLVPNGTMLTLVSMAIVL

SEQ ID NO: 27771 - protein, 50 aa, Homo sapiens
  MAP TO AL138842.2; EXPRESSED IN BONE MARROW, SIGNAL =  18; EXPRESSED IN HELA, SIGNAL =  11; EXPRESSED IN BRAIN, SIGNAL =  13; EXPRESSED IN PLACENTA, SIGNAL =  15; EXPRESSED IN ADULT LIVER, SIGNAL =  20; EXPRESSED IN FETAL LIVER, SIGNAL =  15
PPCYMDVIPEDHRLESPTTPLLDDMDGSQDSPIFMYAPEFKFMPPPTYTE

SEQ ID NO: 27772 - protein, 22 aa, Homo sapiens
  MAP TO CHR21_67.0; EXPRESSED IN FETAL LIVER, SIGNAL = 1.1; EXPRESSED IN LUNG, SIGNAL = 0.66; EXPRESSED IN HELA, SIGNAL = 3.8; EXPRESSED IN BRAIN, SIGNAL = 1.2; EXPRESSED IN PLACENTA, SIGNAL = 0.62; EXPRESSED IN ADULT LIVER, SIGNAL = 0.69
TGPQDPTEGAPNGQCWNTGSNI

SEQ ID NO: 27773 - protein, 82 aa, Homo sapiens
  MAP TO CHR21_67.0; EXPRESSED IN FETAL LIVER, SIGNAL = 1.1; EXPRESSED IN LUNG, SIGNAL = 0.66; EXPRESSED IN HELA, SIGNAL = 3.8; EXPRESSED IN BRAIN, SIGNAL = 1.2; EXPRESSED IN PLACENTA, SIGNAL = 0.62; EXPRESSED IN ADULT LIVER, SIGNAL = 0.69; SWISSPROT HIT: Q62311, EVALUE 2.70e+00
ATGSNRRSSQWPMLEHWEQHLVKLYGIVAHSMSPYRINKNGGRDKYVGEKKQMSHARFQMTWADAPSRRCCGPPTLSVGCAQ

SEQ ID NO: 27774 - protein, 158 aa, Homo sapiens
  MAP TO AL138752.2; EXPRESSED IN LUNG, SIGNAL = 8.1; EXPRESSED IN ADULT LIVER, SIGNAL = 8.2; EXPRESSED IN HELA, SIGNAL = 4.5; EXPRESSED IN BRAIN, SIGNAL = 7.6; EXPRESSED IN PLACENTA, SIGNAL = 8.2; EXPRESSED IN FETAL LIVER, SIGNAL = 7.5; EXPRESSED IN BONE MARROW, SIGNAL = 8.2; SWISSPROT HIT: Q9NQT5, EVALUE 3.00e-45
TRELTAIKLHKLVRIQRTATAGNGKSSRAGVGSGAEAEGGYRKRCLVEPAMAEPASVAAESLAGSRARAARTVLGQVVLPGEELLLPEQEDAEGPGGAVERPLSLNARACSRVRVVCGPGLRRCGDRLLVTKCGRLRHKEPGSGSGGGVYWVDSQQKR

SEQ ID NO: 27775 - protein, 39 aa, Homo sapiens
  MAP TO AL133338.2; EXPRESSED IN PLACENTA, SIGNAL = 1.1; EXPRESSED IN LUNG, SIGNAL = 1.1; EXPRESSED IN ADULT LIVER, SIGNAL = 1.1; EXPRESSED IN BONE MARROW, SIGNAL = 1.1; EXPRESSED IN BRAIN, SIGNAL =   1; EXPRESSED IN HELA, SIGNAL = 0.77; EXPRESSED IN FETAL LIVER, SIGNAL = 0.91; SWISSPROT HIT: P47701, EVALUE 8.50e+00
FPIQRWGKKILDRLITIKQISLYIQNIPPQSCVNFTFST

SEQ ID NO: 27776 - protein, 51 aa, Homo sapiens
  MAP TO CHR22_113.0; EXPRESSED IN BONE MARROW, SIGNAL = 0.43; EXPRESSED IN BRAIN, SIGNAL = 0.51; EXPRESSED IN LUNG, SIGNAL = 0.5; SWISSPROT HIT: P47607, EVALUE 1.60e+00
QDAATRYTCEMREARTRELLFPGFWKFTDGVFIHCNAVEEGEEGEFSYGLR

SEQ ID NO: 27777 - protein, 51 aa, Homo sapiens
  MAP TO CHR21_72.0; EXPRESSED IN BRAIN, SIGNAL = 1.3; EXPRESSED IN HELA, SIGNAL = 2.7; EXPRESSED IN LUNG, SIGNAL = 0.77; EXPRESSED IN FETAL LIVER, SIGNAL = 1.2; EXPRESSED IN BONE MARROW, SIGNAL = 1.3; EXPRESSED IN ADULT LIVER, SIGNAL = 0.66
ADPTAEPLVLGTEEPVQARCHHQNPPLVNSMASASTLCPPSLALSKTLVMS

SEQ ID NO: 27778 - protein, 52 aa, Homo sapiens
  MAP TO AF239614.1; EXPRESSED IN LUNG, SIGNAL = 2.4; EXPRESSED IN FETAL LIVER, SIGNAL = 2.3; EXPRESSED IN PLACENTA, SIGNAL = 2.4; EXPRESSED IN ADULT LIVER, SIGNAL = 2.7; EXPRESSED IN BONE MARROW, SIGNAL = 2.4; EXPRESSED IN BRAIN, SIGNAL = 2.4; SWISSPROT HIT: P54296, EVALUE 3.00e-25
MEDKLAWERHTFEERISRAPEILVRLRSHTVWERMSVKLCFTVQGFPTPVVQ

SEQ ID NO: 27779 - protein, 46 aa, Homo sapiens
  MAP TO AL121876.23; EXPRESSED IN BONE MARROW, SIGNAL =   2; EXPRESSED IN HEART, SIGNAL = 1.9; EXPRESSED IN PLACENTA, SIGNAL = 2.1; EXPRESSED IN LUNG, SIGNAL =   2; EXPRESSED IN ADULT LIVER, SIGNAL = 1.7; EXPRESSED IN HELA, SIGNAL = 0.9; EXPRESSED IN BRAIN, SIGNAL = 2.1; EXPRESSED IN FETAL LIVER, SIGNAL = 1.9; SWISSPROT HIT: Q90610, EVALUE 4.00e-02
MWRSIIIQKGNALLIQEVQEEDGGNYTCELKYEGKLVRRTTELKVT

SEQ ID NO: 27780 - protein, 20 aa, Homo sapiens
  MAP TO AC011585.3; EXPRESSED IN BRAIN, SIGNAL = 0.35; EXPRESSED IN PLACENTA, SIGNAL = 0.43
WPFNMSVNMLPYTAKGTLPM

SEQ ID NO: 27781 - protein, 66 aa, Homo sapiens
  MAP TO AL135909.3; EXPRESSED IN BONE MARROW, SIGNAL =   1; EXPRESSED IN BRAIN, SIGNAL = 0.98; EXPRESSED IN HELA, SIGNAL = 0.69; EXPRESSED IN PLACENTA, SIGNAL =   1; EXPRESSED IN LUNG, SIGNAL = 0.95; EXPRESSED IN ADULT LIVER, SIGNAL =   1; SWISSPROT HIT: P48917, EVALUE 8.00e-01
MINTLLFLSEMWYWIFLWALFSSLFVHGAAGVLMFVMLQRHRQGRVISVIAVSIGFLASVTGAMIT

SEQ ID NO: 27782 - protein, 78 aa, Homo sapiens
  MAP TO AL136304.2; EXPRESSED IN BONE MARROW, SIGNAL = 1.3; EXPRESSED IN HEART, SIGNAL = 1.5; EXPRESSED IN PLACENTA, SIGNAL = 1.7; EXPRESSED IN LUNG, SIGNAL = 1.6; EXPRESSED IN ADULT LIVER, SIGNAL = 2.1; EXPRESSED IN BRAIN, SIGNAL = 1.5; EXPRESSED IN FETAL LIVER, SIGNAL = 1.4
EQQEMAQQERKQQQELHLALKQERRAQAQQGHRPYFLKKCELGTTVANRDRGAGAMVVESCVGVSLIPFKEGMKAGSH

SEQ ID NO: 27783 - protein, 19 aa, Homo sapiens
  MAP TO AL136304.2; EXPRESSED IN BONE MARROW, SIGNAL = 1.3; EXPRESSED IN HEART, SIGNAL = 1.5; EXPRESSED IN PLACENTA, SIGNAL = 1.7; EXPRESSED IN LUNG, SIGNAL = 1.6; EXPRESSED IN ADULT LIVER, SIGNAL = 2.1; EXPRESSED IN BRAIN, SIGNAL = 1.5; EXPRESSED IN FETAL LIVER, SIGNAL = 1.4
SSKKWHSRNESNSRSCTWP

SEQ ID NO: 27784 - protein, 62 aa, Homo sapiens
  MAP TO CHR22_182.0; EXPRESSED IN BRAIN, SIGNAL = 0.8; EXPRESSED IN LUNG, SIGNAL = 0.66; EXPRESSED IN ADULT LIVER, SIGNAL = 0.79; EXPRESSED IN FETAL LIVER, SIGNAL = 0.73; EXPRESSED IN BONE MARROW, SIGNAL = 0.73; SWISSPROT HIT: Q9Z0H3, EVALUE 2.00e-31
NIHVGNISLVDQFEWDMSEKENSPEKFALKLCSELGLGGEFVTTIAYSIRGQLSWHQKTYAF

SEQ ID NO: 27785 - protein, 20 aa, Homo sapiens
  MAP TO U82695.2; EXPRESSED IN FETAL LIVER, SIGNAL = 0.44; EXPRESSED IN ADULT LIVER, SIGNAL = 0.63; EXPRESSED IN PLACENTA, SIGNAL = 0.6; EXPRESSED IN LUNG, SIGNAL = 0.45; EXPRESSED IN BRAIN, SIGNAL = 0.42; SWISSPROT HIT: Q62396, EVALUE 1.50e-02
KVLYKRVMLENYSHLVSLGK

SEQ ID NO: 27786 - protein, 51 aa, Homo sapiens
  MAP TO CHR22_146.0; EXPRESSED IN BONE MARROW, SIGNAL = 0.45; EXPRESSED IN LUNG, SIGNAL = 0.52; EXPRESSED IN BRAIN, SIGNAL = 0.52; EXPRESSED IN FETAL LIVER, SIGNAL = 0.49; SWISSPROT HIT: Q9UIA0, EVALUE 4.00e-25
FCLELYNPSCRGQKIKACKTDGDGRVVEGKHESYRISATSAEERDQWIESI

SEQ ID NO: 27787 - protein, 34 aa, Homo sapiens
  MAP TO CHR22_146.0; EXPRESSED IN BONE MARROW, SIGNAL = 0.45; EXPRESSED IN LUNG, SIGNAL = 0.52; EXPRESSED IN BRAIN, SIGNAL = 0.52; EXPRESSED IN FETAL LIVER, SIGNAL = 0.49
PRPENQGLQDRWRRQGGGGQARIVPHLSHQCRGT

SEQ ID NO: 27788 - protein, 51 aa, Homo sapiens
  MAP TO CHR22_146.0; EXPRESSED IN BONE MARROW, SIGNAL = 0.45; EXPRESSED IN LUNG, SIGNAL = 0.52; EXPRESSED IN BRAIN, SIGNAL = 0.52; EXPRESSED IN FETAL LIVER, SIGNAL = 0.49; SWISSPROT HIT: P30022, EVALUE 4.80e+00
SAWSSTTLAAEARKSRPARPMATAGWWRASTNRTASQPPVPRNVTSGSSPS

SEQ ID NO: 27789 - protein, 30 aa, Homo sapiens
  MAP TO AL137795.2; EXPRESSED IN BONE MARROW, SIGNAL = 2.5; EXPRESSED IN HELA, SIGNAL = 0.61; EXPRESSED IN BRAIN, SIGNAL =   1; EXPRESSED IN PLACENTA, SIGNAL = 1.1; EXPRESSED IN LUNG, SIGNAL = 1.8; EXPRESSED IN ADULT LIVER, SIGNAL = 1.4; EXPRESSED IN FETAL LIVER, SIGNAL = 1.1
MNTHKVDWIPVQLRVKAKEMTPELSLADLE

SEQ ID NO: 27790 - protein, 17 aa, Homo sapiens
  MAP TO CHR22_86.0; EXPRESSED IN HELA, SIGNAL = 2.7; EXPRESSED IN BRAIN, SIGNAL = 0.61; EXPRESSED IN PLACENTA, SIGNAL = 0.53; EXPRESSED IN LUNG, SIGNAL = 0.56; EXPRESSED IN BONE MARROW, SIGNAL = 0.63
GQEGTLPSGGHLRPKAP

SEQ ID NO: 27791 - protein, 51 aa, Homo sapiens
  MAP TO AL138784.1; EXPRESSED IN FETAL LIVER, SIGNAL =   4; EXPRESSED IN BONE MARROW, SIGNAL = 4.5; EXPRESSED IN PLACENTA, SIGNAL = 4.9; EXPRESSED IN HELA, SIGNAL = 3.4; EXPRESSED IN BRAIN, SIGNAL = 4.5; EXPRESSED IN LUNG, SIGNAL = 4.7; SWISSPROT HIT: P37998, EVALUE 4.80e+00
MQKNQERKIKPPLTSLQHDLKTENAGTFELHGSTEINPQVQQTAPEPPHGE

SEQ ID NO: 27792 - protein, 52 aa, Homo sapiens
  MAP TO AL137790.1; EXPRESSED IN LUNG, SIGNAL = 0.54; EXPRESSED IN ADULT LIVER, SIGNAL = 0.62; EXPRESSED IN BRAIN, SIGNAL = 0.61; EXPRESSED IN FETAL LIVER, SIGNAL = 0.7; EXPRESSED IN BONE MARROW, SIGNAL = 0.63
WAHNVPGIELALKSLLLLIITIISLMMFLVYLSPIKHPTLLLRPPESLLEKS

SEQ ID NO: 27793 - protein, 55 aa, Homo sapiens
  MAP TO AL078585.18; EXPRESSED IN FETAL LIVER, SIGNAL = 1.7; EXPRESSED IN BONE MARROW, SIGNAL = 1.7; EXPRESSED IN HEART, SIGNAL = 1.3; EXPRESSED IN PLACENTA, SIGNAL = 2.2; EXPRESSED IN LUNG, SIGNAL = 1.8; EXPRESSED IN HELA, SIGNAL =   1; EXPRESSED IN BRAIN, SIGNAL = 1.5; EXPRESSED IN ADULT LIVER, SIGNAL = 2.1; SWISSPROT HIT: O80286, EVALUE 8.10e+00
CSLLCGAGRAPRVAQPNRRIERQHDRCLGCGYKRFLWALCDPSLASATAGMMRKM

SEQ ID NO: 27794 - protein, 32 aa, Homo sapiens
  MAP TO AL136443.5; EXPRESSED IN BRAIN, SIGNAL = 0.67; EXPRESSED IN FETAL LIVER, SIGNAL = 0.66; EXPRESSED IN PLACENTA, SIGNAL = 0.51; EXPRESSED IN LUNG, SIGNAL = 0.63; EXPRESSED IN BONE MARROW, SIGNAL = 0.5; SWISSPROT HIT: P22648, EVALUE 6.60e+00
GTGTPWASQRTHTVPTLCSAALPQTWTSTTGR

SEQ ID NO: 27795 - protein, 34 aa, Homo sapiens
  MAP TO AL139144.1; EXPRESSED IN HELA, SIGNAL = 4.7; EXPRESSED IN HEART, SIGNAL =   7; EXPRESSED IN PLACENTA, SIGNAL = 9.9; EXPRESSED IN LUNG, SIGNAL = 9.4; EXPRESSED IN BONE MARROW, SIGNAL = 8.5; EXPRESSED IN BRAIN, SIGNAL = 7.3; EXPRESSED IN ADULT LIVER, SIGNAL =  11; EXPRESSED IN FETAL LIVER, SIGNAL = 8.7
MPWKLPGQAGPNRKDLESCRGWDHVADLAPVEWL

SEQ ID NO: 27796 - protein, 69 aa, Homo sapiens
  MAP TO AC012661.4; EXPRESSED IN LUNG, SIGNAL = 2.2; EXPRESSED IN BONE MARROW, SIGNAL = 1.1; EXPRESSED IN ADULT LIVER, SIGNAL = 5.2; EXPRESSED IN BRAIN, SIGNAL = 1.1; EXPRESSED IN FETAL LIVER, SIGNAL = 1.7
MRFSAGLRWGPGLGEGELCREAAAVGSSPPAPPGCTRPPGAPQAPAESAPLEGSDHPAQNLILTFQFDA

SEQ ID NO: 27797 - protein, 38 aa, Homo sapiens
  MAP TO AL138843.2; EXPRESSED IN PLACENTA, SIGNAL = 2.9; EXPRESSED IN LUNG, SIGNAL = 2.6; EXPRESSED IN BONE MARROW, SIGNAL = 2.6; EXPRESSED IN HELA, SIGNAL = 1.4; EXPRESSED IN BRAIN, SIGNAL = 2.6; EXPRESSED IN FETAL LIVER, SIGNAL = 2.7; EXPRESSED IN HEART, SIGNAL = 1.9; SWISSPROT HIT: Q9UL18, EVALUE 1.00e-13
MGKPIKLLANCFQVEIPKIDVYLYEVDIKPDKCPRRVN

SEQ ID NO: 27798 - protein, 25 aa, Homo sapiens
  MAP TO AL138843.2; EXPRESSED IN PLACENTA, SIGNAL = 2.9; EXPRESSED IN LUNG, SIGNAL = 2.6; EXPRESSED IN BONE MARROW, SIGNAL = 2.6; EXPRESSED IN HELA, SIGNAL = 1.4; EXPRESSED IN BRAIN, SIGNAL = 2.6; EXPRESSED IN FETAL LIVER, SIGNAL = 2.7; EXPRESSED IN HEART, SIGNAL = 1.9
WANPLNCWLTVFKLKSQRLMSTSMR

SEQ ID NO: 27799 - protein, 69 aa, Homo sapiens
  MAP TO AL008639.15; EXPRESSED IN BONE MARROW, SIGNAL = 4.9; EXPRESSED IN PLACENTA, SIGNAL = 3.8; EXPRESSED IN LUNG, SIGNAL = 4.7; EXPRESSED IN HELA, SIGNAL = 4.4; EXPRESSED IN FETAL LIVER, SIGNAL = 3.7; EXPRESSED IN HEART, SIGNAL = 3.9; EXPRESSED IN ADULT LIVER, SIGNAL = 4.2; EXPRESSED IN BRAIN, SIGNAL = 4.1; SWISSPROT HIT: P98089, EVALUE 2.50e+00
RSTSTTPNWEPTSVTTPPCPCIWVTRRVPTTASRALAWASRYTIPSTALKACSQWGSLGCRQLPRTRGG

SEQ ID NO: 27800 - protein, 110 aa, Homo sapiens
  MAP TO AC016763.5; EXPRESSED IN BONE MARROW, SIGNAL = 1.1; EXPRESSED IN PLACENTA, SIGNAL = 1.3; EXPRESSED IN BRAIN, SIGNAL =   1; EXPRESSED IN HEART, SIGNAL = 1.3; EXPRESSED IN LUNG, SIGNAL = 1.2; SWISSPROT HIT: P38739, EVALUE 1.30e-01
TSKTLYSTNMALSSSPGISAVQLVRTVGHTTTNHLIPALCTSSPQTLPMNNSCLTNAVHLNNVSVVSPVNVHINTRTSAPSPTALKLATVAASMDRVPKVTPSSAISSIA

SEQ ID NO: 27801 - protein, 36 aa, Homo sapiens
  MAP TO AL133553.2; EXPRESSED IN BONE MARROW, SIGNAL = 1.4; EXPRESSED IN LUNG, SIGNAL = 1.9; EXPRESSED IN BRAIN, SIGNAL = 1.4; EXPRESSED IN HEART, SIGNAL = 1.3; EXPRESSED IN PLACENTA, SIGNAL = 2.3; EXPRESSED IN ADULT LIVER, SIGNAL = 2.4; EXPRESSED IN FETAL LIVER, SIGNAL = 1.6
PFSPGVVPLNMPYLLVLFRIILLITQYRSVGKKAML

SEQ ID NO: 27802 - protein, 63 aa, Homo sapiens
  MAP TO AL138886.1; EXPRESSED IN PLACENTA, SIGNAL = 0.91; EXPRESSED IN LUNG, SIGNAL = 0.98; EXPRESSED IN ADULT LIVER, SIGNAL = 0.84; EXPRESSED IN BONE MARROW, SIGNAL = 1.1; EXPRESSED IN BRAIN, SIGNAL = 1.1; SWISSPROT HIT: Q06180, EVALUE 1.20e+00
ESTFIEPACQIHLPWWISLLRPPSSAIFSIFLLSKFPCSIYTTHKEEMQMINTGESVDQRKAN

SEQ ID NO: 27803 - protein, 49 aa, Homo sapiens
  MAP TO AL138886.1; EXPRESSED IN PLACENTA, SIGNAL = 0.91; EXPRESSED IN LUNG, SIGNAL = 0.98; EXPRESSED IN ADULT LIVER, SIGNAL = 0.84; EXPRESSED IN BONE MARROW, SIGNAL = 1.1; EXPRESSED IN BRAIN, SIGNAL = 1.1
SPRSLSRLARSISPGGFHSLGLQALPSSLSSSFQNFLVLSIQLTRKKCK

SEQ ID NO: 27804 - protein, 27 aa, Homo sapiens
  MAP TO AL133338.2; EXPRESSED IN BRAIN, SIGNAL = 0.47; EXPRESSED IN FETAL LIVER, SIGNAL = 0.51; EXPRESSED IN PLACENTA, SIGNAL = 0.46; EXPRESSED IN LUNG, SIGNAL = 0.48
ALRSFSNVTKQDNYNEEVADLKVDLLK

SEQ ID NO: 27805 - protein, 21 aa, Homo sapiens
  MAP TO AL133338.2; EXPRESSED IN BRAIN, SIGNAL = 0.47; EXPRESSED IN FETAL LIVER, SIGNAL = 0.51; EXPRESSED IN PLACENTA, SIGNAL = 0.46; EXPRESSED IN LUNG, SIGNAL = 0.48
EPCVPFQMSPSKIIIMKKWLT

SEQ ID NO: 27806 - protein, 50 aa, Homo sapiens
  MAP TO AF235096.1; EXPRESSED IN FETAL LIVER, SIGNAL = 0.59; EXPRESSED IN BONE MARROW, SIGNAL = 0.61; EXPRESSED IN PLACENTA, SIGNAL = 0.75; EXPRESSED IN LUNG, SIGNAL = 0.82; EXPRESSED IN BRAIN, SIGNAL = 0.68; SWISSPROT HIT: Q9UN79, EVALUE 3.70e+00
KHVKKDERRYYEELLKYSRDHLMLYPNHQSDIMVKGLRITPFSYYTGIME

SEQ ID NO: 27807 - protein, 44 aa, Homo sapiens
  MAP TO AC022528.3; EXPRESSED IN BONE MARROW, SIGNAL = 0.67; EXPRESSED IN PLACENTA, SIGNAL = 0.72; EXPRESSED IN LUNG, SIGNAL = 0.83; EXPRESSED IN BRAIN, SIGNAL = 0.53
MGNAVIKLAFLPAMWVMMVQSGRSQVASLNHQEEDGHNYLTGIQ

SEQ ID NO: 27808 - protein, 55 aa, Homo sapiens
  MAP TO AJ239319.2; EXPRESSED IN FETAL LIVER, SIGNAL = 0.42; EXPRESSED IN BONE MARROW, SIGNAL = 0.42; EXPRESSED IN LUNG, SIGNAL = 0.45; EXPRESSED IN BRAIN, SIGNAL = 0.52; SWISSPROT HIT: P21675, EVALUE 8.60e-02
RKFALFDEQHREEMRKERRRIQEQLRRLKRNQEKEKLKGPPEKKPKKMKERPDLK

SEQ ID NO: 27809 - protein, 24 aa, Homo sapiens
  MAP TO AJ239319.2; EXPRESSED IN FETAL LIVER, SIGNAL = 0.42; EXPRESSED IN BONE MARROW, SIGNAL = 0.42; EXPRESSED IN LUNG, SIGNAL = 0.45; EXPRESSED IN BRAIN, SIGNAL = 0.52; SWISSPROT HIT: O75795, EVALUE 8.80e+00
ENLPFLMNNIGKRCEKNGGGFKSN

SEQ ID NO: 27810 - protein, 45 aa, Homo sapiens
  MAP TO CHR21_6.0; EXPRESSED IN FETAL LIVER, SIGNAL = 1.3; EXPRESSED IN PLACENTA, SIGNAL = 0.84; EXPRESSED IN ADULT LIVER, SIGNAL = 1.1; EXPRESSED IN BONE MARROW, SIGNAL = 1.3; EXPRESSED IN HELA, SIGNAL = 2.9; EXPRESSED IN BRAIN, SIGNAL = 1.3; EXPRESSED IN HEART, SIGNAL = 1.1; EXPRESSED IN LUNG, SIGNAL = 0.93
GKIRQTSFQIQISNVPLQSADARLVVWLRRSKGYIKAILWTVQTV

SEQ ID NO: 27811 - protein, 31 aa, Homo sapiens
  MAP TO AL139141.1; EXPRESSED IN HEART, SIGNAL =   6; EXPRESSED IN FETAL LIVER, SIGNAL = 5.3; EXPRESSED IN LUNG, SIGNAL = 6.2; EXPRESSED IN ADULT LIVER, SIGNAL = 5.6; EXPRESSED IN BONE MARROW, SIGNAL = 5.6; EXPRESSED IN BRAIN, SIGNAL = 5.6; EXPRESSED IN HELA, SIGNAL = 3.3; SWISSPROT HIT: Q05823, EVALUE 5.40e-02
SACEFLDIVELLLQSGADPTLRDQDGCLPEE

SEQ ID NO: 27812 - protein, 36 aa, Homo sapiens
  MAP TO CHR22_206.0; EXPRESSED IN BONE MARROW, SIGNAL = 1.6; EXPRESSED IN BRAIN, SIGNAL = 1.6; EXPRESSED IN HELA, SIGNAL = 2.2; EXPRESSED IN HEART, SIGNAL = 1.6; EXPRESSED IN LUNG, SIGNAL = 1.8; EXPRESSED IN FETAL LIVER, SIGNAL = 1.8; EXPRESSED IN ADULT LIVER, SIGNAL = 1.6; SWISSPROT HIT: P12649, EVALUE 5.00e+00
GATTARLQCTREVSRWQCRIHAACSTWWIHAPESTD

SEQ ID NO: 27813 - protein, 35 aa, Homo sapiens
  MAP TO CHR22_206.0; EXPRESSED IN BONE MARROW, SIGNAL = 1.6; EXPRESSED IN BRAIN, SIGNAL = 1.6; EXPRESSED IN HELA, SIGNAL = 2.2; EXPRESSED IN HEART, SIGNAL = 1.6; EXPRESSED IN LUNG, SIGNAL = 1.8; EXPRESSED IN FETAL LIVER, SIGNAL = 1.8; EXPRESSED IN ADULT LIVER, SIGNAL = 1.6
WSHHSETPVHQGGFTLAVQNPCCMFDLVDTRPREH

SEQ ID NO: 27814 - protein, 29 aa, Homo sapiens
  MAP TO AL138995.1; EXPRESSED IN HELA, SIGNAL = 4.5; EXPRESSED IN BRAIN, SIGNAL = 1.9; EXPRESSED IN HEART, SIGNAL = 1.9; EXPRESSED IN PLACENTA, SIGNAL = 1.3; EXPRESSED IN FETAL LIVER, SIGNAL = 1.8; EXPRESSED IN BONE MARROW, SIGNAL = 1.4
ATPIQTSGMGSSSHLLLHSQSPWLLHPSP

SEQ ID NO: 27815 - protein, 58 aa, Homo sapiens
  MAP TO CHR21_60.0; EXPRESSED IN HELA, SIGNAL = 7.9; EXPRESSED IN BRAIN, SIGNAL =   2; EXPRESSED IN PLACENTA, SIGNAL = 1.2; EXPRESSED IN ADULT LIVER, SIGNAL = 5.9; EXPRESSED IN FETAL LIVER, SIGNAL = 2.7; EXPRESSED IN BONE MARROW, SIGNAL = 2.3; SWISSPROT HIT: Q15428, EVALUE 1.60e+00
ELREAEPGLTLLLRQEHHPQDVGEALRVPLRVRPPELAGVHARGTARHPGRPARHGGL

SEQ ID NO: 27816 - protein, 36 aa, Homo sapiens
  MAP TO AC015930.3; EXPRESSED IN BONE MARROW, SIGNAL = 0.53; EXPRESSED IN LUNG, SIGNAL = 0.5; EXPRESSED IN BRAIN, SIGNAL = 0.53
TTTRTTRTTTTTTKMHKTPKMAHWVGRKPKLPLPPS

SEQ ID NO: 27817 - protein, 36 aa, Homo sapiens
  MAP TO AB017653.1; EXPRESSED IN BONE MARROW, SIGNAL = 0.67; EXPRESSED IN BRAIN, SIGNAL = 0.67; EXPRESSED IN PLACENTA, SIGNAL = 0.7; EXPRESSED IN LUNG, SIGNAL = 0.54; EXPRESSED IN FETAL LIVER, SIGNAL = 0.71; EXPRESSED IN ADULT LIVER, SIGNAL = 0.73
LPTSLSMRRIITGITIMKAEKYHNLLSVSWRARKVR

SEQ ID NO: 27818 - protein, 34 aa, Homo sapiens
  MAP TO CHR22_114.0; EXPRESSED IN BONE MARROW, SIGNAL = 0.97; EXPRESSED IN LUNG, SIGNAL = 1.2; EXPRESSED IN ADULT LIVER, SIGNAL = 1.1; EXPRESSED IN PLACENTA, SIGNAL = 0.9; EXPRESSED IN HELA, SIGNAL = 0.78; EXPRESSED IN BRAIN, SIGNAL = 1.1; EXPRESSED IN FETAL LIVER, SIGNAL = 0.78; SWISSPROT HIT: Q06712, EVALUE 3.90e+00
TEEPPTPGDAAQLPQPHGIHSQRPQACGCPVPPA

SEQ ID NO: 27819 - protein, 61 aa, Homo sapiens
  MAP TO CHR22_114.0; EXPRESSED IN BONE MARROW, SIGNAL = 0.97; EXPRESSED IN LUNG, SIGNAL = 1.2; EXPRESSED IN ADULT LIVER, SIGNAL = 1.1; EXPRESSED IN PLACENTA, SIGNAL = 0.9; EXPRESSED IN HELA, SIGNAL = 0.78; EXPRESSED IN BRAIN, SIGNAL = 1.1; EXPRESSED IN FETAL LIVER, SIGNAL = 0.78; SWISSPROT HIT: P32019, EVALUE 3.00e-06
AKKRKPAWTDRILWKVKAPGGGPSPSGRKSHRLQVTQHSYRSHMEYTVSDHKPVAAQFLLQ

SEQ ID NO: 27820 - protein, 79 aa, Homo sapiens
  MAP TO U82695.2; EXPRESSED IN BONE MARROW, SIGNAL =   2; EXPRESSED IN BRAIN, SIGNAL = 1.7; EXPRESSED IN PLACENTA, SIGNAL = 6.6; EXPRESSED IN LUNG, SIGNAL = 4.4; EXPRESSED IN ADULT LIVER, SIGNAL = 4.9; EXPRESSED IN FETAL LIVER, SIGNAL = 2.4; SWISSPROT HIT: P21810, EVALUE 3.00e-34
FEQRGFWDFTLDDGPFMMNDEEASGADTSGVLDPDSVTPTYSAMCPFGCHCHLRVVQCSDLGLSLSDGERGMQGGSGAA

SEQ ID NO: 27821 - protein, 28 aa, Homo sapiens
  MAP TO CHR22_9.0; EXPRESSED IN HELA, SIGNAL = 1.2; EXPRESSED IN BRAIN, SIGNAL = 2.1; EXPRESSED IN HEART, SIGNAL = 2.4; EXPRESSED IN FETAL LIVER, SIGNAL = 1.9; EXPRESSED IN ADULT LIVER, SIGNAL =   2; EXPRESSED IN BONE MARROW, SIGNAL = 1.9
LLEIINSIEPAQKTQEEKPNHVPQLHRV

SEQ ID NO: 27822 - protein, 27 aa, Homo sapiens
  MAP TO AL137843.1; EXPRESSED IN BONE MARROW, SIGNAL =   3; EXPRESSED IN PLACENTA, SIGNAL = 3.8; EXPRESSED IN LUNG, SIGNAL = 3.7; EXPRESSED IN ADULT LIVER, SIGNAL = 5.9; EXPRESSED IN HELA, SIGNAL = 1.4; EXPRESSED IN BRAIN, SIGNAL = 3.5; EXPRESSED IN FETAL LIVER, SIGNAL = 3.3; EXPRESSED IN HEART, SIGNAL = 3.2
RLRLHRSDPILQLFSSTLCWNLYCILS

SEQ ID NO: 27823 - protein, 47 aa, Homo sapiens
  MAP TO CHR21_66.0; EXPRESSED IN LUNG, SIGNAL = 0.92; EXPRESSED IN FETAL LIVER, SIGNAL = 1.5; EXPRESSED IN ADULT LIVER, SIGNAL = 0.89; EXPRESSED IN BONE MARROW, SIGNAL = 1.9; EXPRESSED IN BRAIN, SIGNAL = 1.5; EXPRESSED IN HELA, SIGNAL = 3.8; EXPRESSED IN HEART, SIGNAL = 1.2; SWISSPROT HIT: O88700, EVALUE 8.30e+00
YAPTKCSQGHRELSGPDKFQQLEILHRPGQRGLHKGSTGSGRSCPWC

SEQ ID NO: 27824 - protein, 42 aa, Homo sapiens
  MAP TO AL135926.3; EXPRESSED IN FETAL LIVER, SIGNAL = 0.69; EXPRESSED IN PLACENTA, SIGNAL = 0.66; EXPRESSED IN BONE MARROW, SIGNAL = 0.53; EXPRESSED IN LUNG, SIGNAL = 0.6; EXPRESSED IN ADULT LIVER, SIGNAL = 0.73; EXPRESSED IN BRAIN, SIGNAL = 0.54
CFFSHVMGQGLGFMEEKQGQEEVEEEEEKQELRNPVASELQT

SEQ ID NO: 27825 - protein, 77 aa, Homo sapiens
  MAP TO CHR22_73.0; EXPRESSED IN HELA, SIGNAL = 3.2; EXPRESSED IN BRAIN, SIGNAL =   1; EXPRESSED IN LUNG, SIGNAL = 0.81; EXPRESSED IN FETAL LIVER, SIGNAL = 0.77; EXPRESSED IN BONE MARROW, SIGNAL = 0.78; EXPRESSED IN ADULT LIVER, SIGNAL = 0.8; SWISSPROT HIT: O75791, EVALUE 2.00e-14
GHRGNSLDRRSQGGPHLSGAVGEEIRPSMNRKLSDHPPTLPLQQHQHQPQPPQYAPAPQQLQQPPQQRYLQHHHFHQ

SEQ ID NO: 27826 - protein, 28 aa, Homo sapiens
  MAP TO CHR22_73.0; EXPRESSED IN HELA, SIGNAL = 3.2; EXPRESSED IN BRAIN, SIGNAL =   1; EXPRESSED IN LUNG, SIGNAL = 0.81; EXPRESSED IN FETAL LIVER, SIGNAL = 0.77; EXPRESSED IN BONE MARROW, SIGNAL = 0.78; EXPRESSED IN ADULT LIVER, SIGNAL = 0.8
VTGATAWTGGPREAHTSVGLWEKKSDLR

SEQ ID NO: 27827 - protein, 82 aa, Homo sapiens
  MAP TO AL137067.3; EXPRESSED IN BRAIN, SIGNAL = 1.3; EXPRESSED IN PLACENTA, SIGNAL =  16; EXPRESSED IN LUNG, SIGNAL = 6.9; EXPRESSED IN ADULT LIVER, SIGNAL = 6.8; EXPRESSED IN FETAL LIVER, SIGNAL = 4.1; EXPRESSED IN BONE MARROW, SIGNAL = 1.6
LTRSTSSGSCMKRRSGSCSPRSPTCLWCCPWTTAALGTWTASSLRSRCSMRRLPTAAGLRLRACTRSSMRSCRRWLGSTGMT

SEQ ID NO: 27828 - protein, 38 aa, Homo sapiens
  MAP TO CHR22_140.0; EXPRESSED IN LUNG, SIGNAL = 0.61; EXPRESSED IN ADULT LIVER, SIGNAL = 0.6; EXPRESSED IN FETAL LIVER, SIGNAL = 0.61; EXPRESSED IN PLACENTA, SIGNAL = 0.54; EXPRESSED IN BONE MARROW, SIGNAL = 0.62; EXPRESSED IN HELA, SIGNAL = 1.9; EXPRESSED IN BRAIN, SIGNAL = 0.66
VSWEAVSCLGTSSTFAQMPQTLLTSFKGAPPSEPAMSV

SEQ ID NO: 27829 - protein, 145 aa, Homo sapiens
  MAP TO AL133476.4; EXPRESSED IN FETAL LIVER, SIGNAL = 3.2; EXPRESSED IN BONE MARROW, SIGNAL = 3.9; EXPRESSED IN PLACENTA, SIGNAL = 5.1; EXPRESSED IN LUNG, SIGNAL = 4.7; EXPRESSED IN BRAIN, SIGNAL = 3.4; SWISSPROT HIT: O08788, EVALUE 1.60e+00
QPAPLAAPAAQVSVPAPSGEPQASTPRATGRGARKAGSEPETSRPSPLGSYSPIRSVGPFGPSTDSSASTSCSPPPEQPTATESLPPWSHSCPSAVRPATSQQPQKEDQKILTLTEYRLHGTGSLPPLGSWRSGLSRAESLARGG

SEQ ID NO: 27830 - protein, 35 aa, Homo sapiens
  MAP TO AL133476.4; EXPRESSED IN FETAL LIVER, SIGNAL = 3.2; EXPRESSED IN BONE MARROW, SIGNAL = 3.9; EXPRESSED IN PLACENTA, SIGNAL = 5.1; EXPRESSED IN LUNG, SIGNAL = 4.7; EXPRESSED IN BRAIN, SIGNAL = 3.4
SSPQPQKACPHGATPVLLLSGLPPPSSRRRRIRRY

SEQ ID NO: 27831 - protein, 69 aa, Homo sapiens
  MAP TO CHR21_66.0; EXPRESSED IN FETAL LIVER, SIGNAL = 1.3; EXPRESSED IN LUNG, SIGNAL = 0.89; EXPRESSED IN PLACENTA, SIGNAL = 0.83; EXPRESSED IN ADULT LIVER, SIGNAL =   1; EXPRESSED IN BONE MARROW, SIGNAL = 1.4; EXPRESSED IN HELA, SIGNAL = 2.9; EXPRESSED IN BRAIN, SIGNAL = 1.3; SWISSPROT HIT: P57075, EVALUE 1.00e-36
TLRALFQYKPQNVDELTLSPGDYIFVDPTQQDEASEGWVIGISQRTGCRGFLPENYTDRASESDTWVKH

SEQ ID NO: 27832 - protein, 31 aa, Homo sapiens
  MAP TO AL138967.2; EXPRESSED IN PLACENTA, SIGNAL = 1.4; EXPRESSED IN ADULT LIVER, SIGNAL = 1.1; EXPRESSED IN BONE MARROW, SIGNAL = 0.9; EXPRESSED IN LUNG, SIGNAL = 0.99; EXPRESSED IN BRAIN, SIGNAL = 0.79; EXPRESSED IN HELA, SIGNAL = 0.62; EXPRESSED IN FETAL LIVER, SIGNAL = 0.98
APYEIDAIISGILYMKKLRQERLGVWPKIPE

SEQ ID NO: 27833 - protein, 52 aa, Homo sapiens
  MAP TO CHR21_67.0; EXPRESSED IN PLACENTA, SIGNAL = 0.9; EXPRESSED IN FETAL LIVER, SIGNAL = 1.7; EXPRESSED IN ADULT LIVER, SIGNAL = 1.1; EXPRESSED IN BONE MARROW, SIGNAL = 1.7; EXPRESSED IN BRAIN, SIGNAL = 1.5; EXPRESSED IN HELA, SIGNAL = 3.1; EXPRESSED IN LUNG, SIGNAL =   1; SWISSPROT HIT: O76083, EVALUE 1.00e-25
YQINARTELAVRYNDISPLENHHCAVAFQILAEPECNIFSNIPPDGFKQIRQ

SEQ ID NO: 27834 - protein, 51 aa, Homo sapiens
  MAP TO CHR21_67.0; EXPRESSED IN PLACENTA, SIGNAL = 0.9; EXPRESSED IN FETAL LIVER, SIGNAL = 1.7; EXPRESSED IN ADULT LIVER, SIGNAL = 1.1; EXPRESSED IN BONE MARROW, SIGNAL = 1.7; EXPRESSED IN BRAIN, SIGNAL = 1.5; EXPRESSED IN HELA, SIGNAL = 3.1; EXPRESSED IN LUNG, SIGNAL =   1
TRSMPAQSWRSATMTSHRWRTTTAPWPSRSSPSLSATSSPTSHLMGSSRSD

SEQ ID NO: 27835 - protein, 52 aa, Homo sapiens
  MAP TO AL138839.1; EXPRESSED IN PLACENTA, SIGNAL = 1.1; EXPRESSED IN ADULT LIVER, SIGNAL =   1; EXPRESSED IN FETAL LIVER, SIGNAL = 0.92; EXPRESSED IN BONE MARROW, SIGNAL = 0.87; EXPRESSED IN BRAIN, SIGNAL = 1.1; EXPRESSED IN HELA, SIGNAL = 0.96; SWISSPROT HIT: P01029, EVALUE 2.10e+00
MELALNPTQQGAKQAPCAEKFSSCSKFIETLGHNQLNGQLCTGKMKPVEYPT

SEQ ID NO: 27836 - protein, 21 aa, Homo sapiens
  MAP TO CHR22_226.0; EXPRESSED IN HELA, SIGNAL =   3; EXPRESSED IN FETAL LIVER, SIGNAL = 1.2; EXPRESSED IN HEART, SIGNAL = 1.4; EXPRESSED IN PLACENTA, SIGNAL = 1.1; EXPRESSED IN LUNG, SIGNAL = 1.1; EXPRESSED IN BONE MARROW, SIGNAL = 1.6; EXPRESSED IN ADULT LIVER, SIGNAL = 1.1; EXPRESSED IN BRAIN, SIGNAL = 1.5
ACCHLPGLHDVQGLGEPSLQP

SEQ ID NO: 27837 - protein, 21 aa, Homo sapiens
  MAP TO CHR22_226.0; EXPRESSED IN HELA, SIGNAL =   3; EXPRESSED IN FETAL LIVER, SIGNAL = 1.2; EXPRESSED IN HEART, SIGNAL = 1.4; EXPRESSED IN PLACENTA, SIGNAL = 1.1; EXPRESSED IN LUNG, SIGNAL = 1.1; EXPRESSED IN BONE MARROW, SIGNAL = 1.6; EXPRESSED IN ADULT LIVER, SIGNAL = 1.1; EXPRESSED IN BRAIN, SIGNAL = 1.5
PAVISLDFTMYRVLVNPPCSQ

SEQ ID NO: 27838 - protein, 41 aa, Homo sapiens
  MAP TO CHR22_83.0; EXPRESSED IN HELA, SIGNAL = 2.9; EXPRESSED IN BRAIN, SIGNAL = 1.3; EXPRESSED IN FETAL LIVER, SIGNAL = 2.5; EXPRESSED IN BONE MARROW, SIGNAL = 0.98; EXPRESSED IN PLACENTA, SIGNAL = 2.2; EXPRESSED IN LUNG, SIGNAL = 1.3; EXPRESSED IN ADULT LIVER, SIGNAL = 2.7; SWISSPROT HIT: Q9UJY5, EVALUE 4.00e-17
YLGSRTSEKVKNKILELLYSWTVGLPEEVKIAEAYQMLKKQ

SEQ ID NO: 27839 - protein, 51 aa, Homo sapiens
  MAP TO CHR22_83.0; EXPRESSED IN HELA, SIGNAL = 2.9; EXPRESSED IN BRAIN, SIGNAL = 1.3; EXPRESSED IN FETAL LIVER, SIGNAL = 2.5; EXPRESSED IN BONE MARROW, SIGNAL = 0.98; EXPRESSED IN PLACENTA, SIGNAL = 2.2; EXPRESSED IN LUNG, SIGNAL = 1.3; EXPRESSED IN ADULT LIVER, SIGNAL = 2.7; SWISSPROT HIT: Q9ULV5, EVALUE 1.30e+00
QRPPHCVPEVSGLSDIGEGEEQDLGAPLQLDSGPARGGENRRGLPDAKEAG

SEQ ID NO: 27840 - protein, 31 aa, Homo sapiens
  MAP TO CHR22_147.0; EXPRESSED IN BONE MARROW, SIGNAL = 0.45; EXPRESSED IN PLACENTA, SIGNAL = 0.46; EXPRESSED IN ADULT LIVER, SIGNAL = 0.58; EXPRESSED IN HELA, SIGNAL = 1.6; EXPRESSED IN BRAIN, SIGNAL = 0.52
FTQQQPRLQPGPTASECPPPCSQWLPFLPDA

SEQ ID NO: 27841 - protein, 44 aa, Homo sapiens
  MAP TO CHR22_36.0; EXPRESSED IN BONE MARROW, SIGNAL = 3.8; EXPRESSED IN BRAIN, SIGNAL = 2.6; EXPRESSED IN FETAL LIVER, SIGNAL = 3.2; EXPRESSED IN PLACENTA, SIGNAL = 1.8; EXPRESSED IN LUNG, SIGNAL = 2.7; EXPRESSED IN ADULT LIVER, SIGNAL = 1.9; SWISSPROT HIT: P28280, EVALUE 2.20e+00
FYYEQRAGQGRGLSPWQRLSSWWPGHCAAPPTSSWCGCVFPPFS

SEQ ID NO: 27842 - protein, 103 aa, Homo sapiens
  MAP TO CHR21_72.0; EXPRESSED IN BONE MARROW, SIGNAL = 1.5; EXPRESSED IN BRAIN, SIGNAL = 1.4; EXPRESSED IN HELA, SIGNAL = 3.6; EXPRESSED IN FETAL LIVER, SIGNAL = 1.3; EXPRESSED IN LUNG, SIGNAL = 0.76; EXPRESSED IN PLACENTA, SIGNAL = 0.71; EXPRESSED IN ADULT LIVER, SIGNAL = 0.86; SWISSPROT HIT: O27276, EVALUE 1.10e+00
AHMLPDEEAGDQTKDTDHAQAGDQTKDTDHAQARDQTKDTDHAQAVQLVQSQVEITRAGAQRATSQWLQILVSDSWVLGELPFIHRALRLSSELDLDFDGWKE

SEQ ID NO: 27843 - protein, 64 aa, Homo sapiens
  MAP TO CHR21_61.0; EXPRESSED IN BONE MARROW, SIGNAL = 2.1; EXPRESSED IN BRAIN, SIGNAL = 1.6; EXPRESSED IN HEART, SIGNAL = 1.2; EXPRESSED IN PLACENTA, SIGNAL = 1.2; EXPRESSED IN LUNG, SIGNAL = 1.6; EXPRESSED IN ADULT LIVER, SIGNAL = 1.1; SWISSPROT HIT: P20591, EVALUE 2.00e-29
VAENNLCSQYEEKVRPCIDLIDSLRALGVEQDLALPAIAVIGDQSSGKSSVLEALSGVALPRGS

SEQ ID NO: 27844 - protein, 93 aa, Homo sapiens
  MAP TO AC017013.4; EXPRESSED IN BONE MARROW, SIGNAL = 2.7; EXPRESSED IN HEART, SIGNAL = 2.5; EXPRESSED IN ADULT LIVER, SIGNAL = 2.4; EXPRESSED IN HELA, SIGNAL = 2.2; EXPRESSED IN BRAIN, SIGNAL = 2.3; EXPRESSED IN PLACENTA, SIGNAL = 2.8; EXPRESSED IN LUNG, SIGNAL = 2.6; EXPRESSED IN FETAL LIVER, SIGNAL = 2.2
KKKKKEKEKEKESKRRRRRRRRRRRRRRRSRRRRRRRRRKRRRRKEEEEEEKKKKKRRRRKEEEEEEKKKKKRRRRRRGRRRRRRRRRKELGE

SEQ ID NO: 27845 - protein, 72 aa, Homo sapiens
  MAP TO CHR21_72.0; EXPRESSED IN PLACENTA, SIGNAL = 0.99; EXPRESSED IN BONE MARROW, SIGNAL = 1.9; EXPRESSED IN ADULT LIVER, SIGNAL = 1.4; EXPRESSED IN HELA, SIGNAL = 4.1; EXPRESSED IN BRAIN, SIGNAL = 1.5; EXPRESSED IN FETAL LIVER, SIGNAL = 1.7; EXPRESSED IN LUNG, SIGNAL = 1.1; SWISSPROT HIT: Q9NRZ7, EVALUE 6.00e-33
DALQEIYNQKGMFPGEQFKPARRPWTLLNFLSWATILLSPLFSFVLGVFASGSPLLILTFLGFVGAGNGHCR

SEQ ID NO: 27846 - protein, 37 aa, Homo sapiens
  MAP TO AC015855.4; EXPRESSED IN HEART, SIGNAL = 3.4; EXPRESSED IN PLACENTA, SIGNAL = 4.1; EXPRESSED IN LUNG, SIGNAL = 3.6; EXPRESSED IN HELA, SIGNAL = 2.4; EXPRESSED IN FETAL LIVER, SIGNAL = 3.8; EXPRESSED IN ADULT LIVER, SIGNAL = 4.1; EXPRESSED IN BONE MARROW, SIGNAL = 3.9; EXPRESSED IN BRAIN, SIGNAL = 3.4
MAAGDGSSSVGERVGATWALRHLWNGGNSTVGFQGKG

SEQ ID NO: 27847 - protein, 37 aa, Homo sapiens
  MAP TO AC015855.4; EXPRESSED IN HEART, SIGNAL = 3.4; EXPRESSED IN PLACENTA, SIGNAL = 4.1; EXPRESSED IN LUNG, SIGNAL = 3.6; EXPRESSED IN HELA, SIGNAL = 2.4; EXPRESSED IN FETAL LIVER, SIGNAL = 3.8; EXPRESSED IN ADULT LIVER, SIGNAL = 4.1; EXPRESSED IN BONE MARROW, SIGNAL = 3.9; EXPRESSED IN BRAIN, SIGNAL = 3.4
WLLGTGAALLERGWVLPGHSVTCGMVAIAPSASKARE

SEQ ID NO: 27848 - protein, 25 aa, Homo sapiens
  MAP TO AC011266.3; EXPRESSED IN PLACENTA, SIGNAL = 0.8; EXPRESSED IN LUNG, SIGNAL = 0.67; EXPRESSED IN BRAIN, SIGNAL = 0.74; EXPRESSED IN ADULT LIVER, SIGNAL = 0.78; EXPRESSED IN FETAL LIVER, SIGNAL = 0.79; EXPRESSED IN BONE MARROW, SIGNAL = 0.89
MSDERQIPTNEIRLSLTILRSETLE

SEQ ID NO: 27849 - protein, 56 aa, Homo sapiens
  MAP TO CHR22_16.0; EXPRESSED IN PLACENTA, SIGNAL = 0.9; EXPRESSED IN BRAIN, SIGNAL = 0.72; EXPRESSED IN ADULT LIVER, SIGNAL = 0.58; EXPRESSED IN FETAL LIVER, SIGNAL = 0.59; EXPRESSED IN BONE MARROW, SIGNAL = 0.72; SWISSPROT HIT: P10264, EVALUE 6.00e-22
YLQFKTWWIDGVQEQVRKNQATKPTVNIDADQLLGTGPNWSTINQQSVMQNEAIEQ

SEQ ID NO: 27850 - protein, 63 aa, Homo sapiens
  MAP TO CHR21_6.0; EXPRESSED IN BONE MARROW, SIGNAL = 1.7; EXPRESSED IN BRAIN, SIGNAL = 1.7; EXPRESSED IN HEART, SIGNAL = 1.2; EXPRESSED IN LUNG, SIGNAL = 0.88; EXPRESSED IN HELA, SIGNAL = 3.7; EXPRESSED IN FETAL LIVER, SIGNAL = 1.6; EXPRESSED IN PLACENTA, SIGNAL = 0.87
AEVVSDGDEECVGNWNKGDTCYVVAKRLAAFCPCPRDLWNFELERDDLGYLAEEISKQQRIQE

SEQ ID NO: 27851 - protein, 85 aa, Homo sapiens
  MAP TO CHR21_61.0; EXPRESSED IN BONE MARROW, SIGNAL = 1.7; EXPRESSED IN BRAIN, SIGNAL = 1.5; EXPRESSED IN HELA, SIGNAL = 2.8; EXPRESSED IN FETAL LIVER, SIGNAL = 1.6; EXPRESSED IN LUNG, SIGNAL = 1.1; EXPRESSED IN PLACENTA, SIGNAL = 0.92; EXPRESSED IN ADULT LIVER, SIGNAL = 1.1; SWISSPROT HIT: P20592, EVALUE 3.00e-43
STIEDIKVKHTAKAENMIQLQFRMEQMVFCQDQIYSVVLKKVREEIFNPLGTPSQNMKLNSHFPSNESSVSSFTEIGIHLNAYFL

SEQ ID NO: 27852 - protein, 23 aa, Homo sapiens
  MAP TO CHR21_63.0; EXPRESSED IN BONE MARROW, SIGNAL = 2.4; EXPRESSED IN BRAIN, SIGNAL = 1.9; EXPRESSED IN HEART, SIGNAL = 1.9; EXPRESSED IN LUNG, SIGNAL = 1.2; EXPRESSED IN HELA, SIGNAL = 3.9; EXPRESSED IN PLACENTA, SIGNAL = 1.1; EXPRESSED IN FETAL LIVER, SIGNAL = 1.9; EXPRESSED IN ADULT LIVER, SIGNAL = 1.2
NSNPKCTIVLITSKIGKNAANDN

SEQ ID NO: 27853 - protein, 24 aa, Homo sapiens
  MAP TO CHR21_5.0; EXPRESSED IN HELA, SIGNAL = 3.7; EXPRESSED IN BRAIN, SIGNAL = 1.5; EXPRESSED IN HEART, SIGNAL = 1.2; EXPRESSED IN LUNG, SIGNAL =   1; EXPRESSED IN FETAL LIVER, SIGNAL = 1.4; EXPRESSED IN ADULT LIVER, SIGNAL = 0.99; EXPRESSED IN BONE MARROW, SIGNAL = 1.6
LQTSLSSHMKRKRAKFRRPQPVFN

SEQ ID NO: 27854 - protein, 34 aa, Homo sapiens
  MAP TO AL139227.1; EXPRESSED IN LUNG, SIGNAL = 0.78; EXPRESSED IN FETAL LIVER, SIGNAL = 0.55; EXPRESSED IN BRAIN, SIGNAL = 0.58; EXPRESSED IN ADULT LIVER, SIGNAL = 0.85; SWISSPROT HIT: P75298, EVALUE 5.00e+00
QGRSCAGRLSHRDYTDRVSLRYEHSHADQEMSYA

SEQ ID NO: 27855 - protein, 25 aa, Homo sapiens
  MAP TO AC018671.5; EXPRESSED IN BRAIN, SIGNAL = 1.2; EXPRESSED IN HEART, SIGNAL = 1.2; EXPRESSED IN LUNG, SIGNAL = 1.1; EXPRESSED IN ADULT LIVER, SIGNAL = 1.1; EXPRESSED IN PLACENTA, SIGNAL = 1.5; EXPRESSED IN FETAL LIVER, SIGNAL = 1.2; EXPRESSED IN BONE MARROW, SIGNAL = 1.2; SWISSPROT HIT: P40358, EVALUE 2.30e+00
MAVEQMPKKDWYSILGADPSANISD

SEQ ID NO: 27856 - protein, 26 aa, Homo sapiens
  MAP TO AL138732.2; EXPRESSED IN BONE MARROW, SIGNAL = 0.78; EXPRESSED IN HELA, SIGNAL = 0.6; EXPRESSED IN BRAIN, SIGNAL = 0.84; EXPRESSED IN FETAL LIVER, SIGNAL = 0.89; EXPRESSED IN PLACENTA, SIGNAL =   1; EXPRESSED IN LUNG, SIGNAL = 0.98; EXPRESSED IN ADULT LIVER, SIGNAL = 1.1
ENLGNAWMDQEGSHAVRNKQTPFLLS

SEQ ID NO: 27857 - protein, 26 aa, Homo sapiens
  MAP TO AL138732.2; EXPRESSED IN BONE MARROW, SIGNAL = 0.78; EXPRESSED IN HELA, SIGNAL = 0.6; EXPRESSED IN BRAIN, SIGNAL = 0.84; EXPRESSED IN FETAL LIVER, SIGNAL = 0.89; EXPRESSED IN PLACENTA, SIGNAL =   1; EXPRESSED IN LUNG, SIGNAL = 0.98; EXPRESSED IN ADULT LIVER, SIGNAL = 1.1
KIWEMPGWTKKAVMLLEISKLLSSFQ

SEQ ID NO: 27858 - protein, 61 aa, Homo sapiens
  MAP TO CHR21_65.0; EXPRESSED IN BRAIN, SIGNAL = 1.5; EXPRESSED IN PLACENTA, SIGNAL = 1.1; EXPRESSED IN LUNG, SIGNAL = 2.1; EXPRESSED IN HELA, SIGNAL = 3.8; EXPRESSED IN ADULT LIVER, SIGNAL = 1.3; EXPRESSED IN FETAL LIVER, SIGNAL = 1.6; EXPRESSED IN BONE MARROW, SIGNAL = 1.7; EXPRESSED IN HEART, SIGNAL = 1.5
TGKICTVTSTRRATSRSRRPSCGSWTWKMPSCTWTSSYSGFSSSPSASLPILSSGTKSGQR

SEQ ID NO: 27859 - protein, 19 aa, Homo sapiens
  MAP TO CHR21_65.0; EXPRESSED IN BRAIN, SIGNAL = 1.5; EXPRESSED IN PLACENTA, SIGNAL = 1.1; EXPRESSED IN LUNG, SIGNAL = 2.1; EXPRESSED IN HELA, SIGNAL = 3.8; EXPRESSED IN ADULT LIVER, SIGNAL = 1.3; EXPRESSED IN FETAL LIVER, SIGNAL = 1.6; EXPRESSED IN BONE MARROW, SIGNAL = 1.7; EXPRESSED IN HEART, SIGNAL = 1.5
WVRRGHPLHLWLRPGRSAL

SEQ ID NO: 27860 - protein, 74 aa, Homo sapiens
  MAP TO CHR21_65.0; EXPRESSED IN BRAIN, SIGNAL = 1.5; EXPRESSED IN PLACENTA, SIGNAL = 1.1; EXPRESSED IN LUNG, SIGNAL = 2.1; EXPRESSED IN HELA, SIGNAL = 3.8; EXPRESSED IN ADULT LIVER, SIGNAL = 1.3; EXPRESSED IN FETAL LIVER, SIGNAL = 1.6; EXPRESSED IN BONE MARROW, SIGNAL = 1.7; EXPRESSED IN HEART, SIGNAL = 1.5; SWISSPROT HIT: P45844, EVALUE 4.00e-37
YGFEGVILSIYGLDREDLHCDIDETCHFQKSEAILRELDVENAKLYLDFIVLGIFFISLRLIAYFVLRYKIRAE

SEQ ID NO: 27861 - protein, 39 aa, Homo sapiens
  MAP TO AL137017.4; EXPRESSED IN FETAL LIVER, SIGNAL =   1; EXPRESSED IN ADULT LIVER, SIGNAL = 1.1; EXPRESSED IN BRAIN, SIGNAL = 0.93; EXPRESSED IN PLACENTA, SIGNAL = 1.1; EXPRESSED IN HELA, SIGNAL = 0.78; EXPRESSED IN LUNG, SIGNAL =   1
ETPLTTKCGQTMAILSVFLLICRRKMVVQKFSLPCGIRS

SEQ ID NO: 27862 - protein, 57 aa, Homo sapiens
  MAP TO AL137007.4; EXPRESSED IN PLACENTA, SIGNAL = 0.98; EXPRESSED IN LUNG, SIGNAL = 0.98; EXPRESSED IN FETAL LIVER, SIGNAL = 0.58; EXPRESSED IN ADULT LIVER, SIGNAL = 1.1; EXPRESSED IN BONE MARROW, SIGNAL = 0.62; EXPRESSED IN BRAIN, SIGNAL = 0.58; SWISSPROT HIT: Q9NZ52, EVALUE 2.10e+00
MQDFSQPVWQTRGRGAPSTWSIMLKLLGERAHMPASAGPGWPLQMPKQEQAPHGPPA

SEQ ID NO: 27863 - protein, 27 aa, Homo sapiens
  MAP TO CHR21_66.0; EXPRESSED IN HELA, SIGNAL =   3; EXPRESSED IN FETAL LIVER, SIGNAL = 1.6; EXPRESSED IN LUNG, SIGNAL = 1.1; EXPRESSED IN BONE MARROW, SIGNAL = 1.6; EXPRESSED IN PLACENTA, SIGNAL = 0.97; EXPRESSED IN ADULT LIVER, SIGNAL = 1.1; EXPRESSED IN BRAIN, SIGNAL = 1.4
SSHCVCCLPSWSAILSSSGCPCTSRMW

SEQ ID NO: 27864 - protein, 29 aa, Homo sapiens
  MAP TO CHR21_66.0; EXPRESSED IN HELA, SIGNAL =   3; EXPRESSED IN FETAL LIVER, SIGNAL = 1.6; EXPRESSED IN LUNG, SIGNAL = 1.1; EXPRESSED IN BONE MARROW, SIGNAL = 1.6; EXPRESSED IN PLACENTA, SIGNAL = 0.97; EXPRESSED IN ADULT LIVER, SIGNAL = 1.1; EXPRESSED IN BRAIN, SIGNAL = 1.4
RDRVLTVSAVCQAGQLYFPLLAAPVHHEC

SEQ ID NO: 27865 - protein, 30 aa, Homo sapiens
  MAP TO CHR21_66.0; EXPRESSED IN HELA, SIGNAL =   3; EXPRESSED IN FETAL LIVER, SIGNAL = 1.6; EXPRESSED IN LUNG, SIGNAL = 1.1; EXPRESSED IN BONE MARROW, SIGNAL = 1.6; EXPRESSED IN PLACENTA, SIGNAL = 0.97; EXPRESSED IN ADULT LIVER, SIGNAL = 1.1; EXPRESSED IN BRAIN, SIGNAL = 1.4; SWISSPROT HIT: P57057, EVALUE 2.00e-11
GVIEFSLCLLFAKLVSYTFLFWLPLYITNV

SEQ ID NO: 27866 - protein, 52 aa, Homo sapiens
  MAP TO AL138748.1; EXPRESSED IN BRAIN, SIGNAL = 0.77; EXPRESSED IN HELA, SIGNAL = 0.59; EXPRESSED IN LUNG, SIGNAL = 1.2; EXPRESSED IN ADULT LIVER, SIGNAL = 1.4; EXPRESSED IN FETAL LIVER, SIGNAL = 0.93; EXPRESSED IN BONE MARROW, SIGNAL = 0.93; EXPRESSED IN PLACENTA, SIGNAL = 1.2
LLAEVCWLWVRSSVFTFCKERRMVMMLLITYYVLGIASNTFISMLQVKKMSF

SEQ ID NO: 27867 - protein, 58 aa, Homo sapiens
  MAP TO AL137070.3; EXPRESSED IN PLACENTA, SIGNAL = 0.81; EXPRESSED IN LUNG, SIGNAL = 0.94; EXPRESSED IN ADULT LIVER, SIGNAL = 1.2; EXPRESSED IN BRAIN, SIGNAL = 0.55; EXPRESSED IN HELA, SIGNAL = 0.65; EXPRESSED IN FETAL LIVER, SIGNAL = 0.72; SWISSPROT HIT: O14520, EVALUE 2.00e-24
GIIYLVFIGSTIPREPLKLEDSVAYEDHGITVLPKMGSHEPMISPLTLISVSLANRSS

SEQ ID NO: 27868 - protein, 17 aa, Homo sapiens
  MAP TO AL137070.3; EXPRESSED IN PLACENTA, SIGNAL = 0.81; EXPRESSED IN LUNG, SIGNAL = 0.94; EXPRESSED IN ADULT LIVER, SIGNAL = 1.2; EXPRESSED IN BRAIN, SIGNAL = 0.55; EXPRESSED IN HELA, SIGNAL = 0.65; EXPRESSED IN FETAL LIVER, SIGNAL = 0.72
VASSTWSSLAPPSHGSP

SEQ ID NO: 27869 - protein, 17 aa, Homo sapiens
  MAP TO CHR22_117.0; EXPRESSED IN BONE MARROW, SIGNAL = 0.59; EXPRESSED IN BRAIN, SIGNAL = 0.73; EXPRESSED IN FETAL LIVER, SIGNAL = 0.52
TRSKPEPGQCCRSLLPH

SEQ ID NO: 27870 - protein, 51 aa, Homo sapiens
  MAP TO AL137062.3; EXPRESSED IN HEART, SIGNAL = 2.7; EXPRESSED IN ADULT LIVER, SIGNAL = 4.1; EXPRESSED IN BRAIN, SIGNAL =   3; EXPRESSED IN PLACENTA, SIGNAL = 3.4; EXPRESSED IN LUNG, SIGNAL = 3.3; EXPRESSED IN BONE MARROW, SIGNAL = 2.9; SWISSPROT HIT: P24721, EVALUE 7.00e-07
GHKCSPCDTNWRYYGDSCYGFFRHNLTWEESKQYCTDMNATLLKIDNRNIV

SEQ ID NO: 27871 - protein, 26 aa, Homo sapiens
  MAP TO AL137062.3; EXPRESSED IN HEART, SIGNAL = 2.7; EXPRESSED IN ADULT LIVER, SIGNAL = 4.1; EXPRESSED IN BRAIN, SIGNAL =   3; EXPRESSED IN PLACENTA, SIGNAL = 3.4; EXPRESSED IN LUNG, SIGNAL = 3.3; EXPRESSED IN BONE MARROW, SIGNAL = 2.9
KVINAAPVTQTGDIMEIAAMGSSGTT

SEQ ID NO: 27872 - protein, 26 aa, Homo sapiens
  MAP TO CHR21_46.0; EXPRESSED IN HELA, SIGNAL = 0.81; EXPRESSED IN BRAIN, SIGNAL = 0.4
MNFTANNIGFIGTTTDNEKLITKSNK

SEQ ID NO: 27873 - protein, 83 aa, Homo sapiens
  MAP TO AL137068.1; EXPRESSED IN HEART, SIGNAL = 1.3; EXPRESSED IN PLACENTA, SIGNAL = 1.5; EXPRESSED IN FETAL LIVER, SIGNAL =   1; EXPRESSED IN LUNG, SIGNAL = 1.6; EXPRESSED IN ADULT LIVER, SIGNAL = 1.9; EXPRESSED IN BONE MARROW, SIGNAL =   1; EXPRESSED IN BRAIN, SIGNAL = 1.3; EXPRESSED IN HELA, SIGNAL = 1.1
EEKEEEEEEEEEEEGGGEKERKRRKEREGRRKKEERRRGRKEGRKERKEEERREKKRTSIFSMPSRCLSWHFRHALVESSRNP

SEQ ID NO: 27874 - protein, 70 aa, Homo sapiens
  MAP TO AL137068.1; EXPRESSED IN HEART, SIGNAL = 1.3; EXPRESSED IN PLACENTA, SIGNAL = 1.5; EXPRESSED IN FETAL LIVER, SIGNAL =   1; EXPRESSED IN LUNG, SIGNAL = 1.6; EXPRESSED IN ADULT LIVER, SIGNAL = 1.9; EXPRESSED IN BONE MARROW, SIGNAL =   1; EXPRESSED IN BRAIN, SIGNAL = 1.3; EXPRESSED IN HELA, SIGNAL = 1.1
WKKKKRKKRKKKRKRKKEEERKREKEGKREKEGERRKKEEEEGRKEGRKERRRREGRKKELAFSQCLLGA

SEQ ID NO: 27875 - protein, 62 aa, Homo sapiens
  MAP TO AL137918.1; EXPRESSED IN FETAL LIVER, SIGNAL = 0.93; EXPRESSED IN LUNG, SIGNAL = 1.2; EXPRESSED IN PLACENTA, SIGNAL = 1.3; EXPRESSED IN BONE MARROW, SIGNAL = 0.94; EXPRESSED IN BRAIN, SIGNAL = 0.95; EXPRESSED IN HELA, SIGNAL = 0.62; SWISSPROT HIT: O55029, EVALUE 3.50e+00
DPDESQKDGNGQREGVEKAVPTDVKVETSRIWWWSDMESDLQPSCQVTAVTPHRDRNTCKGP

SEQ ID NO: 27876 - protein, 46 aa, Homo sapiens
  MAP TO AL137918.1; EXPRESSED IN FETAL LIVER, SIGNAL = 0.93; EXPRESSED IN LUNG, SIGNAL = 1.2; EXPRESSED IN PLACENTA, SIGNAL = 1.3; EXPRESSED IN BONE MARROW, SIGNAL = 0.94; EXPRESSED IN BRAIN, SIGNAL = 0.95; EXPRESSED IN HELA, SIGNAL = 0.62
IQMRARRMAMAKGKGWRRQFQQMLRLKLLGFGGGQIWKVTCSLAAR

SEQ ID NO: 27877 - protein, 51 aa, Homo sapiens
  MAP TO AC018691.5; EXPRESSED IN HEART, SIGNAL = 1.3; EXPRESSED IN PLACENTA, SIGNAL = 1.6; EXPRESSED IN HELA, SIGNAL = 0.85; EXPRESSED IN BRAIN, SIGNAL = 1.4; EXPRESSED IN LUNG, SIGNAL = 1.8; EXPRESSED IN ADULT LIVER, SIGNAL = 1.7; EXPRESSED IN FETAL LIVER, SIGNAL = 1.2; EXPRESSED IN BONE MARROW, SIGNAL = 1.3; SWISSPROT HIT: P04951, EVALUE 1.60e+00
ETNKKTVHAKYCSRFVHAPWKDGSLVHVNITKEKCKWYSERIHTALARIRR

SEQ ID NO: 27878 - protein, 46 aa, Homo sapiens
  MAP TO CHR22_73.0; EXPRESSED IN BONE MARROW, SIGNAL = 0.72; EXPRESSED IN LUNG, SIGNAL = 0.69; EXPRESSED IN ADULT LIVER, SIGNAL = 0.84; EXPRESSED IN BRAIN, SIGNAL = 0.81; EXPRESSED IN HELA, SIGNAL = 6.2; EXPRESSED IN FETAL LIVER, SIGNAL = 0.88; SWISSPROT HIT: Q01033, EVALUE 2.80e+00
VQPRRWQEEGTETAQEAGQGDGRGREGFQAETKRGAEETRGAKSEG

SEQ ID NO: 27879 - protein, 55 aa, Homo sapiens
  MAP TO CHR22_73.0; EXPRESSED IN BONE MARROW, SIGNAL = 0.72; EXPRESSED IN LUNG, SIGNAL = 0.69; EXPRESSED IN ADULT LIVER, SIGNAL = 0.84; EXPRESSED IN BRAIN, SIGNAL = 0.81; EXPRESSED IN HELA, SIGNAL = 6.2; EXPRESSED IN FETAL LIVER, SIGNAL = 0.88
MSSHEGGKKKALKQPKKQAKEMDEEEKAFKQKQKEEQKKLEVLKAKVVGKGPLAT

SEQ ID NO: 27880 - protein, 39 aa, Homo sapiens
  MAP TO AL035367.1; EXPRESSED IN LUNG, SIGNAL = 0.98; EXPRESSED IN BONE MARROW, SIGNAL = 0.89; EXPRESSED IN PLACENTA, SIGNAL =   1; EXPRESSED IN ADULT LIVER, SIGNAL =  15; EXPRESSED IN HELA, SIGNAL = 1.3; EXPRESSED IN BRAIN, SIGNAL = 0.7; EXPRESSED IN FETAL LIVER, SIGNAL =   2; SWISSPROT HIT: P34896, EVALUE 7.00e-15
IELTLQIQSDTGVRATLKEFKERLAGDKYQAAVQALREE

SEQ ID NO: 27881 - protein, 42 aa, Homo sapiens
  MAP TO CHR21_67.0; EXPRESSED IN FETAL LIVER, SIGNAL = 1.7; EXPRESSED IN HEART, SIGNAL = 1.3; EXPRESSED IN LUNG, SIGNAL = 0.82; EXPRESSED IN PLACENTA, SIGNAL = 0.86; EXPRESSED IN BONE MARROW, SIGNAL = 1.9; EXPRESSED IN HELA, SIGNAL = 4.4; EXPRESSED IN BRAIN, SIGNAL = 1.6
PALHFDCREPCTRNCVCRSSFWHLGGHLSSVLQDLGHRHGPQ

SEQ ID NO: 27882 - protein, 42 aa, Homo sapiens
  MAP TO CHR21_67.0; EXPRESSED IN FETAL LIVER, SIGNAL = 1.7; EXPRESSED IN HEART, SIGNAL = 1.3; EXPRESSED IN LUNG, SIGNAL = 0.82; EXPRESSED IN PLACENTA, SIGNAL = 0.86; EXPRESSED IN BONE MARROW, SIGNAL = 1.9; EXPRESSED IN HELA, SIGNAL = 4.4; EXPRESSED IN BRAIN, SIGNAL = 1.6; SWISSPROT HIT: P26954, EVALUE 2.20e+00
GPALRLPGALHAELCLQKLLLAPGRAPLISTPGPRPSPRTAG

SEQ ID NO: 27883 - protein, 18 aa, Homo sapiens
  MAP TO CHR22_139.0; EXPRESSED IN HELA, SIGNAL = 1.2; EXPRESSED IN FETAL LIVER, SIGNAL = 0.66; EXPRESSED IN LUNG, SIGNAL = 0.58; EXPRESSED IN ADULT LIVER, SIGNAL = 0.6; EXPRESSED IN BONE MARROW, SIGNAL = 0.59; EXPRESSED IN BRAIN, SIGNAL = 0.58
GAPPSLPVCGARSPWEFH

SEQ ID NO: 27884 - protein, 59 aa, Homo sapiens
  MAP TO AC015478.3; EXPRESSED IN FETAL LIVER, SIGNAL = 0.56; EXPRESSED IN PLACENTA, SIGNAL = 0.55; EXPRESSED IN LUNG, SIGNAL = 0.6; EXPRESSED IN ADULT LIVER, SIGNAL = 0.44; EXPRESSED IN BONE MARROW, SIGNAL = 0.55; EXPRESSED IN BRAIN, SIGNAL = 0.69; SWISSPROT HIT: P11378, EVALUE 3.20e-01
PSSTPQSHTVCDTPPCKSTLCPSLLTHSCTSKSSCGHTGTEKRPRGSWGRSIRSWGRPF

SEQ ID NO: 27885 - protein, 96 aa, Homo sapiens
  MAP TO AL138722.2; EXPRESSED IN BONE MARROW, SIGNAL = 0.54; EXPRESSED IN LUNG, SIGNAL = 0.66; EXPRESSED IN BRAIN, SIGNAL = 0.44; EXPRESSED IN FETAL LIVER, SIGNAL = 0.48; SWISSPROT HIT: P08979, EVALUE 1.10e+00
VLKFDAYFQEDVPMSTEEQYRIRQVNIYYYLEDDSMSVIEPVVENSGILQGKLIKRQRLAKNDRGDHYHWKDLNRGINITIYGKTFRVVDCDQFTQ

SEQ ID NO: 27886 - protein, 51 aa, Homo sapiens
  MAP TO AC018691.5; EXPRESSED IN HEART, SIGNAL = 1.3; EXPRESSED IN PLACENTA, SIGNAL = 1.6; EXPRESSED IN HELA, SIGNAL = 0.85; EXPRESSED IN BRAIN, SIGNAL = 1.4; EXPRESSED IN LUNG, SIGNAL = 1.8; EXPRESSED IN ADULT LIVER, SIGNAL = 1.7; EXPRESSED IN FETAL LIVER, SIGNAL = 1.2; EXPRESSED IN BONE MARROW, SIGNAL = 1.3; SWISSPROT HIT: P40986, EVALUE 8.20e+00
RRTRRQSMQNIAAGLSMLPGRMGAWSTSTLPKRSASGTVRESTQPWPGSEG

SEQ ID NO: 27887 - protein, 33 aa, Homo sapiens
  MAP TO AL133263.2; EXPRESSED IN BONE MARROW, SIGNAL = 0.92; EXPRESSED IN BRAIN, SIGNAL = 0.97; EXPRESSED IN FETAL LIVER, SIGNAL = 0.87; EXPRESSED IN HEART, SIGNAL = 1.2; EXPRESSED IN PLACENTA, SIGNAL = 1.4; EXPRESSED IN LUNG, SIGNAL = 1.4; EXPRESSED IN ADULT LIVER, SIGNAL = 1.7; SWISSPROT HIT: Q9Y603, EVALUE 4.00e-13
NRVNMTYEKMSRALRHYYKLNIIKKEPGQKLLF

SEQ ID NO: 27888 - protein, 38 aa, Homo sapiens
  MAP TO CHR21_68.0; EXPRESSED IN FETAL LIVER, SIGNAL = 1.9; EXPRESSED IN LUNG, SIGNAL = 1.4; EXPRESSED IN BONE MARROW, SIGNAL = 2.3; EXPRESSED IN BRAIN, SIGNAL = 1.8; EXPRESSED IN HELA, SIGNAL = 4.7; SWISSPROT HIT: Q47879, EVALUE 6.50e+00
VVEPKERGKLLATQTAAELSKNLSSPSSYPPAVNKGRK

SEQ ID NO: 27889 - protein, 42 aa, Homo sapiens
  MAP TO CHR21_68.0; EXPRESSED IN FETAL LIVER, SIGNAL = 1.9; EXPRESSED IN LUNG, SIGNAL = 1.4; EXPRESSED IN BONE MARROW, SIGNAL = 2.3; EXPRESSED IN BRAIN, SIGNAL = 1.8; EXPRESSED IN HELA, SIGNAL = 4.7
GSDSEARQVGRKVTSPSSSSSSSSSDSESDDEADVSEVTPRV

SEQ ID NO: 27890 - protein, 17 aa, Homo sapiens
  MAP TO CHR21_68.0; EXPRESSED IN FETAL LIVER, SIGNAL = 1.9; EXPRESSED IN LUNG, SIGNAL = 1.4; EXPRESSED IN BONE MARROW, SIGNAL = 2.3; EXPRESSED IN BRAIN, SIGNAL = 1.8; EXPRESSED IN HELA, SIGNAL = 4.7
CSGTKGEGQAPSHPDSS

SEQ ID NO: 27891 - protein, 66 aa, Homo sapiens
  MAP TO AC013648.3; EXPRESSED IN PLACENTA, SIGNAL = 1.1; EXPRESSED IN LUNG, SIGNAL = 0.99; EXPRESSED IN FETAL LIVER, SIGNAL = 0.99; EXPRESSED IN BONE MARROW, SIGNAL = 0.85; EXPRESSED IN BRAIN, SIGNAL = 1.1; SWISSPROT HIT: P18377, EVALUE 1.00e-06
KELGAVIYNCSHLAQDLEKTFQTYWVLGVPKAVLPKTWPQNFSSHFNRFQPFHGLFDGVPTTAYFS

SEQ ID NO: 27892 - protein, 50 aa, Homo sapiens
  MAP TO AL138499.1; EXPRESSED IN BRAIN, SIGNAL = 1.8; EXPRESSED IN PLACENTA, SIGNAL = 2.6; EXPRESSED IN LUNG, SIGNAL = 2.3; EXPRESSED IN ADULT LIVER, SIGNAL = 2.7; EXPRESSED IN HELA, SIGNAL = 1.7; EXPRESSED IN FETAL LIVER, SIGNAL = 2.2; EXPRESSED IN BONE MARROW, SIGNAL = 2.1; SWISSPROT HIT: P14166, EVALUE 5.70e-01
LPGNAPESCHQVPSASTAAAGSFRRKRTTSNFGLSGRFSILLPLHGRLRH

SEQ ID NO: 27893 - protein, 85 aa, Homo sapiens
  MAP TO AL138478.1; EXPRESSED IN FETAL LIVER, SIGNAL = 1.1; EXPRESSED IN PLACENTA, SIGNAL = 1.2; EXPRESSED IN BONE MARROW, SIGNAL =   1; EXPRESSED IN LUNG, SIGNAL = 1.2; EXPRESSED IN BRAIN, SIGNAL = 0.93
MSFYHLAGGGSLWSSLLFHVYLQLIFKRSFELAPVPCFYNPINPIYFSHLAKDQSPQLNPWGGQLPYMISFRIRAISSRETPSAP

SEQ ID NO: 27894 - protein, 23 aa, Homo sapiens
  MAP TO AL138478.1; EXPRESSED IN FETAL LIVER, SIGNAL = 1.1; EXPRESSED IN PLACENTA, SIGNAL = 1.2; EXPRESSED IN BONE MARROW, SIGNAL =   1; EXPRESSED IN LUNG, SIGNAL = 1.2; EXPRESSED IN BRAIN, SIGNAL = 0.93
CLSTTWLEVEVFGHLFSSMSTCS

SEQ ID NO: 27895 - protein, 41 aa, Homo sapiens
  MAP TO AC012186.3; EXPRESSED IN HELA, SIGNAL =   4; EXPRESSED IN BRAIN, SIGNAL = 3.6; EXPRESSED IN FETAL LIVER, SIGNAL = 3.7; EXPRESSED IN BONE MARROW, SIGNAL = 3.5; EXPRESSED IN PLACENTA, SIGNAL = 3.8; EXPRESSED IN LUNG, SIGNAL = 4.7; EXPRESSED IN ADULT LIVER, SIGNAL = 4.3
QTSASFGRSPWLRHRAWLSTMTSCVPLRRLPRTRATWRRPS

SEQ ID NO: 27896 - protein, 29 aa, Homo sapiens
  MAP TO AL132996.2; EXPRESSED IN PLACENTA, SIGNAL = 1.8; EXPRESSED IN LUNG, SIGNAL = 2.1; EXPRESSED IN BONE MARROW, SIGNAL = 1.6; EXPRESSED IN ADULT LIVER, SIGNAL = 2.7; EXPRESSED IN BRAIN, SIGNAL = 1.2; EXPRESSED IN HELA, SIGNAL = 0.61; EXPRESSED IN FETAL LIVER, SIGNAL = 1.4
CGKVWNILETWSAQKTERRGKVWNFLETS

SEQ ID NO: 27897 - protein, 31 aa, Homo sapiens
  MAP TO AC018608.4; EXPRESSED IN BRAIN, SIGNAL = 0.71; EXPRESSED IN LUNG, SIGNAL = 0.69; EXPRESSED IN FETAL LIVER, SIGNAL = 0.74; EXPRESSED IN PLACENTA, SIGNAL = 0.73; EXPRESSED IN ADULT LIVER, SIGNAL = 0.56; EXPRESSED IN BONE MARROW, SIGNAL = 0.82
QAVSHTTTQYHPRNHQGLPIDVVLFIVYELR

SEQ ID NO: 27898 - protein, 29 aa, Homo sapiens
  MAP TO AC018608.4; EXPRESSED IN BRAIN, SIGNAL = 0.71; EXPRESSED IN LUNG, SIGNAL = 0.69; EXPRESSED IN FETAL LIVER, SIGNAL = 0.74; EXPRESSED IN PLACENTA, SIGNAL = 0.73; EXPRESSED IN ADULT LIVER, SIGNAL = 0.56; EXPRESSED IN BONE MARROW, SIGNAL = 0.82
RQYPTQLHNITQGIIRVCLLMLCSSLFMN

SEQ ID NO: 27899 - protein, 58 aa, Homo sapiens
  MAP TO AC022619.3; EXPRESSED IN HELA, SIGNAL = 0.98; EXPRESSED IN ADULT LIVER, SIGNAL = 1.8; EXPRESSED IN BONE MARROW, SIGNAL = 1.9; EXPRESSED IN BRAIN, SIGNAL = 2.2; EXPRESSED IN LUNG, SIGNAL = 2.5; EXPRESSED IN PLACENTA, SIGNAL =   2; EXPRESSED IN HEART, SIGNAL = 1.7; EXPRESSED IN FETAL LIVER, SIGNAL =   2; SWISSPROT HIT: P53074, EVALUE 1.60e+00
QWAEKNNTQEQWAYLAPRSWFLVLSSNKRNHSCLDKLLVVGLKQKIYKMSVEHLVVPE

SEQ ID NO: 27900 - protein, 22 aa, Homo sapiens
  MAP TO AC022619.3; EXPRESSED IN HELA, SIGNAL = 0.98; EXPRESSED IN ADULT LIVER, SIGNAL = 1.8; EXPRESSED IN BONE MARROW, SIGNAL = 1.9; EXPRESSED IN BRAIN, SIGNAL = 2.2; EXPRESSED IN LUNG, SIGNAL = 2.5; EXPRESSED IN PLACENTA, SIGNAL =   2; EXPRESSED IN HEART, SIGNAL = 1.7; EXPRESSED IN FETAL LIVER, SIGNAL =   2
LSGLRRTTPRSNGHTWHPDLGF

SEQ ID NO: 27901 - protein, 33 aa, Homo sapiens
  MAP TO CHR22_154.0; EXPRESSED IN BRAIN, SIGNAL = 0.36; EXPRESSED IN ADULT LIVER, SIGNAL = 0.36
LDNTQYQCVLMMKMMMVMEIMVMFDDGDGDDKD

SEQ ID NO: 27902 - protein, 46 aa, Homo sapiens
  MAP TO AL136094.1; EXPRESSED IN BONE MARROW, SIGNAL = 0.92; EXPRESSED IN BRAIN, SIGNAL = 0.79; EXPRESSED IN PLACENTA, SIGNAL = 0.97; EXPRESSED IN LUNG, SIGNAL = 1.1; EXPRESSED IN ADULT LIVER, SIGNAL =   1
MQETHLPVQTKRMDLETGRTMEVRLLMVVLRDRVSGRQAHPGQLQQ

SEQ ID NO: 27903 - protein, 32 aa, Homo sapiens
  MAP TO AL139253.1; EXPRESSED IN BRAIN, SIGNAL = 0.44; EXPRESSED IN PLACENTA, SIGNAL = 0.46; EXPRESSED IN LUNG, SIGNAL = 0.46; EXPRESSED IN FETAL LIVER, SIGNAL = 0.43; EXPRESSED IN BONE MARROW, SIGNAL = 0.42
MPTLGVVKNQLLLGWHSEDCALEELLCEPHAP

SEQ ID NO: 27904 - protein, 72 aa, Homo sapiens
  MAP TO CHR22_102.0; EXPRESSED IN FETAL LIVER, SIGNAL = 4.8; EXPRESSED IN PLACENTA, SIGNAL = 5.5; EXPRESSED IN ADULT LIVER, SIGNAL = 5.4; EXPRESSED IN BRAIN, SIGNAL = 4.7; EXPRESSED IN HELA, SIGNAL = 4.1; EXPRESSED IN LUNG, SIGNAL = 5.9; EXPRESSED IN HEART, SIGNAL = 4.4; EXPRESSED IN BONE MARROW, SIGNAL = 5.1; SWISSPROT HIT: Q13316, EVALUE 1.80e+00
RGAAPICNGMSTDRPEGIADAGGNSFSAEVGFSGKGCRVSKEAGEHSRWKLRQEDALEELKEGCWARSSGAE

SEQ ID NO: 27905 - protein, 32 aa, Homo sapiens
  MAP TO CHR22_102.0; EXPRESSED IN FETAL LIVER, SIGNAL = 4.8; EXPRESSED IN PLACENTA, SIGNAL = 5.5; EXPRESSED IN ADULT LIVER, SIGNAL = 5.4; EXPRESSED IN BRAIN, SIGNAL = 4.7; EXPRESSED IN HELA, SIGNAL = 4.1; EXPRESSED IN LUNG, SIGNAL = 5.9; EXPRESSED IN HEART, SIGNAL = 4.4; EXPRESSED IN BONE MARROW, SIGNAL = 5.1
QRSCSHMQRHVHRPARGHCGCGGQQLFCRGGV

SEQ ID NO: 27906 - protein, 29 aa, Homo sapiens
  MAP TO CHR22_102.0; EXPRESSED IN FETAL LIVER, SIGNAL = 4.8; EXPRESSED IN PLACENTA, SIGNAL = 5.5; EXPRESSED IN ADULT LIVER, SIGNAL = 5.4; EXPRESSED IN BRAIN, SIGNAL = 4.7; EXPRESSED IN HELA, SIGNAL = 4.1; EXPRESSED IN LUNG, SIGNAL = 5.9; EXPRESSED IN HEART, SIGNAL = 4.4; EXPRESSED IN BONE MARROW, SIGNAL = 5.1
PEELLPYATACPQTGQRALRMRGATAFLQ

SEQ ID NO: 27907 - protein, 57 aa, Homo sapiens
  MAP TO AC011802.4; EXPRESSED IN BRAIN, SIGNAL = 0.62; EXPRESSED IN BONE MARROW, SIGNAL = 0.57; EXPRESSED IN ADULT LIVER, SIGNAL = 0.79; SWISSPROT HIT: P02566, EVALUE 6.00e-03
DSLAEVEEKYKKAMVSNAQLDNEKTNFMYQVDTLKDMLLELEEQLAESRRQYEEKNK

SEQ ID NO: 27908 - protein, 76 aa, Homo sapiens
  MAP TO CHR22_55.0; EXPRESSED IN BRAIN, SIGNAL = 1.4; EXPRESSED IN LUNG, SIGNAL =   1; EXPRESSED IN HELA, SIGNAL = 1.5; EXPRESSED IN HEART, SIGNAL = 1.2; EXPRESSED IN FETAL LIVER, SIGNAL =   2; SWISSPROT HIT: Q9Y3I1, EVALUE 5.00e-39
LGPSQNFEAESIQDNAHMAEGTGFYPSEPMLCSESVEGQVPHSLETLYQSADCSDANDALIVLIHLLMLESGYIPQ

SEQ ID NO: 27909 - protein, 143 aa, Homo sapiens
  MAP TO CHR22_6.0; EXPRESSED IN BONE MARROW, SIGNAL = 2.2; EXPRESSED IN BRAIN, SIGNAL = 2.2; EXPRESSED IN HEART, SIGNAL = 2.2; EXPRESSED IN FETAL LIVER, SIGNAL = 2.3; EXPRESSED IN HELA, SIGNAL = 3.7; EXPRESSED IN ADULT LIVER, SIGNAL = 3.7; EXPRESSED IN LUNG, SIGNAL = 2.9; EXPRESSED IN PLACENTA, SIGNAL = 2.5; SWISSPROT HIT: P28636, EVALUE 2.30e+00
ALLQEERLDAVTLLYATSLPSFCLLAGAALVLEAGVAPPPTAGDSRLWACILLSCLLSVLYNLASFSLLALTSALTVHVLGNLTVVGNLILSRLLFGSRLSALSYVGIALTLSGMFLYHNCEFVASWAARRGLWRRDQPSKGL

SEQ ID NO: 27910 - protein, 61 aa, Homo sapiens
  MAP TO CHR22_6.0; EXPRESSED IN BONE MARROW, SIGNAL = 2.2; EXPRESSED IN BRAIN, SIGNAL = 2.2; EXPRESSED IN HEART, SIGNAL = 2.2; EXPRESSED IN FETAL LIVER, SIGNAL = 2.3; EXPRESSED IN HELA, SIGNAL = 3.7; EXPRESSED IN ADULT LIVER, SIGNAL = 3.7; EXPRESSED IN LUNG, SIGNAL = 2.9; EXPRESSED IN PLACENTA, SIGNAL = 2.5; SWISSPROT HIT: O15119, EVALUE 1.10e+00
CPAAGGEAGRGDPALRHLAAQLLPAGGCSPGAGGWRCPTAHCWRLSPLGLHPAQLPPVCSL

SEQ ID NO: 27911 - protein, 68 aa, Homo sapiens
  MAP TO AL138832.2; EXPRESSED IN BRAIN, SIGNAL = 5.8; EXPRESSED IN FETAL LIVER, SIGNAL = 5.1; EXPRESSED IN LUNG, SIGNAL = 5.9; EXPRESSED IN BONE MARROW, SIGNAL = 4.7; SWISSPROT HIT: Q90339, EVALUE 2.40e-01
WNNLLEEIAEQLQSSKALLQLWQRYKDYSKQCASTVQQQEDRTNELLKAATNKDIADDEVATWIQDCN

SEQ ID NO: 27912 - protein, 46 aa, Homo sapiens
  MAP TO AL138832.2; EXPRESSED IN BRAIN, SIGNAL = 5.8; EXPRESSED IN FETAL LIVER, SIGNAL = 5.1; EXPRESSED IN LUNG, SIGNAL = 5.9; EXPRESSED IN BONE MARROW, SIGNAL = 4.7; SWISSPROT HIT: P75257, EVALUE 8.30e+00
GITCWKRLLSSYSPARPYFSFGKDTRTTPNSVLRQFSSRRIEPMSC

SEQ ID NO: 27913 - protein, 18 aa, Homo sapiens
  MAP TO AC025745.1; EXPRESSED IN HELA, SIGNAL = 2.5; EXPRESSED IN HEART, SIGNAL = 4.5; EXPRESSED IN LUNG, SIGNAL = 5.5; EXPRESSED IN ADULT LIVER, SIGNAL = 4.7; EXPRESSED IN FETAL LIVER, SIGNAL = 4.8; EXPRESSED IN BONE MARROW, SIGNAL = 5.6; EXPRESSED IN BRAIN, SIGNAL = 4.8
WMTLRNSRLHQTKLLQIW

SEQ ID NO: 27914 - protein, 44 aa, Homo sapiens
  MAP TO AC006349.3; EXPRESSED IN BRAIN, SIGNAL = 0.54; EXPRESSED IN FETAL LIVER, SIGNAL = 0.42; EXPRESSED IN PLACENTA, SIGNAL = 0.49
PLQSFQDRPPKYLLKETLCMTDALCTFWSPRYLRPCPAILPHAI

SEQ ID NO: 27915 - protein, 57 aa, Homo sapiens
  MAP TO CHR21_24.0; EXPRESSED IN FETAL LIVER, SIGNAL = 0.98; EXPRESSED IN ADULT LIVER, SIGNAL = 0.47; EXPRESSED IN PLACENTA, SIGNAL = 0.64; EXPRESSED IN HELA, SIGNAL =   3; EXPRESSED IN BRAIN, SIGNAL = 1.2
RAIQSLWSEDHRAVADHGQGFLQQTGLPWRCTYSSLSGGCQRSSVRNLENCTLPWSS

SEQ ID NO: 27916 - protein, 28 aa, Homo sapiens
  MAP TO CHR21_27.0; EXPRESSED IN BONE MARROW, SIGNAL = 1.1; EXPRESSED IN PLACENTA, SIGNAL = 0.68; EXPRESSED IN BRAIN, SIGNAL = 1.1; EXPRESSED IN ADULT LIVER, SIGNAL = 0.51; EXPRESSED IN HELA, SIGNAL = 2.8; EXPRESSED IN FETAL LIVER, SIGNAL = 0.86
LLKITIFVLGSPQPEIIFCQYHLVSLQK

SEQ ID NO: 27917 - protein, 62 aa, Homo sapiens
  MAP TO CHR22_85.0; EXPRESSED IN LUNG, SIGNAL = 0.75; EXPRESSED IN BRAIN, SIGNAL = 0.69; EXPRESSED IN PLACENTA, SIGNAL = 0.72; EXPRESSED IN ADULT LIVER, SIGNAL = 0.76; EXPRESSED IN FETAL LIVER, SIGNAL = 0.62; EXPRESSED IN BONE MARROW, SIGNAL = 0.64; SWISSPROT HIT: Q16587, EVALUE 4.60e+00
SPSSSGIALSLWSAATLHMAPAEAPTISAAAVAAASVCGAHVNPGQKPWAMRRKMPSAFCAK

SEQ ID NO: 27918 - protein, 38 aa, Homo sapiens
  MAP TO CHR22_104.0; EXPRESSED IN HELA, SIGNAL =   2; EXPRESSED IN LUNG, SIGNAL =   3; EXPRESSED IN PLACENTA, SIGNAL = 3.5; EXPRESSED IN ADULT LIVER, SIGNAL = 3.1; EXPRESSED IN HEART, SIGNAL = 2.4; EXPRESSED IN FETAL LIVER, SIGNAL = 2.8; EXPRESSED IN BONE MARROW, SIGNAL = 2.8; EXPRESSED IN BRAIN, SIGNAL = 2.8
LQQALPLNPQPWESKGEKPVQDPGVSAHQTRGALWSPR

SEQ ID NO: 27919 - protein, 44 aa, Homo sapiens
  MAP TO AL136382.1; EXPRESSED IN PLACENTA, SIGNAL = 0.64; EXPRESSED IN FETAL LIVER, SIGNAL = 0.63; EXPRESSED IN LUNG, SIGNAL = 0.8; EXPRESSED IN ADULT LIVER, SIGNAL = 0.64; EXPRESSED IN BONE MARROW, SIGNAL = 0.59; EXPRESSED IN BRAIN, SIGNAL = 0.7
LKQDILNEKTELEATLKEAELVTHSVELLLPLFKDTIEKINFEN

SEQ ID NO: 27920 - protein, 50 aa, Homo sapiens
  MAP TO AL121993.2; EXPRESSED IN BRAIN, SIGNAL = 0.53; EXPRESSED IN PLACENTA, SIGNAL = 0.64; EXPRESSED IN LUNG, SIGNAL = 0.67; EXPRESSED IN FETAL LIVER, SIGNAL = 0.5; EXPRESSED IN BONE MARROW, SIGNAL = 0.44; SWISSPROT HIT: P36328, EVALUE 2.50e-01
CRTGEAKLTKGFNLAARFIIHTVGPKYKSRYRTAAESSLYSCYRNVLQLA

SEQ ID NO: 27921 - protein, 67 aa, Homo sapiens
  MAP TO AL133543.2; EXPRESSED IN HELA, SIGNAL = 1.4; EXPRESSED IN BRAIN, SIGNAL = 0.68; EXPRESSED IN FETAL LIVER, SIGNAL = 0.8; EXPRESSED IN LUNG, SIGNAL = 1.7; EXPRESSED IN BONE MARROW, SIGNAL = 0.76; EXPRESSED IN ADULT LIVER, SIGNAL = 1.5; SWISSPROT HIT: P15924, EVALUE 3.00e-34
LKTMRQEDYMKTIADLELHYQEFIRNSQGSEMFGDDDKRKIQSQFTDAQKHYQTLVIQLPGYPQHQT

SEQ ID NO: 27922 - protein, 45 aa, Homo sapiens
  MAP TO CHR22_107.0; EXPRESSED IN HELA, SIGNAL = 2.6; EXPRESSED IN HEART, SIGNAL = 2.7; EXPRESSED IN LUNG, SIGNAL = 3.6; EXPRESSED IN FETAL LIVER, SIGNAL = 3.2; EXPRESSED IN PLACENTA, SIGNAL = 3.7; EXPRESSED IN ADULT LIVER, SIGNAL = 3.8; EXPRESSED IN BONE MARROW, SIGNAL = 3.5; EXPRESSED IN BRAIN, SIGNAL = 3.3; SWISSPROT HIT: Q59105, EVALUE 2.20e+00
REAIIPAVGTAAAHGAPGGRTGSSAHSAERCRHLTPLETTSALWT

SEQ ID NO: 27923 - protein, 18 aa, Homo sapiens
  MAP TO AL137145.3; EXPRESSED IN PLACENTA, SIGNAL = 0.43; EXPRESSED IN BONE MARROW, SIGNAL = 0.58; EXPRESSED IN BRAIN, SIGNAL = 0.55; EXPRESSED IN FETAL LIVER, SIGNAL = 0.43
MSLTLWRLAREESLTLSW

SEQ ID NO: 27924 - protein, 51 aa, Homo sapiens
  MAP TO AL132765.16; EXPRESSED IN BRAIN, SIGNAL = 0.44; EXPRESSED IN FETAL LIVER, SIGNAL = 0.53; EXPRESSED IN PLACENTA, SIGNAL = 0.45; EXPRESSED IN ADULT LIVER, SIGNAL = 0.39; EXPRESSED IN BONE MARROW, SIGNAL = 0.44; SWISSPROT HIT: Q02817, EVALUE 6.30e+00
MLRHTSCCAEASLCTSGQPCPPGCVPAVWSLCVFLSPTYPCIRVCGLLWHC

SEQ ID NO: 27925 - protein, 43 aa, Homo sapiens
  MAP TO AL133263.2; EXPRESSED IN PLACENTA, SIGNAL = 0.6; EXPRESSED IN ADULT LIVER, SIGNAL = 0.29; EXPRESSED IN BONE MARROW, SIGNAL = 0.6; EXPRESSED IN BRAIN, SIGNAL = 0.58; SWISSPROT HIT: P70444, EVALUE 2.00e-01
HNLLSQPKEHSIVQKHHQEEIIHKLAMQLRHIGDNIDHRMVRE

SEQ ID NO: 27926 - protein, 21 aa, Homo sapiens
  MAP TO AL133263.2; EXPRESSED IN PLACENTA, SIGNAL = 0.6; EXPRESSED IN ADULT LIVER, SIGNAL = 0.29; EXPRESSED IN BONE MARROW, SIGNAL = 0.6; EXPRESSED IN BRAIN, SIGNAL = 0.58
IIIYFLSPRSIALFRSITRRK

SEQ ID NO: 27927 - protein, 133 aa, Homo sapiens
  MAP TO AL133499.1; EXPRESSED IN BONE MARROW, SIGNAL = 0.66; EXPRESSED IN BRAIN, SIGNAL = 0.9; EXPRESSED IN PLACENTA, SIGNAL = 0.87; EXPRESSED IN LUNG, SIGNAL = 0.98; EXPRESSED IN HELA, SIGNAL = 2.7; EXPRESSED IN ADULT LIVER, SIGNAL = 0.76; SWISSPROT HIT: P78563, EVALUE 6.00e-52
MQLNEIKPGLQYTLLSQTGPVHAPLFVMSVEVNGQVFEGSGPTKKKAKLHAAEKALRSFVQFPNASEAHLAMGRTLSVNTDFTSDQADFPDTLFNGFETPDKAEPPFYVGSNGDDSFSSSGDLSLSASPVPAS

SEQ ID NO: 27928 - protein, 52 aa, Homo sapiens
  MAP TO CHR21_16.0; EXPRESSED IN HELA, SIGNAL =   3; EXPRESSED IN FETAL LIVER, SIGNAL = 0.83; EXPRESSED IN BONE MARROW, SIGNAL = 0.95; EXPRESSED IN ADULT LIVER, SIGNAL = 0.49; EXPRESSED IN BRAIN, SIGNAL = 0.95; SWISSPROT HIT: P31641, EVALUE 2.00e-15
DVRSTGKVVYFTATFQFAMLLRQLVRGLMLPGMGAGINFSLYPDITCLEGAQ

SEQ ID NO: 27929 - protein, 52 aa, Homo sapiens
  MAP TO CHR21_16.0; EXPRESSED IN HELA, SIGNAL =   3; EXPRESSED IN FETAL LIVER, SIGNAL = 0.83; EXPRESSED IN BONE MARROW, SIGNAL = 0.95; EXPRESSED IN ADULT LIVER, SIGNAL = 0.49; EXPRESSED IN BRAIN, SIGNAL = 0.95
GCQVHGEGRLLHSHVPVRHAPEAAGPRADAARHGCRHQFFSVSRHHLPRGRT

SEQ ID NO: 27930 - protein, 51 aa, Homo sapiens
  MAP TO AL133472.2; EXPRESSED IN FETAL LIVER, SIGNAL = 0.44; EXPRESSED IN ADULT LIVER, SIGNAL = 0.47; EXPRESSED IN BRAIN, SIGNAL = 0.38; SWISSPROT HIT: Q92562, EVALUE 4.00e-24
FVRFLEGYYIVLITKRRKMADIGGHAIYKVEDTNMIYIPNDSVRVTHPDEA

SEQ ID NO: 27931 - protein, 22 aa, Homo sapiens
  MAP TO AL160191.1; EXPRESSED IN PLACENTA, SIGNAL = 1.8; EXPRESSED IN LUNG, SIGNAL = 2.1; EXPRESSED IN ADULT LIVER, SIGNAL =   2; EXPRESSED IN BONE MARROW, SIGNAL = 2.1; EXPRESSED IN BRAIN, SIGNAL = 1.5; EXPRESSED IN HELA, SIGNAL = 2.4; EXPRESSED IN FETAL LIVER, SIGNAL = 2.2
FGITDIKLNVCAEGACVLVIDK

SEQ ID NO: 27932 - protein, 36 aa, Homo sapiens
  MAP TO AC024066.3; EXPRESSED IN BONE MARROW, SIGNAL = 2.5; EXPRESSED IN ADULT LIVER, SIGNAL = 2.4; EXPRESSED IN BRAIN, SIGNAL = 2.5; EXPRESSED IN FETAL LIVER, SIGNAL = 2.5; EXPRESSED IN LUNG, SIGNAL = 2.4; EXPRESSED IN PLACENTA, SIGNAL = 2.5; EXPRESSED IN HEART, SIGNAL = 2.3; EXPRESSED IN HELA, SIGNAL = 1.7; SWISSPROT HIT: P02983, EVALUE 1.70e+00
IVMNSITICVTTLGIILLSMEIATFALNATTYNWSN

SEQ ID NO: 27933 - protein, 44 aa, Homo sapiens
  MAP TO AL160168.1; EXPRESSED IN BONE MARROW, SIGNAL = 1.7; EXPRESSED IN HELA, SIGNAL = 0.66; EXPRESSED IN BRAIN, SIGNAL = 1.7; EXPRESSED IN PLACENTA, SIGNAL = 2.3; EXPRESSED IN FETAL LIVER, SIGNAL = 1.5; EXPRESSED IN ADULT LIVER, SIGNAL = 1.8
PLQCPTKRRDPLMKWRFILYLCSCPSIWCAVNCVFHTNIASGFP

SEQ ID NO: 27934 - protein, 35 aa, Homo sapiens
  MAP TO AC016569.2; EXPRESSED IN BRAIN, SIGNAL = 0.39; EXPRESSED IN PLACENTA, SIGNAL = 0.48; EXPRESSED IN LUNG, SIGNAL = 0.44
SVVLGAHETLIEPCPWIHLRAILQLAVIMKVLGSP

SEQ ID NO: 27935 - protein, 19 aa, Homo sapiens
  MAP TO CHR22_130.0; EXPRESSED IN BONE MARROW, SIGNAL = 2.8; EXPRESSED IN BRAIN, SIGNAL = 2.4; EXPRESSED IN HEART, SIGNAL =   2; EXPRESSED IN HELA, SIGNAL = 1.6; EXPRESSED IN PLACENTA, SIGNAL = 2.9; EXPRESSED IN LUNG, SIGNAL = 2.4; EXPRESSED IN FETAL LIVER, SIGNAL = 2.2; EXPRESSED IN ADULT LIVER, SIGNAL = 2.6
TRSPSQSNQTRERNKGHPY

SEQ ID NO: 27936 - protein, 40 aa, Homo sapiens
  MAP TO CHR22_133.0; EXPRESSED IN BONE MARROW, SIGNAL = 0.47; EXPRESSED IN BRAIN, SIGNAL = 0.48; EXPRESSED IN PLACENTA, SIGNAL = 0.6; EXPRESSED IN LUNG, SIGNAL = 0.59; EXPRESSED IN ADULT LIVER, SIGNAL = 0.69; SWISSPROT HIT: P75959, EVALUE 4.90e+00
HSHSWQQRLLLGVDLFVPQCNCEHHECRKVPVSDHGISWV

SEQ ID NO: 27937 - protein, 45 aa, Homo sapiens
  MAP TO AC021010.3; EXPRESSED IN PLACENTA, SIGNAL = 0.44; EXPRESSED IN BRAIN, SIGNAL = 0.43; EXPRESSED IN FETAL LIVER, SIGNAL = 0.44
SKHELIYSDFWNIQDEDNNQEHCDSKHFLKVACETKLQLFEKAGV

SEQ ID NO: 27938 - protein, 47 aa, Homo sapiens
  MAP TO AL138788.1; EXPRESSED IN HEART, SIGNAL = 2.6; EXPRESSED IN PLACENTA, SIGNAL = 3.7; EXPRESSED IN LUNG, SIGNAL = 3.1; EXPRESSED IN ADULT LIVER, SIGNAL = 3.3; EXPRESSED IN HELA, SIGNAL = 3.6; EXPRESSED IN BONE MARROW, SIGNAL = 2.7; EXPRESSED IN BRAIN, SIGNAL = 2.8; EXPRESSED IN FETAL LIVER, SIGNAL = 2.8
NYNEKHHQQKVKLQKVKYRLTNEVELRDKRINQFEDEIGILQHKIEK

SEQ ID NO: 27939 - protein, 19 aa, Homo sapiens
  MAP TO AL138788.1; EXPRESSED IN HEART, SIGNAL = 2.6; EXPRESSED IN PLACENTA, SIGNAL = 3.7; EXPRESSED IN LUNG, SIGNAL = 3.1; EXPRESSED IN ADULT LIVER, SIGNAL = 3.3; EXPRESSED IN HELA, SIGNAL = 3.6; EXPRESSED IN BONE MARROW, SIGNAL = 2.7; EXPRESSED IN BRAIN, SIGNAL = 2.8; EXPRESSED IN FETAL LIVER, SIGNAL = 2.8
TIMRNITNKKSSFKKSSIV

SEQ ID NO: 27940 - protein, 40 aa, Homo sapiens
  MAP TO AC015819.4; EXPRESSED IN PLACENTA, SIGNAL = 0.78; EXPRESSED IN BONE MARROW, SIGNAL = 0.68; EXPRESSED IN LUNG, SIGNAL = 0.68; EXPRESSED IN BRAIN, SIGNAL = 0.52; EXPRESSED IN FETAL LIVER, SIGNAL = 0.67; SWISSPROT HIT: P14347, EVALUE 6.50e+00
SIFNRSDSGVCHNPNEQPGLGHSLDSLRPAAQLPSFSWAW

SEQ ID NO: 27941 - protein, 40 aa, Homo sapiens
  MAP TO AC015819.4; EXPRESSED IN PLACENTA, SIGNAL = 0.78; EXPRESSED IN BONE MARROW, SIGNAL = 0.68; EXPRESSED IN LUNG, SIGNAL = 0.68; EXPRESSED IN BRAIN, SIGNAL = 0.52; EXPRESSED IN FETAL LIVER, SIGNAL = 0.67
APSSTGVTAVCVTTLTSSPGWGTAWTHFVLQPSSPASPGH

SEQ ID NO: 27942 - protein, 33 aa, Homo sapiens
  MAP TO AL137790.1; EXPRESSED IN FETAL LIVER, SIGNAL = 2.1; EXPRESSED IN HEART, SIGNAL = 2.3; EXPRESSED IN PLACENTA, SIGNAL = 2.7; EXPRESSED IN LUNG, SIGNAL = 2.3; EXPRESSED IN ADULT LIVER, SIGNAL = 2.3; EXPRESSED IN HELA, SIGNAL = 1.2; EXPRESSED IN BONE MARROW, SIGNAL = 2.2; EXPRESSED IN BRAIN, SIGNAL = 2.1
SLAGNAFHDDGCSADPGMTDTIAADGPGSAWLG

SEQ ID NO: 27943 - protein, 34 aa, Homo sapiens
  MAP TO AL133418.2; EXPRESSED IN BONE MARROW, SIGNAL = 1.2; EXPRESSED IN BRAIN, SIGNAL = 1.1; EXPRESSED IN HELA, SIGNAL = 0.67; EXPRESSED IN FETAL LIVER, SIGNAL =   1
MKVKDSACQKALLWRIREEKEMDCPGKDSNTKIT

SEQ ID NO: 27944 - protein, 30 aa, Homo sapiens
  MAP TO CHR22_214.0; EXPRESSED IN BONE MARROW, SIGNAL = 1.4; EXPRESSED IN LUNG, SIGNAL = 1.2; EXPRESSED IN ADULT LIVER, SIGNAL = 0.86; EXPRESSED IN BRAIN, SIGNAL = 1.3; EXPRESSED IN FETAL LIVER, SIGNAL = 0.93
LSSVKDVGGSSGETKGGGRRHHHCPQPCSL

SEQ ID NO: 27945 - protein, 39 aa, Homo sapiens
  MAP TO AC024195.2; EXPRESSED IN LUNG, SIGNAL = 0.66; EXPRESSED IN ADULT LIVER, SIGNAL = 0.69; EXPRESSED IN BRAIN, SIGNAL = 0.46; EXPRESSED IN FETAL LIVER, SIGNAL = 0.46; SWISSPROT HIT: P26342, EVALUE 5.00e-10
MESFTVLSGCASRGTTGLPQEVHVLNLRTAARGLASYRE

SEQ ID NO: 27946 - protein, 24 aa, Homo sapiens
  MAP TO AC024195.2; EXPRESSED IN LUNG, SIGNAL = 0.66; EXPRESSED IN ADULT LIVER, SIGNAL = 0.69; EXPRESSED IN BRAIN, SIGNAL = 0.46; EXPRESSED IN FETAL LIVER, SIGNAL = 0.46
WRASLFCQAVPAEAQLGCHRRCMS

SEQ ID NO: 27947 - protein, 27 aa, Homo sapiens
  MAP TO AC013637.3; EXPRESSED IN FETAL LIVER, SIGNAL = 0.95; EXPRESSED IN LUNG, SIGNAL = 0.83; EXPRESSED IN BONE MARROW, SIGNAL = 1.1; EXPRESSED IN BRAIN, SIGNAL = 0.68
MGEDAIEVTQREGDEDLQQGWISEKRA

SEQ ID NO: 27948 - protein, 40 aa, Homo sapiens
  MAP TO AL138740.2; EXPRESSED IN BRAIN, SIGNAL = 1.4; EXPRESSED IN LUNG, SIGNAL = 1.3; EXPRESSED IN FETAL LIVER, SIGNAL = 1.4; EXPRESSED IN BONE MARROW, SIGNAL = 1.1; EXPRESSED IN HEART, SIGNAL = 1.4
TKEEEIRKRLRSDRLLPSANHSDSAELDGAEVAFAKGLQR

SEQ ID NO: 27949 - protein, 72 aa, Homo sapiens
  MAP TO AL160058.2; EXPRESSED IN FETAL LIVER, SIGNAL = 0.56; EXPRESSED IN PLACENTA, SIGNAL = 0.8; EXPRESSED IN LUNG, SIGNAL = 0.63; EXPRESSED IN ADULT LIVER, SIGNAL = 0.64; EXPRESSED IN BONE MARROW, SIGNAL = 0.54; EXPRESSED IN BRAIN, SIGNAL = 0.59
RKKLRLNNLCNLSKISLQVNVELGNGTKISLLSPMFFTSELHSLTVQIAQRLWASNTRIVWKIISLCSPNEI

SEQ ID NO: 27950 - protein, 27 aa, Homo sapiens
  MAP TO AL136478.2; EXPRESSED IN PLACENTA, SIGNAL = 0.62; EXPRESSED IN LUNG, SIGNAL = 0.56; EXPRESSED IN BRAIN, SIGNAL = 0.51; EXPRESSED IN FETAL LIVER, SIGNAL = 0.58
MLGAGASKDLCFCSENILQRHTWKLMK

SEQ ID NO: 27951 - protein, 24 aa, Homo sapiens
  MAP TO AL136478.2; EXPRESSED IN PLACENTA, SIGNAL = 0.62; EXPRESSED IN LUNG, SIGNAL = 0.56; EXPRESSED IN BRAIN, SIGNAL = 0.51; EXPRESSED IN FETAL LIVER, SIGNAL = 0.58
CWEQGLQKTCAFAVRTFCRDTPGS

SEQ ID NO: 27952 - protein, 24 aa, Homo sapiens
  MAP TO AL137840.3; EXPRESSED IN PLACENTA, SIGNAL = 1.3; EXPRESSED IN ADULT LIVER, SIGNAL = 0.6; EXPRESSED IN FETAL LIVER, SIGNAL = 1.3; EXPRESSED IN LUNG, SIGNAL = 0.97; EXPRESSED IN BONE MARROW, SIGNAL = 1.2; EXPRESSED IN BRAIN, SIGNAL = 1.4
TMLCTEDMMQNKTDITTELKPVKS

SEQ ID NO: 27953 - protein, 78 aa, Homo sapiens
  MAP TO AL158832.2; EXPRESSED IN LUNG, SIGNAL = 1.1; EXPRESSED IN FETAL LIVER, SIGNAL = 1.1; EXPRESSED IN PLACENTA, SIGNAL = 1.3; EXPRESSED IN ADULT LIVER, SIGNAL = 0.86; EXPRESSED IN BONE MARROW, SIGNAL = 1.4; EXPRESSED IN BRAIN, SIGNAL = 0.99
DNHLEKFFTLCHSLESQVTFPIRVLDQKISEMALEHELKLSIICLNSSRLEPLVLFLHLVLDKLFQLSVQPMVIAGQT

SEQ ID NO: 27954 - protein, 17 aa, Homo sapiens
  MAP TO AL158832.2; EXPRESSED IN LUNG, SIGNAL = 1.1; EXPRESSED IN FETAL LIVER, SIGNAL = 1.1; EXPRESSED IN PLACENTA, SIGNAL = 1.3; EXPRESSED IN ADULT LIVER, SIGNAL = 0.86; EXPRESSED IN BONE MARROW, SIGNAL = 1.4; EXPRESSED IN BRAIN, SIGNAL = 0.99
TTTWRSSSPSATPWRAR

SEQ ID NO: 27955 - protein, 63 aa, Homo sapiens
  MAP TO CHR21_69.0; EXPRESSED IN LUNG, SIGNAL = 0.93; EXPRESSED IN FETAL LIVER, SIGNAL = 1.6; EXPRESSED IN PLACENTA, SIGNAL = 0.84; EXPRESSED IN ADULT LIVER, SIGNAL = 1.1; EXPRESSED IN BONE MARROW, SIGNAL = 1.6; EXPRESSED IN HELA, SIGNAL = 3.3; EXPRESSED IN BRAIN, SIGNAL = 1.6; SWISSPROT HIT: P02493, EVALUE 2.00e-32
MDVTIQHPWFKRTLGPFYPSRLFDQFFGEGLFEYDLLPFLSSTISPYYRQSLFRTVLDSGISE

SEQ ID NO: 27956 - protein, 39 aa, Homo sapiens
  MAP TO CHR21_69.0; EXPRESSED IN LUNG, SIGNAL = 0.93; EXPRESSED IN FETAL LIVER, SIGNAL = 1.6; EXPRESSED IN PLACENTA, SIGNAL = 0.84; EXPRESSED IN ADULT LIVER, SIGNAL = 1.1; EXPRESSED IN BONE MARROW, SIGNAL = 1.6; EXPRESSED IN HELA, SIGNAL = 3.3; EXPRESSED IN BRAIN, SIGNAL = 1.6
PRGTKAEHGRDHPAPLVQAHPGALLPQPAVRPVFRRGPF

SEQ ID NO: 27957 - protein, 123 aa, Homo sapiens
  MAP TO AL160314.1; EXPRESSED IN FETAL LIVER, SIGNAL = 1.7; EXPRESSED IN LUNG, SIGNAL = 1.4; EXPRESSED IN PLACENTA, SIGNAL = 1.2; EXPRESSED IN ADULT LIVER, SIGNAL = 1.3; EXPRESSED IN BONE MARROW, SIGNAL = 1.4; EXPRESSED IN BRAIN, SIGNAL = 0.97; SWISSPROT HIT: O14249, EVALUE 1.00e-14
LQNKFLARYVSLPNQNKIWTVTVSPEQNDRTPLVMVHGFGGGVGLWILNMDSLSARRTLHTFDLLGFGRSSRPAFPRDPEGAEDEFVTSIETWRETMGIPSMILLGHSLGGFLATSYSIKYPD

SEQ ID NO: 27958 - protein, 21 aa, Homo sapiens
  MAP TO AL160314.1; EXPRESSED IN FETAL LIVER, SIGNAL = 1.7; EXPRESSED IN LUNG, SIGNAL = 1.4; EXPRESSED IN PLACENTA, SIGNAL = 1.2; EXPRESSED IN ADULT LIVER, SIGNAL = 1.3; EXPRESSED IN BONE MARROW, SIGNAL = 1.4; EXPRESSED IN BRAIN, SIGNAL = 0.97
VSRISSWPDMYPSQTRIRSGR

SEQ ID NO: 27959 - protein, 64 aa, Homo sapiens
  MAP TO CHR21_71.0; EXPRESSED IN FETAL LIVER, SIGNAL = 1.4; EXPRESSED IN BONE MARROW, SIGNAL = 1.5; EXPRESSED IN BRAIN, SIGNAL = 1.4; EXPRESSED IN HEART, SIGNAL = 1.3; EXPRESSED IN LUNG, SIGNAL = 0.98; EXPRESSED IN HELA, SIGNAL = 3.5; EXPRESSED IN PLACENTA, SIGNAL = 0.91; EXPRESSED IN ADULT LIVER, SIGNAL = 1.2; SWISSPROT HIT: P56182, EVALUE 7.00e-17
SLVLNNITRGIFETIVEQAPLAIEDLLNELDTQDEEVASDSDESSEGGERGDALSQKRSEKPPA

SEQ ID NO: 27960 - protein, 27 aa, Homo sapiens
  MAP TO AC025758.1; EXPRESSED IN BONE MARROW, SIGNAL = 1.7; EXPRESSED IN HELA, SIGNAL = 1.3; EXPRESSED IN BRAIN, SIGNAL = 1.6; EXPRESSED IN FETAL LIVER, SIGNAL = 1.7; EXPRESSED IN LUNG, SIGNAL = 1.7; EXPRESSED IN PLACENTA, SIGNAL = 1.8; EXPRESSED IN ADULT LIVER, SIGNAL = 1.6
ILAPSSFSCLLFSAQPSRRISFLRLMA

SEQ ID NO: 27961 - protein, 35 aa, Homo sapiens
  MAP TO AL138722.2; EXPRESSED IN FETAL LIVER, SIGNAL = 2.3; EXPRESSED IN BONE MARROW, SIGNAL = 2.5; EXPRESSED IN LUNG, SIGNAL = 2.3; EXPRESSED IN HELA, SIGNAL = 1.3; EXPRESSED IN BRAIN, SIGNAL = 2.3; EXPRESSED IN PLACENTA, SIGNAL = 2.5; EXPRESSED IN ADULT LIVER, SIGNAL = 2.3
LLLASCVLILVMLSLLRIILELLLWSCLPSLQHIS

SEQ ID NO: 27962 - protein, 36 aa, Homo sapiens
  MAP TO CHR21_3.0; EXPRESSED IN LUNG, SIGNAL = 1.1; EXPRESSED IN BRAIN, SIGNAL = 2.5; EXPRESSED IN PLACENTA, SIGNAL = 1.1; EXPRESSED IN HEART, SIGNAL = 2.5; EXPRESSED IN ADULT LIVER, SIGNAL = 1.5; EXPRESSED IN BONE MARROW, SIGNAL = 2.4; EXPRESSED IN HELA, SIGNAL =  10; EXPRESSED IN FETAL LIVER, SIGNAL = 2.2; SWISSPROT HIT: O15084, EVALUE 2.70e-01
ALQCQREACANILIDSGADPNIVDVYGNTAVHYAVN

SEQ ID NO: 27963 - protein, 17 aa, Homo sapiens
  MAP TO CHR21_3.0; EXPRESSED IN LUNG, SIGNAL = 1.1; EXPRESSED IN BRAIN, SIGNAL = 2.5; EXPRESSED IN PLACENTA, SIGNAL = 1.1; EXPRESSED IN HEART, SIGNAL = 2.5; EXPRESSED IN ADULT LIVER, SIGNAL = 1.5; EXPRESSED IN BONE MARROW, SIGNAL = 2.4; EXPRESSED IN HELA, SIGNAL =  10; EXPRESSED IN FETAL LIVER, SIGNAL = 2.2
SAMPEGGLCKYSHRFWC

SEQ ID NO: 27964 - protein, 52 aa, Homo sapiens
  MAP TO CHR22_206.0; EXPRESSED IN BRAIN, SIGNAL = 1.1; EXPRESSED IN FETAL LIVER, SIGNAL = 1.2; EXPRESSED IN HEART, SIGNAL = 1.5; EXPRESSED IN LUNG, SIGNAL = 1.5; EXPRESSED IN BONE MARROW, SIGNAL = 1.1; EXPRESSED IN ADULT LIVER, SIGNAL = 1.3
ALLQAQVLRAAAAAAELHQLHQPEHVLRGAGRLQLGLQHHAHQNMALQRHRG

SEQ ID NO: 27965 - protein, 66 aa, Homo sapiens
  MAP TO CHR22_206.0; EXPRESSED IN BRAIN, SIGNAL = 1.1; EXPRESSED IN FETAL LIVER, SIGNAL = 1.2; EXPRESSED IN HEART, SIGNAL = 1.5; EXPRESSED IN LUNG, SIGNAL = 1.5; EXPRESSED IN BONE MARROW, SIGNAL = 1.1; EXPRESSED IN ADULT LIVER, SIGNAL = 1.3; SWISSPROT HIT: P21958, EVALUE 4.60e+00
EQCFCSCPTPSASSQGSSGGGGTPPAPPTRTCSARSGSATTGPTTPCSPKHGAPAPQGMKSLLIGC

SEQ ID NO: 27966 - protein, 35 aa, Homo sapiens
  MAP TO AL160237.1; EXPRESSED IN HEART, SIGNAL =   5; EXPRESSED IN FETAL LIVER, SIGNAL = 6.1; EXPRESSED IN PLACENTA, SIGNAL = 6.1; EXPRESSED IN ADULT LIVER, SIGNAL = 5.4; EXPRESSED IN BONE MARROW, SIGNAL = 6.7; EXPRESSED IN BRAIN, SIGNAL = 5.6; EXPRESSED IN LUNG, SIGNAL = 5.8
DGKCLFQQPSKPEMNCSLQNCQKEEIEKKKEAIGP

SEQ ID NO: 27967 - protein, 67 aa, Homo sapiens
  MAP TO CHR21_73.0; EXPRESSED IN FETAL LIVER, SIGNAL = 1.1; EXPRESSED IN HEART, SIGNAL = 1.2; EXPRESSED IN BONE MARROW, SIGNAL = 1.2; EXPRESSED IN LUNG, SIGNAL = 0.78; EXPRESSED IN BRAIN, SIGNAL = 1.2; EXPRESSED IN ADULT LIVER, SIGNAL = 0.91; EXPRESSED IN HELA, SIGNAL = 2.5; SWISSPROT HIT: Q00587, EVALUE 7.00e-01
SADEVCRGRVSLCSPAPVSRPSAPTASPPGTFPSCMVPAACGPGGGGPGLPPRDGRSRRRADCPLLA

SEQ ID NO: 27968 - protein, 86 aa, Homo sapiens
  MAP TO AL138748.1; EXPRESSED IN FETAL LIVER, SIGNAL = 0.56; EXPRESSED IN BONE MARROW, SIGNAL = 0.55; EXPRESSED IN PLACENTA, SIGNAL = 0.6; EXPRESSED IN BRAIN, SIGNAL = 0.65; SWISSPROT HIT: P24386, EVALUE 4.00e-44
MSCEMLTEQTPSSDPENALEVNGAEVTGEKENHCDDKTCVPSTSAEDMSENVPIAEDTTEQPKKNRITYSQIIKEGRRFNIDLVSK

SEQ ID NO: 27969 - protein, 18 aa, Homo sapiens
  MAP TO AL138748.1; EXPRESSED IN FETAL LIVER, SIGNAL = 0.56; EXPRESSED IN BONE MARROW, SIGNAL = 0.55; EXPRESSED IN PLACENTA, SIGNAL = 0.6; EXPRESSED IN BRAIN, SIGNAL = 0.65
ICMKMSKKLVHCRKIMLL

SEQ ID NO: 27970 - protein, 61 aa, Homo sapiens
  MAP TO AF239614.1; EXPRESSED IN FETAL LIVER, SIGNAL = 0.49; EXPRESSED IN BONE MARROW, SIGNAL = 0.43; EXPRESSED IN BRAIN, SIGNAL = 0.64; EXPRESSED IN ADULT LIVER, SIGNAL = 0.38; SWISSPROT HIT: P54296, EVALUE 2.00e-28
SVVGSGSWQRVNAQTAVRSPRYAVFDLMEGKSYVFRVLSANRHGLSEPSEITSPIQAQDVT

SEQ ID NO: 27971 - protein, 39 aa, Homo sapiens
  MAP TO CHR22_153.0; EXPRESSED IN BONE MARROW, SIGNAL = 1.1; EXPRESSED IN BRAIN, SIGNAL = 0.94; EXPRESSED IN HELA, SIGNAL = 1.4; EXPRESSED IN FETAL LIVER, SIGNAL = 0.96; EXPRESSED IN ADULT LIVER, SIGNAL = 0.77; SWISSPROT HIT: P55957, EVALUE 6.00e-09
DRNRDLATALEQLLQAYPRDMEKEKTMLVLALLLAKKVA

SEQ ID NO: 27972 - protein, 17 aa, Homo sapiens
  MAP TO CHR22_153.0; EXPRESSED IN BONE MARROW, SIGNAL = 1.1; EXPRESSED IN BRAIN, SIGNAL = 0.94; EXPRESSED IN HELA, SIGNAL = 1.4; EXPRESSED IN FETAL LIVER, SIGNAL = 0.96; EXPRESSED IN ADULT LIVER, SIGNAL = 0.77
PEQGPGHCPGAAAAGLP

SEQ ID NO: 27973 - protein, 55 aa, Homo sapiens
  MAP TO AC005629.2; EXPRESSED IN PLACENTA, SIGNAL = 0.66; EXPRESSED IN ADULT LIVER, SIGNAL = 0.45; EXPRESSED IN BRAIN, SIGNAL = 0.71; EXPRESSED IN HELA, SIGNAL = 0.8; EXPRESSED IN FETAL LIVER, SIGNAL = 0.77; EXPRESSED IN LUNG, SIGNAL = 0.49; SWISSPROT HIT: P93119, EVALUE 1.60e+00
MQTWHSKDDTPLAHVTSTCSANALPRHKNINIRSTIPSLPCSPKTAIIIINIDIV

SEQ ID NO: 27974 - protein, 35 aa, Homo sapiens
  MAP TO AC022057.2; EXPRESSED IN BONE MARROW, SIGNAL = 0.61; EXPRESSED IN BRAIN, SIGNAL = 0.53; EXPRESSED IN FETAL LIVER, SIGNAL = 0.68; EXPRESSED IN LUNG, SIGNAL = 0.62; EXPRESSED IN ADULT LIVER, SIGNAL = 0.72; SWISSPROT HIT: O47478, EVALUE 8.60e+00
RFTNHWEFEIFFRYNNIKVIVNFVLVIIKRICYIL

SEQ ID NO: 27975 - protein, 125 aa, Homo sapiens
  MAP TO AF238280.1; EXPRESSED IN FETAL LIVER, SIGNAL = 1.1; EXPRESSED IN LUNG, SIGNAL = 1.1; EXPRESSED IN ADULT LIVER, SIGNAL = 1.1; EXPRESSED IN BONE MARROW, SIGNAL = 1.2; EXPRESSED IN BRAIN, SIGNAL =   1; EXPRESSED IN HELA, SIGNAL = 0.73; SWISSPROT HIT: Q99676, EVALUE 4.00e-48
KAFSTQLFLIQHQRIHTGEKPYECNECAKSFSLNRTLTVHQRIHTGEKPYRCNECGKSFSQCSQVIQHKRIHTGEKPYICNECGKSFGARLSLIQHQRIHTGEKPYGCSVCGKTFSQKGHLIQHQ

SEQ ID NO: 27976 - protein, 81 aa, Homo sapiens
  MAP TO CHR21_65.0; EXPRESSED IN HEART, SIGNAL = 1.3; EXPRESSED IN BRAIN, SIGNAL = 1.7; EXPRESSED IN LUNG, SIGNAL = 0.88; EXPRESSED IN HELA, SIGNAL = 4.2; EXPRESSED IN FETAL LIVER, SIGNAL = 1.5
WCLLQGTGERCVCSSWDRQERRAGGRMRAAVACRSHSVMPDHGACHAGSPTATRGTASMLSVRKLWPGDRWAMSSSSCCQQ

SEQ ID NO: 27977 - protein, 26 aa, Homo sapiens
  MAP TO CHR21_65.0; EXPRESSED IN HEART, SIGNAL = 1.3; EXPRESSED IN BRAIN, SIGNAL = 1.7; EXPRESSED IN LUNG, SIGNAL = 0.88; EXPRESSED IN HELA, SIGNAL = 4.2; EXPRESSED IN FETAL LIVER, SIGNAL = 1.5
GAFCRALENAVCAHLGTGRRGGQVAG

SEQ ID NO: 27978 - protein, 63 aa, Homo sapiens
  MAP TO CHR21_65.0; EXPRESSED IN HEART, SIGNAL = 1.3; EXPRESSED IN BRAIN, SIGNAL = 1.7; EXPRESSED IN LUNG, SIGNAL = 0.88; EXPRESSED IN HELA, SIGNAL = 4.2; EXPRESSED IN FETAL LIVER, SIGNAL = 1.5; SWISSPROT HIT: Q52523, EVALUE 8.90e+00
AGEEGRWQDEGGCSLQVTQCYARPRCLPRWVSNGHTRHCFHVISEETVAWRQVGDEFKFLLPT

SEQ ID NO: 27979 - protein, 76 aa, Homo sapiens
  MAP TO AC007029.3; EXPRESSED IN BONE MARROW, SIGNAL = 0.8; EXPRESSED IN HELA, SIGNAL = 0.82; EXPRESSED IN BRAIN, SIGNAL = 0.71; EXPRESSED IN LUNG, SIGNAL = 0.64; EXPRESSED IN FETAL LIVER, SIGNAL = 0.72; EXPRESSED IN PLACENTA, SIGNAL = 0.59; EXPRESSED IN ADULT LIVER, SIGNAL = 0.63; SWISSPROT HIT: P27113, EVALUE 1.10e+00
GVWAVITWLCGTEASSTASWLIVCNGQWLHADIDFVDIQMIKHTLVYSYHFKTEQETADVTHHFLWASIGLPSEEP

SEQ ID NO: 27980 - protein, 24 aa, Homo sapiens
  MAP TO AC007029.3; EXPRESSED IN BONE MARROW, SIGNAL = 0.8; EXPRESSED IN HELA, SIGNAL = 0.82; EXPRESSED IN BRAIN, SIGNAL = 0.71; EXPRESSED IN LUNG, SIGNAL = 0.64; EXPRESSED IN FETAL LIVER, SIGNAL = 0.72; EXPRESSED IN PLACENTA, SIGNAL = 0.59; EXPRESSED IN ADULT LIVER, SIGNAL = 0.63
WSVGCYNLAVWNRSFFNSFLAHCV

SEQ ID NO: 27981 - protein, 73 aa, Homo sapiens
  MAP TO CHR22_207.0; EXPRESSED IN FETAL LIVER, SIGNAL = 1.2; EXPRESSED IN BONE MARROW, SIGNAL = 1.4; EXPRESSED IN LUNG, SIGNAL = 0.7; EXPRESSED IN BRAIN, SIGNAL = 1.3; EXPRESSED IN ADULT LIVER, SIGNAL = 0.86; EXPRESSED IN HELA, SIGNAL = 2.7; SWISSPROT HIT: P13866, EVALUE 2.00e-41
FHEVGGYDAFMEKYMKAIPTIVSDGNTTFQEKCYTPRADSFHIFRDPLTGDLPWPGFIFGMSILTLWYWCTDQ

SEQ ID NO: 27982 - protein, 46 aa, Homo sapiens
  MAP TO AL137005.2; EXPRESSED IN LUNG, SIGNAL = 7.3; EXPRESSED IN BONE MARROW, SIGNAL = 7.7; EXPRESSED IN ADULT LIVER, SIGNAL = 7.9; EXPRESSED IN HELA, SIGNAL = 5.5; EXPRESSED IN BRAIN, SIGNAL =   7; EXPRESSED IN FETAL LIVER, SIGNAL = 7.4; EXPRESSED IN HEART, SIGNAL = 6.5
SGGDIRPWCSLACRCVTPVTASIVHGGLPVCFAVSSFFIKTPVRLD

SEQ ID NO: 27983 - protein, 20 aa, Homo sapiens
  MAP TO CHR21_71.0; EXPRESSED IN HEART, SIGNAL = 1.2; EXPRESSED IN LUNG, SIGNAL =   1; EXPRESSED IN BONE MARROW, SIGNAL = 1.6; EXPRESSED IN BRAIN, SIGNAL = 1.3; EXPRESSED IN HELA, SIGNAL = 3.2; EXPRESSED IN FETAL LIVER, SIGNAL = 1.6
KVRRSPRARAWRGRGAGGGV

SEQ ID NO: 27984 - protein, 40 aa, Homo sapiens
  MAP TO CHR22_18.0; EXPRESSED IN HELA, SIGNAL = 2.7; EXPRESSED IN BRAIN, SIGNAL = 3.4; EXPRESSED IN FETAL LIVER, SIGNAL = 3.2; EXPRESSED IN BONE MARROW, SIGNAL = 3.6; EXPRESSED IN LUNG, SIGNAL = 3.3; EXPRESSED IN HEART, SIGNAL =   3; EXPRESSED IN ADULT LIVER, SIGNAL = 3.1
MEIPMSQTAVIIIALLGLATQWGYQALGPCWGTSAKNPVM

SEQ ID NO: 27985 - protein, 123 aa, Homo sapiens
  MAP TO AL080248.7; EXPRESSED IN PLACENTA, SIGNAL = 0.75; EXPRESSED IN LUNG, SIGNAL = 0.66; EXPRESSED IN FETAL LIVER, SIGNAL = 0.88; EXPRESSED IN ADULT LIVER, SIGNAL = 0.93; EXPRESSED IN BONE MARROW, SIGNAL = 0.84; EXPRESSED IN BRAIN, SIGNAL = 0.68; EXPRESSED IN HELA, SIGNAL = 0.61; EXPRESSED IN HEART, SIGNAL = 1.3; SWISSPROT HIT: P43244, EVALUE 3.90e-01
CDDDKVVTLKDSKSQMRRKMSDLLTYAKIVSSESVNRVEQVDNKEVLNINNEAPVVHSLVSSEKAKMALSLDDCDNSNNENDFVNTTEKVLIHDMLKICDGFIEGLEQRMFVADSRTRNHFSL

SEQ ID NO: 27986 - protein, 28 aa, Homo sapiens
  MAP TO AL139112.1; EXPRESSED IN BRAIN, SIGNAL = 0.46; EXPRESSED IN FETAL LIVER, SIGNAL = 0.56; EXPRESSED IN ADULT LIVER, SIGNAL = 0.58
MSMEELRDADKVFLNLDSVHVGSYNVKI

SEQ ID NO: 27987 - protein, 36 aa, Homo sapiens
  MAP TO AC020698.2; EXPRESSED IN PLACENTA, SIGNAL = 0.87; EXPRESSED IN ADULT LIVER, SIGNAL = 0.99; EXPRESSED IN BONE MARROW, SIGNAL = 0.48; EXPRESSED IN BRAIN, SIGNAL = 0.46; SWISSPROT HIT: P96254, EVALUE 5.00e+00
VKGREAAHTAAVVRVCVEGKGREAAHTAAVVWVCVE

SEQ ID NO: 27988 - protein, 78 aa, Homo sapiens
  MAP TO AC015937.3; EXPRESSED IN FETAL LIVER, SIGNAL = 1.8; EXPRESSED IN BONE MARROW, SIGNAL = 1.8; EXPRESSED IN PLACENTA, SIGNAL = 2.9; EXPRESSED IN BRAIN, SIGNAL = 2.3; EXPRESSED IN HEART, SIGNAL = 1.7; EXPRESSED IN ADULT LIVER, SIGNAL = 1.9; SWISSPROT HIT: P24177, EVALUE 1.40e+00
FRVGGGNRHGEGGKGSETSLLERGERRMSRYKGKAMGKGIGRASPSGRARKVGEKVLPRKWGLENNNDSNSPGKQEEQ

SEQ ID NO: 27989 - protein, 27 aa, Homo sapiens
  MAP TO AC015937.3; EXPRESSED IN FETAL LIVER, SIGNAL = 1.8; EXPRESSED IN BONE MARROW, SIGNAL = 1.8; EXPRESSED IN PLACENTA, SIGNAL = 2.9; EXPRESSED IN BRAIN, SIGNAL = 2.3; EXPRESSED IN HEART, SIGNAL = 1.7; EXPRESSED IN ADULT LIVER, SIGNAL = 1.9
SELVAATGMVKEARALKRLSWRGERGG

SEQ ID NO: 27990 - protein, 70 aa, Homo sapiens
  MAP TO AL136105.2; EXPRESSED IN BRAIN, SIGNAL = 2.3; EXPRESSED IN LUNG, SIGNAL = 3.5; EXPRESSED IN HEART, SIGNAL = 2.8; EXPRESSED IN PLACENTA, SIGNAL = 4.5; EXPRESSED IN ADULT LIVER, SIGNAL = 4.4; EXPRESSED IN HELA, SIGNAL = 3.4; EXPRESSED IN FETAL LIVER, SIGNAL = 3.1; EXPRESSED IN BONE MARROW, SIGNAL = 2.8; SWISSPROT HIT: O00214, EVALUE 5.00e-36
FQVDLQNGSSMKPRADVAFHFNPRFKRAGCIVCNTLINEKWGREEITYDTPFKREKSFEIVIMVLKDKFQ

SEQ ID NO: 27991 - protein, 56 aa, Homo sapiens
  MAP TO AJ239319.2; EXPRESSED IN PLACENTA, SIGNAL = 2.6; EXPRESSED IN BRAIN, SIGNAL = 2.1; EXPRESSED IN HEART, SIGNAL = 2.2; EXPRESSED IN ADULT LIVER, SIGNAL = 2.7; EXPRESSED IN FETAL LIVER, SIGNAL = 2.1; EXPRESSED IN BONE MARROW, SIGNAL = 2.4; SWISSPROT HIT: P21675, EVALUE 9.00e-20
YGSYEEPDPKSNTQDTSFSSIGGYEVSEEEEDEEEEEQRSGPSVLSQVHLSEDEED

SEQ ID NO: 27992 - protein, 44 aa, Homo sapiens
  MAP TO AJ239319.2; EXPRESSED IN PLACENTA, SIGNAL = 2.6; EXPRESSED IN BRAIN, SIGNAL = 2.1; EXPRESSED IN HEART, SIGNAL = 2.2; EXPRESSED IN ADULT LIVER, SIGNAL = 2.7; EXPRESSED IN FETAL LIVER, SIGNAL = 2.1; EXPRESSED IN BONE MARROW, SIGNAL = 2.4
MGAMRSLIPSRTPKTQASAASVGMRYQRRKKMRRRKSSALGRAY

SEQ ID NO: 27993 - protein, 72 aa, Homo sapiens
  MAP TO AL136381.1; EXPRESSED IN PLACENTA, SIGNAL = 0.94; EXPRESSED IN ADULT LIVER, SIGNAL = 1.1; EXPRESSED IN LUNG, SIGNAL = 0.91; EXPRESSED IN BONE MARROW, SIGNAL = 0.69; EXPRESSED IN BRAIN, SIGNAL = 0.64; SWISSPROT HIT: Q16513, EVALUE 8.00e-34
AQARFNESSQKLDLLKYSLEQRLNEVPKNHPKSRIIIEELSLVAASPTLSPRQSMISTQNQYSTLSKPAALT

SEQ ID NO: 27994 - protein, 29 aa, Homo sapiens
  MAP TO AL138743.1; EXPRESSED IN BONE MARROW, SIGNAL = 0.56; EXPRESSED IN BRAIN, SIGNAL = 0.51; EXPRESSED IN PLACENTA, SIGNAL = 0.69; EXPRESSED IN FETAL LIVER, SIGNAL = 0.52; EXPRESSED IN LUNG, SIGNAL = 0.62
RKGNTHTLLVGITHVLIHMWMLKNVYTWT

SEQ ID NO: 27995 - protein, 29 aa, Homo sapiens
  MAP TO AL137071.3; EXPRESSED IN FETAL LIVER, SIGNAL = 0.56; EXPRESSED IN BONE MARROW, SIGNAL = 0.59; EXPRESSED IN BRAIN, SIGNAL = 0.52; EXPRESSED IN PLACENTA, SIGNAL = 0.77; EXPRESSED IN ADULT LIVER, SIGNAL = 0.88
LVAIHYQHTTGNDDDQILIRKKDKHTHTT

SEQ ID NO: 27996 - protein, 17 aa, Homo sapiens
  MAP TO AL137071.3; EXPRESSED IN FETAL LIVER, SIGNAL = 0.56; EXPRESSED IN BONE MARROW, SIGNAL = 0.59; EXPRESSED IN BRAIN, SIGNAL = 0.52; EXPRESSED IN PLACENTA, SIGNAL = 0.77; EXPRESSED IN ADULT LIVER, SIGNAL = 0.88
WLLYITSTPLAMTMTKF

SEQ ID NO: 27997 - protein, 41 aa, Homo sapiens
  MAP TO AL136147.2; EXPRESSED IN BONE MARROW, SIGNAL = 0.57; EXPRESSED IN PLACENTA, SIGNAL = 0.86; EXPRESSED IN BRAIN, SIGNAL = 0.57; EXPRESSED IN ADULT LIVER, SIGNAL = 0.81; EXPRESSED IN LUNG, SIGNAL = 0.79; EXPRESSED IN FETAL LIVER, SIGNAL = 0.6; SWISSPROT HIT: O09167, EVALUE 3.80e+00
FLMNSLTSNDSRRITHTDKGNWRKLPRRATPPKGFFKYMKH

SEQ ID NO: 27998 - protein, 73 aa, Homo sapiens
  MAP TO AL137068.1; EXPRESSED IN FETAL LIVER, SIGNAL = 0.71; EXPRESSED IN BONE MARROW, SIGNAL = 0.82; EXPRESSED IN PLACENTA, SIGNAL = 0.85; EXPRESSED IN ADULT LIVER, SIGNAL = 1.1; EXPRESSED IN BRAIN, SIGNAL = 0.68; EXPRESSED IN LUNG, SIGNAL = 0.99; SWISSPROT HIT: P13648, EVALUE 7.00e-03
QIAANEALKKDLEGVISGLQEYLGTIKGQATQAQNECRKLRDEKETLLQRLTEVEQERDQLEIVAMDAENMRK

SEQ ID NO: 27999 - protein, 34 aa, Homo sapiens
  MAP TO CHR22_43.0; EXPRESSED IN FETAL LIVER, SIGNAL =  11; EXPRESSED IN BONE MARROW, SIGNAL =  12; EXPRESSED IN BRAIN, SIGNAL =  11; EXPRESSED IN HEART, SIGNAL =  10; EXPRESSED IN HELA, SIGNAL = 6.1; EXPRESSED IN LUNG, SIGNAL =  12; EXPRESSED IN ADULT LIVER, SIGNAL =  12; SWISSPROT HIT: Q08598, EVALUE 5.00e+00
VLGEDPDLAIFQWHLFHHEFLRQSDGATLFQNNH

SEQ ID NO: 28000 - protein, 17 aa, Homo sapiens
  MAP TO CHR22_43.0; EXPRESSED IN FETAL LIVER, SIGNAL =  11; EXPRESSED IN BONE MARROW, SIGNAL =  12; EXPRESSED IN BRAIN, SIGNAL =  11; EXPRESSED IN HEART, SIGNAL =  10; EXPRESSED IN HELA, SIGNAL = 6.1; EXPRESSED IN LUNG, SIGNAL =  12; EXPRESSED IN ADULT LIVER, SIGNAL =  12
SWGRSRLSHFPVAPLPP

SEQ ID NO: 28001 - protein, 30 aa, Homo sapiens
  MAP TO AL138840.1; EXPRESSED IN HELA, SIGNAL =   1; EXPRESSED IN BRAIN, SIGNAL = 1.3; EXPRESSED IN FETAL LIVER, SIGNAL = 1.2; EXPRESSED IN HEART, SIGNAL = 1.3; EXPRESSED IN PLACENTA, SIGNAL = 1.5; EXPRESSED IN LUNG, SIGNAL = 1.3; EXPRESSED IN ADULT LIVER, SIGNAL = 1.2; EXPRESSED IN BONE MARROW, SIGNAL = 1.1; SWISSPROT HIT: P06126, EVALUE 3.90e+00
IEDFYKSFLDASYAHVFQQKVNVWLSHAPS

SEQ ID NO: 28002 - protein, 69 aa, Homo sapiens
  MAP TO AF235094.1; EXPRESSED IN BONE MARROW, SIGNAL = 8.2; EXPRESSED IN BRAIN, SIGNAL = 7.1; EXPRESSED IN HEART, SIGNAL = 6.9; EXPRESSED IN LUNG, SIGNAL = 8.7; EXPRESSED IN PLACENTA, SIGNAL = 9.6; EXPRESSED IN HELA, SIGNAL = 4.5; EXPRESSED IN FETAL LIVER, SIGNAL = 7.5; SWISSPROT HIT: O43653, EVALUE 4.00e-19
AVGLLTVISKGCSLNCVDDSQDYYVGKKNITCCDTDLCNASGAHALQPAAAILALLPALGLLLWGPGQL

SEQ ID NO: 28003 - protein, 24 aa, Homo sapiens
  MAP TO AL138726.2; EXPRESSED IN FETAL LIVER, SIGNAL = 0.8; EXPRESSED IN BONE MARROW, SIGNAL = 0.78; EXPRESSED IN BRAIN, SIGNAL = 0.68; EXPRESSED IN LUNG, SIGNAL = 0.78; EXPRESSED IN PLACENTA, SIGNAL = 0.86
CWTREDVMYSFSLMLIHGWSLGSS

SEQ ID NO: 28004 - protein, 32 aa, Homo sapiens
  MAP TO AC016078.3; EXPRESSED IN LUNG, SIGNAL = 1.2; EXPRESSED IN HELA, SIGNAL = 0.85; EXPRESSED IN BRAIN, SIGNAL =   1; EXPRESSED IN PLACENTA, SIGNAL = 1.3; EXPRESSED IN FETAL LIVER, SIGNAL = 1.6; EXPRESSED IN BONE MARROW, SIGNAL = 1.3
LGLPVWHSIGMVTDDILALLLMLAEVTSFPSF

SEQ ID NO: 28005 - protein, 48 aa, Homo sapiens
  MAP TO AL121957.3; EXPRESSED IN LUNG, SIGNAL = 0.57; EXPRESSED IN FETAL LIVER, SIGNAL = 0.45; EXPRESSED IN BONE MARROW, SIGNAL = 0.44; EXPRESSED IN BRAIN, SIGNAL = 0.42
WESPLPGVRTLLHMPIGWESKIQNLCLPQWKARLYIPTRPHSVRNSSK

SEQ ID NO: 28006 - protein, 31 aa, Homo sapiens
  MAP TO CHR22_185_1.0; EXPRESSED IN FETAL LIVER, SIGNAL = 0.55; EXPRESSED IN PLACENTA, SIGNAL = 0.65; EXPRESSED IN LUNG, SIGNAL = 0.52; EXPRESSED IN ADULT LIVER, SIGNAL = 0.49; EXPRESSED IN BONE MARROW, SIGNAL = 0.5; EXPRESSED IN BRAIN, SIGNAL = 0.44
VTTPSVIQVQKASASPGSCSRRHNCRPIPRL

SEQ ID NO: 28007 - protein, 66 aa, Homo sapiens
  MAP TO CHR22_171.0; EXPRESSED IN BONE MARROW, SIGNAL = 0.91; EXPRESSED IN BRAIN, SIGNAL = 0.68; EXPRESSED IN HELA, SIGNAL = 0.9; EXPRESSED IN FETAL LIVER, SIGNAL = 0.99; EXPRESSED IN LUNG, SIGNAL = 0.96; EXPRESSED IN ADULT LIVER, SIGNAL = 0.98
EVTAAPAVAVPPEATVAITTALSKAGPAIPTPAVSSALAVAVPLGPIMAVTAAPAMVATLGTVTKD

SEQ ID NO: 28008 - protein, 48 aa, Homo sapiens
  MAP TO AL136163.3; EXPRESSED IN FETAL LIVER, SIGNAL = 2.9; EXPRESSED IN BONE MARROW, SIGNAL = 3.1; EXPRESSED IN BRAIN, SIGNAL = 2.9; EXPRESSED IN HEART, SIGNAL = 2.5; EXPRESSED IN HELA, SIGNAL = 1.4; EXPRESSED IN PLACENTA, SIGNAL = 3.3; EXPRESSED IN LUNG, SIGNAL =   3; EXPRESSED IN ADULT LIVER, SIGNAL = 2.7
RRKKRKKKKVRRRRKEEVGERRKGEKREGGGGRRGGRGAGRGAGRKGG

SEQ ID NO: 28009 - protein, 52 aa, Homo sapiens
  MAP TO CHR22_207.0; EXPRESSED IN FETAL LIVER, SIGNAL = 1.6; EXPRESSED IN BONE MARROW, SIGNAL = 1.8; EXPRESSED IN HELA, SIGNAL =   4; EXPRESSED IN BRAIN, SIGNAL = 1.7; EXPRESSED IN LUNG, SIGNAL =   1; EXPRESSED IN ADULT LIVER, SIGNAL = 0.85; EXPRESSED IN PLACENTA, SIGNAL = 0.86
ELAALARGKDATLPPWTVAPGAPRPPRSPGLLRPTSSFAMQPISPSSLSTSW

SEQ ID NO: 28010 - protein, 18 aa, Homo sapiens
  MAP TO CHR21_21.0; EXPRESSED IN PLACENTA, SIGNAL = 0.51; EXPRESSED IN LUNG, SIGNAL = 0.68; EXPRESSED IN FETAL LIVER, SIGNAL =   1; EXPRESSED IN ADULT LIVER, SIGNAL = 0.77; EXPRESSED IN BONE MARROW, SIGNAL = 1.2; EXPRESSED IN BRAIN, SIGNAL = 1.2; EXPRESSED IN HELA, SIGNAL = 3.8
KSGHTSTEYKDYFGEVIL

SEQ ID NO: 28011 - protein, 47 aa, Homo sapiens
  MAP TO AL137855.1; EXPRESSED IN FETAL LIVER, SIGNAL = 8.4; EXPRESSED IN HEART, SIGNAL = 7.1; EXPRESSED IN PLACENTA, SIGNAL = 9.3; EXPRESSED IN BONE MARROW, SIGNAL = 8.5; EXPRESSED IN LUNG, SIGNAL =  11; EXPRESSED IN ADULT LIVER, SIGNAL = 9.6; EXPRESSED IN BRAIN, SIGNAL = 8.2
MLLTESLFGGLSTRMRVKGTLTEVIQGPALGTFQVSPMENVFEQGLQ

SEQ ID NO: 28012 - protein, 25 aa, Homo sapiens
  MAP TO AC012186.3; EXPRESSED IN BONE MARROW, SIGNAL = 3.6; EXPRESSED IN BRAIN, SIGNAL =   3; EXPRESSED IN PLACENTA, SIGNAL = 3.4; EXPRESSED IN ADULT LIVER, SIGNAL =   4; EXPRESSED IN LUNG, SIGNAL = 4.4; EXPRESSED IN HEART, SIGNAL = 4.9; EXPRESSED IN HELA, SIGNAL = 2.3; EXPRESSED IN FETAL LIVER, SIGNAL = 3.1
CAWCSASRPAPSRSAREAPSASTSP

SEQ ID NO: 28013 - protein, 25 aa, Homo sapiens
  MAP TO CHR22_164.0; EXPRESSED IN BRAIN, SIGNAL = 0.41; EXPRESSED IN FETAL LIVER, SIGNAL = 0.66; EXPRESSED IN LUNG, SIGNAL = 1.2; EXPRESSED IN BONE MARROW, SIGNAL = 0.69; EXPRESSED IN ADULT LIVER, SIGNAL = 0.93
PAPGRLRAARDTRAAGKTQLLFVHK

SEQ ID NO: 28014 - protein, 108 aa, Homo sapiens
  MAP TO CHR22_164.0; EXPRESSED IN BRAIN, SIGNAL = 0.41; EXPRESSED IN FETAL LIVER, SIGNAL = 0.66; EXPRESSED IN LUNG, SIGNAL = 1.2; EXPRESSED IN BONE MARROW, SIGNAL = 0.69; EXPRESSED IN ADULT LIVER, SIGNAL = 0.93; SWISSPROT HIT: P91621, EVALUE 1.10e+00
LLPGDSGQPETLVLRVRPSFCLCTSNTTTEICNYCKDAGTFTVFCYGARTKAGQKPDQQSAGDDEPPSSRHHVREAPGPLSPGGDPAGQPDVCLNATDFKQFTNETHC

SEQ ID NO: 28015 - protein, 45 aa, Homo sapiens
  MAP TO AF235096.1; EXPRESSED IN HELA, SIGNAL = 0.91; EXPRESSED IN FETAL LIVER, SIGNAL = 2.2; EXPRESSED IN LUNG, SIGNAL =   2; EXPRESSED IN ADULT LIVER, SIGNAL = 2.2; EXPRESSED IN BONE MARROW, SIGNAL = 1.9; EXPRESSED IN BRAIN, SIGNAL =   2; SWISSPROT HIT: Q9P784, EVALUE 3.70e+00
HIGPAIPEVSSVWFKLYIYHVTGQGPPSLLLSKGTRLRKLPDIFQ

SEQ ID NO: 28016 - protein, 53 aa, Homo sapiens
  MAP TO AL137799.2; EXPRESSED IN BONE MARROW, SIGNAL = 6.1; EXPRESSED IN HEART, SIGNAL = 3.2; EXPRESSED IN PLACENTA, SIGNAL =   4; EXPRESSED IN LUNG, SIGNAL = 5.5; EXPRESSED IN BRAIN, SIGNAL = 3.6
ILSHWNFIKFPRRTATLRPPVQPQHPSQHQSPSKPRSEDAPTSTSSFSQQTLL

SEQ ID NO: 28017 - protein, 69 aa, Homo sapiens
  MAP TO CHR22_167.0; EXPRESSED IN FETAL LIVER, SIGNAL = 1.4; EXPRESSED IN PLACENTA, SIGNAL = 1.4; EXPRESSED IN LUNG, SIGNAL = 1.4; EXPRESSED IN ADULT LIVER, SIGNAL = 1.5; EXPRESSED IN BONE MARROW, SIGNAL = 1.3; EXPRESSED IN BRAIN, SIGNAL = 1.1; EXPRESSED IN HELA, SIGNAL = 0.82; SWISSPROT HIT: Q29496, EVALUE 7.70e+00
MAFPMLTGAEEPAGEPLCILFINLFLKFSKTPRVEFLQSSVQTVQAADGREVLASKKLTGQAVSCSSMP

SEQ ID NO: 28018 - protein, 21 aa, Homo sapiens
  MAP TO CHR22_167.0; EXPRESSED IN FETAL LIVER, SIGNAL = 1.4; EXPRESSED IN PLACENTA, SIGNAL = 1.4; EXPRESSED IN LUNG, SIGNAL = 1.4; EXPRESSED IN ADULT LIVER, SIGNAL = 1.5; EXPRESSED IN BONE MARROW, SIGNAL = 1.3; EXPRESSED IN BRAIN, SIGNAL = 1.1; EXPRESSED IN HELA, SIGNAL = 0.82
GFPDAHRCRGASWGASVYPFY

SEQ ID NO: 28019 - protein, 68 aa, Homo sapiens
  MAP TO AL139021.1; EXPRESSED IN BONE MARROW, SIGNAL = 0.64; EXPRESSED IN BRAIN, SIGNAL = 0.47; EXPRESSED IN PLACENTA, SIGNAL = 0.6; EXPRESSED IN LUNG, SIGNAL = 0.83; SWISSPROT HIT: P29374, EVALUE 1.00e-35
QSSDSEDLPVLDNSSKCTPVKHLNVSKPQKLARSPARISPHIKDGEKDKHREKHPNSSPRTYKWSFQL

SEQ ID NO: 28020 - protein, 38 aa, Homo sapiens
  MAP TO AC011580.4; EXPRESSED IN LUNG, SIGNAL = 0.75; EXPRESSED IN FETAL LIVER, SIGNAL = 0.56; EXPRESSED IN PLACENTA, SIGNAL = 0.57; EXPRESSED IN BONE MARROW, SIGNAL = 0.46; EXPRESSED IN BRAIN, SIGNAL = 0.54
LKATTTDVRKNDSIISNVTVTSVTLPNAVSTLQSSKPK

SEQ ID NO: 28021 - protein, 78 aa, Homo sapiens
  MAP TO CHR22_184_2.0; EXPRESSED IN PLACENTA, SIGNAL =   1; EXPRESSED IN LUNG, SIGNAL = 0.82; EXPRESSED IN BRAIN, SIGNAL = 0.77; EXPRESSED IN ADULT LIVER, SIGNAL = 0.89; EXPRESSED IN FETAL LIVER, SIGNAL = 0.75; EXPRESSED IN BONE MARROW, SIGNAL = 0.89; SWISSPROT HIT: P52111, EVALUE 4.30e+00
VEAICDILSYDMYWWDKVDLRKPLTLRKVRLTGDHIIRLLHTTNGEAEGKKWAIMYPKLPSDFCHLPADYTKNQVFYG

SEQ ID NO: 28022 - protein, 36 aa, Homo sapiens
  MAP TO AL133543.2; EXPRESSED IN BRAIN, SIGNAL = 0.83; EXPRESSED IN HELA, SIGNAL = 0.55; EXPRESSED IN FETAL LIVER, SIGNAL = 0.81; EXPRESSED IN BONE MARROW, SIGNAL = 0.69; EXPRESSED IN PLACENTA, SIGNAL = 0.8; EXPRESSED IN LUNG, SIGNAL = 0.75; EXPRESSED IN ADULT LIVER, SIGNAL = 0.69
ERLEDQQFSSQASFRHLSAEVILYIPIFDIRLQHGK

SEQ ID NO: 28023 - protein, 30 aa, Homo sapiens
  MAP TO AL133543.2; EXPRESSED IN BRAIN, SIGNAL = 0.83; EXPRESSED IN HELA, SIGNAL = 0.55; EXPRESSED IN FETAL LIVER, SIGNAL = 0.81; EXPRESSED IN BONE MARROW, SIGNAL = 0.69; EXPRESSED IN PLACENTA, SIGNAL = 0.8; EXPRESSED IN LUNG, SIGNAL = 0.75; EXPRESSED IN ADULT LIVER, SIGNAL = 0.69
KRGWKINNFLAKPASDICQLRSFFIFPYLI

SEQ ID NO: 28024 - protein, 34 aa, Homo sapiens
  MAP TO AL138967.2; EXPRESSED IN BONE MARROW, SIGNAL = 2.3; EXPRESSED IN HELA, SIGNAL = 1.1; EXPRESSED IN BRAIN, SIGNAL = 2.5; EXPRESSED IN FETAL LIVER, SIGNAL = 2.9; EXPRESSED IN PLACENTA, SIGNAL = 3.2; EXPRESSED IN LUNG, SIGNAL = 2.8; EXPRESSED IN ADULT LIVER, SIGNAL = 2.7
CLITATLVQWFSKSGPRPPPPPPSPSSSSCLGTC

SEQ ID NO: 28025 - protein, 44 aa, Homo sapiens
  MAP TO CHR22_136.0; EXPRESSED IN BONE MARROW, SIGNAL = 0.8; EXPRESSED IN BRAIN, SIGNAL = 0.72; EXPRESSED IN HELA, SIGNAL = 1.6; EXPRESSED IN LUNG, SIGNAL = 0.72; EXPRESSED IN ADULT LIVER, SIGNAL = 0.73
MTLVPWACGWELLHMFQQAAATALRDEHLAQGQDINGDNQEGRG

SEQ ID NO: 28026 - protein, 56 aa, Homo sapiens
  MAP TO CHR22_72.0; EXPRESSED IN BONE MARROW, SIGNAL =   1; EXPRESSED IN HELA, SIGNAL = 2.4; EXPRESSED IN BRAIN, SIGNAL = 0.85; EXPRESSED IN PLACENTA, SIGNAL = 0.97; EXPRESSED IN LUNG, SIGNAL = 0.95; EXPRESSED IN ADULT LIVER, SIGNAL =   1; SWISSPROT HIT: P74120, EVALUE 6.20e+00
ETGAAYLFLPVWNIPVQQRQGERGKAYSGTDMFRVVTSSGRQQGFQKPTVFLSVRS

SEQ ID NO: 28027 - protein, 21 aa, Homo sapiens
  MAP TO AC015822.3; EXPRESSED IN BRAIN, SIGNAL = 0.47; EXPRESSED IN FETAL LIVER, SIGNAL = 0.46; EXPRESSED IN PLACENTA, SIGNAL = 0.55; EXPRESSED IN ADULT LIVER, SIGNAL = 0.54
YALHPETWLPSSCHRKCHTIY

SEQ ID NO: 28028 - protein, 84 aa, Homo sapiens
  MAP TO CHR22_236.0; EXPRESSED IN BRAIN, SIGNAL = 2.1; EXPRESSED IN HELA, SIGNAL = 4.2; EXPRESSED IN FETAL LIVER, SIGNAL =   2; EXPRESSED IN HEART, SIGNAL = 1.7; EXPRESSED IN LUNG, SIGNAL = 1.1; EXPRESSED IN ADULT LIVER, SIGNAL = 1.2; EXPRESSED IN BONE MARROW, SIGNAL = 2.3; EXPRESSED IN PLACENTA, SIGNAL = 1.1; SWISSPROT HIT: P10354, EVALUE 3.80e-01
VCAAEASTWYSYKKRNWDTDTQSKDSYVTMETEQSNVATSQGMQSIDGHQKPKEAGKTPLYGFQREHSPADAWTSGFRPPELWE

SEQ ID NO: 28029 - protein, 55 aa, Homo sapiens
  MAP TO CHR22_50.0; EXPRESSED IN HELA, SIGNAL = 2.4; EXPRESSED IN HEART, SIGNAL = 2.5; EXPRESSED IN LUNG, SIGNAL = 2.8; EXPRESSED IN FETAL LIVER, SIGNAL = 2.6; EXPRESSED IN PLACENTA, SIGNAL =   3; EXPRESSED IN ADULT LIVER, SIGNAL = 3.1; EXPRESSED IN BONE MARROW, SIGNAL = 2.9; EXPRESSED IN BRAIN, SIGNAL = 2.6; SWISSPROT HIT: P13024, EVALUE 4.70e+00
SSTVAELLCFSSHAFIIDSSSIEAKKIIILWFGILIYFWQQSNLTLLIVLCFILN

SEQ ID NO: 28030 - protein, 29 aa, Homo sapiens
  MAP TO AL136444.1; EXPRESSED IN FETAL LIVER, SIGNAL = 2.8; EXPRESSED IN BONE MARROW, SIGNAL = 3.1; EXPRESSED IN BRAIN, SIGNAL =   4; EXPRESSED IN PLACENTA, SIGNAL = 3.8; EXPRESSED IN LUNG, SIGNAL =   4; EXPRESSED IN ADULT LIVER, SIGNAL = 3.9; EXPRESSED IN HELA, SIGNAL = 2.1
AAQAEAVNSLPGNINFKDHLKANNHHTVE

SEQ ID NO: 28031 - protein, 49 aa, Homo sapiens
  MAP TO CHR22_76.0; EXPRESSED IN BONE MARROW, SIGNAL = 1.2; EXPRESSED IN PLACENTA, SIGNAL =   1; EXPRESSED IN LUNG, SIGNAL = 1.1; EXPRESSED IN BRAIN, SIGNAL =   1; EXPRESSED IN ADULT LIVER, SIGNAL =   1; EXPRESSED IN HELA, SIGNAL = 4.9; EXPRESSED IN FETAL LIVER, SIGNAL = 1.2
PAASPPGDGRCQRPGLQRHIRGVGTEEQQQPLPSDSWNKLPLRGVGGGW

SEQ ID NO: 28032 - protein, 64 aa, Homo sapiens
  MAP TO AL159176.2; EXPRESSED IN BONE MARROW, SIGNAL = 0.54; EXPRESSED IN LUNG, SIGNAL = 0.68; EXPRESSED IN BRAIN, SIGNAL = 0.54; EXPRESSED IN FETAL LIVER, SIGNAL = 0.5
DSSIWKNVFMVIGYEVFLDVLMVLVNSIVFCSLMFYKKAEIFWLSGEPRNSNEFAARFLFQLLH

SEQ ID NO: 28033 - protein, 40 aa, Homo sapiens
  MAP TO AC013697.3; EXPRESSED IN BRAIN, SIGNAL = 0.46; EXPRESSED IN FETAL LIVER, SIGNAL = 0.45; EXPRESSED IN PLACENTA, SIGNAL = 0.53; EXPRESSED IN BONE MARROW, SIGNAL = 0.46; EXPRESSED IN ADULT LIVER, SIGNAL = 0.47; SWISSPROT HIT: Q10063, EVALUE 3.80e+00
FSNEAIRSWAFLYWENFYYGFDLITCYWSVQILDCFMVNL

SEQ ID NO: 28034 - protein, 43 aa, Homo sapiens
  MAP TO CHR22_30.0; EXPRESSED IN FETAL LIVER, SIGNAL = 1.7; EXPRESSED IN LUNG, SIGNAL = 1.6; EXPRESSED IN BONE MARROW, SIGNAL = 1.6; EXPRESSED IN PLACENTA, SIGNAL = 1.7; EXPRESSED IN ADULT LIVER, SIGNAL = 1.6; EXPRESSED IN BRAIN, SIGNAL = 1.7
MVSNLLRVIASIESSLLHLSDIYIALPAQTAQFIPPIAPKNNA

SEQ ID NO: 28035 - protein, 30 aa, Homo sapiens
  MAP TO CHR22_223.0; EXPRESSED IN BONE MARROW, SIGNAL = 1.4; EXPRESSED IN HELA, SIGNAL = 2.3; EXPRESSED IN BRAIN, SIGNAL = 1.3; EXPRESSED IN FETAL LIVER, SIGNAL = 1.2; EXPRESSED IN LUNG, SIGNAL = 0.75; EXPRESSED IN ADULT LIVER, SIGNAL = 0.75
ARQALAITHWLFSPAKRAATVPCWSPWEIY

SEQ ID NO: 28036 - protein, 37 aa, Homo sapiens
  MAP TO AL136312.1; EXPRESSED IN FETAL LIVER, SIGNAL = 0.48; EXPRESSED IN BONE MARROW, SIGNAL = 0.45; EXPRESSED IN LUNG, SIGNAL = 0.59; EXPRESSED IN PLACENTA, SIGNAL = 0.57; EXPRESSED IN BRAIN, SIGNAL = 0.51
MGEWHRSRDCVKDKNPLVFFVWCALAILIDTGSTLLQ

SEQ ID NO: 28037 - protein, 27 aa, Homo sapiens
  MAP TO AL136312.1; EXPRESSED IN FETAL LIVER, SIGNAL = 0.48; EXPRESSED IN BONE MARROW, SIGNAL = 0.45; EXPRESSED IN LUNG, SIGNAL = 0.59; EXPRESSED IN PLACENTA, SIGNAL = 0.57; EXPRESSED IN BRAIN, SIGNAL = 0.51
WGSGTEVGTALRIKTPWSSLFGVLLQS

SEQ ID NO: 28038 - protein, 78 aa, Homo sapiens
  MAP TO AL133520.2; EXPRESSED IN FETAL LIVER, SIGNAL = 1.8; EXPRESSED IN LUNG, SIGNAL = 1.3; EXPRESSED IN PLACENTA, SIGNAL = 2.2; EXPRESSED IN BRAIN, SIGNAL = 1.1; SWISSPROT HIT: Q13183, EVALUE 1.00e-24
MAVYWCTEALPLSVTALLPIVLFPFMGILPSNKVCPQYFLDTNFLFLSGLIMASAIEEWNLHRRIALKILMLVGVQPA

SEQ ID NO: 28039 - protein, 23 aa, Homo sapiens
  MAP TO AL133520.2; EXPRESSED IN FETAL LIVER, SIGNAL = 1.8; EXPRESSED IN LUNG, SIGNAL = 1.3; EXPRESSED IN PLACENTA, SIGNAL = 2.2; EXPRESSED IN BRAIN, SIGNAL = 1.1
KAAACLSSCSWRCTGARRPCRSQ

SEQ ID NO: 28040 - protein, 84 aa, Homo sapiens
  MAP TO AL139021.1; EXPRESSED IN HELA, SIGNAL = 0.58; EXPRESSED IN BRAIN, SIGNAL = 0.7; EXPRESSED IN FETAL LIVER, SIGNAL = 0.64; EXPRESSED IN BONE MARROW, SIGNAL = 0.65
VMSVAKDEEPESMDFPAQPPPPEPVPFMPFPAGTKAPSPSQMPGSDSSTLESTLSVTVTETETLDKPISEGEILFSCGQKLAPK

SEQ ID NO: 28041 - protein, 37 aa, Homo sapiens
  MAP TO AL138732.2; EXPRESSED IN FETAL LIVER, SIGNAL = 0.72; EXPRESSED IN BONE MARROW, SIGNAL = 0.69; EXPRESSED IN BRAIN, SIGNAL = 0.78; EXPRESSED IN PLACENTA, SIGNAL = 0.54; EXPRESSED IN HELA, SIGNAL = 1.2; SWISSPROT HIT: P21953, EVALUE 2.00e-15
VHVIREVASMAKEKLGVSCEVIDLRTIIPWDVDTICK

SEQ ID NO: 28042 - protein, 17 aa, Homo sapiens
  MAP TO CHR22_84.0; EXPRESSED IN BONE MARROW, SIGNAL = 0.76; EXPRESSED IN BRAIN, SIGNAL = 0.65; EXPRESSED IN HELA, SIGNAL =   3; EXPRESSED IN PLACENTA, SIGNAL = 0.93; EXPRESSED IN FETAL LIVER, SIGNAL = 0.79; EXPRESSED IN LUNG, SIGNAL = 0.77; EXPRESSED IN ADULT LIVER, SIGNAL = 0.9
TCPSAEQPRPLPSSLPG

SEQ ID NO: 28043 - protein, 26 aa, Homo sapiens
  MAP TO AC018704.5; EXPRESSED IN HELA, SIGNAL = 0.85; EXPRESSED IN BRAIN, SIGNAL = 1.2; EXPRESSED IN PLACENTA, SIGNAL = 1.2; EXPRESSED IN LUNG, SIGNAL = 1.1; EXPRESSED IN ADULT LIVER, SIGNAL =   1; EXPRESSED IN FETAL LIVER, SIGNAL = 1.1; EXPRESSED IN BONE MARROW, SIGNAL = 1.1
KQPGMFSVKMASLKQCTKMTREERPL

SEQ ID NO: 28044 - protein, 55 aa, Homo sapiens
  MAP TO AC011981.3; EXPRESSED IN BRAIN, SIGNAL = 0.4; EXPRESSED IN ADULT LIVER, SIGNAL = 0.35; SWISSPROT HIT: Q00959, EVALUE 2.00e-06
VKYGNYAFVWDAAVLEYVAINDPDCSFYTIGNTVADRGYGIALQHGSPYRDVFSQ

SEQ ID NO: 28045 - protein, 19 aa, Homo sapiens
  MAP TO CHR22_115.0; EXPRESSED IN HELA, SIGNAL = 0.6; EXPRESSED IN FETAL LIVER, SIGNAL = 0.8; EXPRESSED IN PLACENTA, SIGNAL = 0.85; EXPRESSED IN LUNG, SIGNAL = 0.87; EXPRESSED IN ADULT LIVER, SIGNAL =   1; EXPRESSED IN BONE MARROW, SIGNAL =   1; EXPRESSED IN BRAIN, SIGNAL = 0.87
GRHQAPQLKEWRSLGLGIR

SEQ ID NO: 28046 - protein, 60 aa, Homo sapiens
  MAP TO CHR22_115.0; EXPRESSED IN HELA, SIGNAL = 0.6; EXPRESSED IN FETAL LIVER, SIGNAL = 0.8; EXPRESSED IN PLACENTA, SIGNAL = 0.85; EXPRESSED IN LUNG, SIGNAL = 0.87; EXPRESSED IN ADULT LIVER, SIGNAL =   1; EXPRESSED IN BONE MARROW, SIGNAL =   1; EXPRESSED IN BRAIN, SIGNAL = 0.87; SWISSPROT HIT: P13025, EVALUE 8.00e+00
PTHIRGIVLVGCESSLGSGQRLAGLQEADIKPHNSKNGGAWGLALDDASPLLRMHWGSDA

SEQ ID NO: 28047 - protein, 46 aa, Homo sapiens
  MAP TO AL136987.1; EXPRESSED IN LUNG, SIGNAL = 0.58; EXPRESSED IN BRAIN, SIGNAL = 0.53; EXPRESSED IN ADULT LIVER, SIGNAL = 0.46
LINPQHQCASSQMRKCRRFLFGALLSWFLVASNTQKHDQLLLLLLF

SEQ ID NO: 28048 - protein, 36 aa, Homo sapiens
  MAP TO AC023115.3; EXPRESSED IN PLACENTA, SIGNAL = 0.54; EXPRESSED IN FETAL LIVER, SIGNAL = 0.51; EXPRESSED IN LUNG, SIGNAL = 0.45; EXPRESSED IN ADULT LIVER, SIGNAL = 0.52; EXPRESSED IN BONE MARROW, SIGNAL = 0.46; EXPRESSED IN BRAIN, SIGNAL = 0.53
LESPAWHLNIPKGNINDDDNDSDGDTHQLLNSNHIP

SEQ ID NO: 28049 - protein, 30 aa, Homo sapiens
  MAP TO AL121836.9; EXPRESSED IN PLACENTA, SIGNAL = 0.74; EXPRESSED IN LUNG, SIGNAL = 0.79; EXPRESSED IN BONE MARROW, SIGNAL = 0.6; EXPRESSED IN ADULT LIVER, SIGNAL = 0.67; EXPRESSED IN BRAIN, SIGNAL = 0.71
WQTSKMYKLKATKSSTQPSLERQSQSLGMS

SEQ ID NO: 28050 - protein, 20 aa, Homo sapiens
  MAP TO CHR22_100.0; EXPRESSED IN BRAIN, SIGNAL = 2.6; EXPRESSED IN HELA, SIGNAL = 1.5; EXPRESSED IN FETAL LIVER, SIGNAL = 3.1; EXPRESSED IN HEART, SIGNAL = 2.3; EXPRESSED IN BONE MARROW, SIGNAL = 2.9; EXPRESSED IN PLACENTA, SIGNAL = 2.7; EXPRESSED IN LUNG, SIGNAL = 2.7; EXPRESSED IN ADULT LIVER, SIGNAL = 2.8
TARKPDFSPCCLQLPHSPPH

SEQ ID NO: 28051 - protein, 33 aa, Homo sapiens
  MAP TO CHR22_100.0; EXPRESSED IN BRAIN, SIGNAL = 2.6; EXPRESSED IN HELA, SIGNAL = 1.5; EXPRESSED IN FETAL LIVER, SIGNAL = 3.1; EXPRESSED IN HEART, SIGNAL = 2.3; EXPRESSED IN BONE MARROW, SIGNAL = 2.9; EXPRESSED IN PLACENTA, SIGNAL = 2.7; EXPRESSED IN LUNG, SIGNAL = 2.7; EXPRESSED IN ADULT LIVER, SIGNAL = 2.8
HCKEARFLPLLPSAPPLTPALISSFTRVTGHTF

SEQ ID NO: 28052 - protein, 48 aa, Homo sapiens
  MAP TO AC023120.3; EXPRESSED IN FETAL LIVER, SIGNAL = 1.4; EXPRESSED IN BONE MARROW, SIGNAL = 1.4; EXPRESSED IN LUNG, SIGNAL = 1.5; EXPRESSED IN BRAIN, SIGNAL = 1.3; EXPRESSED IN PLACENTA, SIGNAL = 1.5; EXPRESSED IN ADULT LIVER, SIGNAL = 1.4; EXPRESSED IN HELA, SIGNAL = 0.53; SWISSPROT HIT: P57110, EVALUE 6.00e-04
CSKSCQGGFRVREVRCLSDDMTLSNLCDPQLKPEERESCNPQDCVPEV

SEQ ID NO: 28053 - protein, 20 aa, Homo sapiens
  MAP TO AC023120.3; EXPRESSED IN FETAL LIVER, SIGNAL = 1.4; EXPRESSED IN BONE MARROW, SIGNAL = 1.4; EXPRESSED IN LUNG, SIGNAL = 1.5; EXPRESSED IN BRAIN, SIGNAL = 1.3; EXPRESSED IN PLACENTA, SIGNAL = 1.5; EXPRESSED IN ADULT LIVER, SIGNAL = 1.4; EXPRESSED IN HELA, SIGNAL = 0.53
VPRAARVAFGSGKCGVCLMT

SEQ ID NO: 28054 - protein, 92 aa, Homo sapiens
  MAP TO CHR22_22.0; EXPRESSED IN HELA, SIGNAL = 4.6; EXPRESSED IN FETAL LIVER, SIGNAL = 2.7; EXPRESSED IN BONE MARROW, SIGNAL = 2.5; EXPRESSED IN BRAIN, SIGNAL = 3.7; EXPRESSED IN HEART, SIGNAL = 2.7; EXPRESSED IN PLACENTA, SIGNAL = 2.6; SWISSPROT HIT: Q12772, EVALUE 2.00e-37
GDFAAAAGNLQTCLAVLGRALPTSRLDLACSLSWNVIRYSLQKLRLVRWLLKKVFQCRRATPATEAGFEDEAKTSARDAALAYHRLHQLHIT

SEQ ID NO: 28055 - protein, 63 aa, Homo sapiens
  MAP TO CHR22_22.0; EXPRESSED IN HELA, SIGNAL = 4.6; EXPRESSED IN FETAL LIVER, SIGNAL = 2.7; EXPRESSED IN BONE MARROW, SIGNAL = 2.5; EXPRESSED IN BRAIN, SIGNAL = 3.7; EXPRESSED IN HEART, SIGNAL = 2.7; EXPRESSED IN PLACENTA, SIGNAL = 2.6; SWISSPROT HIT: Q09455, EVALUE 4.60e+00
RFCSCCRQPTNLPGSFGPGTAHLPPGPGLQPLLERDPLQPAEATPGALAAQESLPVPAGHASH

SEQ ID NO: 28056 - protein, 20 aa, Homo sapiens
  MAP TO AL121876.23; EXPRESSED IN FETAL LIVER, SIGNAL = 0.82; EXPRESSED IN PLACENTA, SIGNAL = 0.74; EXPRESSED IN BONE MARROW, SIGNAL = 0.97; EXPRESSED IN BRAIN, SIGNAL = 0.89; EXPRESSED IN LUNG, SIGNAL = 0.73; EXPRESSED IN ADULT LIVER, SIGNAL = 0.73
FICLTLTFLRRMLKITCSFP

SEQ ID NO: 28057 - protein, 24 aa, Homo sapiens
  MAP TO AC016569.2; EXPRESSED IN PLACENTA, SIGNAL = 1.2; EXPRESSED IN LUNG, SIGNAL = 1.1; EXPRESSED IN HELA, SIGNAL = 0.72; EXPRESSED IN BRAIN, SIGNAL = 0.96; EXPRESSED IN ADULT LIVER, SIGNAL =   1; EXPRESSED IN FETAL LIVER, SIGNAL = 0.95; EXPRESSED IN BONE MARROW, SIGNAL = 1.1
VRYRVLCEVEDVEATWGSRLQACT

SEQ ID NO: 28058 - protein, 35 aa, Homo sapiens
  MAP TO AL133553.2; EXPRESSED IN LUNG, SIGNAL = 0.97; EXPRESSED IN ADULT LIVER, SIGNAL = 1.2; EXPRESSED IN FETAL LIVER, SIGNAL = 0.97; EXPRESSED IN BONE MARROW, SIGNAL = 0.95; EXPRESSED IN BRAIN, SIGNAL = 0.88; EXPRESSED IN HELA, SIGNAL = 0.64; SWISSPROT HIT: P71360, EVALUE 8.60e+00
QGYLRYLKTTMAWKTLPIYLLLLLSVFVIQQVSSQ

SEQ ID NO: 28059 - protein, 66 aa, Homo sapiens
  MAP TO AL138691.2; EXPRESSED IN BONE MARROW, SIGNAL = 0.89; EXPRESSED IN BRAIN, SIGNAL = 0.94; EXPRESSED IN FETAL LIVER, SIGNAL = 0.88; SWISSPROT HIT: Q07609, EVALUE 2.70e+00
MDLNLEKHYVICKLFLNRTKLFRSASGGVSVLEAARAQMLTRNTLPSSLAFPQRHVGLSVKSKIKQ

SEQ ID NO: 28060 - protein, 37 aa, Homo sapiens
  MAP TO AC018432.4; EXPRESSED IN FETAL LIVER, SIGNAL = 0.51; EXPRESSED IN BRAIN, SIGNAL = 0.47; EXPRESSED IN PLACENTA, SIGNAL = 0.44; EXPRESSED IN ADULT LIVER, SIGNAL = 0.47
ASTSRRQHTTGWWLRASGTCTSPCWLPCPAPLSSRPC

SEQ ID NO: 28061 - protein, 53 aa, Homo sapiens
  MAP TO AC022117.2; EXPRESSED IN BRAIN, SIGNAL = 0.59; EXPRESSED IN HELA, SIGNAL =  10; EXPRESSED IN LUNG, SIGNAL = 4.4; EXPRESSED IN ADULT LIVER, SIGNAL = 7.2; EXPRESSED IN FETAL LIVER, SIGNAL = 4.1; EXPRESSED IN BONE MARROW, SIGNAL = 0.81; SWISSPROT HIT: P35444, EVALUE 8.10e+00
RPATAPGWSAAQPESMQAPGALVPGSLCPAPPASRAAWSPGAWPRGWPGVWQE

SEQ ID NO: 28062 - protein, 46 aa, Homo sapiens
  MAP TO AL133520.2; EXPRESSED IN ADULT LIVER, SIGNAL = 1.8; EXPRESSED IN HELA, SIGNAL = 1.1; EXPRESSED IN FETAL LIVER, SIGNAL = 1.5; EXPRESSED IN BONE MARROW, SIGNAL = 1.5; EXPRESSED IN LUNG, SIGNAL = 1.9; EXPRESSED IN PLACENTA, SIGNAL = 2.2; EXPRESSED IN HEART, SIGNAL = 1.7; EXPRESSED IN BRAIN, SIGNAL = 1.6; SWISSPROT HIT: Q92448, EVALUE 1.30e+00
MKRVVKEELKNNNSEKFFLNPKKLVFQYSHFMNEQTSEEGTKSLAE

SEQ ID NO: 28063 - protein, 37 aa, Homo sapiens
  MAP TO AC008432.2; EXPRESSED IN HELA, SIGNAL = 0.6; EXPRESSED IN BRAIN, SIGNAL = 0.56; EXPRESSED IN BONE MARROW, SIGNAL = 0.62; EXPRESSED IN PLACENTA, SIGNAL = 1.2; EXPRESSED IN ADULT LIVER, SIGNAL = 1.1; EXPRESSED IN LUNG, SIGNAL = 0.96
MEKDGRLESSTDHSPNKDTKLTIICTERNTFIRTKKQ

SEQ ID NO: 28064 - protein, 119 aa, Homo sapiens
  MAP TO CHR22_2.0; EXPRESSED IN FETAL LIVER, SIGNAL = 1.2; EXPRESSED IN LUNG, SIGNAL = 1.5; EXPRESSED IN BRAIN, SIGNAL = 1.1; EXPRESSED IN HEART, SIGNAL = 1.2; EXPRESSED IN PLACENTA, SIGNAL = 1.5; EXPRESSED IN HELA, SIGNAL = 0.61; EXPRESSED IN ADULT LIVER, SIGNAL = 1.8; SWISSPROT HIT: O60755, EVALUE 3.00e-54
MADAQNISLDSPGSVGAVAVPVVFALIFLLGTVGNGLVLAVLLQPGPSAWQEPGSTTDLFILNLAVADLCFILCCVPFQATIYTLDAWLFGALVCKAVHLLIYLTMYASSFTLAAVSVD

SEQ ID NO: 28065 - protein, 20 aa, Homo sapiens
  MAP TO AC020721.4; EXPRESSED IN BONE MARROW, SIGNAL = 0.92; EXPRESSED IN BRAIN, SIGNAL = 0.89; EXPRESSED IN PLACENTA, SIGNAL = 0.82; EXPRESSED IN LUNG, SIGNAL = 0.9; EXPRESSED IN HELA, SIGNAL = 0.68; EXPRESSED IN ADULT LIVER, SIGNAL = 1.2
WTRSFPVLRQSGSSCTKRVR

SEQ ID NO: 28066 - protein, 71 aa, Homo sapiens
  MAP TO AL159176.2; EXPRESSED IN FETAL LIVER, SIGNAL = 0.64; EXPRESSED IN BONE MARROW, SIGNAL = 0.65; EXPRESSED IN BRAIN, SIGNAL = 0.75; SWISSPROT HIT: P36312, EVALUE 5.30e-01
DDLKRRSMSIDDTPRGSWACSIFDLKNSLPDALLPNLLDRTPNEEIDRQNDDQRKSNRHKELFALHPSPDE

SEQ ID NO: 28067 - protein, 53 aa, Homo sapiens
  MAP TO AL136147.2; EXPRESSED IN BONE MARROW, SIGNAL = 0.99; EXPRESSED IN BRAIN, SIGNAL = 1.1; EXPRESSED IN HELA, SIGNAL = 0.84; EXPRESSED IN FETAL LIVER, SIGNAL = 0.74
SSVVSLYFLELTDVFKPVHSGFSCYDRSLSMPYIEPTQEAIPFLMLLSLAFAG

SEQ ID NO: 28068 - protein, 53 aa, Homo sapiens
  MAP TO AL160058.2; EXPRESSED IN PLACENTA, SIGNAL = 1.5; EXPRESSED IN LUNG, SIGNAL = 1.5; EXPRESSED IN BONE MARROW, SIGNAL =   1; EXPRESSED IN BRAIN, SIGNAL = 0.95; EXPRESSED IN FETAL LIVER, SIGNAL = 0.98; EXPRESSED IN HEART, SIGNAL = 1.5; SWISSPROT HIT: P48443, EVALUE 5.00e-15
VQEERQRSRERAESEAECATSGHEDMPVERILEAELAVEPKTESYGDMNMENS

SEQ ID NO: 28069 - protein, 32 aa, Homo sapiens
  MAP TO AL160058.2; EXPRESSED IN PLACENTA, SIGNAL = 1.5; EXPRESSED IN LUNG, SIGNAL = 1.5; EXPRESSED IN BONE MARROW, SIGNAL =   1; EXPRESSED IN BRAIN, SIGNAL = 0.95; EXPRESSED IN FETAL LIVER, SIGNAL = 0.98; EXPRESSED IN HEART, SIGNAL = 1.5
LCKKKDRGAESELRVRQNVLPVVMKTCLWRGF

SEQ ID NO: 28070 - protein, 66 aa, Homo sapiens
  MAP TO AC022247.2; EXPRESSED IN FETAL LIVER, SIGNAL = 0.88; EXPRESSED IN PLACENTA, SIGNAL = 0.92; EXPRESSED IN LUNG, SIGNAL = 0.86; EXPRESSED IN BONE MARROW, SIGNAL = 0.8; EXPRESSED IN BRAIN, SIGNAL = 0.85
KSKGKKEEEKVKEEEEVMVVPKFVGEGSSDKEWCPPSDPDFSMYVYEVTKSILPITNIKEQIEDLA

SEQ ID NO: 28071 - protein, 41 aa, Homo sapiens
  MAP TO AC017072.4; EXPRESSED IN BONE MARROW, SIGNAL = 1.2; EXPRESSED IN ADULT LIVER, SIGNAL = 1.5; EXPRESSED IN BRAIN, SIGNAL = 1.2; EXPRESSED IN HELA, SIGNAL = 0.84; EXPRESSED IN FETAL LIVER, SIGNAL = 1.3; EXPRESSED IN LUNG, SIGNAL = 1.2; EXPRESSED IN PLACENTA, SIGNAL = 1.2; SWISSPROT HIT: P43681, EVALUE 2.20e+00
MDLNAQHANSQAADLRGGSACLTRPLDRLLPGRPQGAPESD

SEQ ID NO: 28072 - protein, 53 aa, Homo sapiens
  MAP TO AL160002.2; EXPRESSED IN BRAIN, SIGNAL = 5.3; EXPRESSED IN FETAL LIVER, SIGNAL = 6.6; EXPRESSED IN LUNG, SIGNAL = 6.3; EXPRESSED IN ADULT LIVER, SIGNAL =  18; EXPRESSED IN BONE MARROW, SIGNAL =   4; SWISSPROT HIT: O08580, EVALUE 3.60e+00
DLCRKHALPDPRSGQEASELDPPLCIYWNWSFWSNTVSLASGIVQSRCLLGQK

SEQ ID NO: 28073 - protein, 20 aa, Homo sapiens
  MAP TO AL160002.2; EXPRESSED IN BRAIN, SIGNAL = 5.3; EXPRESSED IN FETAL LIVER, SIGNAL = 6.6; EXPRESSED IN LUNG, SIGNAL = 6.3; EXPRESSED IN ADULT LIVER, SIGNAL =  18; EXPRESSED IN BONE MARROW, SIGNAL =   4
RPLPQTCSARSSVRPRSIRA

SEQ ID NO: 28074 - protein, 27 aa, Homo sapiens
  MAP TO AC022263.3; EXPRESSED IN FETAL LIVER, SIGNAL = 2.1; EXPRESSED IN BONE MARROW, SIGNAL = 2.2; EXPRESSED IN BRAIN, SIGNAL = 1.6; EXPRESSED IN PLACENTA, SIGNAL = 3.3; EXPRESSED IN ADULT LIVER, SIGNAL = 3.1; EXPRESSED IN LUNG, SIGNAL =   3
ICGTLNLREMIYGIWWKKCLSSKAFKM

SEQ ID NO: 28075 - protein, 55 aa, Homo sapiens
  MAP TO AC015819.4; EXPRESSED IN BRAIN, SIGNAL = 0.44; EXPRESSED IN LUNG, SIGNAL = 0.45; SWISSPROT HIT: O88566, EVALUE 6.20e+00
QNRPGRRCRKRSDAPNPCFRKQHLGAEGTALPRHRAQRPCPASAFAQGLCVLPGT

SEQ ID NO: 28076 - protein, 23 aa, Homo sapiens
  MAP TO AC022263.3; EXPRESSED IN LUNG, SIGNAL = 0.78; EXPRESSED IN FETAL LIVER, SIGNAL = 0.83; EXPRESSED IN ADULT LIVER, SIGNAL = 0.71; EXPRESSED IN BONE MARROW, SIGNAL = 0.89; EXPRESSED IN HELA, SIGNAL = 0.64; EXPRESSED IN BRAIN, SIGNAL = 0.94
MNLMLLGPILQDPAASADGLPDV

SEQ ID NO: 28077 - protein, 30 aa, Homo sapiens
  MAP TO AC022247.2; EXPRESSED IN HELA, SIGNAL = 2.3; EXPRESSED IN BRAIN, SIGNAL = 5.1; EXPRESSED IN LUNG, SIGNAL = 5.3; EXPRESSED IN ADULT LIVER, SIGNAL = 5.4; EXPRESSED IN FETAL LIVER, SIGNAL = 5.3; EXPRESSED IN HEART, SIGNAL = 3.9; EXPRESSED IN BONE MARROW, SIGNAL = 4.9; EXPRESSED IN PLACENTA, SIGNAL = 5.9
MRSWPLHLTPAVTATQEVLDTLLGSRTVLA

SEQ ID NO: 28078 - protein, 40 aa, Homo sapiens
  MAP TO AC018715.3; EXPRESSED IN BONE MARROW, SIGNAL = 1.4; EXPRESSED IN BRAIN, SIGNAL = 1.4; EXPRESSED IN HELA, SIGNAL = 0.79; EXPRESSED IN PLACENTA, SIGNAL = 1.9; EXPRESSED IN ADULT LIVER, SIGNAL = 1.8; EXPRESSED IN LUNG, SIGNAL = 1.7; EXPRESSED IN FETAL LIVER, SIGNAL = 1.6; EXPRESSED IN HEART, SIGNAL = 1.3; SWISSPROT HIT: P40360, EVALUE 8.40e+00
EFKKFKNDALSLLPSSHNLHRWYFQTPSAISPCDQAYTER

SEQ ID NO: 28079 - protein, 40 aa, Homo sapiens
  MAP TO AC018715.3; EXPRESSED IN BONE MARROW, SIGNAL = 1.4; EXPRESSED IN BRAIN, SIGNAL = 1.4; EXPRESSED IN HELA, SIGNAL = 0.79; EXPRESSED IN PLACENTA, SIGNAL = 1.9; EXPRESSED IN ADULT LIVER, SIGNAL = 1.8; EXPRESSED IN LUNG, SIGNAL = 1.7; EXPRESSED IN FETAL LIVER, SIGNAL = 1.6; EXPRESSED IN HEART, SIGNAL = 1.3
SSRNSKMMPYHCCHLPTICTDGIFKPHLLYLLVTKHILKE

SEQ ID NO: 28080 - protein, 60 aa, Homo sapiens
  MAP TO AC023120.3; EXPRESSED IN FETAL LIVER, SIGNAL = 0.69; EXPRESSED IN PLACENTA, SIGNAL = 0.88; EXPRESSED IN BONE MARROW, SIGNAL = 0.79; EXPRESSED IN HELA, SIGNAL = 0.54; EXPRESSED IN BRAIN, SIGNAL = 0.8; SWISSPROT HIT: Q9P2N4, EVALUE 9.00e-07
CSIECGSGTQQREVICVRKNADTFEVLDPSECSFLEKPPSQQSCHLKPCGAKWFSTEWSM

SEQ ID NO: 28081 - protein, 28 aa, Homo sapiens
  MAP TO AC021010.3; EXPRESSED IN BONE MARROW, SIGNAL = 1.3; EXPRESSED IN ADULT LIVER, SIGNAL =   1; EXPRESSED IN BRAIN, SIGNAL = 1.1; EXPRESSED IN HELA, SIGNAL = 1.2; EXPRESSED IN FETAL LIVER, SIGNAL = 1.1
FPAMLMLPVQGPHFENHCPILNYPEFEE

SEQ ID NO: 28082 - protein, 111 aa, Homo sapiens
  MAP TO AC015937.3; EXPRESSED IN BONE MARROW, SIGNAL = 3.3; EXPRESSED IN BRAIN, SIGNAL = 3.2; EXPRESSED IN HELA, SIGNAL = 1.9; EXPRESSED IN FETAL LIVER, SIGNAL =   3; EXPRESSED IN LUNG, SIGNAL = 3.1; EXPRESSED IN PLACENTA, SIGNAL = 3.7; EXPRESSED IN ADULT LIVER, SIGNAL =   3; SWISSPROT HIT: Q08708, EVALUE 8.00e-15
YEALEGPEEISGFEGDTVSLQCTYREELRDHRKYWCRKGGILFSRCSGTIYAEEEGQETMKGRVSIRDSRQELSLIVTLWNLTLQDAGEYWCGVEKRGPDESLLISLFVFP

SEQ ID NO: 28083 - protein, 28 aa, Homo sapiens
  MAP TO AC015937.3; EXPRESSED IN BONE MARROW, SIGNAL = 3.3; EXPRESSED IN BRAIN, SIGNAL = 3.2; EXPRESSED IN HELA, SIGNAL = 1.9; EXPRESSED IN FETAL LIVER, SIGNAL =   3; EXPRESSED IN LUNG, SIGNAL = 3.1; EXPRESSED IN PLACENTA, SIGNAL = 3.7; EXPRESSED IN ADULT LIVER, SIGNAL =   3
VMKPWRAQRKSAGSKGTLCPCSAPTGKS

SEQ ID NO: 28084 - protein, 73 aa, Homo sapiens
  MAP TO AL031283.26; EXPRESSED IN BRAIN, SIGNAL = 0.39; EXPRESSED IN ADULT LIVER, SIGNAL = 0.34; SWISSPROT HIT: P35978, EVALUE 4.80e-02
YLDMSKTLGSLMNIKNMSGHVSMKYLSRQEREKVNQLRQRDLDLVFDKITQLKNQLGRKEELLRGYEKDVEQL

SEQ ID NO: 28085 - protein, 31 aa, Homo sapiens
  MAP TO AL031283.26; EXPRESSED IN BRAIN, SIGNAL = 0.39; EXPRESSED IN ADULT LIVER, SIGNAL = 0.34
RRSTSFDKGTSTWCLIRSPNSRTSWGGKRSC

SEQ ID NO: 28086 - protein, 87 aa, Homo sapiens
  MAP TO CHR22_146.0; EXPRESSED IN BONE MARROW, SIGNAL = 0.94; EXPRESSED IN BRAIN, SIGNAL = 0.86; EXPRESSED IN LUNG, SIGNAL = 0.89; EXPRESSED IN HELA, SIGNAL =   2; EXPRESSED IN PLACENTA, SIGNAL = 0.8; EXPRESSED IN ADULT LIVER, SIGNAL = 0.83; SWISSPROT HIT: Q00312, EVALUE 2.90e+00
PSIKLERDEPGTDRKPQAWILLSSCLISPNPHHSPDPILPHEATEERRMIGPEPHGQRGMNMNELGWNPRVYSKAHRLLPRHPVRQA

SEQ ID NO: 28087 - protein, 44 aa, Homo sapiens
  MAP TO AL158832.2; EXPRESSED IN HEART, SIGNAL = 2.4; EXPRESSED IN PLACENTA, SIGNAL = 2.6; EXPRESSED IN BONE MARROW, SIGNAL = 2.4; EXPRESSED IN LUNG, SIGNAL = 2.4; EXPRESSED IN ADULT LIVER, SIGNAL = 2.3; EXPRESSED IN HELA, SIGNAL = 1.7; EXPRESSED IN BRAIN, SIGNAL = 2.5; SWISSPROT HIT: Q94920, EVALUE 2.90e+00
MHKNLQADQSAPRATPAAVLGNQTALEGFSLAFDPQGKFFHYLL

SEQ ID NO: 28088 - protein, 19 aa, Homo sapiens
  MAP TO AL158832.2; EXPRESSED IN HEART, SIGNAL = 2.4; EXPRESSED IN PLACENTA, SIGNAL = 2.6; EXPRESSED IN BONE MARROW, SIGNAL = 2.4; EXPRESSED IN LUNG, SIGNAL = 2.4; EXPRESSED IN ADULT LIVER, SIGNAL = 2.3; EXPRESSED IN HELA, SIGNAL = 1.7; EXPRESSED IN BRAIN, SIGNAL = 2.5
CTRISKQINQHHELLQQLC

SEQ ID NO: 28089 - protein, 33 aa, Homo sapiens
  MAP TO AC012360.2; EXPRESSED IN FETAL LIVER, SIGNAL = 0.39; EXPRESSED IN BRAIN, SIGNAL = 0.46
WLAWPTGCLLNRSLSSCCQQSSALVRTHPDIQA

SEQ ID NO: 28090 - protein, 73 aa, Homo sapiens
  MAP TO AL138722.2; EXPRESSED IN LUNG, SIGNAL = 0.73; EXPRESSED IN PLACENTA, SIGNAL = 0.71; EXPRESSED IN BRAIN, SIGNAL = 0.42
NFPQCVLEISDQEVLEWYTAKDFIVGKSLTILGRTFFIYDCDPFTRRYYKKKFGITDLPRIDVSKREPPPVKQ

SEQ ID NO: 28091 - protein, 38 aa, Homo sapiens
  MAP TO AC011985.3; EXPRESSED IN BONE MARROW, SIGNAL = 4.2; EXPRESSED IN BRAIN, SIGNAL =   4; EXPRESSED IN LUNG, SIGNAL = 3.6; EXPRESSED IN HELA, SIGNAL = 1.8; EXPRESSED IN HEART, SIGNAL = 3.1; EXPRESSED IN PLACENTA, SIGNAL = 3.9; EXPRESSED IN FETAL LIVER, SIGNAL = 3.7
ERKASSGMGVPGWKWEQWWGLKLRGWTLGLNLWTLLLC

SEQ ID NO: 28092 - protein, 34 aa, Homo sapiens
  MAP TO AC018608.4; EXPRESSED IN FETAL LIVER, SIGNAL = 0.69; EXPRESSED IN BONE MARROW, SIGNAL = 0.6; EXPRESSED IN PLACENTA, SIGNAL = 0.58; EXPRESSED IN LUNG, SIGNAL = 0.52; EXPRESSED IN BRAIN, SIGNAL = 0.53
FTDNFQMDSALSREILWNYYYVMISGLTSCFTLR

SEQ ID NO: 28093 - protein, 54 aa, Homo sapiens
  MAP TO CHR22_171.0; EXPRESSED IN PLACENTA, SIGNAL = 0.9; EXPRESSED IN BONE MARROW, SIGNAL = 0.86; EXPRESSED IN LUNG, SIGNAL = 0.91; EXPRESSED IN ADULT LIVER, SIGNAL = 1.6; EXPRESSED IN HELA, SIGNAL =   1; EXPRESSED IN BRAIN, SIGNAL = 0.75
FGAPHASESCSKNGPERGGQDGKASLEAHRDAPGAGAPPAPGKKEAPPVEGDSE

SEQ ID NO: 28094 - protein, 75 aa, Homo sapiens
  MAP TO AL031283.26; EXPRESSED IN FETAL LIVER, SIGNAL = 1.6; EXPRESSED IN BONE MARROW, SIGNAL = 1.5; EXPRESSED IN BRAIN, SIGNAL = 1.3; EXPRESSED IN LUNG, SIGNAL = 2.1; EXPRESSED IN HELA, SIGNAL = 0.59; EXPRESSED IN PLACENTA, SIGNAL = 1.6; EXPRESSED IN ADULT LIVER, SIGNAL = 1.5; SWISSPROT HIT: P42566, EVALUE 1.00e-02
IMVEERLILQQKMVKALQDEQESQRHGFEEEIMEYKEQIKQHAQTIVSLEEKLQKVTQHHKKIEGEIATLKDNDP

SEQ ID NO: 28095 - protein, 25 aa, Homo sapiens
  MAP TO AL135926.3; EXPRESSED IN BRAIN, SIGNAL = 1.1; EXPRESSED IN FETAL LIVER, SIGNAL = 0.99; EXPRESSED IN LUNG, SIGNAL = 0.97; EXPRESSED IN PLACENTA, SIGNAL = 1.1; EXPRESSED IN BONE MARROW, SIGNAL = 0.86
IKLAKNEVVDLTLAKIDIQHGLRII

SEQ ID NO: 28096 - protein, 55 aa, Homo sapiens
  MAP TO AL133543.2; EXPRESSED IN BRAIN, SIGNAL = 0.77; EXPRESSED IN HELA, SIGNAL = 1.6; EXPRESSED IN PLACENTA, SIGNAL = 1.1; EXPRESSED IN ADULT LIVER, SIGNAL = 1.6; EXPRESSED IN FETAL LIVER, SIGNAL = 0.88; EXPRESSED IN LUNG, SIGNAL = 0.97; EXPRESSED IN BONE MARROW, SIGNAL = 0.82
AAAMEGEPPPVEERRRLQEELNEFVESGCRTLEEVTASLGWDLDSLDPGEEEAAE

SEQ ID NO: 28097 - protein, 18 aa, Homo sapiens
  MAP TO AL133543.2; EXPRESSED IN BRAIN, SIGNAL = 0.77; EXPRESSED IN HELA, SIGNAL = 1.6; EXPRESSED IN PLACENTA, SIGNAL = 1.1; EXPRESSED IN ADULT LIVER, SIGNAL = 1.6; EXPRESSED IN FETAL LIVER, SIGNAL = 0.88; EXPRESSED IN LUNG, SIGNAL = 0.97; EXPRESSED IN BONE MARROW, SIGNAL = 0.82
LWRASLHLWRSGGGCRRS

SEQ ID NO: 28098 - protein, 36 aa, Homo sapiens
  MAP TO CHR22_37.0; EXPRESSED IN FETAL LIVER, SIGNAL = 3.1; EXPRESSED IN BRAIN, SIGNAL = 2.5; EXPRESSED IN ADULT LIVER, SIGNAL = 4.1
ELSGVNMTKDQHFPMLETQSVHSFLVLGRRPASFLH

SEQ ID NO: 28099 - protein, 18 aa, Homo sapiens
  MAP TO CHR22_229.0; EXPRESSED IN HEART, SIGNAL = 1.2; EXPRESSED IN HELA, SIGNAL = 3.7; EXPRESSED IN BRAIN, SIGNAL = 1.7; EXPRESSED IN LUNG, SIGNAL = 0.95; EXPRESSED IN ADULT LIVER, SIGNAL = 0.99; EXPRESSED IN FETAL LIVER, SIGNAL = 1.4; EXPRESSED IN BONE MARROW, SIGNAL = 1.8
DPAAVCDPGGERTLCLWR

SEQ ID NO: 28100 - protein, 56 aa, Homo sapiens
  MAP TO AL135909.3; EXPRESSED IN PLACENTA, SIGNAL = 0.73; EXPRESSED IN LUNG, SIGNAL = 0.7; EXPRESSED IN BONE MARROW, SIGNAL = 0.54; EXPRESSED IN BRAIN, SIGNAL = 0.45; EXPRESSED IN FETAL LIVER, SIGNAL = 0.61
YFKDVTLLSSGSEISDKKFPLLFIFVPLFVICLLTSDYPQYFPFIFGFHAFHYDVS

SEQ ID NO: 28101 - protein, 29 aa, Homo sapiens
  MAP TO AL135909.3; EXPRESSED IN PLACENTA, SIGNAL = 0.73; EXPRESSED IN LUNG, SIGNAL = 0.7; EXPRESSED IN BONE MARROW, SIGNAL = 0.54; EXPRESSED IN BRAIN, SIGNAL = 0.45; EXPRESSED IN FETAL LIVER, SIGNAL = 0.61
ILKMSLYCLLARKFLIRSFLYFLYLFHCL

SEQ ID NO: 28102 - protein, 28 aa, Homo sapiens
  MAP TO CHR22_152.0; EXPRESSED IN PLACENTA, SIGNAL = 1.2; EXPRESSED IN LUNG, SIGNAL = 1.2; EXPRESSED IN BRAIN, SIGNAL = 0.4; EXPRESSED IN ADULT LIVER, SIGNAL = 0.69; EXPRESSED IN HELA, SIGNAL = 1.2; EXPRESSED IN FETAL LIVER, SIGNAL = 0.48
MVPHRGLSVGLCYWRIGYSAVAISRSAL

SEQ ID NO: 28103 - protein, 24 aa, Homo sapiens
  MAP TO CHR22_152.0; EXPRESSED IN PLACENTA, SIGNAL = 1.2; EXPRESSED IN LUNG, SIGNAL = 1.2; EXPRESSED IN BRAIN, SIGNAL = 0.4; EXPRESSED IN ADULT LIVER, SIGNAL = 0.69; EXPRESSED IN HELA, SIGNAL = 1.2; EXPRESSED IN FETAL LIVER, SIGNAL = 0.48
GATSRAQCWSLLLANWVLSSGHIQ

SEQ ID NO: 28104 - protein, 29 aa, Homo sapiens
  MAP TO AC020588.4; EXPRESSED IN BRAIN, SIGNAL = 0.91; EXPRESSED IN HELA, SIGNAL = 0.53; EXPRESSED IN PLACENTA, SIGNAL = 1.1; EXPRESSED IN FETAL LIVER, SIGNAL = 0.78; EXPRESSED IN LUNG, SIGNAL = 1.8; EXPRESSED IN ADULT LIVER, SIGNAL = 0.99; EXPRESSED IN BONE MARROW, SIGNAL = 0.8
AEKMGSLTHRNPAEKEATTRSVPALRWSK

SEQ ID NO: 28105 - protein, 57 aa, Homo sapiens
  MAP TO CHR22_140.0; EXPRESSED IN BONE MARROW, SIGNAL = 0.72; EXPRESSED IN HELA, SIGNAL = 6.5; EXPRESSED IN BRAIN, SIGNAL = 0.52; EXPRESSED IN LUNG, SIGNAL = 0.6; EXPRESSED IN FETAL LIVER, SIGNAL = 0.61; EXPRESSED IN PLACENTA, SIGNAL = 0.81; EXPRESSED IN ADULT LIVER, SIGNAL = 0.66; SWISSPROT HIT: P98083, EVALUE 8.00e+00
LSGFSCTTALQNLLHPCWRPLSWLPMVTAQPCAQSLSLVLGWRELKFLKLPVLEMLV

SEQ ID NO: 28106 - protein, 23 aa, Homo sapiens
  MAP TO AC016692.4; EXPRESSED IN LUNG, SIGNAL = 8.5; EXPRESSED IN ADULT LIVER, SIGNAL = 8.2; EXPRESSED IN PLACENTA, SIGNAL = 9.4; EXPRESSED IN BRAIN, SIGNAL = 7.7; EXPRESSED IN HELA, SIGNAL = 4.6; EXPRESSED IN FETAL LIVER, SIGNAL = 6.6; EXPRESSED IN BONE MARROW, SIGNAL = 6.4; EXPRESSED IN HEART, SIGNAL = 7.1
DLPEIRSSGVLEILQPEEIKLQE

SEQ ID NO: 28107 - protein, 25 aa, Homo sapiens
  MAP TO AC016692.4; EXPRESSED IN LUNG, SIGNAL = 8.5; EXPRESSED IN ADULT LIVER, SIGNAL = 8.2; EXPRESSED IN PLACENTA, SIGNAL = 9.4; EXPRESSED IN BRAIN, SIGNAL = 7.7; EXPRESSED IN HELA, SIGNAL = 4.6; EXPRESSED IN FETAL LIVER, SIGNAL = 6.6; EXPRESSED IN BONE MARROW, SIGNAL = 6.4; EXPRESSED IN HEART, SIGNAL = 7.1
GSCIRNTEINRLSKKSKPGGNRMQK

SEQ ID NO: 28108 - protein, 59 aa, Homo sapiens
  MAP TO AC015896.4; EXPRESSED IN HELA, SIGNAL = 0.76; EXPRESSED IN BRAIN, SIGNAL = 0.64; EXPRESSED IN LUNG, SIGNAL = 0.56; EXPRESSED IN FETAL LIVER, SIGNAL = 0.65; EXPRESSED IN BONE MARROW, SIGNAL = 0.59; SWISSPROT HIT: Q41969, EVALUE 2.70e+00
KEQSEVRPKPESKPEMQAERANPHMHRAEVQKRGAEDTTLVSTLDSCFAFSHRQRHEAE

SEQ ID NO: 28109 - protein, 48 aa, Homo sapiens
  MAP TO AC016687.2; EXPRESSED IN HELA, SIGNAL = 0.91; EXPRESSED IN FETAL LIVER, SIGNAL = 1.6; EXPRESSED IN HEART, SIGNAL = 1.8; EXPRESSED IN PLACENTA, SIGNAL = 2.2; EXPRESSED IN BRAIN, SIGNAL = 1.9; EXPRESSED IN LUNG, SIGNAL =   2; EXPRESSED IN ADULT LIVER, SIGNAL = 1.9; SWISSPROT HIT: P44677, EVALUE 6.30e+00
TKLAGMTDIELRIWTGTKIVEIQEDGKTLSKENKNHNKVTQELEANIA

SEQ ID NO: 28110 - protein, 69 aa, Homo sapiens
  MAP TO AC016763.5; EXPRESSED IN LUNG, SIGNAL = 0.46; EXPRESSED IN BRAIN, SIGNAL = 0.37; SWISSPROT HIT: P43572, EVALUE 3.00e-04
LVTLQEAKLLLNEDDYLIKAVYDYWVRKRKNCRGPSLIPQIKQEKRDGSTNNDPYVAFRRRTEKMQTRK

SEQ ID NO: 28111 - protein, 45 aa, Homo sapiens
  MAP TO AC021011.2; EXPRESSED IN FETAL LIVER, SIGNAL = 0.77; EXPRESSED IN PLACENTA, SIGNAL = 1.1; EXPRESSED IN ADULT LIVER, SIGNAL = 0.97; EXPRESSED IN BONE MARROW, SIGNAL = 0.85; EXPRESSED IN LUNG, SIGNAL = 0.99; EXPRESSED IN BRAIN, SIGNAL = 0.98
YSHLVKKAKANIEFPRFWNDLCQNSSGMKYYALFVMPKTFKIQQA

SEQ ID NO: 28112 - protein, 53 aa, Homo sapiens
  MAP TO AF235095.1; EXPRESSED IN HELA, SIGNAL = 0.78; EXPRESSED IN PLACENTA, SIGNAL = 0.8; EXPRESSED IN FETAL LIVER, SIGNAL =   1; EXPRESSED IN ADULT LIVER, SIGNAL = 0.93; EXPRESSED IN BONE MARROW, SIGNAL = 0.72; EXPRESSED IN BRAIN, SIGNAL = 0.56; SWISSPROT HIT: Q9NV58, EVALUE 2.00e-25
IGVPIMLAYVYGVVPISLCRSGGCGVSAGNGKGVRIEFDDENDINVGGTNTAV

SEQ ID NO: 28113 - protein, 26 aa, Homo sapiens
  MAP TO AC013816.3; EXPRESSED IN FETAL LIVER, SIGNAL = 0.56; EXPRESSED IN PLACENTA, SIGNAL = 0.51; EXPRESSED IN BONE MARROW, SIGNAL = 0.43; EXPRESSED IN LUNG, SIGNAL = 0.46; EXPRESSED IN ADULT LIVER, SIGNAL = 0.36; EXPRESSED IN BRAIN, SIGNAL = 0.56
GEKKEGESTEKQGKGDHYSKCQEPEK

SEQ ID NO: 28114 - protein, 26 aa, Homo sapiens
  MAP TO AC013816.3; EXPRESSED IN FETAL LIVER, SIGNAL = 0.56; EXPRESSED IN PLACENTA, SIGNAL = 0.51; EXPRESSED IN BONE MARROW, SIGNAL = 0.43; EXPRESSED IN LUNG, SIGNAL = 0.46; EXPRESSED IN ADULT LIVER, SIGNAL = 0.36; EXPRESSED IN BRAIN, SIGNAL = 0.56
ERRRRGKALRNKEKGIITQNVKNPKR

SEQ ID NO: 28115 - protein, 22 aa, Homo sapiens
  MAP TO AC016078.3; EXPRESSED IN BONE MARROW, SIGNAL = 0.57; EXPRESSED IN BRAIN, SIGNAL = 0.58; EXPRESSED IN FETAL LIVER, SIGNAL = 0.71; EXPRESSED IN PLACENTA, SIGNAL = 0.54; EXPRESSED IN ADULT LIVER, SIGNAL = 0.71
CPMRSKLQLGLKSTKLTNFLKG

SEQ ID NO: 28116 - protein, 31 aa, Homo sapiens
  MAP TO CHR21_64.0; EXPRESSED IN LUNG, SIGNAL = 0.87; EXPRESSED IN PLACENTA, SIGNAL = 0.93; EXPRESSED IN FETAL LIVER, SIGNAL = 1.8; EXPRESSED IN BONE MARROW, SIGNAL = 1.9; EXPRESSED IN HELA, SIGNAL = 3.5; EXPRESSED IN BRAIN, SIGNAL = 1.7; EXPRESSED IN HEART, SIGNAL = 1.4; SWISSPROT HIT: P21483, EVALUE 3.90e+00
AGRRPGSVRGRACQPAAGQPGLPRVCPGQPR

SEQ ID NO: 28117 - protein, 57 aa, Homo sapiens
  MAP TO CHR21_64.0; EXPRESSED IN LUNG, SIGNAL = 0.87; EXPRESSED IN PLACENTA, SIGNAL = 0.93; EXPRESSED IN FETAL LIVER, SIGNAL = 1.8; EXPRESSED IN BONE MARROW, SIGNAL = 1.9; EXPRESSED IN HELA, SIGNAL = 3.5; EXPRESSED IN BRAIN, SIGNAL = 1.7; EXPRESSED IN HEART, SIGNAL = 1.4; SWISSPROT HIT: Q05095, EVALUE 4.70e+00
CWEAAGQRQRQGLPACCRPARPAKSLPRATPMMHPASLCPCRADEGMWPRWLPCLCQ

SEQ ID NO: 28118 - protein, 31 aa, Homo sapiens
  MAP TO AC024195.2; EXPRESSED IN BONE MARROW, SIGNAL = 0.99; EXPRESSED IN PLACENTA, SIGNAL = 1.1; EXPRESSED IN BRAIN, SIGNAL = 2.6; EXPRESSED IN LUNG, SIGNAL = 1.1; EXPRESSED IN FETAL LIVER, SIGNAL = 1.1
GCRKGASSLSSEVVTVSLAAPSWALGVLEVA

SEQ ID NO: 28119 - protein, 65 aa, Homo sapiens
  MAP TO AC016672.4; EXPRESSED IN PLACENTA, SIGNAL = 8.3; EXPRESSED IN FETAL LIVER, SIGNAL =   5; EXPRESSED IN LUNG, SIGNAL = 6.9; EXPRESSED IN ADULT LIVER, SIGNAL = 6.6; EXPRESSED IN BONE MARROW, SIGNAL = 5.6; EXPRESSED IN HELA, SIGNAL = 2.3; EXPRESSED IN BRAIN, SIGNAL = 6.6; EXPRESSED IN HEART, SIGNAL = 6.4
VVVHVSAVTTTLASICQTKGTCVRRSAASMPAARCCLALNYGLAHSLREGIIGSLFCSRENGSIG

SEQ ID NO: 28120 - protein, 37 aa, Homo sapiens
  MAP TO AC016672.4; EXPRESSED IN PLACENTA, SIGNAL = 8.3; EXPRESSED IN FETAL LIVER, SIGNAL =   5; EXPRESSED IN LUNG, SIGNAL = 6.9; EXPRESSED IN ADULT LIVER, SIGNAL = 6.6; EXPRESSED IN BONE MARROW, SIGNAL = 5.6; EXPRESSED IN HELA, SIGNAL = 2.3; EXPRESSED IN BRAIN, SIGNAL = 6.6; EXPRESSED IN HEART, SIGNAL = 6.4; SWISSPROT HIT: P17473, EVALUE 1.30e+00
LSWFTCPLSPQPLPASAKPRARVSGGLLPACQLPGAA

SEQ ID NO: 28121 - protein, 27 aa, Homo sapiens
  MAP TO AL121830.11; EXPRESSED IN PLACENTA, SIGNAL = 1.3; EXPRESSED IN FETAL LIVER, SIGNAL = 1.4; EXPRESSED IN ADULT LIVER, SIGNAL = 1.2; EXPRESSED IN BONE MARROW, SIGNAL =   1; EXPRESSED IN BRAIN, SIGNAL = 1.1; EXPRESSED IN HELA, SIGNAL = 1.2
VTICMIFTGLPGPGTILFPVTGTLMGT

SEQ ID NO: 28122 - protein, 27 aa, Homo sapiens
  MAP TO AC011977.3; EXPRESSED IN BRAIN, SIGNAL = 0.67; EXPRESSED IN PLACENTA, SIGNAL = 0.92; EXPRESSED IN LUNG, SIGNAL = 0.6; EXPRESSED IN FETAL LIVER, SIGNAL = 0.67; EXPRESSED IN BONE MARROW, SIGNAL = 0.44
MPLSQILSTEEARTEFAADLLDSLLLT

SEQ ID NO: 28123 - protein, 25 aa, Homo sapiens
  MAP TO AC011977.3; EXPRESSED IN BRAIN, SIGNAL = 0.67; EXPRESSED IN PLACENTA, SIGNAL = 0.92; EXPRESSED IN LUNG, SIGNAL = 0.6; EXPRESSED IN FETAL LIVER, SIGNAL = 0.67; EXPRESSED IN BONE MARROW, SIGNAL = 0.44
CPLAKFFPLRRQELSLLQTCWIHCC

SEQ ID NO: 28124 - protein, 107 aa, Homo sapiens
  MAP TO CHR22_182.0; EXPRESSED IN BRAIN, SIGNAL = 0.54; EXPRESSED IN BONE MARROW, SIGNAL = 0.55; EXPRESSED IN PLACENTA, SIGNAL = 0.39; EXPRESSED IN ADULT LIVER, SIGNAL = 0.53; SWISSPROT HIT: Q12967, EVALUE 1.00e-03
PAPRPGQHALTMPALEPAPPLLADLGPALEPESPAALGPPGYLHSAPGPAPAPGEGPPPGTVLEPQSAPESSCPCRGSVKNQPSEELPDMTTFPPRLLAEQLTLMDA

SEQ ID NO: 28125 - protein, 84 aa, Homo sapiens
  MAP TO CHR22_182.0; EXPRESSED IN BRAIN, SIGNAL = 0.54; EXPRESSED IN BONE MARROW, SIGNAL = 0.55; EXPRESSED IN PLACENTA, SIGNAL = 0.39; EXPRESSED IN ADULT LIVER, SIGNAL = 0.53
SCSTSWATRINNAGPGASTTTAGGPGACSGARVTCSPGSTRISTFSTRASTSTRGRAPSRDSAGATVSPRVLLSLSWVCKEPTQ

SEQ ID NO: 28126 - protein, 62 aa, Homo sapiens
  MAP TO AC023152.3; EXPRESSED IN LUNG, SIGNAL = 6.3; EXPRESSED IN BRAIN, SIGNAL = 7.1; EXPRESSED IN ADULT LIVER, SIGNAL = 6.6; EXPRESSED IN FETAL LIVER, SIGNAL = 6.2; EXPRESSED IN BONE MARROW, SIGNAL = 6.2; SWISSPROT HIT: P56095, EVALUE 1.20e+00
PRLLPGSGSSCVGGPHSSERREEAASRMKCKPNQTRTYDPEGFKKRAACLCFRSEREDEVLL

SEQ ID NO: 28127 - protein, 28 aa, Homo sapiens
  MAP TO AC023152.3; EXPRESSED IN LUNG, SIGNAL = 6.3; EXPRESSED IN BRAIN, SIGNAL = 7.1; EXPRESSED IN ADULT LIVER, SIGNAL = 6.6; EXPRESSED IN FETAL LIVER, SIGNAL = 6.2; EXPRESSED IN BONE MARROW, SIGNAL = 6.2
HLGCCPAAAAAASAAHTAARGERRLPRG

SEQ ID NO: 28128 - protein, 24 aa, Homo sapiens
  MAP TO CHR22_122.0; EXPRESSED IN BONE MARROW, SIGNAL = 0.41; EXPRESSED IN PLACENTA, SIGNAL = 0.52; EXPRESSED IN LUNG, SIGNAL = 0.45; EXPRESSED IN ADULT LIVER, SIGNAL = 0.53; EXPRESSED IN BRAIN, SIGNAL = 0.45; EXPRESSED IN FETAL LIVER, SIGNAL = 0.5
HLPRACHQLCHQPCHQLCHQLCQY

SEQ ID NO: 28129 - protein, 73 aa, Homo sapiens
  MAP TO AC012360.2; EXPRESSED IN BRAIN, SIGNAL = 0.41; EXPRESSED IN FETAL LIVER, SIGNAL = 0.41; EXPRESSED IN BONE MARROW, SIGNAL = 0.41; EXPRESSED IN ADULT LIVER, SIGNAL = 0.32; SWISSPROT HIT: Q11030, EVALUE 1.60e+00
KNTEELCGLPLRMKQMSAKICFHSEEHKLNISLFTPHLHPYPESIHQDPPLRGTNYNDLCMRQFELAFLLLVN

SEQ ID NO: 28130 - protein, 25 aa, Homo sapiens
  MAP TO AL137796.1; EXPRESSED IN PLACENTA, SIGNAL =   3; EXPRESSED IN LUNG, SIGNAL = 2.7; EXPRESSED IN ADULT LIVER, SIGNAL = 2.7; EXPRESSED IN BONE MARROW, SIGNAL = 3.2; EXPRESSED IN BRAIN, SIGNAL = 2.8; EXPRESSED IN HELA, SIGNAL =   2; EXPRESSED IN FETAL LIVER, SIGNAL = 3.1; EXPRESSED IN HEART, SIGNAL = 2.2
STLLLLLLLLPGMWAVCELGGSIAS

SEQ ID NO: 28131 - protein, 27 aa, Homo sapiens
  MAP TO AL137793.1; EXPRESSED IN BONE MARROW, SIGNAL = 2.9; EXPRESSED IN BRAIN, SIGNAL = 2.8; EXPRESSED IN HELA, SIGNAL = 1.9; EXPRESSED IN HEART, SIGNAL = 2.6; EXPRESSED IN FETAL LIVER, SIGNAL = 2.9; EXPRESSED IN LUNG, SIGNAL = 3.3
NIQRQKEILMKKLFKMESEYSSKRKPS

SEQ ID NO: 28132 - protein, 54 aa, Homo sapiens
  MAP TO AC015845.4; EXPRESSED IN LUNG, SIGNAL = 0.47; EXPRESSED IN BRAIN, SIGNAL = 0.38; EXPRESSED IN PLACENTA, SIGNAL = 0.52; EXPRESSED IN FETAL LIVER, SIGNAL = 0.51; EXPRESSED IN BONE MARROW, SIGNAL = 0.59; SWISSPROT HIT: Q9ZFM2, EVALUE 2.10e+00
DYQSYLTWISTLHKEMALILEARVSAFFIKRLTVNVQVERPWVSPQEQNFINFL

SEQ ID NO: 28133 - protein, 17 aa, Homo sapiens
  MAP TO AC015845.4; EXPRESSED IN LUNG, SIGNAL = 0.47; EXPRESSED IN BRAIN, SIGNAL = 0.38; EXPRESSED IN PLACENTA, SIGNAL = 0.52; EXPRESSED IN FETAL LIVER, SIGNAL = 0.51; EXPRESSED IN BONE MARROW, SIGNAL = 0.59
IINLISPGFLPFTKRWP

SEQ ID NO: 28134 - protein, 21 aa, Homo sapiens
  MAP TO CHR22_128.0; EXPRESSED IN BRAIN, SIGNAL = 0.73; EXPRESSED IN FETAL LIVER, SIGNAL = 0.74; EXPRESSED IN PLACENTA, SIGNAL = 0.81; EXPRESSED IN LUNG, SIGNAL = 0.64; EXPRESSED IN BONE MARROW, SIGNAL = 0.79
SDPGALGSDPAPNLSAAAAAL

SEQ ID NO: 28135 - protein, 27 aa, Homo sapiens
  MAP TO AL133406.3; EXPRESSED IN BONE MARROW, SIGNAL = 1.3; EXPRESSED IN BRAIN, SIGNAL = 1.5; EXPRESSED IN HELA, SIGNAL = 0.91; EXPRESSED IN FETAL LIVER, SIGNAL = 1.3; EXPRESSED IN LUNG, SIGNAL = 1.5; EXPRESSED IN HEART, SIGNAL = 1.3; EXPRESSED IN PLACENTA, SIGNAL = 1.8; EXPRESSED IN ADULT LIVER, SIGNAL = 1.5
LALNEPSLPVPPPACFSVLRSRGCRRP

SEQ ID NO: 28136 - protein, 73 aa, Homo sapiens
  MAP TO CHR21_70.0; EXPRESSED IN HEART, SIGNAL = 1.3; EXPRESSED IN BRAIN, SIGNAL = 1.4; EXPRESSED IN HELA, SIGNAL = 4.1; EXPRESSED IN FETAL LIVER, SIGNAL = 1.3; EXPRESSED IN BONE MARROW, SIGNAL = 1.5; SWISSPROT HIT: O35984, EVALUE 2.10e-01
YYSFDVFRHWHRGFLTSVFVASWSGGKHPKLRFTDEKAERLIKPFVVPRRVSFGAGSHHRTWLPTTPAEPGSS

SEQ ID NO: 28137 - protein, 29 aa, Homo sapiens
  MAP TO AC018671.5; EXPRESSED IN BRAIN, SIGNAL = 2.2; EXPRESSED IN PLACENTA, SIGNAL = 2.8; EXPRESSED IN LUNG, SIGNAL = 2.2; EXPRESSED IN ADULT LIVER, SIGNAL = 2.5; EXPRESSED IN FETAL LIVER, SIGNAL = 1.8; EXPRESSED IN BONE MARROW, SIGNAL = 1.9; EXPRESSED IN HEART, SIGNAL = 2.1
LRGPQSPRCKPVLVHGQLGTRPCSRWCGA

SEQ ID NO: 28138 - protein, 24 aa, Homo sapiens
  MAP TO AL136317.2; EXPRESSED IN LUNG, SIGNAL = 3.7; EXPRESSED IN ADULT LIVER, SIGNAL = 4.1; EXPRESSED IN PLACENTA, SIGNAL = 3.9; EXPRESSED IN BONE MARROW, SIGNAL = 3.5; EXPRESSED IN BRAIN, SIGNAL = 3.3; EXPRESSED IN HELA, SIGNAL =   2; EXPRESSED IN FETAL LIVER, SIGNAL = 3.8
CSSCVSSPSWTRRTTQHCQEHTHW

SEQ ID NO: 28139 - protein, 51 aa, Homo sapiens
  MAP TO CHR21_72.0; EXPRESSED IN LUNG, SIGNAL = 0.83; EXPRESSED IN BRAIN, SIGNAL = 1.2; EXPRESSED IN ADULT LIVER, SIGNAL = 0.74; EXPRESSED IN HELA, SIGNAL = 3.5; EXPRESSED IN FETAL LIVER, SIGNAL = 1.2; EXPRESSED IN BONE MARROW, SIGNAL = 1.5
RLLTVTVELSPAPKSPGLTVVPSCAASTQGPPVPPPRRGQVCSAHYTRALG

SEQ ID NO: 28140 - protein, 50 aa, Homo sapiens
  MAP TO CHR21_72.0; EXPRESSED IN LUNG, SIGNAL = 0.83; EXPRESSED IN BRAIN, SIGNAL = 1.2; EXPRESSED IN ADULT LIVER, SIGNAL = 0.74; EXPRESSED IN HELA, SIGNAL = 3.5; EXPRESSED IN FETAL LIVER, SIGNAL = 1.2; EXPRESSED IN BONE MARROW, SIGNAL = 1.5; SWISSPROT HIT: Q16633, EVALUE 2.80e+00
SADSNSGAFPSTQEPGAHRGPLLCSQHTRPSRATTSQGPGLLGPLHQSPW

SEQ ID NO: 28141 - protein, 24 aa, Homo sapiens
  MAP TO AL160314.1; EXPRESSED IN FETAL LIVER, SIGNAL = 2.6; EXPRESSED IN BONE MARROW, SIGNAL = 1.8; EXPRESSED IN PLACENTA, SIGNAL =   2; EXPRESSED IN LUNG, SIGNAL = 2.6; EXPRESSED IN ADULT LIVER, SIGNAL = 3.8; EXPRESSED IN BRAIN, SIGNAL = 1.1
MKLPTQEMKPERKELKGKVPTRRQ

SEQ ID NO: 28142 - protein, 48 aa, Homo sapiens
  MAP TO CHR21_74.0; EXPRESSED IN BRAIN, SIGNAL = 1.1; EXPRESSED IN ADULT LIVER, SIGNAL = 0.57; EXPRESSED IN HELA, SIGNAL = 2.6; EXPRESSED IN FETAL LIVER, SIGNAL = 0.94; EXPRESSED IN BONE MARROW, SIGNAL = 1.2
RLQEVHPGWRGVLHSQQVRRLRQWEEQGPQQQWPEASGSSQGSPGRCP

SEQ ID NO: 28143 - protein, 48 aa, Homo sapiens
  MAP TO CHR21_74.0; EXPRESSED IN BRAIN, SIGNAL = 1.1; EXPRESSED IN ADULT LIVER, SIGNAL = 0.57; EXPRESSED IN HELA, SIGNAL = 2.6; EXPRESSED IN FETAL LIVER, SIGNAL = 0.94; EXPRESSED IN BONE MARROW, SIGNAL = 1.2; SWISSPROT HIT: O43918, EVALUE 3.00e-22
GSKKCIQVGGEFYTPSKFEDSGSGKNKARSSSGPKPLVRAKGAQGAAP

SEQ ID NO: 28144 - protein, 22 aa, Homo sapiens
  MAP TO CHR22_176.0; EXPRESSED IN PLACENTA, SIGNAL = 0.84; EXPRESSED IN BRAIN, SIGNAL = 0.83; EXPRESSED IN FETAL LIVER, SIGNAL = 0.87; EXPRESSED IN BONE MARROW, SIGNAL = 0.88; SWISSPROT HIT: P53673, EVALUE 6.00e-09
WVCSQFPGYRGFQYVLECDHHS

SEQ ID NO: 28145 - protein, 23 aa, Homo sapiens
  MAP TO CHR22_176.0; EXPRESSED IN PLACENTA, SIGNAL = 0.84; EXPRESSED IN BRAIN, SIGNAL = 0.83; EXPRESSED IN FETAL LIVER, SIGNAL = 0.87; EXPRESSED IN BONE MARROW, SIGNAL = 0.88
LGLLPVSGLPRISVCAGMRSPFR

SEQ ID NO: 28146 - protein, 31 aa, Homo sapiens
  MAP TO AL137802.2; EXPRESSED IN FETAL LIVER, SIGNAL = 0.69; EXPRESSED IN BONE MARROW, SIGNAL = 0.67; EXPRESSED IN LUNG, SIGNAL = 0.83; EXPRESSED IN PLACENTA, SIGNAL = 0.68; EXPRESSED IN BRAIN, SIGNAL = 0.62
VMVMEEEARQDRKAQVRKTMQVQGQEEKEQL

SEQ ID NO: 28147 - protein, 45 aa, Homo sapiens
  MAP TO AL137798.1; EXPRESSED IN BONE MARROW, SIGNAL = 0.88; EXPRESSED IN PLACENTA, SIGNAL = 1.1; EXPRESSED IN LUNG, SIGNAL = 0.97; EXPRESSED IN BRAIN, SIGNAL = 0.89; SWISSPROT HIT: P26927, EVALUE 3.00e-22
YMPTLRNGLEENFCRNPDGDPGGPWCHTTDPAVRFQSCGIKSCRV

SEQ ID NO: 28148 - protein, 39 aa, Homo sapiens
  MAP TO AL137798.1; EXPRESSED IN BONE MARROW, SIGNAL = 0.88; EXPRESSED IN PLACENTA, SIGNAL = 1.1; EXPRESSED IN LUNG, SIGNAL = 0.97; EXPRESSED IN BRAIN, SIGNAL = 0.89; SWISSPROT HIT: P26927, EVALUE 9.00e-21
ACVWCNGEEYRGAVDRTESGRECQRWDLQHPHQHPFEPG

SEQ ID NO: 28149 - protein, 86 aa, Homo sapiens
  MAP TO AL137798.1; EXPRESSED IN BONE MARROW, SIGNAL = 0.88; EXPRESSED IN PLACENTA, SIGNAL = 1.1; EXPRESSED IN LUNG, SIGNAL = 0.97; EXPRESSED IN BRAIN, SIGNAL = 0.89; SWISSPROT HIT: P04072, EVALUE 8.60e-01
TCPRSGMAWKRTSAVTLMATPEVLGATQQTLPCASRAAASNPAGWVSGAGSSWESGGTSPRPSTNPLALCLQPRVSGAMARNTAAR

SEQ ID NO: 28150 - protein, 54 aa, Homo sapiens
  MAP TO AL139152.1; EXPRESSED IN BRAIN, SIGNAL = 6.7; EXPRESSED IN FETAL LIVER, SIGNAL =  10; EXPRESSED IN LUNG, SIGNAL =  19; EXPRESSED IN ADULT LIVER, SIGNAL =  21; EXPRESSED IN BONE MARROW, SIGNAL = 9.2
ELLAEKEPEVLQDSLDRWYSTPSVYLGLTDPCQPYRSAFYVLEQQRVGLAVDMD

SEQ ID NO: 28151 - protein, 27 aa, Homo sapiens
  MAP TO AL139152.1; EXPRESSED IN BRAIN, SIGNAL = 6.7; EXPRESSED IN FETAL LIVER, SIGNAL =  10; EXPRESSED IN LUNG, SIGNAL =  19; EXPRESSED IN ADULT LIVER, SIGNAL =  21; EXPRESSED IN BONE MARROW, SIGNAL = 9.2
SCWLRKSLKSCRTHWIDGIRLLQFILD

SEQ ID NO: 28152 - protein, 37 aa, Homo sapiens
  MAP TO AC019277.4; EXPRESSED IN BRAIN, SIGNAL = 0.39; EXPRESSED IN FETAL LIVER, SIGNAL = 0.45
SSSREQTHDAIASQQPTLSPSSSPKQAAHAQPTPGPT

SEQ ID NO: 28153 - protein, 64 aa, Homo sapiens
  MAP TO CHR22_115.0; EXPRESSED IN BONE MARROW, SIGNAL = 0.5; EXPRESSED IN PLACENTA, SIGNAL = 0.48; EXPRESSED IN LUNG, SIGNAL = 0.54; EXPRESSED IN BRAIN, SIGNAL = 0.54; SWISSPROT HIT: Q63515, EVALUE 2.00e-03
FEKGHCYEPYIQNGNFTTSDPTYNIGTIVEFTCDPGHSLEQGPAIIECINVRDPYWNDTEPLCR

SEQ ID NO: 28154 - protein, 28 aa, Homo sapiens
  MAP TO CHR22_115.0; EXPRESSED IN BONE MARROW, SIGNAL = 0.5; EXPRESSED IN PLACENTA, SIGNAL = 0.48; EXPRESSED IN LUNG, SIGNAL = 0.54; EXPRESSED IN BRAIN, SIGNAL = 0.54
RLRKATAMSPTSRMGTSLHPTRPITLGL

SEQ ID NO: 28155 - protein, 83 aa, Homo sapiens
  MAP TO CHR22_174.0; EXPRESSED IN HEART, SIGNAL = 1.3; EXPRESSED IN BRAIN, SIGNAL = 1.2; EXPRESSED IN HELA, SIGNAL = 1.1; EXPRESSED IN FETAL LIVER, SIGNAL = 1.5; EXPRESSED IN BONE MARROW, SIGNAL = 1.1; EXPRESSED IN ADULT LIVER, SIGNAL = 1.1; EXPRESSED IN LUNG, SIGNAL = 1.1; EXPRESSED IN PLACENTA, SIGNAL = 1.3; SWISSPROT HIT: Q92558, EVALUE 6.90e-01
PRLATAATTSTDANTTTTAAALNEPAHPTGLPPPGHRCSTALALAAASRPPTSLALCSLHRCHHANHSEASRGVPGSSLQHVQ

SEQ ID NO: 28156 - protein, 35 aa, Homo sapiens
  MAP TO AC016714.2; EXPRESSED IN PLACENTA, SIGNAL = 0.61; EXPRESSED IN BONE MARROW, SIGNAL = 0.58; EXPRESSED IN LUNG, SIGNAL = 0.64; EXPRESSED IN ADULT LIVER, SIGNAL = 0.67; EXPRESSED IN BRAIN, SIGNAL = 0.65; EXPRESSED IN HELA, SIGNAL = 0.67; EXPRESSED IN FETAL LIVER, SIGNAL = 0.69; SWISSPROT HIT: P52289, EVALUE 6.60e+00
MANTYTSLDCIKCGNTGYVRITINDSGIAGLRYPE

SEQ ID NO: 28157 - protein, 27 aa, Homo sapiens
  MAP TO AC016714.2; EXPRESSED IN PLACENTA, SIGNAL = 0.61; EXPRESSED IN BONE MARROW, SIGNAL = 0.58; EXPRESSED IN LUNG, SIGNAL = 0.64; EXPRESSED IN ADULT LIVER, SIGNAL = 0.67; EXPRESSED IN BRAIN, SIGNAL = 0.65; EXPRESSED IN HELA, SIGNAL = 0.67; EXPRESSED IN FETAL LIVER, SIGNAL = 0.69
WQIHILLWIALSVVTQDMCASQLMTVA

SEQ ID NO: 28158 - protein, 39 aa, Homo sapiens
  MAP TO AC015957.3; EXPRESSED IN PLACENTA, SIGNAL = 1.1; EXPRESSED IN HELA, SIGNAL = 0.78; EXPRESSED IN BRAIN, SIGNAL =   1; EXPRESSED IN LUNG, SIGNAL = 1.4; EXPRESSED IN ADULT LIVER, SIGNAL =   1; EXPRESSED IN FETAL LIVER, SIGNAL = 0.97; SWISSPROT HIT: P25522, EVALUE 1.70e+00
RGIDWLPVIPAPTGRAVLHLSGHNGPIPIDGVGVELYPQ

SEQ ID NO: 28159 - protein, 39 aa, Homo sapiens
  MAP TO AC015957.3; EXPRESSED IN PLACENTA, SIGNAL = 1.1; EXPRESSED IN HELA, SIGNAL = 0.78; EXPRESSED IN BRAIN, SIGNAL =   1; EXPRESSED IN LUNG, SIGNAL = 1.4; EXPRESSED IN ADULT LIVER, SIGNAL =   1; EXPRESSED IN FETAL LIVER, SIGNAL = 0.97; SWISSPROT HIT: P53394, EVALUE 8.50e+00
LVESTGCRSFQLPLAVQYSTSRATMGPSPLMELALSCIH

SEQ ID NO: 28160 - protein, 38 aa, Homo sapiens
  MAP TO AB017653.1; EXPRESSED IN BONE MARROW, SIGNAL =   2; EXPRESSED IN LUNG, SIGNAL = 2.7; EXPRESSED IN HEART, SIGNAL =   2; EXPRESSED IN ADULT LIVER, SIGNAL = 3.1; EXPRESSED IN HELA, SIGNAL =   2; EXPRESSED IN BRAIN, SIGNAL = 2.1; EXPRESSED IN FETAL LIVER, SIGNAL = 2.1; EXPRESSED IN PLACENTA, SIGNAL = 2.9
SKELIVVDIGTTAIVRAGHWLAEPDQEFMHKWGQMVSK

SEQ ID NO: 28161 - protein, 18 aa, Homo sapiens
  MAP TO CHR22_123.0; EXPRESSED IN HELA, SIGNAL = 1.3; EXPRESSED IN LUNG, SIGNAL = 1.7; EXPRESSED IN ADULT LIVER, SIGNAL = 1.5; EXPRESSED IN BRAIN, SIGNAL = 1.4; EXPRESSED IN PLACENTA, SIGNAL = 1.5; EXPRESSED IN HEART, SIGNAL = 1.4; EXPRESSED IN FETAL LIVER, SIGNAL = 1.6; EXPRESSED IN BONE MARROW, SIGNAL = 1.6
MVMMMMTVTVMVMRIMVM

SEQ ID NO: 28162 - protein, 112 aa, Homo sapiens
  MAP TO AL136304.2; EXPRESSED IN FETAL LIVER, SIGNAL = 1.8; EXPRESSED IN PLACENTA, SIGNAL = 2.4; EXPRESSED IN LUNG, SIGNAL = 1.9; EXPRESSED IN ADULT LIVER, SIGNAL =   2; EXPRESSED IN BONE MARROW, SIGNAL = 1.6; EXPRESSED IN BRAIN, SIGNAL = 1.5; EXPRESSED IN HEART, SIGNAL = 1.6; EXPRESSED IN HELA, SIGNAL = 1.3; SWISSPROT HIT: Q14999, EVALUE 3.00e-41
MGTLISELVQAMRWDQASDRPRSSARSPGSIFQPQLADVSPGLPAAQAQPSFRRSRRFRPRSEFASGNTYALYVRDTLQPGMRVRMLDDYEEISAGDEGEFRQSNNGVPPVQ

SEQ ID NO: 28163 - protein, 43 aa, Homo sapiens
  MAP TO AC011734.4; EXPRESSED IN FETAL LIVER, SIGNAL = 0.59; EXPRESSED IN LUNG, SIGNAL = 0.56; EXPRESSED IN ADULT LIVER, SIGNAL = 1.1; EXPRESSED IN BONE MARROW, SIGNAL = 0.52; EXPRESSED IN BRAIN, SIGNAL = 0.52; SWISSPROT HIT: P26502, EVALUE 8.40e+00
IKVCALEFNELLESILCILLVVEVFSLKKTGEMLEVVVGGRQV

SEQ ID NO: 28164 - protein, 38 aa, Homo sapiens
  MAP TO CHR22_177.0; EXPRESSED IN BONE MARROW, SIGNAL = 0.76; EXPRESSED IN BRAIN, SIGNAL = 0.69; EXPRESSED IN HELA, SIGNAL = 0.85; EXPRESSED IN PLACENTA, SIGNAL = 0.89; EXPRESSED IN LUNG, SIGNAL = 0.96; EXPRESSED IN ADULT LIVER, SIGNAL = 0.84; EXPRESSED IN FETAL LIVER, SIGNAL = 0.74
QHPSSARTDAHDPQPARPGSLVSPQQHRLRSHGERRVL

SEQ ID NO: 28165 - protein, 43 aa, Homo sapiens
  MAP TO CHR22_177.0; EXPRESSED IN BONE MARROW, SIGNAL = 0.76; EXPRESSED IN BRAIN, SIGNAL = 0.69; EXPRESSED IN HELA, SIGNAL = 0.85; EXPRESSED IN PLACENTA, SIGNAL = 0.89; EXPRESSED IN LUNG, SIGNAL = 0.96; EXPRESSED IN ADULT LIVER, SIGNAL = 0.84; EXPRESSED IN FETAL LIVER, SIGNAL = 0.74
SSIPPVHAQTPMTRSQPGQAALSPLNSTDFEVTGNGVCFKPQR

SEQ ID NO: 28166 - protein, 25 aa, Homo sapiens
  MAP TO AL138893.2; EXPRESSED IN BRAIN, SIGNAL = 4.3; EXPRESSED IN FETAL LIVER, SIGNAL =   4; EXPRESSED IN BONE MARROW, SIGNAL = 3.9; EXPRESSED IN HEART, SIGNAL = 3.9; EXPRESSED IN PLACENTA, SIGNAL = 4.2; EXPRESSED IN LUNG, SIGNAL = 4.3; EXPRESSED IN ADULT LIVER, SIGNAL =   5
KTRKGTTNPRRFLKRKRLTGEAVWA

SEQ ID NO: 28167 - protein, 39 aa, Homo sapiens
  MAP TO AC011950.4; EXPRESSED IN BONE MARROW, SIGNAL = 1.4; EXPRESSED IN LUNG, SIGNAL = 1.8; EXPRESSED IN HELA, SIGNAL =   1; EXPRESSED IN FETAL LIVER, SIGNAL = 1.3; EXPRESSED IN PLACENTA, SIGNAL = 1.6; EXPRESSED IN ADULT LIVER, SIGNAL = 1.5; EXPRESSED IN BRAIN, SIGNAL = 1.7; EXPRESSED IN HEART, SIGNAL = 1.6
MKTDHQHKHSSPKDKQKSYVLDQLFSKCGPWTAETASSL

SEQ ID NO: 28168 - protein, 35 aa, Homo sapiens
  MAP TO AL121939.3; EXPRESSED IN PLACENTA, SIGNAL =   1; EXPRESSED IN HELA, SIGNAL = 1.2; EXPRESSED IN BRAIN, SIGNAL = 2.3; EXPRESSED IN FETAL LIVER, SIGNAL = 1.6; EXPRESSED IN BONE MARROW, SIGNAL = 1.8; EXPRESSED IN HEART, SIGNAL = 1.4; SWISSPROT HIT: Q05140, EVALUE 2.00e-14
PPAGTGMPMMPQQPVMFAQPMMRPPFGAAAVPGTQ

SEQ ID NO: 28169 - protein, 26 aa, Homo sapiens
  MAP TO AC025179.2; EXPRESSED IN ADULT LIVER, SIGNAL = 0.46; EXPRESSED IN BRAIN, SIGNAL = 0.41; EXPRESSED IN BONE MARROW, SIGNAL = 0.52
EHYFLSKLNTKNGKILHNEHRSQCVR

SEQ ID NO: 28170 - protein, 57 aa, Homo sapiens
  MAP TO AL096771.11; EXPRESSED IN FETAL LIVER, SIGNAL = 1.1; EXPRESSED IN PLACENTA, SIGNAL = 1.2; EXPRESSED IN LUNG, SIGNAL = 1.3; EXPRESSED IN BONE MARROW, SIGNAL = 1.1; EXPRESSED IN ADULT LIVER, SIGNAL = 1.4; EXPRESSED IN HELA, SIGNAL = 0.58; EXPRESSED IN BRAIN, SIGNAL = 1.1; SWISSPROT HIT: P50895, EVALUE 8.00e+00
HVFPLQDHQEIILGKSIEGLTFGIEASKTWRCREENYVGETQKRDWWTNSLTSDEYN

SEQ ID NO: 28171 - protein, 36 aa, Homo sapiens
  MAP TO AC012544.3; EXPRESSED IN BONE MARROW, SIGNAL = 5.9; EXPRESSED IN ADULT LIVER, SIGNAL =   7; EXPRESSED IN HELA, SIGNAL = 2.4; EXPRESSED IN BRAIN, SIGNAL = 6.5; EXPRESSED IN HEART, SIGNAL = 6.9; EXPRESSED IN FETAL LIVER, SIGNAL = 5.2; EXPRESSED IN LUNG, SIGNAL = 7.8
EDTASLPTVGRSNATESSAIQTTKSADALILDLSAP

SEQ ID NO: 28172 - protein, 46 aa, Homo sapiens
  MAP TO CHR21_9.0; EXPRESSED IN HELA, SIGNAL = 0.66; EXPRESSED IN BRAIN, SIGNAL = 1.3; EXPRESSED IN BONE MARROW, SIGNAL = 0.99; EXPRESSED IN ADULT LIVER, SIGNAL = 1.4
HQTPSYQTTGASDNGSLLLGTSGRNLTAVLPKTTPPVTKKPDTMTQ

SEQ ID NO: 28173 - protein, 31 aa, Homo sapiens
  MAP TO CHR21_9.0; EXPRESSED IN HELA, SIGNAL = 0.66; EXPRESSED IN BRAIN, SIGNAL = 1.3; EXPRESSED IN BONE MARROW, SIGNAL = 0.99; EXPRESSED IN ADULT LIVER, SIGNAL = 1.4
PSNSKLSNNRSLRQWFPFAGDLWEESDCCSA

SEQ ID NO: 28174 - protein, 26 aa, Homo sapiens
  MAP TO CHR21_9.0; EXPRESSED IN HELA, SIGNAL = 0.66; EXPRESSED IN BRAIN, SIGNAL = 1.3; EXPRESSED IN BONE MARROW, SIGNAL = 0.99; EXPRESSED IN ADULT LIVER, SIGNAL = 1.4
AIKLQAIKQPEPQTMVPFCWGPLGGI

SEQ ID NO: 28175 - protein, 20 aa, Homo sapiens
  MAP TO AC008432.2; EXPRESSED IN HELA, SIGNAL = 1.2; EXPRESSED IN FETAL LIVER, SIGNAL = 2.5; EXPRESSED IN HEART, SIGNAL = 1.5; EXPRESSED IN LUNG, SIGNAL = 1.7; EXPRESSED IN ADULT LIVER, SIGNAL =   2; EXPRESSED IN BONE MARROW, SIGNAL = 2.8; EXPRESSED IN BRAIN, SIGNAL = 2.1
TKQYLLASKPSRKILPHQMN

SEQ ID NO: 28176 - protein, 94 aa, Homo sapiens
  MAP TO AC023120.3; EXPRESSED IN FETAL LIVER, SIGNAL = 0.45; EXPRESSED IN BRAIN, SIGNAL = 0.48; EXPRESSED IN PLACENTA, SIGNAL = 0.5; EXPRESSED IN LUNG, SIGNAL = 0.45; SWISSPROT HIT: P46821, EVALUE 1.00e-02
FKALKEQRLRETKPEVGLVNIKGYGSLEIQGSDPSGWEDCSFDNRIKAIEECKSVIESNRISRESSVDCLKESPNKQQERAQSQSGVDLQEDVL

SEQ ID NO: 28177 - protein, 39 aa, Homo sapiens
  MAP TO AL138889.2; EXPRESSED IN BRAIN, SIGNAL = 0.54; EXPRESSED IN PLACENTA, SIGNAL = 0.62; EXPRESSED IN ADULT LIVER, SIGNAL = 0.66; EXPRESSED IN FETAL LIVER, SIGNAL = 0.54; EXPRESSED IN BONE MARROW, SIGNAL = 0.5; SWISSPROT HIT: Q12767, EVALUE 5.00e+00
SLLSLKNMCHLPNEAQQVEWGYEVSMKPFPTMHSNHMWQ

SEQ ID NO: 28178 - protein, 58 aa, Homo sapiens
  MAP TO AJ239319.2; EXPRESSED IN FETAL LIVER, SIGNAL = 0.69; EXPRESSED IN LUNG, SIGNAL = 0.73; EXPRESSED IN ADULT LIVER, SIGNAL = 0.6; EXPRESSED IN BONE MARROW, SIGNAL = 0.67; EXPRESSED IN BRAIN, SIGNAL = 0.5; SWISSPROT HIT: P21675, EVALUE 3.00e-28
MREQERQASGGGEMFFMRTPQDLTGKDGDLILAEYSEENGPLMMQVGMATKIKNYYKR

SEQ ID NO: 28179 - protein, 141 aa, Homo sapiens
  MAP TO U82695.2; EXPRESSED IN BONE MARROW, SIGNAL = 3.1; EXPRESSED IN HELA, SIGNAL = 2.5; EXPRESSED IN BRAIN, SIGNAL =   3; EXPRESSED IN FETAL LIVER, SIGNAL = 4.1; EXPRESSED IN PLACENTA, SIGNAL = 4.8; EXPRESSED IN HEART, SIGNAL = 3.1; EXPRESSED IN ADULT LIVER, SIGNAL = 5.5; SWISSPROT HIT: P10388, EVALUE 4.00e-03
QLQPIPGIGHPDKPEAGKLDQLRDQPTPKQGAQGTPTQSPSTGWKALPRPGLALRKESPPVTLEQEQGHNKGLVAEWAQPQATAAMRAGAGKPEALKLRPWQAGRDPQAQEGAAVTEEDQGQRTGGREDKGRGLKPRRPPK

SEQ ID NO: 28180 - protein, 38 aa, Homo sapiens
  MAP TO AC011225.5; EXPRESSED IN BONE MARROW, SIGNAL = 2.8; EXPRESSED IN BRAIN, SIGNAL = 2.5; EXPRESSED IN HELA, SIGNAL = 1.4; EXPRESSED IN HEART, SIGNAL = 2.4; EXPRESSED IN FETAL LIVER, SIGNAL = 2.8; EXPRESSED IN PLACENTA, SIGNAL = 3.6; EXPRESSED IN ADULT LIVER, SIGNAL = 3.2
IISFPYTSQTQKKWFFILPTASSTTRSFRAASTTIASA

SEQ ID NO: 28181 - protein, 34 aa, Homo sapiens
  MAP TO AL137025.2; EXPRESSED IN HEART, SIGNAL = 3.3; EXPRESSED IN PLACENTA, SIGNAL = 4.2; EXPRESSED IN LUNG, SIGNAL = 4.1; EXPRESSED IN FETAL LIVER, SIGNAL = 3.5; EXPRESSED IN ADULT LIVER, SIGNAL = 3.6; EXPRESSED IN BONE MARROW, SIGNAL = 3.7; EXPRESSED IN BRAIN, SIGNAL = 3.7
VVGDLMLRIQRIQDFTPKLLLVRKRLLGLEPEGP

SEQ ID NO: 28182 - protein, 20 aa, Homo sapiens
  MAP TO AL137025.2; EXPRESSED IN HEART, SIGNAL = 3.3; EXPRESSED IN PLACENTA, SIGNAL = 4.2; EXPRESSED IN LUNG, SIGNAL = 4.1; EXPRESSED IN FETAL LIVER, SIGNAL = 3.5; EXPRESSED IN ADULT LIVER, SIGNAL = 3.6; EXPRESSED IN BONE MARROW, SIGNAL = 3.7; EXPRESSED IN BRAIN, SIGNAL = 3.7
LLETLCFESSVFKTLLPSFC

SEQ ID NO: 28183 - protein, 62 aa, Homo sapiens
  MAP TO AC020582.3; EXPRESSED IN PLACENTA, SIGNAL = 0.85; EXPRESSED IN LUNG, SIGNAL = 0.89; EXPRESSED IN ADULT LIVER, SIGNAL = 0.93; EXPRESSED IN FETAL LIVER, SIGNAL = 0.83; EXPRESSED IN HELA, SIGNAL = 0.75; EXPRESSED IN BRAIN, SIGNAL = 0.78
MRLPAQPWEGDAPLTPLFTSLPPTPELALGQAVGAQLETHQAGPWSHWPDGRGRDVPGLLGS

SEQ ID NO: 28184 - protein, 58 aa, Homo sapiens
  MAP TO AL137071.3; EXPRESSED IN HEART, SIGNAL = 2.5; EXPRESSED IN PLACENTA, SIGNAL = 1.7; EXPRESSED IN HELA, SIGNAL = 3.8; EXPRESSED IN BRAIN, SIGNAL = 2.2; EXPRESSED IN ADULT LIVER, SIGNAL = 1.9; EXPRESSED IN LUNG, SIGNAL = 1.5; EXPRESSED IN FETAL LIVER, SIGNAL = 1.9; EXPRESSED IN BONE MARROW, SIGNAL =   2; SWISSPROT HIT: P26436, EVALUE 7.20e-01
FAPSAPSPHHISPRRVPAPSSILQRTQPPYTQQPSGSHLKSYQPETNSSFQPNGIHVH

SEQ ID NO: 28185 - protein, 31 aa, Homo sapiens
  MAP TO AC018671.5; EXPRESSED IN BONE MARROW, SIGNAL = 0.67; EXPRESSED IN BRAIN, SIGNAL = 0.66; EXPRESSED IN HELA, SIGNAL = 0.6; EXPRESSED IN LUNG, SIGNAL = 0.73; EXPRESSED IN FETAL LIVER, SIGNAL = 0.65; EXPRESSED IN ADULT LIVER, SIGNAL = 0.73
AVVLPRVLGLQWRQPARATSPVSRGGVLEPA

SEQ ID NO: 28186 - protein, 57 aa, Homo sapiens
  MAP TO AL137068.1; EXPRESSED IN HELA, SIGNAL =   6; EXPRESSED IN BRAIN, SIGNAL = 2.4; EXPRESSED IN FETAL LIVER, SIGNAL = 2.4; EXPRESSED IN BONE MARROW, SIGNAL = 2.4; EXPRESSED IN PLACENTA, SIGNAL = 2.5; EXPRESSED IN ADULT LIVER, SIGNAL = 3.2; EXPRESSED IN LUNG, SIGNAL = 2.5; SWISSPROT HIT: P29776, EVALUE 2.80e+00
EKGTGGFGASSLKTDWREGGGGARWLNRTPPEIVLHTGTPNRTTIHARQHLHKSHKI

SEQ ID NO: 28187 - protein, 33 aa, Homo sapiens
  MAP TO AL137019.1; EXPRESSED IN BRAIN, SIGNAL = 0.95; EXPRESSED IN PLACENTA, SIGNAL = 1.1; EXPRESSED IN BONE MARROW, SIGNAL = 0.87; EXPRESSED IN LUNG, SIGNAL = 1.1; EXPRESSED IN ADULT LIVER, SIGNAL =   1
FQDLKEFQLTDRMFNLHETNKMVAFGVRPGRKF

SEQ ID NO: 28188 - protein, 58 aa, Homo sapiens
  MAP TO CHR22_166.0; EXPRESSED IN FETAL LIVER, SIGNAL = 0.63; EXPRESSED IN BONE MARROW, SIGNAL = 0.72; EXPRESSED IN ADULT LIVER, SIGNAL = 0.63; EXPRESSED IN BRAIN, SIGNAL = 0.7
CCAPQGGRVLPSAEGGARQPPHQAPLPDSRARPRDPRPIHRLCSAKEGRETHKELSEQ

SEQ ID NO: 28189 - protein, 105 aa, Homo sapiens
  MAP TO CHR22_166.0; EXPRESSED IN FETAL LIVER, SIGNAL = 0.63; EXPRESSED IN BONE MARROW, SIGNAL = 0.72; EXPRESSED IN ADULT LIVER, SIGNAL = 0.63; EXPRESSED IN BRAIN, SIGNAL = 0.7; SWISSPROT HIT: P32927, EVALUE 5.00e-27
SAVLLREEECSPVLREGLGSLHTRHHCQIPVPDPATHGQYIVSVQPRRAEKHIKSSVNSEFAPSPLWGWSGTSTPSLCNPNQFRVPPGPVFMFVTFKEMQSSDQK

SEQ ID NO: 28190 - protein, 38 aa, Homo sapiens
  MAP TO AL138886.1; EXPRESSED IN BONE MARROW, SIGNAL = 0.68; EXPRESSED IN BRAIN, SIGNAL = 0.67; EXPRESSED IN LUNG, SIGNAL = 0.73; EXPRESSED IN FETAL LIVER, SIGNAL = 0.99; EXPRESSED IN ADULT LIVER, SIGNAL = 0.92; SWISSPROT HIT: P33908, EVALUE 6.00e-16
NIKGATIVDALDTLFIMEMKHEFEEAKSWVEENLDFNV

SEQ ID NO: 28191 - protein, 84 aa, Homo sapiens
  MAP TO CHR22_172.0; EXPRESSED IN BRAIN, SIGNAL = 0.38; SWISSPROT HIT: P16258, EVALUE 7.00e-22
DSGDDDEATTPADKSELHHTLKNLSLKLDDLSTCNDLIAKHGAALQRSLTELDGLKIPSESGEKLKVVNERATLFRITSNAMIN

SEQ ID NO: 28192 - protein, 21 aa, Homo sapiens
  MAP TO CHR22_172.0; EXPRESSED IN BRAIN, SIGNAL = 0.38
MTLGTTTRLPPQPTRASCTTP

SEQ ID NO: 28193 - protein, 18 aa, Homo sapiens
  MAP TO AL138837.1; EXPRESSED IN LUNG, SIGNAL = 8.3; EXPRESSED IN ADULT LIVER, SIGNAL =   9; EXPRESSED IN HEART, SIGNAL = 5.8; EXPRESSED IN BONE MARROW, SIGNAL = 6.7; EXPRESSED IN PLACENTA, SIGNAL = 8.4; EXPRESSED IN BRAIN, SIGNAL = 5.3; EXPRESSED IN HELA, SIGNAL = 4.5; EXPRESSED IN FETAL LIVER, SIGNAL = 6.6
WPWNCKPRHLRSQSLKNS

SEQ ID NO: 28194 - protein, 47 aa, Homo sapiens
  MAP TO CHR22_173.0; EXPRESSED IN PLACENTA, SIGNAL = 0.55; EXPRESSED IN ADULT LIVER, SIGNAL = 0.79; EXPRESSED IN BRAIN, SIGNAL = 0.43; EXPRESSED IN FETAL LIVER, SIGNAL = 0.58; SWISSPROT HIT: P04922, EVALUE 3.00e-02
EAGGAQAGSRGHRPDSHKPEAQAHSGAGGREPESAAGGVAGQVERGE

SEQ ID NO: 28195 - protein, 46 aa, Homo sapiens
  MAP TO CHR22_173.0; EXPRESSED IN PLACENTA, SIGNAL = 0.55; EXPRESSED IN ADULT LIVER, SIGNAL = 0.79; EXPRESSED IN BRAIN, SIGNAL = 0.43; EXPRESSED IN FETAL LIVER, SIGNAL = 0.58
RLAALKLEAEDIALTATSQKHKLTVVLEAVNRSLQLEEWQAKWSVE

SEQ ID NO: 28196 - protein, 80 aa, Homo sapiens
  MAP TO AL137790.1; EXPRESSED IN BONE MARROW, SIGNAL = 0.88; EXPRESSED IN BRAIN, SIGNAL = 1.2; EXPRESSED IN HELA, SIGNAL = 0.77; EXPRESSED IN FETAL LIVER, SIGNAL = 0.72; EXPRESSED IN PLACENTA, SIGNAL = 0.91; EXPRESSED IN LUNG, SIGNAL = 0.87; EXPRESSED IN ADULT LIVER, SIGNAL = 0.93; SWISSPROT HIT: P31662, EVALUE 2.00e-30
LDKMLDPQVWREAATQVFFALGLGFGGVIAFSSYNKQDNNCHFDAALVSFINFFTSVLATLVVFAVLGFKANIMNEKCVV

SEQ ID NO: 28197 - protein, 65 aa, Homo sapiens
  MAP TO AL137790.1; EXPRESSED IN BONE MARROW, SIGNAL = 0.88; EXPRESSED IN BRAIN, SIGNAL = 1.2; EXPRESSED IN HELA, SIGNAL = 0.77; EXPRESSED IN FETAL LIVER, SIGNAL = 0.72; EXPRESSED IN PLACENTA, SIGNAL = 0.91; EXPRESSED IN LUNG, SIGNAL = 0.87; EXPRESSED IN ADULT LIVER, SIGNAL = 0.93; SWISSPROT HIT: P14728, EVALUE 3.00e-01
CGGRQLPRSSLPWAWALVVSLPSPATISRTTTATSMPPWCPSSTSSRQCWPPSWCLLCWASRPTS

SEQ ID NO: 28198 - protein, 20 aa, Homo sapiens
  MAP TO CHR22_74.0; EXPRESSED IN LUNG, SIGNAL = 0.45; EXPRESSED IN ADULT LIVER, SIGNAL = 0.66; EXPRESSED IN HELA, SIGNAL =   1; EXPRESSED IN BRAIN, SIGNAL = 0.39
PPNSSNCCSLPSSKATSTSS

SEQ ID NO: 28199 - protein, 46 aa, Homo sapiens
  MAP TO CHR21_15.0; EXPRESSED IN BRAIN, SIGNAL = 1.7; EXPRESSED IN LUNG, SIGNAL = 1.1; EXPRESSED IN ADULT LIVER, SIGNAL = 1.2; EXPRESSED IN HELA, SIGNAL = 3.2; EXPRESSED IN PLACENTA, SIGNAL = 0.99; EXPRESSED IN FETAL LIVER, SIGNAL = 1.6; EXPRESSED IN BONE MARROW, SIGNAL = 1.7; SWISSPROT HIT: P30125, EVALUE 6.30e+00
AQCTAESRRDLWPRKPGIVQGFSPCDSLRYGLVGWERPDHLPARHL

SEQ ID NO: 28200 - protein, 93 aa, Homo sapiens
  MAP TO AL136109.1; EXPRESSED IN ADULT LIVER, SIGNAL = 0.58; EXPRESSED IN PLACENTA, SIGNAL = 0.59; EXPRESSED IN LUNG, SIGNAL = 0.58; EXPRESSED IN BONE MARROW, SIGNAL = 0.53; EXPRESSED IN BRAIN, SIGNAL = 0.48; SWISSPROT HIT: P47179, EVALUE 2.70e+00
VGSRKLQLYKVEVLVKVRSSVEQLEISKIPRSKKTTGQNWTTISTNLWVTTNLLRHWETPNKPSQKSSNGKLEENRDGRGCIHQGRPSLQSGP

SEQ ID NO: 28201 - protein, 73 aa, Homo sapiens
  MAP TO CHR22_206.0; EXPRESSED IN HELA, SIGNAL = 1.2; EXPRESSED IN LUNG, SIGNAL = 1.3; EXPRESSED IN ADULT LIVER, SIGNAL = 1.2; EXPRESSED IN BRAIN, SIGNAL = 1.2; EXPRESSED IN PLACENTA, SIGNAL = 1.4; EXPRESSED IN FETAL LIVER, SIGNAL = 1.3; EXPRESSED IN BONE MARROW, SIGNAL = 1.3; SWISSPROT HIT: P20645, EVALUE 4.00e+00
LIESLKFWRTRFLLLPACVTATKRITEGEAHCDIYGDRPRADEDEWQLLDGFVRFVEGLNRIRRRHRSDRMMR

SEQ ID NO: 28202 - protein, 61 aa, Homo sapiens
  MAP TO CHR22_138.0; EXPRESSED IN HELA, SIGNAL = 3.3; EXPRESSED IN BRAIN, SIGNAL = 0.29; EXPRESSED IN PLACENTA, SIGNAL = 0.36; SWISSPROT HIT: P10220, EVALUE 7.20e-01
TQEWAQLPVGRVLANVLTEVADTGNQPIPQRSLCRPQPCSHAETCGEVEAQVPAQSNREQP

SEQ ID NO: 28203 - protein, 25 aa, Homo sapiens
  MAP TO AL096764.11; EXPRESSED IN BONE MARROW, SIGNAL = 0.64; EXPRESSED IN BRAIN, SIGNAL = 0.54; EXPRESSED IN FETAL LIVER, SIGNAL = 0.64; EXPRESSED IN PLACENTA, SIGNAL = 0.8; EXPRESSED IN ADULT LIVER, SIGNAL = 0.53; SWISSPROT HIT: P10383, EVALUE 3.20e-02
LGSLGLFRKLTAKDASCLFRAISEQ

SEQ ID NO: 28204 - protein, 67 aa, Homo sapiens
  MAP TO AL138743.1; EXPRESSED IN BRAIN, SIGNAL = 0.43; EXPRESSED IN HELA, SIGNAL = 1.7; SWISSPROT HIT: O35777, EVALUE 1.00e-07
IRVIRPPNYAGPLMLGLLLAVIGGLVYLRRSNMEFLFNKTGWAFAALVSEFQKTKNYLNKIPNSVFL

SEQ ID NO: 28205 - protein, 31 aa, Homo sapiens
  MAP TO AC021685.3; EXPRESSED IN LUNG, SIGNAL = 1.3; EXPRESSED IN PLACENTA, SIGNAL = 1.3; EXPRESSED IN HELA, SIGNAL = 0.97; EXPRESSED IN BRAIN, SIGNAL = 1.4; EXPRESSED IN FETAL LIVER, SIGNAL = 1.6; SWISSPROT HIT: Q10475, EVALUE 3.90e+00
MQVVFCLALIHHGYSNVEGSHVGNLDGSKRP

SEQ ID NO: 28206 - protein, 74 aa, Homo sapiens
  MAP TO AL137068.1; EXPRESSED IN BRAIN, SIGNAL = 0.4; EXPRESSED IN HELA, SIGNAL = 0.52; EXPRESSED IN FETAL LIVER, SIGNAL = 0.43; SWISSPROT HIT: P38541, EVALUE 1.20e+00
YAEIDKAPDESPYIGKSRYKRNMFATESYIIDSAQAVQIKKMEPDEQLRNDHMNLRGHTPLDTQLEDKEKKISA

SEQ ID NO: 28207 - protein, 52 aa, Homo sapiens
  MAP TO AL137068.1; EXPRESSED IN BRAIN, SIGNAL = 0.4; EXPRESSED IN HELA, SIGNAL = 0.52; EXPRESSED IN FETAL LIVER, SIGNAL = 0.43; SWISSPROT HIT: P15751, EVALUE 1.30e+00
MLKLIKPQMKALTLANPDTREICLPQRVILLTVLRQYRSRRWSQMNNLEMIT

SEQ ID NO: 28208 - protein, 66 aa, Homo sapiens
  MAP TO CHR22_134.0; EXPRESSED IN LUNG, SIGNAL = 0.98; EXPRESSED IN FETAL LIVER, SIGNAL = 0.97; EXPRESSED IN BONE MARROW, SIGNAL = 0.89; EXPRESSED IN BRAIN, SIGNAL = 1.1; EXPRESSED IN HELA, SIGNAL = 1.2
RQEDLVFSMLGPEGGEEETYYYCGPGQPEAADGHPAPQVRQLGGLPSQLQTLCDLPTAAASLCRPL

SEQ ID NO: 28209 - protein, 41 aa, Homo sapiens
  MAP TO CHR22_134.0; EXPRESSED IN LUNG, SIGNAL = 0.98; EXPRESSED IN FETAL LIVER, SIGNAL = 0.97; EXPRESSED IN BONE MARROW, SIGNAL = 0.89; EXPRESSED IN BRAIN, SIGNAL = 1.1; EXPRESSED IN HELA, SIGNAL = 1.2
DRKTWCFPCLGQREVRRRLTTTAGQGSQKQQTGTQPLRCAS

SEQ ID NO: 28210 - protein, 46 aa, Homo sapiens
  MAP TO CHR22_173.0; EXPRESSED IN BRAIN, SIGNAL = 0.7; EXPRESSED IN LUNG, SIGNAL = 0.89; EXPRESSED IN FETAL LIVER, SIGNAL = 0.78; EXPRESSED IN PLACENTA, SIGNAL = 0.78; SWISSPROT HIT: P22225, EVALUE 6.30e+00
KLAGCKLNVAEVTQSEIGQKQKLQTVLEAVHDLLRPRGWALRWSVD

SEQ ID NO: 28211 - protein, 56 aa, Homo sapiens
  MAP TO AL138499.1; EXPRESSED IN BRAIN, SIGNAL = 0.64; EXPRESSED IN FETAL LIVER, SIGNAL = 0.85; EXPRESSED IN BONE MARROW, SIGNAL = 0.75; EXPRESSED IN PLACENTA, SIGNAL = 1.1; EXPRESSED IN LUNG, SIGNAL = 1.3; SWISSPROT HIT: P23890, EVALUE 6.20e+00
FVDEPLIHATTYIPLMDNADSSPVVDKREVIDLLKPDQVEGIQKSGTKKLKTETDK

SEQ ID NO: 28212 - protein, 41 aa, Homo sapiens
  MAP TO AL136162.4; EXPRESSED IN LUNG, SIGNAL = 7.4; EXPRESSED IN ADULT LIVER, SIGNAL = 6.6; EXPRESSED IN HELA, SIGNAL = 3.6; EXPRESSED IN PLACENTA, SIGNAL = 7.4; EXPRESSED IN BONE MARROW, SIGNAL = 7.2; EXPRESSED IN BRAIN, SIGNAL = 6.7; EXPRESSED IN FETAL LIVER, SIGNAL = 6.7; EXPRESSED IN HEART, SIGNAL = 5.4; SWISSPROT HIT: P08921, EVALUE 6.40e+00
MLERKLYPLKHHPLNKNNRISKHLPLSSTFQKRFKGPPLPR

SEQ ID NO: 28213 - protein, 46 aa, Homo sapiens
  MAP TO AC018464.4; EXPRESSED IN HELA, SIGNAL = 0.65; EXPRESSED IN BRAIN, SIGNAL = 0.63; EXPRESSED IN PLACENTA, SIGNAL = 0.53; EXPRESSED IN LUNG, SIGNAL = 0.49; EXPRESSED IN FETAL LIVER, SIGNAL = 0.55; SWISSPROT HIT: P04937, EVALUE 2.80e+00
GDFDKIWREHCEDEETLCEYAVAMKNLADNHWAKTCEGEGRIEWCC

SEQ ID NO: 28214 - protein, 24 aa, Homo sapiens
  MAP TO AC018464.4; EXPRESSED IN HELA, SIGNAL = 0.65; EXPRESSED IN BRAIN, SIGNAL = 0.63; EXPRESSED IN PLACENTA, SIGNAL = 0.53; EXPRESSED IN LUNG, SIGNAL = 0.49; EXPRESSED IN FETAL LIVER, SIGNAL = 0.55
WEILIRSGENTVRMKKLFVNMPLQ

SEQ ID NO: 28215 - protein, 61 aa, Homo sapiens
  MAP TO CHR22_4.0; EXPRESSED IN BONE MARROW, SIGNAL = 0.87; EXPRESSED IN LUNG, SIGNAL = 0.99; EXPRESSED IN PLACENTA, SIGNAL = 1.2; EXPRESSED IN BRAIN, SIGNAL = 1.1; EXPRESSED IN HELA, SIGNAL = 0.56; EXPRESSED IN FETAL LIVER, SIGNAL = 1.5; SWISSPROT HIT: Q37704, EVALUE 3.60e+00
VKANSQGDWSREIRELPLLNAMPLHSWLILYSRSSHREAMSLKGHLQSVTAPMGITMKPAE

SEQ ID NO: 28216 - protein, 43 aa, Homo sapiens
  MAP TO CHR22_163.0; EXPRESSED IN HELA, SIGNAL = 0.5; EXPRESSED IN FETAL LIVER, SIGNAL = 1.1; EXPRESSED IN PLACENTA, SIGNAL = 1.2; EXPRESSED IN ADULT LIVER, SIGNAL = 1.3; EXPRESSED IN LUNG, SIGNAL = 1.1; EXPRESSED IN BONE MARROW, SIGNAL = 0.97; EXPRESSED IN BRAIN, SIGNAL = 1.1; SWISSPROT HIT: O95613, EVALUE 3.80e+00
TLEEGCAPSQGSEISWEEEELAVEKERQQKDSFTDVLARGLVA

SEQ ID NO: 28217 - protein, 43 aa, Homo sapiens
  MAP TO CHR22_163.0; EXPRESSED IN HELA, SIGNAL = 0.5; EXPRESSED IN FETAL LIVER, SIGNAL = 1.1; EXPRESSED IN PLACENTA, SIGNAL = 1.2; EXPRESSED IN ADULT LIVER, SIGNAL = 1.3; EXPRESSED IN LUNG, SIGNAL = 1.1; EXPRESSED IN BONE MARROW, SIGNAL = 0.97; EXPRESSED IN BRAIN, SIGNAL = 1.1
LWRRDVHLARAQRFPGRRRNWLWRKRDSRRILLLMCWQEGLWP

SEQ ID NO: 28218 - protein, 23 aa, Homo sapiens
  MAP TO AL132875.5; EXPRESSED IN HELA, SIGNAL = 2.3; EXPRESSED IN HEART, SIGNAL = 2.3; EXPRESSED IN FETAL LIVER, SIGNAL = 1.6; EXPRESSED IN PLACENTA, SIGNAL = 1.1; EXPRESSED IN BONE MARROW, SIGNAL = 1.9; EXPRESSED IN BRAIN, SIGNAL = 2.1
NPIHVAIMMVLTILTSTTTLMTT

SEQ ID NO: 28219 - protein, 19 aa, Homo sapiens
  MAP TO CHR22_165.0; EXPRESSED IN FETAL LIVER, SIGNAL = 0.59; EXPRESSED IN BONE MARROW, SIGNAL = 0.56; EXPRESSED IN BRAIN, SIGNAL = 0.59; EXPRESSED IN PLACENTA, SIGNAL = 0.58; EXPRESSED IN ADULT LIVER, SIGNAL = 0.6
AHEEQYPSPREGSQRRGQL

SEQ ID NO: 28220 - protein, 31 aa, Homo sapiens
  MAP TO AL133553.2; EXPRESSED IN BONE MARROW, SIGNAL = 3.6; EXPRESSED IN HEART, SIGNAL = 2.5; EXPRESSED IN BRAIN, SIGNAL = 3.2; EXPRESSED IN PLACENTA, SIGNAL = 2.6; EXPRESSED IN HELA, SIGNAL = 2.7
RNRKEHGRYHGSFSGQCWKWHISLLPLFNWL

SEQ ID NO: 28221 - protein, 40 aa, Homo sapiens
  MAP TO AC013614.4; EXPRESSED IN BONE MARROW, SIGNAL = 1.1; EXPRESSED IN PLACENTA, SIGNAL = 1.7; EXPRESSED IN BRAIN, SIGNAL = 1.5; EXPRESSED IN LUNG, SIGNAL = 1.5; EXPRESSED IN ADULT LIVER, SIGNAL = 1.5; EXPRESSED IN FETAL LIVER, SIGNAL = 1.3
QPWNSLFFSSWIWASIFFFLALNKASNFPTTKMLSPGYVH

SEQ ID NO: 28222 - protein, 55 aa, Homo sapiens
  MAP TO AC019325.3; EXPRESSED IN HELA, SIGNAL = 0.75; EXPRESSED IN FETAL LIVER, SIGNAL = 1.5; EXPRESSED IN BONE MARROW, SIGNAL = 1.3; EXPRESSED IN PLACENTA, SIGNAL = 1.6; EXPRESSED IN BRAIN, SIGNAL = 1.2; EXPRESSED IN LUNG, SIGNAL = 1.5; EXPRESSED IN ADULT LIVER, SIGNAL = 1.3; SWISSPROT HIT: P21851, EVALUE 4.00e-26
YESIIATLCENLDSLDEPDARAAMIWIVGEYAERIDNADELLESFLEGFHDESTQ

SEQ ID NO: 28223 - protein, 36 aa, Homo sapiens
  MAP TO CHR22_184_1.0; EXPRESSED IN HELA, SIGNAL = 0.64; EXPRESSED IN FETAL LIVER, SIGNAL = 0.97; EXPRESSED IN LUNG, SIGNAL = 0.98; EXPRESSED IN PLACENTA, SIGNAL =   1; EXPRESSED IN BONE MARROW, SIGNAL = 1.1; EXPRESSED IN BRAIN, SIGNAL = 0.95
GGHAEALISEWSVAVRWRDTTALSRTQGKTEPWLSE

SEQ ID NO: 28224 - protein, 80 aa, Homo sapiens
  MAP TO AL137799.2; EXPRESSED IN FETAL LIVER, SIGNAL = 3.5; EXPRESSED IN PLACENTA, SIGNAL = 3.9; EXPRESSED IN LUNG, SIGNAL = 4.3; EXPRESSED IN BONE MARROW, SIGNAL = 3.9; EXPRESSED IN HEART, SIGNAL = 2.9; EXPRESSED IN ADULT LIVER, SIGNAL = 4.3; EXPRESSED IN BRAIN, SIGNAL = 4.3; SWISSPROT HIT: Q9Z2C4, EVALUE 8.40e+00
AATEPKFPAVRLALQNFDMTYSVQFGDLWPSIRVSLLSEQKYGALVNNFAAWDHVSAKLEQLSAKDFVNEAISHWELQSE

SEQ ID NO: 28225 - protein, 18 aa, Homo sapiens
  MAP TO AL137799.2; EXPRESSED IN FETAL LIVER, SIGNAL = 3.5; EXPRESSED IN PLACENTA, SIGNAL = 3.9; EXPRESSED IN LUNG, SIGNAL = 4.3; EXPRESSED IN BONE MARROW, SIGNAL = 3.9; EXPRESSED IN HEART, SIGNAL = 2.9; EXPRESSED IN ADULT LIVER, SIGNAL = 4.3; EXPRESSED IN BRAIN, SIGNAL = 4.3
LPQSPNSLLFDWLCRILT

SEQ ID NO: 28226 - protein, 33 aa, Homo sapiens
  MAP TO AL133408.3; EXPRESSED IN HELA, SIGNAL = 1.1; EXPRESSED IN BRAIN, SIGNAL = 0.82; EXPRESSED IN FETAL LIVER, SIGNAL = 0.94; EXPRESSED IN PLACENTA, SIGNAL = 0.48
NVKEMRIYEYDDSDDFRFETNSHINHSPLSSFV

SEQ ID NO: 28227 - protein, 61 aa, Homo sapiens
  MAP TO AL138783.2; EXPRESSED IN BRAIN, SIGNAL = 0.62; EXPRESSED IN PLACENTA, SIGNAL = 0.81; EXPRESSED IN LUNG, SIGNAL = 0.61; EXPRESSED IN FETAL LIVER, SIGNAL = 0.71; EXPRESSED IN BONE MARROW, SIGNAL = 0.67; SWISSPROT HIT: Q15431, EVALUE 5.00e-28
STQKALEEDLQIATKTICQLTEEKETQMEESNKARAAHSFVVTEFETTVCSLEELLRTEQQ

SEQ ID NO: 28228 - protein, 48 aa, Homo sapiens
  MAP TO AL137797.1; EXPRESSED IN BONE MARROW, SIGNAL = 1.1; EXPRESSED IN BRAIN, SIGNAL = 1.7; EXPRESSED IN PLACENTA, SIGNAL =   2; EXPRESSED IN LUNG, SIGNAL = 2.2; EXPRESSED IN ADULT LIVER, SIGNAL = 2.1; SWISSPROT HIT: O00519, EVALUE 3.00e-09
SQSYVTLYNLLDFPAGVVPVTIVTLQDEEELAFYKGCYGDSSDKNFSE

SEQ ID NO: 28229 - protein, 39 aa, Homo sapiens
  MAP TO AC009472.2; EXPRESSED IN FETAL LIVER, SIGNAL = 0.65; EXPRESSED IN PLACENTA, SIGNAL = 1.1; EXPRESSED IN BRAIN, SIGNAL = 0.57; EXPRESSED IN ADULT LIVER, SIGNAL = 0.91; EXPRESSED IN LUNG, SIGNAL = 0.64
MLTPGLRWARRLKPTLQLRQRVNFPLALQDKLASFQGPQ

SEQ ID NO: 28230 - protein, 72 aa, Homo sapiens
  MAP TO AC016683.4; EXPRESSED IN BRAIN, SIGNAL = 4.9; EXPRESSED IN FETAL LIVER, SIGNAL =   4; EXPRESSED IN HEART, SIGNAL = 4.3; EXPRESSED IN PLACENTA, SIGNAL = 5.2; EXPRESSED IN BONE MARROW, SIGNAL = 4.3; EXPRESSED IN HELA, SIGNAL = 3.9; EXPRESSED IN ADULT LIVER, SIGNAL = 4.5; EXPRESSED IN LUNG, SIGNAL = 4.7; SWISSPROT HIT: Q9Z1L0, EVALUE 1.10e+00
MDSTEYVFPMRSNTCKLIRMIKMAQITNLEQDPVKLKKSVSTTTPFQSRRLPGRREVPAARVLWPRCNWSFQ

SEQ ID NO: 28231 - protein, 25 aa, Homo sapiens
  MAP TO AL136377.1; EXPRESSED IN BRAIN, SIGNAL = 0.84; EXPRESSED IN PLACENTA, SIGNAL = 0.88; EXPRESSED IN BONE MARROW, SIGNAL = 0.78; EXPRESSED IN ADULT LIVER, SIGNAL = 0.73; SWISSPROT HIT: P48566, EVALUE 4.20e-02
AYSVYDEDIGYCQGQSFLAAVLLLH

SEQ ID NO: 28232 - protein, 24 aa, Homo sapiens
  MAP TO AL136377.1; EXPRESSED IN BRAIN, SIGNAL = 0.84; EXPRESSED IN PLACENTA, SIGNAL = 0.88; EXPRESSED IN BONE MARROW, SIGNAL = 0.78; EXPRESSED IN ADULT LIVER, SIGNAL = 0.73
PTLCMMKTLGTVKGSLFLLLYYCC

SEQ ID NO: 28233 - protein, 29 aa, Homo sapiens
  MAP TO AC020699.2; EXPRESSED IN BRAIN, SIGNAL = 0.65; EXPRESSED IN PLACENTA, SIGNAL = 0.72; EXPRESSED IN LUNG, SIGNAL = 0.51; EXPRESSED IN ADULT LIVER, SIGNAL = 0.63
VMNWQFECINNVMANICGLISLTSTVNKE

SEQ ID NO: 28234 - protein, 89 aa, Homo sapiens
  MAP TO AL137068.1; EXPRESSED IN BRAIN, SIGNAL = 0.72; EXPRESSED IN HELA, SIGNAL = 0.52; EXPRESSED IN ADULT LIVER, SIGNAL = 0.48; EXPRESSED IN FETAL LIVER, SIGNAL = 0.62; EXPRESSED IN BONE MARROW, SIGNAL = 0.64; SWISSPROT HIT: Q88434, EVALUE 4.10e+00
MANQKDLERRQMEISDAMRTLKSEVKDEIRTSLKNLNQFLPELPADLEAILERNENLEGELESLKENLPFTMNEGPFEEKLNFSQVHIM

SEQ ID NO: 28235 - protein, 17 aa, Homo sapiens
  MAP TO AL137068.1; EXPRESSED IN BRAIN, SIGNAL = 0.72; EXPRESSED IN HELA, SIGNAL = 0.52; EXPRESSED IN ADULT LIVER, SIGNAL = 0.48; EXPRESSED IN FETAL LIVER, SIGNAL = 0.62; EXPRESSED IN BONE MARROW, SIGNAL = 0.64
WQTKKIWREDKWKSVMQ

SEQ ID NO: 28236 - protein, 54 aa, Homo sapiens
  MAP TO AC021252.3; EXPRESSED IN BONE MARROW, SIGNAL = 1.4; EXPRESSED IN BRAIN, SIGNAL = 1.6; EXPRESSED IN HEART, SIGNAL = 1.9; EXPRESSED IN PLACENTA, SIGNAL = 1.9; EXPRESSED IN ADULT LIVER, SIGNAL = 1.6; EXPRESSED IN FETAL LIVER, SIGNAL = 1.3; SWISSPROT HIT: Q9PR67, EVALUE 2.80e+00
VFEIVHSATSTMKVGHVFIISLLNFFNSLIHNLVSIWALLNANTKMILPWNTID

SEQ ID NO: 28237 - protein, 104 aa, Homo sapiens
  MAP TO AL137918.1; EXPRESSED IN FETAL LIVER, SIGNAL = 1.6; EXPRESSED IN PLACENTA, SIGNAL = 1.9; EXPRESSED IN ADULT LIVER, SIGNAL =   2; EXPRESSED IN BONE MARROW, SIGNAL = 1.9; EXPRESSED IN HEART, SIGNAL = 1.8; EXPRESSED IN LUNG, SIGNAL =   2; EXPRESSED IN HELA, SIGNAL = 1.1; EXPRESSED IN BRAIN, SIGNAL = 1.5; SWISSPROT HIT: P53037, EVALUE 9.10e+00
MVETAIGSSNSAGHFQCHQQFRRSPWGNQREQESKCCEQKAWSTEYKREVSWRPLELLGRHYMEVEVFKEEIKKKNLDHFSCFDQHNHRYYSLCSDFLCNQQKG

SEQ ID NO: 28238 - protein, 54 aa, Homo sapiens
  MAP TO AL137918.1; EXPRESSED IN FETAL LIVER, SIGNAL = 1.6; EXPRESSED IN PLACENTA, SIGNAL = 1.9; EXPRESSED IN ADULT LIVER, SIGNAL =   2; EXPRESSED IN BONE MARROW, SIGNAL = 1.9; EXPRESSED IN HEART, SIGNAL = 1.8; EXPRESSED IN LUNG, SIGNAL =   2; EXPRESSED IN HELA, SIGNAL = 1.1; EXPRESSED IN BRAIN, SIGNAL = 1.5; SWISSPROT HIT: O84418, EVALUE 3.60e+00
WWRQQLAPATVLVTFSVTSNLGGHHGGTRESKRANAVNKRLGPQSTRERSPGDL

SEQ ID NO: 28239 - protein, 24 aa, Homo sapiens
  MAP TO AC021609.3; EXPRESSED IN PLACENTA, SIGNAL = 1.2; EXPRESSED IN ADULT LIVER, SIGNAL = 0.87; EXPRESSED IN LUNG, SIGNAL = 0.94; EXPRESSED IN BONE MARROW, SIGNAL = 0.96; EXPRESSED IN BRAIN, SIGNAL = 1.3; EXPRESSED IN FETAL LIVER, SIGNAL = 1.3
NCPRNWWGQGSYSVILSPRIPQSS

SEQ ID NO: 28240 - protein, 18 aa, Homo sapiens
  MAP TO AC015855.4; EXPRESSED IN BONE MARROW, SIGNAL = 2.4; EXPRESSED IN BRAIN, SIGNAL = 2.9; EXPRESSED IN HELA, SIGNAL = 3.6; EXPRESSED IN ADULT LIVER, SIGNAL = 1.9; EXPRESSED IN FETAL LIVER, SIGNAL = 2.5; EXPRESSED IN LUNG, SIGNAL = 1.7
RPGSGACAVTTSSTAPSF

SEQ ID NO: 28241 - protein, 20 aa, Homo sapiens
  MAP TO AC018586.3; EXPRESSED IN BRAIN, SIGNAL = 0.4; EXPRESSED IN PLACENTA, SIGNAL = 0.36
YSTRQTTFRRKILAVRFIQL

SEQ ID NO: 28242 - protein, 20 aa, Homo sapiens
  MAP TO AC020698.2; EXPRESSED IN FETAL LIVER, SIGNAL = 3.9; EXPRESSED IN BONE MARROW, SIGNAL = 4.9; EXPRESSED IN BRAIN, SIGNAL = 4.2; EXPRESSED IN HEART, SIGNAL = 3.7; EXPRESSED IN HELA, SIGNAL = 3.4; EXPRESSED IN ADULT LIVER, SIGNAL = 5.1
WPSLVWVGCGSPSLVWVGCG

SEQ ID NO: 28243 - protein, 19 aa, Homo sapiens
  MAP TO CHR22_82.0; EXPRESSED IN BRAIN, SIGNAL = 0.28; EXPRESSED IN HELA, SIGNAL = 0.56; EXPRESSED IN ADULT LIVER, SIGNAL = 0.43
GPQPGRAGLAILPNWCYEV

SEQ ID NO: 28244 - protein, 45 aa, Homo sapiens
  MAP TO AL132656.3; EXPRESSED IN FETAL LIVER, SIGNAL = 1.1; EXPRESSED IN BONE MARROW, SIGNAL = 1.1; EXPRESSED IN BRAIN, SIGNAL = 0.92; EXPRESSED IN HELA, SIGNAL = 1.1; EXPRESSED IN PLACENTA, SIGNAL = 1.4; EXPRESSED IN ADULT LIVER, SIGNAL = 1.5
DQQRPRSLRRSPQKWCRSMWTSWRSCWGLPSGPRGSPRNNGKRAK

SEQ ID NO: 28245 - protein, 46 aa, Homo sapiens
  MAP TO AL136084.2; EXPRESSED IN PLACENTA, SIGNAL = 2.2; EXPRESSED IN HELA, SIGNAL =   1; EXPRESSED IN BRAIN, SIGNAL = 1.8; EXPRESSED IN ADULT LIVER, SIGNAL = 2.4; EXPRESSED IN HEART, SIGNAL = 1.6; EXPRESSED IN FETAL LIVER, SIGNAL = 1.8; EXPRESSED IN BONE MARROW, SIGNAL =   2; SWISSPROT HIT: O08912, EVALUE 1.40e-02
DGSLFHEQSKKCVQAARKESSDSFVPLLRDCTNSDHQKWFFKERML

SEQ ID NO: 28246 - protein, 46 aa, Homo sapiens
  MAP TO AL136084.2; EXPRESSED IN PLACENTA, SIGNAL = 2.2; EXPRESSED IN HELA, SIGNAL =   1; EXPRESSED IN BRAIN, SIGNAL = 1.8; EXPRESSED IN ADULT LIVER, SIGNAL = 2.4; EXPRESSED IN HEART, SIGNAL = 1.6; EXPRESSED IN FETAL LIVER, SIGNAL = 1.8; EXPRESSED IN BONE MARROW, SIGNAL =   2
MDLYFTNSPRNVSRLRGRSRVTVSFHSYETAPTRIIRNGSSKSACY

SEQ ID NO: 28247 - protein, 70 aa, Homo sapiens
  MAP TO AL035367.1; EXPRESSED IN FETAL LIVER, SIGNAL = 2.2; EXPRESSED IN PLACENTA, SIGNAL = 1.7; EXPRESSED IN BRAIN, SIGNAL = 1.3; EXPRESSED IN HEART, SIGNAL = 1.2; SWISSPROT HIT: P34896, EVALUE 2.00e-29
TSCYSRNLEYARLRKIADENGAYLMADMAHISGLVAAGVVPSPFEHCHVVTTTTHKTLRGCRAGMIFYRK

SEQ ID NO: 28248 - protein, 50 aa, Homo sapiens
  MAP TO AL035367.1; EXPRESSED IN FETAL LIVER, SIGNAL = 2.2; EXPRESSED IN PLACENTA, SIGNAL = 1.7; EXPRESSED IN BRAIN, SIGNAL = 1.3; EXPRESSED IN HEART, SIGNAL = 1.2; SWISSPROT HIT: P11276, EVALUE 3.70e+00
EPAATPETWNMPGYGRLQMRTGRISWRTWLTSAGWWRLAWCPPHLNTAMW

SEQ ID NO: 28249 - protein, 25 aa, Homo sapiens
  MAP TO AL136366.3; EXPRESSED IN HELA, SIGNAL = 0.67; EXPRESSED IN BRAIN, SIGNAL = 0.87; EXPRESSED IN FETAL LIVER, SIGNAL = 0.76; EXPRESSED IN BONE MARROW, SIGNAL = 0.97; EXPRESSED IN PLACENTA, SIGNAL = 1.2; EXPRESSED IN ADULT LIVER, SIGNAL = 1.2
ILSHRAGKTFVLPSFFYKSTGTQTE

SEQ ID NO: 28250 - protein, 19 aa, Homo sapiens
  MAP TO CHR22_85.0; EXPRESSED IN BRAIN, SIGNAL = 0.32; EXPRESSED IN ADULT LIVER, SIGNAL = 0.32
GALLRDHAPKGLQSLCQSP

SEQ ID NO: 28251 - protein, 21 aa, Homo sapiens
  MAP TO CHR22_183_2.0; EXPRESSED IN BONE MARROW, SIGNAL = 0.61; EXPRESSED IN HELA, SIGNAL = 0.77; EXPRESSED IN BRAIN, SIGNAL = 0.57; EXPRESSED IN PLACENTA, SIGNAL = 0.72; EXPRESSED IN FETAL LIVER, SIGNAL = 0.61
AQPCEVPGRGDLPRHAHSAAP

SEQ ID NO: 28252 - protein, 54 aa, Homo sapiens
  MAP TO CHR22_88.0; EXPRESSED IN BRAIN, SIGNAL = 0.3; EXPRESSED IN HELA, SIGNAL = 0.52; SWISSPROT HIT: P35626, EVALUE 7.00e-26
LLDCDQELYKNFPLVISERWQQEVTETVYEAVNADTDKIEARKRAKNKQLGHEE

SEQ ID NO: 28253 - protein, 23 aa, Homo sapiens
  MAP TO CHR22_88.0; EXPRESSED IN BRAIN, SIGNAL = 0.3; EXPRESSED IN HELA, SIGNAL = 0.52
YLIATKNSTRTSLWSSLNAGSKK

SEQ ID NO: 28254 - protein, 40 aa, Homo sapiens
  MAP TO AC021685.3; EXPRESSED IN FETAL LIVER, SIGNAL = 0.8; EXPRESSED IN BONE MARROW, SIGNAL = 0.72; EXPRESSED IN PLACENTA, SIGNAL = 0.94; EXPRESSED IN BRAIN, SIGNAL = 0.95; EXPRESSED IN ADULT LIVER, SIGNAL = 0.88
CSGGSFRRAVKFGGVKLCASNKLNIDRIEETPVTVVNYHQ

SEQ ID NO: 28255 - protein, 63 aa, Homo sapiens
  MAP TO CHR22_180.0; EXPRESSED IN BONE MARROW, SIGNAL = 0.81; EXPRESSED IN BRAIN, SIGNAL = 0.55; EXPRESSED IN LUNG, SIGNAL = 5.6; EXPRESSED IN ADULT LIVER, SIGNAL = 7.8; SWISSPROT HIT: P13942, EVALUE 2.20e-02
EAPGDQEPEAGEQNLGAPGEEGTPGQRLEPLLQDHQEPEGSELGNYCRQCLHCSADQQHPSCC

SEQ ID NO: 28256 - protein, 139 aa, Homo sapiens
  MAP TO CHR22_180.0; EXPRESSED IN BONE MARROW, SIGNAL = 0.81; EXPRESSED IN BRAIN, SIGNAL = 0.55; EXPRESSED IN LUNG, SIGNAL = 5.6; EXPRESSED IN ADULT LIVER, SIGNAL = 7.8; SWISSPROT HIT: P05783, EVALUE 2.00e-58
VRHLETKNRKLESKIWEHLEKKGPQVRDWSHYFKTIRNQRAQSLAITVDNACIVLQINNTHLAADDFRVKYETELAMCQSVESNIHGLCKVNDDTNVTRLQLETEIKALKEELLFMKKNHEEEVKGLQAQIASSGLTME

SEQ ID NO: 28257 - protein, 34 aa, Homo sapiens
  MAP TO AL138832.2; EXPRESSED IN LUNG, SIGNAL = 1.8; EXPRESSED IN HEART, SIGNAL = 1.5; EXPRESSED IN PLACENTA, SIGNAL = 1.7; EXPRESSED IN ADULT LIVER, SIGNAL = 1.9; EXPRESSED IN BRAIN, SIGNAL = 1.8; EXPRESSED IN FETAL LIVER, SIGNAL = 1.5; EXPRESSED IN BONE MARROW, SIGNAL = 1.4
MLLTVTEVEGLAEGTEDLDGELLPTPSAHPSVVM

SEQ ID NO: 28258 - protein, 19 aa, Homo sapiens
  MAP TO AL138832.2; EXPRESSED IN LUNG, SIGNAL = 1.8; EXPRESSED IN HEART, SIGNAL = 1.5; EXPRESSED IN PLACENTA, SIGNAL = 1.7; EXPRESSED IN ADULT LIVER, SIGNAL = 1.9; EXPRESSED IN BRAIN, SIGNAL = 1.8; EXPRESSED IN FETAL LIVER, SIGNAL = 1.5; EXPRESSED IN BONE MARROW, SIGNAL = 1.4
CFLRSWRRKLRATRSRSLL

SEQ ID NO: 28259 - protein, 49 aa, Homo sapiens
  MAP TO AL138839.1; EXPRESSED IN BONE MARROW, SIGNAL = 1.2; EXPRESSED IN BRAIN, SIGNAL =   1; EXPRESSED IN FETAL LIVER, SIGNAL =   1; EXPRESSED IN ADULT LIVER, SIGNAL = 1.2; SWISSPROT HIT: P40598, EVALUE 3.70e+00
QNFMPLMHCQSGFGDLEICGGHNDAPSRFSFEDDILPQFLGVYSADSLQ

SEQ ID NO: 28260 - protein, 83 aa, Homo sapiens
  MAP TO AC018709.5; EXPRESSED IN BRAIN, SIGNAL = 0.39; EXPRESSED IN PLACENTA, SIGNAL = 0.41; EXPRESSED IN ADULT LIVER, SIGNAL = 0.45
MGKHDIQKTAGNTVHCAVLAVTPMVMGLPGSCGSLPLPSSRREYWTARPQPRKRSKVKSGSMVSTECVSLWQHRKVKKLSQTT

SEQ ID NO: 28261 - protein, 78 aa, Homo sapiens
  MAP TO AC018709.5; EXPRESSED IN BRAIN, SIGNAL = 0.39; EXPRESSED IN PLACENTA, SIGNAL = 0.41; EXPRESSED IN ADULT LIVER, SIGNAL = 0.45
WENTISKKLQAIQSTVQYWLLPRWSWGCLEAAARCPCPAAGGSIGQHVPSPGKDQKSKVEVWFLLNVYHFGSTVKSKN

SEQ ID NO: 28262 - protein, 67 aa, Homo sapiens
  MAP TO CHR22_24.0; EXPRESSED IN BRAIN, SIGNAL = 5.1; EXPRESSED IN FETAL LIVER, SIGNAL =   5; EXPRESSED IN LUNG, SIGNAL = 4.8; EXPRESSED IN HEART, SIGNAL = 4.6; EXPRESSED IN BONE MARROW, SIGNAL = 5.5; EXPRESSED IN PLACENTA, SIGNAL = 4.6; EXPRESSED IN HELA, SIGNAL = 4.4; SWISSPROT HIT: P53675, EVALUE 2.00e-32
GILRTRETVQKFQSIPAQSGQASPLLQYFGILLDQGQLNKLESLELCHLVLQQGRKQLLEKWLKEDK

SEQ ID NO: 28263 - protein, 38 aa, Homo sapiens
  MAP TO CHR22_24.0; EXPRESSED IN BRAIN, SIGNAL = 5.1; EXPRESSED IN FETAL LIVER, SIGNAL =   5; EXPRESSED IN LUNG, SIGNAL = 4.8; EXPRESSED IN HEART, SIGNAL = 4.6; EXPRESSED IN BONE MARROW, SIGNAL = 5.5; EXPRESSED IN PLACENTA, SIGNAL = 4.6; EXPRESSED IN HELA, SIGNAL = 4.4
NPAYQRDGPEIPEYTRSVWPGFSIAAVLRNPARPGSAQ

SEQ ID NO: 28264 - protein, 74 aa, Homo sapiens
  MAP TO AC016692.4; EXPRESSED IN BRAIN, SIGNAL = 1.5; EXPRESSED IN PLACENTA, SIGNAL =   2; EXPRESSED IN ADULT LIVER, SIGNAL = 1.9; EXPRESSED IN BONE MARROW, SIGNAL = 1.8; SWISSPROT HIT: Q09237, EVALUE 5.30e-01
PTFVSFLKEVESPYEVHDYIRAYLGDTSEAKEFAKQFLERRAKQKANQQRHEQQLPQQQQQQPPQQPPQQPQQQ

SEQ ID NO: 28265 - protein, 17 aa, Homo sapiens
  MAP TO CHR22_217.0; EXPRESSED IN BONE MARROW, SIGNAL = 1.9; EXPRESSED IN HELA, SIGNAL = 4.8; EXPRESSED IN BRAIN, SIGNAL = 1.9; EXPRESSED IN LUNG, SIGNAL =   1; EXPRESSED IN FETAL LIVER, SIGNAL = 1.9; EXPRESSED IN HEART, SIGNAL = 1.3; EXPRESSED IN PLACENTA, SIGNAL = 1.1
RVRDRLSFCLQVKRCRS

SEQ ID NO: 28266 - protein, 67 aa, Homo sapiens
  MAP TO CHR22_8.0; EXPRESSED IN LUNG, SIGNAL = 0.46; EXPRESSED IN ADULT LIVER, SIGNAL = 0.49; EXPRESSED IN BRAIN, SIGNAL = 0.58; SWISSPROT HIT: P81236, EVALUE 9.20e-01
IQQVLRKVQALEAIAEEKTRAGPALVSFTSRTISTTPLCLDASSVLVSFANSCRCLSAISNTLYLES

SEQ ID NO: 28267 - protein, 25 aa, Homo sapiens
  MAP TO CHR22_52.0; EXPRESSED IN FETAL LIVER, SIGNAL = 4.9; EXPRESSED IN BONE MARROW, SIGNAL = 5.2; EXPRESSED IN PLACENTA, SIGNAL = 4.4; EXPRESSED IN LUNG, SIGNAL = 4.5; EXPRESSED IN ADULT LIVER, SIGNAL = 4.9; EXPRESSED IN BRAIN, SIGNAL = 4.5; EXPRESSED IN HELA, SIGNAL = 3.5
SSLMLNGGRQVLQLPGILAQAHLGA

SEQ ID NO: 28268 - protein, 27 aa, Homo sapiens
  MAP TO CHR22_52.0; EXPRESSED IN FETAL LIVER, SIGNAL = 4.9; EXPRESSED IN BONE MARROW, SIGNAL = 5.2; EXPRESSED IN PLACENTA, SIGNAL = 4.4; EXPRESSED IN LUNG, SIGNAL = 4.5; EXPRESSED IN ADULT LIVER, SIGNAL = 4.9; EXPRESSED IN BRAIN, SIGNAL = 4.5; EXPRESSED IN HELA, SIGNAL = 3.5
SLLGLLGGGPLLPAEPGQVWHRGEAQV

SEQ ID NO: 28269 - protein, 87 aa, Homo sapiens
  MAP TO CHR22_11.0; EXPRESSED IN FETAL LIVER, SIGNAL = 0.92; EXPRESSED IN BONE MARROW, SIGNAL = 0.81; EXPRESSED IN LUNG, SIGNAL = 0.86; EXPRESSED IN BRAIN, SIGNAL = 0.81; SWISSPROT HIT: P33666, EVALUE 2.50e+00
TFCPPRPKPVARKGQVDLKKSRLRMSLQEKLLTYYRNRAAIPAGEQARAKQAAVDICAELRSFLRAKLPDMPLRDMYLSGSLYDDLQ

SEQ ID NO: 28270 - protein, 69 aa, Homo sapiens
  MAP TO CHR22_11.0; EXPRESSED IN FETAL LIVER, SIGNAL = 0.92; EXPRESSED IN BONE MARROW, SIGNAL = 0.81; EXPRESSED IN LUNG, SIGNAL = 0.86; EXPRESSED IN BRAIN, SIGNAL = 0.81; SWISSPROT HIT: P54183, EVALUE 1.10e+00
YILPAPAQASGQEGPGRLEEVTTPHVPAGETSYLLPEPGSHPCWRAGSGQASCCGHMCRAPELPAGQVA

SEQ ID NO: 28271 - protein, 65 aa, Homo sapiens
  MAP TO CHR22_12.0; EXPRESSED IN BONE MARROW, SIGNAL = 1.7; EXPRESSED IN BRAIN, SIGNAL = 1.8; EXPRESSED IN LUNG, SIGNAL = 1.8; EXPRESSED IN FETAL LIVER, SIGNAL = 1.9; EXPRESSED IN PLACENTA, SIGNAL = 2.1; EXPRESSED IN ADULT LIVER, SIGNAL = 1.8
PPLGRDFGHYPCPSKDRRIHGIGFCAPASLRGADSRRCFSWQSSLCAHLDCTSSMHLSCTCKYPP

SEQ ID NO: 28272 - protein, 69 aa, Homo sapiens
  MAP TO CHR22_54.0; EXPRESSED IN LUNG, SIGNAL = 0.97; EXPRESSED IN BONE MARROW, SIGNAL = 0.96; EXPRESSED IN PLACENTA, SIGNAL =   1; EXPRESSED IN BRAIN, SIGNAL = 0.88; EXPRESSED IN HELA, SIGNAL = 1.2; EXPRESSED IN FETAL LIVER, SIGNAL =   1
VTAYPWTNSTSKTFNDHLLKADACTKINQTQTQTQTQSSMPGAIGTCTKTVRLLEGISSNPQIDDLWKN

SEQ ID NO: 28273 - protein, 43 aa, Homo sapiens
  MAP TO CHR22_171.0; EXPRESSED IN PLACENTA, SIGNAL = 2.2; EXPRESSED IN LUNG, SIGNAL = 2.1; EXPRESSED IN HELA, SIGNAL = 2.3; EXPRESSED IN BRAIN, SIGNAL =   2; EXPRESSED IN FETAL LIVER, SIGNAL = 2.1; EXPRESSED IN BONE MARROW, SIGNAL = 2.2; EXPRESSED IN HEART, SIGNAL = 1.9
PSPEGPMPLGGGEDEDAEEAVELPEASAPKAALEPKESRSPQQ

SEQ ID NO: 28274 - protein, 24 aa, Homo sapiens
  MAP TO CHR22_171.0; EXPRESSED IN PLACENTA, SIGNAL = 2.2; EXPRESSED IN LUNG, SIGNAL = 2.1; EXPRESSED IN HELA, SIGNAL = 2.3; EXPRESSED IN BRAIN, SIGNAL =   2; EXPRESSED IN FETAL LIVER, SIGNAL = 2.1; EXPRESSED IN BONE MARROW, SIGNAL = 2.2; EXPRESSED IN HEART, SIGNAL = 1.9
PLSRRPDAPGWGRGRGCRGGSRAS

SEQ ID NO: 28275 - protein, 21 aa, Homo sapiens
  MAP TO CHR22_171.0; EXPRESSED IN PLACENTA, SIGNAL = 2.2; EXPRESSED IN LUNG, SIGNAL = 2.1; EXPRESSED IN HELA, SIGNAL = 2.3; EXPRESSED IN BRAIN, SIGNAL =   2; EXPRESSED IN FETAL LIVER, SIGNAL = 2.1; EXPRESSED IN BONE MARROW, SIGNAL = 2.2; EXPRESSED IN HEART, SIGNAL = 1.9
APLQKARCPWVGARTRMQRRQ

SEQ ID NO: 28276 - protein, 42 aa, Homo sapiens
  MAP TO CHR22_113.0; EXPRESSED IN HEART, SIGNAL = 1.7; EXPRESSED IN HELA, SIGNAL = 1.5; EXPRESSED IN ADULT LIVER, SIGNAL =   1; EXPRESSED IN LUNG, SIGNAL = 0.97; EXPRESSED IN PLACENTA, SIGNAL = 1.2; EXPRESSED IN BONE MARROW, SIGNAL =   1; EXPRESSED IN BRAIN, SIGNAL = 0.98; EXPRESSED IN FETAL LIVER, SIGNAL = 1.1
SFRSLLQCHLCHKDFLTTLLQTEALPGRPSLLPVSSLFFALI

SEQ ID NO: 28277 - protein, 24 aa, Homo sapiens
  MAP TO AL138752.2; EXPRESSED IN LUNG, SIGNAL = 0.62; EXPRESSED IN BONE MARROW, SIGNAL = 0.65; EXPRESSED IN HELA, SIGNAL = 0.6; EXPRESSED IN BRAIN, SIGNAL = 0.73
TWIMNTQMTRTSCLKPKANLMIIP

SEQ ID NO: 28278 - protein, 45 aa, Homo sapiens
  MAP TO CHR22_182.0; EXPRESSED IN BONE MARROW, SIGNAL = 0.69; EXPRESSED IN BRAIN, SIGNAL = 0.47; EXPRESSED IN FETAL LIVER, SIGNAL = 0.5; EXPRESSED IN PLACENTA, SIGNAL = 0.55; EXPRESSED IN LUNG, SIGNAL = 0.62; EXPRESSED IN ADULT LIVER, SIGNAL = 0.55; SWISSPROT HIT: P38806, EVALUE 6.40e+00
TIALLAEDGNLVSLEEDLKEGASRAQTMGNSLLKERAIYVLVRII

SEQ ID NO: 28279 - protein, 59 aa, Homo sapiens
  MAP TO CHR22_184_2.0; EXPRESSED IN BRAIN, SIGNAL = 1.1; EXPRESSED IN HELA, SIGNAL = 0.61; EXPRESSED IN FETAL LIVER, SIGNAL = 1.1; EXPRESSED IN PLACENTA, SIGNAL = 1.2; EXPRESSED IN LUNG, SIGNAL = 0.95; EXPRESSED IN ADULT LIVER, SIGNAL = 0.98; EXPRESSED IN BONE MARROW, SIGNAL = 1.1; SWISSPROT HIT: P13463, EVALUE 6.10e+00
QEKPQDSSTAKAHFKPFLTSSTNFPLPKANHKAKPLSNGVREYATFREDDSAQGVLVGM

SEQ ID NO: 28280 - protein, 29 aa, Homo sapiens
  MAP TO CHR22_184_2.0; EXPRESSED IN BRAIN, SIGNAL = 1.1; EXPRESSED IN HELA, SIGNAL = 0.61; EXPRESSED IN FETAL LIVER, SIGNAL = 1.1; EXPRESSED IN PLACENTA, SIGNAL = 1.2; EXPRESSED IN LUNG, SIGNAL = 0.95; EXPRESSED IN ADULT LIVER, SIGNAL = 0.98; EXPRESSED IN BONE MARROW, SIGNAL = 1.1
GQDTLLRAREAPRQLYRQSTFQAFSYIIY

SEQ ID NO: 28281 - protein, 22 aa, Homo sapiens
  MAP TO CHR22_199.0; EXPRESSED IN HELA, SIGNAL = 1.1; EXPRESSED IN BRAIN, SIGNAL = 1.6
WARGLSGFRSEAADLRGECYSS

SEQ ID NO: 28282 - protein, 50 aa, Homo sapiens
  MAP TO CHR22_48.0; EXPRESSED IN PLACENTA, SIGNAL = 0.92; EXPRESSED IN BONE MARROW, SIGNAL = 0.96; EXPRESSED IN LUNG, SIGNAL = 1.1; EXPRESSED IN ADULT LIVER, SIGNAL = 1.1; EXPRESSED IN HELA, SIGNAL = 0.56; EXPRESSED IN BRAIN, SIGNAL = 1.2; EXPRESSED IN FETAL LIVER, SIGNAL = 0.9
SSSPSPSSSLPSSPSLRHHQHHHHHHHHSVITIIITITIISSPSSLPSSP

SEQ ID NO: 28283 - protein, 48 aa, Homo sapiens
  MAP TO AL135783.6; EXPRESSED IN FETAL LIVER, SIGNAL = 0.7; EXPRESSED IN PLACENTA, SIGNAL =   1; EXPRESSED IN LUNG, SIGNAL = 1.1; EXPRESSED IN BRAIN, SIGNAL = 0.7; SWISSPROT HIT: P29965, EVALUE 1.00e-21
LVTLENGKQLTVKRQGLYYIYAQVTFCSNREASSQAPFIASLCLKSPG

SEQ ID NO: 28284 - protein, 55 aa, Homo sapiens
  MAP TO AL133499.1; EXPRESSED IN BONE MARROW, SIGNAL = 0.44; EXPRESSED IN BRAIN, SIGNAL = 0.46; EXPRESSED IN FETAL LIVER, SIGNAL = 0.42; EXPRESSED IN LUNG, SIGNAL = 0.77; SWISSPROT HIT: P78563, EVALUE 1.00e-25
TDVKDAKVISVSTGTKCINGEYMSDRGLALNDCHAEIISRRSLLRFLYTQLELYL

SEQ ID NO: 28285 - protein, 43 aa, Homo sapiens
  MAP TO AL136311.2; EXPRESSED IN FETAL LIVER, SIGNAL = 0.78; EXPRESSED IN LUNG, SIGNAL = 0.67; EXPRESSED IN BONE MARROW, SIGNAL = 0.74; EXPRESSED IN BRAIN, SIGNAL = 0.4; EXPRESSED IN PLACENTA, SIGNAL = 0.63
GNTNWKPPLNCKIYNYLNRIGCFFLHPRCSKRKDAADFAICMH

SEQ ID NO: 28286 - protein, 17 aa, Homo sapiens
  MAP TO AL136311.2; EXPRESSED IN FETAL LIVER, SIGNAL = 0.78; EXPRESSED IN LUNG, SIGNAL = 0.67; EXPRESSED IN BONE MARROW, SIGNAL = 0.74; EXPRESSED IN BRAIN, SIGNAL = 0.4; EXPRESSED IN PLACENTA, SIGNAL = 0.63
EETPIGSLRSTVRFITT

SEQ ID NO: 28287 - protein, 17 aa, Homo sapiens
  MAP TO CHR22_193.0; EXPRESSED IN BRAIN, SIGNAL = 0.7; EXPRESSED IN LUNG, SIGNAL = 0.75; EXPRESSED IN ADULT LIVER, SIGNAL = 0.61; EXPRESSED IN HELA, SIGNAL = 0.63; EXPRESSED IN FETAL LIVER, SIGNAL = 0.67; EXPRESSED IN BONE MARROW, SIGNAL = 0.77
GQEGTLPSGGHLRPKAP

SEQ ID NO: 28288 - protein, 39 aa, Homo sapiens
  MAP TO CHR22_193.0; EXPRESSED IN BRAIN, SIGNAL = 0.7; EXPRESSED IN LUNG, SIGNAL = 0.75; EXPRESSED IN ADULT LIVER, SIGNAL = 0.61; EXPRESSED IN HELA, SIGNAL = 0.63; EXPRESSED IN FETAL LIVER, SIGNAL = 0.67; EXPRESSED IN BONE MARROW, SIGNAL = 0.77
RAGRYFALRRAPSTQSTLTKRLCTVATLRLRPRSWSSTK

SEQ ID NO: 28289 - protein, 28 aa, Homo sapiens
  MAP TO AL133492.1; EXPRESSED IN BRAIN, SIGNAL = 0.9; EXPRESSED IN HEART, SIGNAL = 1.1; EXPRESSED IN PLACENTA, SIGNAL = 1.3; EXPRESSED IN FETAL LIVER, SIGNAL = 0.85; EXPRESSED IN LUNG, SIGNAL = 1.2; EXPRESSED IN ADULT LIVER, SIGNAL = 1.2; EXPRESSED IN BONE MARROW, SIGNAL = 1.1
SSSKDTITVTSAMSVSEDRRRLFRIWHC

SEQ ID NO: 28290 - protein, 64 aa, Homo sapiens
  MAP TO AL138478.1; EXPRESSED IN BRAIN, SIGNAL = 1.7; EXPRESSED IN PLACENTA, SIGNAL = 2.1; EXPRESSED IN LUNG, SIGNAL = 2.1; EXPRESSED IN ADULT LIVER, SIGNAL = 2.3; EXPRESSED IN FETAL LIVER, SIGNAL = 1.7; EXPRESSED IN BONE MARROW, SIGNAL = 1.8
NHSDSLHCHYPHSSHSHSHLSRTMHWPPNIPPCFLPPPSTHHSTLSSGAHSPNSRQQRGLPEHK

SEQ ID NO: 28291 - protein, 125 aa, Homo sapiens
  MAP TO AL035367.1; EXPRESSED IN FETAL LIVER, SIGNAL =  16; EXPRESSED IN ADULT LIVER, SIGNAL =  22; EXPRESSED IN BONE MARROW, SIGNAL =  20; EXPRESSED IN HEART, SIGNAL =  16; EXPRESSED IN HELA, SIGNAL = 8.2; EXPRESSED IN BRAIN, SIGNAL =  14; EXPRESSED IN PLACENTA, SIGNAL =  23; EXPRESSED IN LUNG, SIGNAL =  21; SWISSPROT HIT: Q13472, EVALUE 5.00e-62
LKLKFKRGSLPPTMPLEFVCCIGGCDDTLREILDLRFSGGPPRASQPSGRLQANQSLNRMDNSQHPQPADSRQTGSSKALAQTLPPPTAAGESNSVTCNCGQEAVLLTVRKEGPNRGRQFFKCNG

SEQ ID NO: 28292 - protein, 40 aa, Homo sapiens
  MAP TO AC025758.1; EXPRESSED IN BONE MARROW, SIGNAL = 0.5; EXPRESSED IN PLACENTA, SIGNAL = 0.63; EXPRESSED IN BRAIN, SIGNAL = 0.48; EXPRESSED IN FETAL LIVER, SIGNAL = 0.57
MQKTINPTQEKEKRHIQDGVEGKILGDNCETGVGGKQLKQ

SEQ ID NO: 28293 - protein, 33 aa, Homo sapiens
  MAP TO AL136099.2; EXPRESSED IN HEART, SIGNAL = 2.1; EXPRESSED IN PLACENTA, SIGNAL = 2.6; EXPRESSED IN FETAL LIVER, SIGNAL = 1.8; EXPRESSED IN LUNG, SIGNAL = 2.7; EXPRESSED IN ADULT LIVER, SIGNAL = 2.6; EXPRESSED IN BRAIN, SIGNAL = 2.2
MIDDEDDGEEREDEDNDGDEDHEEESDEDDEDD

SEQ ID NO: 28294 - protein, 90 aa, Homo sapiens
  MAP TO CHR22_75.0; EXPRESSED IN FETAL LIVER, SIGNAL = 0.5; EXPRESSED IN PLACENTA, SIGNAL = 0.53; EXPRESSED IN ADULT LIVER, SIGNAL = 0.51; EXPRESSED IN BONE MARROW, SIGNAL = 0.67; EXPRESSED IN BRAIN, SIGNAL = 0.4; EXPRESSED IN HELA, SIGNAL = 0.77; SWISSPROT HIT: Q62799, EVALUE 1.40e-02
CEDTASGPSPDTRCWCLDPCEDTARGPSPDTRCWRLDPCEGTARGPSPDTRFWCLDPCEGAARGPSPDTRCWRLDPCEGAARRPSPDTRC

SEQ ID NO: 28295 - protein, 68 aa, Homo sapiens
  MAP TO AL139253.1; EXPRESSED IN PLACENTA, SIGNAL = 2.9; EXPRESSED IN LUNG, SIGNAL =   3; EXPRESSED IN ADULT LIVER, SIGNAL = 2.8; EXPRESSED IN FETAL LIVER, SIGNAL = 2.4; EXPRESSED IN BONE MARROW, SIGNAL = 2.7; EXPRESSED IN HELA, SIGNAL = 2.2; EXPRESSED IN BRAIN, SIGNAL = 2.8; EXPRESSED IN HEART, SIGNAL = 2.5; SWISSPROT HIT: P21436, EVALUE 7.80e-02
SPVCNFHEDYNSTKEGGANVGPICPHTSSPWNSTGYRCSGNTVEWMKPSPLGNRSVQQPPLPHYYEDG

SEQ ID NO: 28296 - protein, 88 aa, Homo sapiens
  MAP TO CHR21_50.0; EXPRESSED IN BRAIN, SIGNAL = 0.4
VWQLLQKLQWWPWLWVLWLRRPGLWLWRLWLWVLWLRRPGLWLWRPGLWLWRPGLWLWLLLWLWLQRPGLWLWLWLWLCLPLLLWLWL

SEQ ID NO: 28297 - protein, 102 aa, Homo sapiens
  MAP TO CHR21_50.0; EXPRESSED IN BRAIN, SIGNAL = 0.4
CGSYYRNYNGGHGYGCCGYGGLGCGYGGCGYGCCGYGGLGFGYGGLDCGYGGLGCGYGSFCGCGYRGLDCGYGCGYGYVSHSFCGCGYRCGSGYGSSFGYYY

SEQ ID NO: 28298 - protein, 63 aa, Homo sapiens
  MAP TO AL137008.1; EXPRESSED IN PLACENTA, SIGNAL = 1.1; EXPRESSED IN BONE MARROW, SIGNAL = 0.81; EXPRESSED IN BRAIN, SIGNAL = 1.3; SWISSPROT HIT: O94833, EVALUE 2.00e-16
VLAWAKQHQQRLASALAGLIAKQELLEALLAWLQWAETTLTDKDKEVIPQEIEEVKALIAEHQ

SEQ ID NO: 28299 - protein, 37 aa, Homo sapiens
  MAP TO CHR22_162.0; EXPRESSED IN BONE MARROW, SIGNAL = 0.97; EXPRESSED IN BRAIN, SIGNAL = 0.94; EXPRESSED IN PLACENTA, SIGNAL = 1.3; EXPRESSED IN FETAL LIVER, SIGNAL = 0.96; EXPRESSED IN LUNG, SIGNAL =   1
MAPLLASCVALDKLLNLSEPWFPHVSNSNDSGAYPTG

SEQ ID NO: 28300 - protein, 85 aa, Homo sapiens
  MAP TO CHR22_180.0; EXPRESSED IN HELA, SIGNAL = 0.59; EXPRESSED IN LUNG, SIGNAL = 0.78; EXPRESSED IN FETAL LIVER, SIGNAL = 0.72; EXPRESSED IN BONE MARROW, SIGNAL = 0.74; EXPRESSED IN BRAIN, SIGNAL = 0.65; SWISSPROT HIT: P77748, EVALUE 6.50e-01
IHTRTHHGQGEDQKGFSELQLLLIPVDPRDPLLPVEGVQVLGALNKELNKTHKQSKERIKEQKQRFIENESTLPRVGAGKQLKGQ

SEQ ID NO: 28301 - protein, 23 aa, Homo sapiens
  MAP TO CHR22_135.0; EXPRESSED IN BRAIN, SIGNAL = 0.6; EXPRESSED IN LUNG, SIGNAL = 0.55; EXPRESSED IN ADULT LIVER, SIGNAL = 0.49; EXPRESSED IN BONE MARROW, SIGNAL = 0.59
DETLRANFNVLIPSLEINFWTES

SEQ ID NO: 28302 - protein, 55 aa, Homo sapiens
  MAP TO AC021722.4; EXPRESSED IN ADULT LIVER, SIGNAL = 0.38; EXPRESSED IN BRAIN, SIGNAL = 0.3
VRKFIPTITIKLQQEVILDARIRSPHTIRESVVTIFMKKSRCIIKYSRRRIRLPK

SEQ ID NO: 28303 - protein, 30 aa, Homo sapiens
  MAP TO AL137003.1; EXPRESSED IN BRAIN, SIGNAL = 1.9; EXPRESSED IN HELA, SIGNAL = 1.9; EXPRESSED IN FETAL LIVER, SIGNAL = 1.9; EXPRESSED IN BONE MARROW, SIGNAL = 1.8; EXPRESSED IN LUNG, SIGNAL = 2.5; EXPRESSED IN ADULT LIVER, SIGNAL = 2.6
SRATCGKRHCQVSGGCLVLPKSYLQKTSLT

SEQ ID NO: 28304 - protein, 46 aa, Homo sapiens
  MAP TO AL133547.3; EXPRESSED IN HELA, SIGNAL = 0.86; EXPRESSED IN BRAIN, SIGNAL = 0.99; EXPRESSED IN PLACENTA, SIGNAL = 1.2; EXPRESSED IN ADULT LIVER, SIGNAL = 0.83; EXPRESSED IN FETAL LIVER, SIGNAL = 1.1; EXPRESSED IN BONE MARROW, SIGNAL =   1
GEAAGKTEEQPHLGGSWCLSHLAARDTGWRKQGILREGDYSQTPAG

SEQ ID NO: 28305 - protein, 38 aa, Homo sapiens
  MAP TO AL133547.3; EXPRESSED IN HELA, SIGNAL = 0.86; EXPRESSED IN BRAIN, SIGNAL = 0.99; EXPRESSED IN PLACENTA, SIGNAL = 1.2; EXPRESSED IN ADULT LIVER, SIGNAL = 0.83; EXPRESSED IN FETAL LIVER, SIGNAL = 1.1; EXPRESSED IN BONE MARROW, SIGNAL =   1
RRSCRKNRRTASPWRLLVPFPPGSQRYRVEKTGNPQRR

SEQ ID NO: 28306 - protein, 33 aa, Homo sapiens
  MAP TO AL133396.1; EXPRESSED IN BONE MARROW, SIGNAL = 0.85; EXPRESSED IN PLACENTA, SIGNAL = 1.2; EXPRESSED IN ADULT LIVER, SIGNAL = 1.2; EXPRESSED IN HELA, SIGNAL = 0.95; EXPRESSED IN BRAIN, SIGNAL =   1; EXPRESSED IN FETAL LIVER, SIGNAL = 0.94
LSIEINNCFGTITRQGTVLNDVAQKKTICAIQE

SEQ ID NO: 28307 - protein, 68 aa, Homo sapiens
  MAP TO AL139144.1; EXPRESSED IN FETAL LIVER, SIGNAL = 0.97; EXPRESSED IN PLACENTA, SIGNAL = 1.1; EXPRESSED IN ADULT LIVER, SIGNAL = 0.87; EXPRESSED IN HELA, SIGNAL = 0.75; EXPRESSED IN BRAIN, SIGNAL =   1; SWISSPROT HIT: Q15113, EVALUE 2.00e-08
DDACGGTLRGQSGIISSPHFPSEYHNNADCTWTILAELGDTIALVFIDFQLEDGYDFLEVTGTEGSSL

SEQ ID NO: 28308 - protein, 69 aa, Homo sapiens
  MAP TO AL139144.1; EXPRESSED IN FETAL LIVER, SIGNAL = 0.97; EXPRESSED IN PLACENTA, SIGNAL = 1.1; EXPRESSED IN ADULT LIVER, SIGNAL = 0.87; EXPRESSED IN HELA, SIGNAL = 0.75; EXPRESSED IN BRAIN, SIGNAL =   1; SWISSPROT HIT: Q62599, EVALUE 1.30e+00
LMMPVVGPCGARVASSPAPTSPRSTITMPTAHGPSWLSWGTPSPWCLLTSSWRMVTTFWKSLGQKAPPS

SEQ ID NO: 28309 - protein, 30 aa, Homo sapiens
  MAP TO AL133285.3; EXPRESSED IN BRAIN, SIGNAL = 0.36
EHSDKKNPENAYEILYKMKITKAYSHHTIQ

SEQ ID NO: 28310 - protein, 18 aa, Homo sapiens
  MAP TO AL133285.3; EXPRESSED IN BRAIN, SIGNAL = 0.36
VNIQIRKIQRTPMRYYIK

SEQ ID NO: 28311 - protein, 57 aa, Homo sapiens
  MAP TO CHR21_16.0; EXPRESSED IN BRAIN, SIGNAL = 1.4; EXPRESSED IN HELA, SIGNAL = 3.3; EXPRESSED IN FETAL LIVER, SIGNAL = 1.2; EXPRESSED IN BONE MARROW, SIGNAL = 1.4; EXPRESSED IN PLACENTA, SIGNAL = 0.76; EXPRESSED IN LUNG, SIGNAL = 0.81; EXPRESSED IN ADULT LIVER, SIGNAL = 0.8; SWISSPROT HIT: O31385, EVALUE 4.70e+00
GEDLALVLWHRLCLHRNCALPERPLHRHRGLGYRLPVPVLPEGAAQGTLQPQLEHAP

SEQ ID NO: 28312 - protein, 39 aa, Homo sapiens
  MAP TO CHR21_55.0; EXPRESSED IN BRAIN, SIGNAL = 0.33; SWISSPROT HIT: Q01988, EVALUE 8.50e+00
TGKEAQDPPAVIHPLGLEKTLPWACPTLKQNGDSIGQEE

SEQ ID NO: 28313 - protein, 39 aa, Homo sapiens
  MAP TO CHR21_55.0; EXPRESSED IN BRAIN, SIGNAL = 0.33
DWQGGPGSPCCDSSPGAREDPPLGLPNTETEWRFYWPGR

SEQ ID NO: 28314 - protein, 44 aa, Homo sapiens
  MAP TO AL138726.2; EXPRESSED IN BONE MARROW, SIGNAL = 0.55; EXPRESSED IN BRAIN, SIGNAL = 0.6; EXPRESSED IN PLACENTA, SIGNAL = 0.7; EXPRESSED IN FETAL LIVER, SIGNAL = 0.57; EXPRESSED IN LUNG, SIGNAL = 0.69; EXPRESSED IN ADULT LIVER, SIGNAL = 0.8
SFFVEVLGKPCGSVLFTMTTIVRFRHARCAVIITLQQCTRKDNP

SEQ ID NO: 28315 - protein, 55 aa, Homo sapiens
  MAP TO AC020588.4; EXPRESSED IN BRAIN, SIGNAL = 0.37; EXPRESSED IN FETAL LIVER, SIGNAL = 0.44; SWISSPROT HIT: P18200, EVALUE 2.80e+00
FLLNAYDFSTTVKSNPGKLGTICMFRFLQVSLHVPWQGYTMSIIYILPISVKVYH

SEQ ID NO: 28316 - protein, 44 aa, Homo sapiens
  MAP TO CHR21_71.0; EXPRESSED IN PLACENTA, SIGNAL = 0.86; EXPRESSED IN BRAIN, SIGNAL =   2; EXPRESSED IN LUNG, SIGNAL = 0.91; EXPRESSED IN ADULT LIVER, SIGNAL = 0.94; EXPRESSED IN HELA, SIGNAL = 5.5; EXPRESSED IN FETAL LIVER, SIGNAL = 1.3; EXPRESSED IN BONE MARROW, SIGNAL = 1.6; SWISSPROT HIT: P14172, EVALUE 7.50e-01
FCGNCQPLRAESGIPSPDCLLSNHGAAGACPVHGPFPPGHVRLS

SEQ ID NO: 28317 - protein, 54 aa, Homo sapiens
  MAP TO CHR21_73.0; EXPRESSED IN BRAIN, SIGNAL = 1.3; EXPRESSED IN HELA, SIGNAL = 3.4; EXPRESSED IN FETAL LIVER, SIGNAL = 0.99; EXPRESSED IN PLACENTA, SIGNAL = 0.59; EXPRESSED IN BONE MARROW, SIGNAL = 1.3; EXPRESSED IN LUNG, SIGNAL = 0.8; EXPRESSED IN ADULT LIVER, SIGNAL = 0.71
RFQYLRSRGRASLNLPPMAQAQRFQYLGSRQSVSSTPETEAGCTVGCWEREPWL

SEQ ID NO: 28318 - protein, 26 aa, Homo sapiens
  MAP TO CHR22_185_2.0; EXPRESSED IN PLACENTA, SIGNAL = 0.61; EXPRESSED IN BRAIN, SIGNAL = 0.46; EXPRESSED IN LUNG, SIGNAL = 0.59; EXPRESSED IN BONE MARROW, SIGNAL = 0.53
HEQNSHLVVTGVLVYGIGVDPSFQGF

SEQ ID NO: 28319 - protein, 88 aa, Homo sapiens
  MAP TO AL138781.2; EXPRESSED IN PLACENTA, SIGNAL = 1.2; EXPRESSED IN ADULT LIVER, SIGNAL = 1.1; EXPRESSED IN FETAL LIVER, SIGNAL = 0.93; EXPRESSED IN LUNG, SIGNAL = 1.2; EXPRESSED IN BONE MARROW, SIGNAL =   1; EXPRESSED IN BRAIN, SIGNAL =   1; EXPRESSED IN HELA, SIGNAL = 0.69; SWISSPROT HIT: P46939, EVALUE 2.30e+00
MGLLHGPPGKALRLWNSEQLLSPRKPVKLWNSEQFLLTARWAKNLEDSRGELTAAFPALQREAFCPQRDVSKCPPGAPVPGCRVAPAP

SEQ ID NO: 28320 - protein, 31 aa, Homo sapiens
  MAP TO AC022215.2; EXPRESSED IN PLACENTA, SIGNAL = 1.4; EXPRESSED IN LUNG, SIGNAL = 1.4; EXPRESSED IN ADULT LIVER, SIGNAL = 1.4; EXPRESSED IN BONE MARROW, SIGNAL = 1.2; EXPRESSED IN BRAIN, SIGNAL = 1.4; EXPRESSED IN FETAL LIVER, SIGNAL = 1.1
MPVGTLPWSLGQGQKQLRRQDNMSDTEMEGH

SEQ ID NO: 28321 - protein, 64 aa, Homo sapiens
  MAP TO AL138722.2; EXPRESSED IN PLACENTA, SIGNAL = 0.47; EXPRESSED IN BRAIN, SIGNAL = 0.51; SWISSPROT HIT: P47050, EVALUE 3.20e-01
VLRFYAIWDDTDSMYGECRTYIIHYYLMDDTVEIREVHERNDGRDPFPLLMNRQRVPKVLVENA

SEQ ID NO: 28322 - protein, 49 aa, Homo sapiens
  MAP TO AL138722.2; EXPRESSED IN PLACENTA, SIGNAL = 0.47; EXPRESSED IN BRAIN, SIGNAL = 0.51
SFDSMQSGMIQTACMVNVGPTSFITILWMIRWKFERSTNGMMGEILSHS

SEQ ID NO: 28323 - protein, 38 aa, Homo sapiens
  MAP TO AC011799.5; EXPRESSED IN PLACENTA, SIGNAL = 0.49; EXPRESSED IN BRAIN, SIGNAL = 0.58; SWISSPROT HIT: P12430, EVALUE 8.50e+00
TAMHILEQQKKQQKLSSYCDYNHTYKYASGKKYSKEVQ

SEQ ID NO: 28324 - protein, 51 aa, Homo sapiens
  MAP TO AL138996.1; EXPRESSED IN PLACENTA, SIGNAL = 1.3; EXPRESSED IN LUNG, SIGNAL = 1.5; EXPRESSED IN ADULT LIVER, SIGNAL = 1.9; EXPRESSED IN BRAIN, SIGNAL = 1.2; EXPRESSED IN FETAL LIVER, SIGNAL = 1.2; EXPRESSED IN HEART, SIGNAL = 1.2; SWISSPROT HIT: P24723, EVALUE 1.00e-23
DRLFFVMEFVNGGDLMFHIQKSRRFDEARARFYAAEIISALMFLHDKGIIY

SEQ ID NO: 28325 - protein, 33 aa, Homo sapiens
  MAP TO CHR22_129.0; EXPRESSED IN HELA, SIGNAL = 2.3; EXPRESSED IN BRAIN, SIGNAL = 1.8; EXPRESSED IN FETAL LIVER, SIGNAL = 1.6; EXPRESSED IN BONE MARROW, SIGNAL = 1.6; EXPRESSED IN HEART, SIGNAL = 2.2; EXPRESSED IN ADULT LIVER, SIGNAL = 1.9
TTLLGVQTDQRVLRHLIVQYLPRLDKLLQEHDI

SEQ ID NO: 28326 - protein, 39 aa, Homo sapiens
  MAP TO CHR22_129.0; EXPRESSED IN HELA, SIGNAL = 2.3; EXPRESSED IN BRAIN, SIGNAL = 1.8; EXPRESSED IN FETAL LIVER, SIGNAL = 1.6; EXPRESSED IN BONE MARROW, SIGNAL = 1.6; EXPRESSED IN HEART, SIGNAL = 2.2; EXPRESSED IN ADULT LIVER, SIGNAL = 1.9; SWISSPROT HIT: Q9WTM3, EVALUE 2.90e+00
GRLPPAVPGGGGRLLDDVCHHRGPAPRLLLQHHPAGCPD

SEQ ID NO: 28327 - protein, 39 aa, Homo sapiens
  MAP TO CHR22_129.0; EXPRESSED IN HELA, SIGNAL = 2.3; EXPRESSED IN BRAIN, SIGNAL = 1.8; EXPRESSED IN FETAL LIVER, SIGNAL = 1.6; EXPRESSED IN BONE MARROW, SIGNAL = 1.6; EXPRESSED IN HEART, SIGNAL = 2.2; EXPRESSED IN ADULT LIVER, SIGNAL = 1.9
VGAPFLICTKTWVEGPCPCALARWPPASCCSWRRRTPSG

SEQ ID NO: 28328 - protein, 19 aa, Homo sapiens
  MAP TO CHR22_114.0; EXPRESSED IN FETAL LIVER, SIGNAL = 1.3; EXPRESSED IN PLACENTA, SIGNAL = 1.7; EXPRESSED IN BONE MARROW, SIGNAL = 0.99; EXPRESSED IN BRAIN, SIGNAL = 0.93
ARARGTGTAGRGFKANPHP

SEQ ID NO: 28329 - protein, 107 aa, Homo sapiens
  MAP TO CHR22_114.0; EXPRESSED IN FETAL LIVER, SIGNAL = 1.3; EXPRESSED IN PLACENTA, SIGNAL = 1.7; EXPRESSED IN BONE MARROW, SIGNAL = 0.99; EXPRESSED IN BRAIN, SIGNAL = 0.93; SWISSPROT HIT: P53814, EVALUE 3.00e-13
VPEREEQEQQAEVSKPTPTPEGTSQDVTTVTLLLRAPPGSTSSSPASPSSSPTPASPEPPLEPAEAQCLTAEVPGSPEPPPSPPKTTSPEPQESPTLPSTEGQVVNK

SEQ ID NO: 28330 - protein, 29 aa, Homo sapiens
  MAP TO AC016729.5; EXPRESSED IN BRAIN, SIGNAL = 0.44; EXPRESSED IN PLACENTA, SIGNAL = 0.51; EXPRESSED IN FETAL LIVER, SIGNAL = 0.52; EXPRESSED IN ADULT LIVER, SIGNAL = 0.69; EXPRESSED IN BONE MARROW, SIGNAL = 0.58
IQEVHVEVGYMDILYDAEVWGMNDALTQT

SEQ ID NO: 28331 - protein, 21 aa, Homo sapiens
  MAP TO AC016729.5; EXPRESSED IN BRAIN, SIGNAL = 0.44; EXPRESSED IN PLACENTA, SIGNAL = 0.51; EXPRESSED IN FETAL LIVER, SIGNAL = 0.52; EXPRESSED IN ADULT LIVER, SIGNAL = 0.69; EXPRESSED IN BONE MARROW, SIGNAL = 0.58
FKRSMLRLVTWIYCMMLRCGV

SEQ ID NO: 28332 - protein, 56 aa, Homo sapiens
  MAP TO AC012580.3; EXPRESSED IN PLACENTA, SIGNAL = 0.54; EXPRESSED IN BRAIN, SIGNAL = 0.31; EXPRESSED IN FETAL LIVER, SIGNAL = 0.42
VVEVGKCEVKVPAYSMSGMGLLSGSWNGAFAPFPHTVEGARKYTNPIHEGRAIMTQ

SEQ ID NO: 28333 - protein, 25 aa, Homo sapiens
  MAP TO CHR21_57.0; EXPRESSED IN FETAL LIVER, SIGNAL = 0.5; EXPRESSED IN HELA, SIGNAL = 1.2; EXPRESSED IN BRAIN, SIGNAL = 0.54
GRPKASSGRNACIPARPPWVWGGWS

SEQ ID NO: 28334 - protein, 59 aa, Homo sapiens
  MAP TO AJ132411.1; EXPRESSED IN FETAL LIVER, SIGNAL = 1.7; EXPRESSED IN PLACENTA, SIGNAL = 1.5; EXPRESSED IN LUNG, SIGNAL = 1.8; EXPRESSED IN BONE MARROW, SIGNAL = 1.2; EXPRESSED IN BRAIN, SIGNAL = 1.4; SWISSPROT HIT: Q15031, EVALUE 2.00e-27
INNKACGKIPVPQQVARDQDKVHEFVLQSELGVRLLQGRSIKKSFLSPRTALINFLVQD

SEQ ID NO: 28335 - protein, 59 aa, Homo sapiens
  MAP TO AJ132411.1; EXPRESSED IN FETAL LIVER, SIGNAL = 1.7; EXPRESSED IN PLACENTA, SIGNAL = 1.5; EXPRESSED IN LUNG, SIGNAL = 1.8; EXPRESSED IN BONE MARROW, SIGNAL = 1.2; EXPRESSED IN BRAIN, SIGNAL = 1.4; SWISSPROT HIT: O54898, EVALUE 8.00e+00
STIKLVAKFLCPNKLPGTRTKSTNLFFKASWVSGFCKDEASRSPSFPRELPSSTSWCKI

SEQ ID NO: 28336 - protein, 39 aa, Homo sapiens
  MAP TO AL133378.4; EXPRESSED IN BRAIN, SIGNAL = 0.63; EXPRESSED IN ADULT LIVER, SIGNAL = 0.77; EXPRESSED IN FETAL LIVER, SIGNAL = 0.64; EXPRESSED IN PLACENTA, SIGNAL = 0.8; EXPRESSED IN LUNG, SIGNAL = 0.77; EXPRESSED IN BONE MARROW, SIGNAL = 0.66; SWISSPROT HIT: P32547, EVALUE 5.00e+00
IWKLTLSLITTKDWPTGPIMRPLSTSISPPPVLILLMWP

SEQ ID NO: 28337 - protein, 27 aa, Homo sapiens
  MAP TO AL139149.1; EXPRESSED IN BRAIN, SIGNAL = 0.7; EXPRESSED IN FETAL LIVER, SIGNAL = 0.59; EXPRESSED IN BONE MARROW, SIGNAL = 0.68; EXPRESSED IN PLACENTA, SIGNAL = 0.78; EXPRESSED IN ADULT LIVER, SIGNAL = 0.61; EXPRESSED IN LUNG, SIGNAL = 0.62
VLIYDWRSDGELSDGLLSPLLFYIDLL

SEQ ID NO: 28338 - protein, 40 aa, Homo sapiens
  MAP TO CHR21_53.0; EXPRESSED IN HELA, SIGNAL = 0.94; EXPRESSED IN BRAIN, SIGNAL = 0.61; EXPRESSED IN BONE MARROW, SIGNAL = 0.44
YWPASLGFWIVKLSWKCLLSFSCWRRFLAKPGWRMEMRKV

SEQ ID NO: 28339 - protein, 39 aa, Homo sapiens
  MAP TO AL138783.2; EXPRESSED IN PLACENTA, SIGNAL = 1.4; EXPRESSED IN FETAL LIVER, SIGNAL = 1.2; EXPRESSED IN BONE MARROW, SIGNAL =   1; EXPRESSED IN HELA, SIGNAL = 1.5; EXPRESSED IN BRAIN, SIGNAL = 1.2; SWISSPROT HIT: Q15431, EVALUE 4.00e-16
LKNTELTSHCNKLSLENKELTQETSDMTLELKNQQEDIN

SEQ ID NO: 28340 - protein, 36 aa, Homo sapiens
  MAP TO AL138801.1; EXPRESSED IN FETAL LIVER, SIGNAL =   1; EXPRESSED IN BONE MARROW, SIGNAL = 0.75; EXPRESSED IN BRAIN, SIGNAL = 0.92; EXPRESSED IN PLACENTA, SIGNAL = 0.91; EXPRESSED IN LUNG, SIGNAL = 0.5; EXPRESSED IN ADULT LIVER, SIGNAL = 0.63; SWISSPROT HIT: Q62685, EVALUE 5.00e+00
AFGLVLRDEVGLRYICEAFKGCKRDSSMRGKCRGEE

SEQ ID NO: 28341 - protein, 113 aa, Homo sapiens
  MAP TO AL139022.1; EXPRESSED IN FETAL LIVER, SIGNAL = 1.1; EXPRESSED IN PLACENTA, SIGNAL = 1.1; EXPRESSED IN LUNG, SIGNAL = 1.1; EXPRESSED IN BRAIN, SIGNAL = 0.95; SWISSPROT HIT: P18283, EVALUE 1.00e-64
ENCQNEEILNSLKYVRPGGGYQPTFTLVQKCEVNGQNEHPVFAYLKDKLPYPYDDPFSLMTDPKLIIWSPVRRSDVAWNFEKFLIGPEGEPFRRYSRTFPTINIEPDIKRLLK

SEQ ID NO: 28342 - protein, 34 aa, Homo sapiens
  MAP TO AL138735.2; EXPRESSED IN LUNG, SIGNAL = 0.68; EXPRESSED IN ADULT LIVER, SIGNAL = 0.71; EXPRESSED IN BONE MARROW, SIGNAL = 0.55; EXPRESSED IN BRAIN, SIGNAL = 0.73
MSLRGKSMGAAEKVCQEDLVPNLFQITACHDEEK

SEQ ID NO: 28343 - protein, 57 aa, Homo sapiens
  MAP TO AC013613.3; EXPRESSED IN PLACENTA, SIGNAL = 0.34; EXPRESSED IN ADULT LIVER, SIGNAL = 0.49; EXPRESSED IN BRAIN, SIGNAL = 0.3; EXPRESSED IN FETAL LIVER, SIGNAL = 0.38; SWISSPROT HIT: P42685, EVALUE 9.00e-25
SMDPNDFLREAQIMKNLRHPKLIQLYAVCTLEDPIYIITELMRHGSLQEYLQSKLKT

SEQ ID NO: 28344 - protein, 126 aa, Homo sapiens
  MAP TO AC021609.3; EXPRESSED IN FETAL LIVER, SIGNAL = 2.6; EXPRESSED IN BONE MARROW, SIGNAL = 2.4; EXPRESSED IN BRAIN, SIGNAL = 2.2; EXPRESSED IN HELA, SIGNAL = 1.8; EXPRESSED IN PLACENTA, SIGNAL = 3.2; EXPRESSED IN ADULT LIVER, SIGNAL = 3.2; SWISSPROT HIT: Q05471, EVALUE 6.30e+00
LELVVEPWIAGLWPALRKHFRSSRGQEEISGALPVASPASSRTDLVKSELLHIESQVELLRFDDSGRKDSEVLKQNAVNSNQSNVVIEDFESSLTRSVPPLSQASLNIPGLPPEYLQVHLQESLGQ

SEQ ID NO: 28345 - protein, 127 aa, Homo sapiens
  MAP TO AL137800.2; EXPRESSED IN FETAL LIVER, SIGNAL = 0.89; EXPRESSED IN BONE MARROW, SIGNAL = 0.87; EXPRESSED IN BRAIN, SIGNAL = 0.91; EXPRESSED IN PLACENTA, SIGNAL = 0.94; EXPRESSED IN LUNG, SIGNAL = 1.2; EXPRESSED IN ADULT LIVER, SIGNAL = 1.1; SWISSPROT HIT: Q92540, EVALUE 6.00e-30
FPPPTYVIPPPVAFSMGSGYTFPAGVSVPGTFLQPTAHSPAGNQVQAGKQSHIPYSQQRPSGPGPMNQGPQQSQPPSQQPLTSLPAQPTAQSTSQLQVQALTQQQQSPTKAVPALGKSPPHHSGFQQ

SEQ ID NO: 28346 - protein, 33 aa, Homo sapiens
  MAP TO AL133499.1; EXPRESSED IN BRAIN, SIGNAL = 0.45; EXPRESSED IN ADULT LIVER, SIGNAL = 0.55; EXPRESSED IN PLACENTA, SIGNAL = 0.46
MASSTTGPLHMGTFFSIMGRRYKRRRKKRSERK

SEQ ID NO: 28347 - protein, 33 aa, Homo sapiens
  MAP TO AL133499.1; EXPRESSED IN BRAIN, SIGNAL = 0.45; EXPRESSED IN ADULT LIVER, SIGNAL = 0.55; EXPRESSED IN PLACENTA, SIGNAL = 0.46; SWISSPROT HIT: Q03368, EVALUE 8.60e+00
WRRPPLGLCTWGPFSASWGVGIKGGARSALRGK

SEQ ID NO: 28348 - protein, 40 aa, Homo sapiens
  MAP TO CHR22_126.0; EXPRESSED IN BRAIN, SIGNAL = 0.33; EXPRESSED IN PLACENTA, SIGNAL = 0.49; EXPRESSED IN ADULT LIVER, SIGNAL = 0.48; EXPRESSED IN FETAL LIVER, SIGNAL = 0.39
PPLNLRESAAIAGAGFRRARALSPPRGRSRSGRRRGNPEK

SEQ ID NO: 28349 - protein, 34 aa, Homo sapiens
  MAP TO AC013341.3; EXPRESSED IN ADULT LIVER, SIGNAL = 0.4; EXPRESSED IN BRAIN, SIGNAL = 0.41
IAQLTNNQTSNLLSYGENISLVLNLSYDFIATCQ

SEQ ID NO: 28350 - protein, 41 aa, Homo sapiens
  MAP TO CHR21_48.0; EXPRESSED IN BRAIN, SIGNAL = 0.29; EXPRESSED IN HELA, SIGNAL = 0.64
IFSPVEVKLLPSAIANPGVAGILAVRGDLVTLKLLSDYWEP

SEQ ID NO: 28351 - protein, 151 aa, Homo sapiens
  MAP TO AC013648.3; EXPRESSED IN BONE MARROW, SIGNAL = 0.76; EXPRESSED IN LUNG, SIGNAL = 0.84; EXPRESSED IN BRAIN, SIGNAL = 0.87
TSGICSLLPLPEGTLGNPAAGLTQERPREEMGSATRGPSERRFNSFTCADKAAVVSTAVKAAISGGWHAACTRINTSNRKTAKSSKANKDGWVLLTPPMPVPHPLSVPSFTSDSCVHSDVPKKSPTEWTHRKSYSRRMCHPLPFLPRLTLA

SEQ ID NO: 28352 - protein, 58 aa, Homo sapiens
  MAP TO AL137859.2; EXPRESSED IN BONE MARROW, SIGNAL = 0.62; EXPRESSED IN BRAIN, SIGNAL = 0.82; EXPRESSED IN LUNG, SIGNAL = 0.89; EXPRESSED IN FETAL LIVER, SIGNAL = 0.69; SWISSPROT HIT: O77668, EVALUE 7.20e-01
ARRENNLIKETLPLKWAPIWALGTFHLAPPGKLQPSWASTPMPPCLRTDLATAFGMEP

SEQ ID NO: 28353 - protein, 50 aa, Homo sapiens
  MAP TO AL096771.11; EXPRESSED IN BONE MARROW, SIGNAL = 0.68; EXPRESSED IN BRAIN, SIGNAL = 0.81; EXPRESSED IN FETAL LIVER, SIGNAL = 0.53; EXPRESSED IN LUNG, SIGNAL = 0.66; SWISSPROT HIT: Q99715, EVALUE 3.00e-22
VHIVVTSKSVKIYIDCYEIIEKDIKEAGNITTDGYEILGKLLKGERKSAA

SEQ ID NO: 28354 - protein, 57 aa, Homo sapiens
  MAP TO AC011950.4; EXPRESSED IN BRAIN, SIGNAL = 0.3; SWISSPROT HIT: P54097, EVALUE 2.00e-04
CDKDPQTTVIENGRSQRGRFSFEVFRFVKHKNQKMSTVFLHCVTKLCRADDCPFLMP

SEQ ID NO: 28355 - protein, 27 aa, Homo sapiens
  MAP TO AC011950.4; EXPRESSED IN BRAIN, SIGNAL = 0.3
VTRTLRPPSLRMAEASGAGFLLKCSDL

SEQ ID NO: 28356 - protein, 23 aa, Homo sapiens
  MAP TO CHR21_18.0; EXPRESSED IN FETAL LIVER, SIGNAL = 1.9; EXPRESSED IN ADULT LIVER, SIGNAL =   2; EXPRESSED IN HELA, SIGNAL = 8.4; EXPRESSED IN BRAIN, SIGNAL = 1.9
PKRDIVLDVSSTSSEDRDEENEE

SEQ ID NO: 28357 - protein, 65 aa, Homo sapiens
  MAP TO CHR22_124.0; EXPRESSED IN FETAL LIVER, SIGNAL = 0.55; EXPRESSED IN BONE MARROW, SIGNAL = 0.74; EXPRESSED IN BRAIN, SIGNAL = 0.44; EXPRESSED IN ADULT LIVER, SIGNAL = 0.51; SWISSPROT HIT: P47382, EVALUE 1.20e+00
MMRLGGRLVLNTKEELANERLMTLKIAEMKEAMRTLIFPPSMHFFQAKHLIERSQVFNILRMMPK

SEQ ID NO: 28358 - protein, 117 aa, Homo sapiens
  MAP TO CHR22_152.0; EXPRESSED IN BONE MARROW, SIGNAL = 0.52; EXPRESSED IN BRAIN, SIGNAL = 0.48; EXPRESSED IN FETAL LIVER, SIGNAL = 0.49; SWISSPROT HIT: O73775, EVALUE 1.00e-46
RCERLPCHENRECSKLPLRITYYHLSFPTNIQAPAVVFRMGPSSAVPGDSMQLAITGGNEEGFFTTRKVSPHSGVVALTKPVPEPRDLLLTVKMDLSRHGTVSSFVAKLFIFVSAEL

SEQ ID NO: 28359 - protein, 27 aa, Homo sapiens
  MAP TO CHR21_59.0; EXPRESSED IN BRAIN, SIGNAL = 0.39; EXPRESSED IN HELA, SIGNAL = 0.68
VDCDLAPCALDFGRPGGLCLPPEQRTH

SEQ ID NO: 28360 - protein, 64 aa, Homo sapiens
  MAP TO CHR21_59.0; EXPRESSED IN BRAIN, SIGNAL = 0.39; EXPRESSED IN HELA, SIGNAL = 0.68; SWISSPROT HIT: P10189, EVALUE 2.70e+00
LIVTLLHVPWILGGLVDYVCHLSKEPIDEELWAVGLRQQNKERSTGHSGCDVHFHQEVVLSRDQ

SEQ ID NO: 28361 - protein, 81 aa, Homo sapiens
  MAP TO CHR19.1; EXPRESSED IN HELA, SIGNAL = 1.9; EXPRESSED IN BRAIN, SIGNAL = 1.8; EXPRESSED IN BONE MARROW, SIGNAL = 1.9; EXPRESSED IN HEART, SIGNAL = 2.2; EXPRESSED IN ADULT LIVER, SIGNAL = 3.4; EXPRESSED IN FETAL LIVER, SIGNAL = 1.7; EXPRESSED IN LUNG, SIGNAL = 2.2; SWISSPROT HIT: P15279, EVALUE 8.00e-01
LFTPNFQGSPAEQGDKKAKSVLLLTEKDASHAVGVLRYLERADAKVPAELYEFTAGVLEAKEDKKAGRPLCPYLKAFGFCK

SEQ ID NO: 28362 - protein, 63 aa, Homo sapiens
  MAP TO CHR7.1; EXPRESSED IN BRAIN, SIGNAL = 1.6; EXPRESSED IN PLACENTA, SIGNAL = 1.4; EXPRESSED IN FETAL LIVER, SIGNAL = 1.9; EXPRESSED IN LUNG, SIGNAL = 1.4; EXPRESSED IN HELA, SIGNAL =   2; EXPRESSED IN HEART, SIGNAL = 1.4; EXPRESSED IN BONE MARROW, SIGNAL = 1.8; EXPRESSED IN ADULT LIVER, SIGNAL = 1.9; SWISSPROT HIT: O00303, EVALUE 6.00e+00
VNTRLLLSFSSLLAPTIRIDVHRKENAGAAEKSITILSTPEGTSAACKSILEIMHKEAQDIKL

SEQ ID NO: 28363 - protein, 63 aa, Homo sapiens
  MAP TO AP002016.2; EXPRESSED IN FETAL LIVER, SIGNAL = 0.92; EXPRESSED IN LUNG, SIGNAL = 1.1; EXPRESSED IN BRAIN, SIGNAL = 0.86; EXPRESSED IN HEART, SIGNAL = 0.78; EXPRESSED IN BONE MARROW, SIGNAL = 0.9; SWISSPROT HIT: Q9UFF9, EVALUE 2.00e-32
DTEFPGVVVRPIGEFRSSIDYQYQLLRCNVDLLKIIQLGLTFTNEKGEYPSGINTWQFNFKFN

SEQ ID NO: 28364 - protein, 54 aa, Homo sapiens
  MAP TO CHR10.1; EXPRESSED IN PLACENTA, SIGNAL = 2.1; EXPRESSED IN HELA, SIGNAL = 2.1; EXPRESSED IN BRAIN, SIGNAL = 1.7; EXPRESSED IN LUNG, SIGNAL = 1.3; EXPRESSED IN HEART, SIGNAL = 1.7; EXPRESSED IN ADULT LIVER, SIGNAL = 4.1; SWISSPROT HIT: Q9ZES2, EVALUE 6.20e+00
ERIRVYMNRVKEITDKKKAGKLDRGAASRFVKNALWEPKPKNASKVANKGKSKS

SEQ ID NO: 28365 - protein, 59 aa, Homo sapiens
  MAP TO CHR1.1; EXPRESSED IN ADULT LIVER, SIGNAL = 0.83; EXPRESSED IN BONE MARROW, SIGNAL = 1.5; EXPRESSED IN FETAL LIVER, SIGNAL = 1.1; EXPRESSED IN LUNG, SIGNAL = 0.72; EXPRESSED IN BRAIN, SIGNAL = 1.4; EXPRESSED IN HEART, SIGNAL = 0.68; SWISSPROT HIT: P57518, EVALUE 1.60e+00
KQILIRKSHLFQNKLHYSAKYLYWISFDPSHSQFNIALSQLNLLKGVLLMVCYADINIS

SEQ ID NO: 28366 - protein, 56 aa, Homo sapiens
  MAP TO CHR17.1; EXPRESSED IN BONE MARROW, SIGNAL = 1.3; EXPRESSED IN ADULT LIVER, SIGNAL = 0.86; EXPRESSED IN PLACENTA, SIGNAL = 1.2; EXPRESSED IN FETAL LIVER, SIGNAL = 1.2; EXPRESSED IN HELA, SIGNAL = 1.1; EXPRESSED IN BRAIN, SIGNAL = 1.1; EXPRESSED IN LUNG, SIGNAL = 0.68; EXPRESSED IN HEART, SIGNAL = 0.62; SWISSPROT HIT: P42229, EVALUE 6.00e-24
PVFTSPDHVLDQDGEFDLDETMDVARHVEELLRRPMDSLDSRLSPPAGLFTSARGS

SEQ ID NO: 28367 - protein, 48 aa, Homo sapiens
  MAP TO CHR12.1; EXPRESSED IN ADULT LIVER, SIGNAL = 1.2; EXPRESSED IN FETAL LIVER, SIGNAL = 3.1; EXPRESSED IN LUNG, SIGNAL =   3; EXPRESSED IN BONE MARROW, SIGNAL = 3.8; EXPRESSED IN PLACENTA, SIGNAL = 2.7; EXPRESSED IN BRAIN, SIGNAL = 3.7; EXPRESSED IN HELA, SIGNAL = 2.6; EXPRESSED IN HEART, SIGNAL = 2.3
QFVAYRCWFWGCECLGDVSHLFFSLLLVCWTEKGSCRPQPPKRFSFFC

SEQ ID NO: 28368 - protein, 34 aa, Homo sapiens
  MAP TO CHR17.1; EXPRESSED IN ADULT LIVER, SIGNAL = 0.63; EXPRESSED IN FETAL LIVER, SIGNAL = 0.41; EXPRESSED IN HELA, SIGNAL = 0.57; EXPRESSED IN BRAIN, SIGNAL = 0.49; EXPRESSED IN HEART, SIGNAL = 0.78; EXPRESSED IN BONE MARROW, SIGNAL = 0.4
PPPSFLRWKGVGFFLSWGDGGVEGGVWWGCDILP

SEQ ID NO: 28369 - protein, 51 aa, Homo sapiens
  MAP TO CHR15.1; EXPRESSED IN BRAIN, SIGNAL = 0.61; EXPRESSED IN HEART, SIGNAL = 0.64; EXPRESSED IN BONE MARROW, SIGNAL = 0.7; EXPRESSED IN ADULT LIVER, SIGNAL = 0.78; EXPRESSED IN FETAL LIVER, SIGNAL = 0.73
HFPSRKLIPSMFSPFPQLVGRESHFHQVHRTHLTILKHLTFNTNHMAVSFN

SEQ ID NO: 28370 - protein, 77 aa, Homo sapiens
  MAP TO CHR22.1; EXPRESSED IN BRAIN, SIGNAL = 1.8; EXPRESSED IN PLACENTA, SIGNAL = 1.8; EXPRESSED IN LUNG, SIGNAL =   3; EXPRESSED IN FETAL LIVER, SIGNAL = 1.8; EXPRESSED IN HELA, SIGNAL = 1.9; EXPRESSED IN HEART, SIGNAL = 2.6; EXPRESSED IN BONE MARROW, SIGNAL = 2.1; EXPRESSED IN ADULT LIVER, SIGNAL = 2.6; SWISSPROT HIT: P74442, EVALUE 4.00e-07
THELTNPGIAEVTIRPDRKILATAGWDHRIRVFHWRTMQPLAVLAFHSAAVQCVAFTADGLLAAGSKDQRISLWSLY

SEQ ID NO: 28371 - protein, 128 aa, Homo sapiens
  MAP TO AC009789.19; EXPRESSED IN ADULT LIVER, SIGNAL = 1.1; EXPRESSED IN FETAL LIVER, SIGNAL = 1.1; EXPRESSED IN HELA, SIGNAL =   1; EXPRESSED IN BRAIN, SIGNAL = 1.1; EXPRESSED IN BONE MARROW, SIGNAL = 1.2; EXPRESSED IN HEART, SIGNAL = 0.65
SVQEVTELGEASGEVHVDWSEASPAASLGQPGGAGGTRPPSRSRFFCFIRRFWNQILTCVSLSSRVAAISTLRARLRYLLKWNSFSSSVSCLVVKLVRRPLGEPRPGSDTFARGGAGRKARSILSPLS

SEQ ID NO: 28372 - protein, 84 aa, Homo sapiens
  MAP TO CHR17.1; EXPRESSED IN ADULT LIVER, SIGNAL = 4.1; EXPRESSED IN FETAL LIVER, SIGNAL = 6.6; EXPRESSED IN BONE MARROW, SIGNAL = 7.7; EXPRESSED IN PLACENTA, SIGNAL =   5; EXPRESSED IN LUNG, SIGNAL = 2.9; EXPRESSED IN BRAIN, SIGNAL =   7; EXPRESSED IN HELA, SIGNAL = 4.5; EXPRESSED IN HEART, SIGNAL =   3; SWISSPROT HIT: Q61510, EVALUE 6.00e+00
SKGFLSFYFQPETFTFSNPHCACREPALLSDGLCASGYCAQAHRLEQEKEVSPNQWLSEEPNGKTRSWQNCSRAFSVLFLIFIS

SEQ ID NO: 28373 - protein, 74 aa, Homo sapiens
  MAP TO CHR19.1; EXPRESSED IN BONE MARROW, SIGNAL = 3.3; EXPRESSED IN ADULT LIVER, SIGNAL = 2.2; EXPRESSED IN LUNG, SIGNAL = 2.6; EXPRESSED IN FETAL LIVER, SIGNAL = 2.2; EXPRESSED IN HELA, SIGNAL = 2.6; EXPRESSED IN BRAIN, SIGNAL =   3; EXPRESSED IN HEART, SIGNAL =   3; SWISSPROT HIT: P22888, EVALUE 1.70e+00
LTFMLRGSAWQPRGGRSALTLSPALCQPVWAVSCPGATAAQREPRDKGSLCSGSSQRAGGRVECVCEYFAELGK

SEQ ID NO: 28374 - protein, 26 aa, Homo sapiens
  MAP TO CHR5.1; EXPRESSED IN HEART, SIGNAL = 0.77; EXPRESSED IN BONE MARROW, SIGNAL = 0.5; EXPRESSED IN FETAL LIVER, SIGNAL = 0.44; EXPRESSED IN BRAIN, SIGNAL = 0.48; EXPRESSED IN LUNG, SIGNAL = 0.65
LLDWHNKQILEAVSLERSHLSPSFEL

SEQ ID NO: 28375 - protein, 51 aa, Homo sapiens
  MAP TO CHR14.1; EXPRESSED IN HELA, SIGNAL = 2.6; EXPRESSED IN BRAIN, SIGNAL =   2; EXPRESSED IN HEART, SIGNAL = 1.1; EXPRESSED IN ADULT LIVER, SIGNAL = 1.8; EXPRESSED IN BONE MARROW, SIGNAL = 1.7; EXPRESSED IN FETAL LIVER, SIGNAL = 1.6
APSWVRPGRHICPNTRHRLPPRALQLPQPAGAFCEEAAQPALTGSVPLPAA

SEQ ID NO: 28376 - protein, 89 aa, Homo sapiens
  MAP TO CHR4.1; EXPRESSED IN FETAL LIVER, SIGNAL = 0.92; EXPRESSED IN HELA, SIGNAL = 0.92; EXPRESSED IN LUNG, SIGNAL = 0.72; EXPRESSED IN BRAIN, SIGNAL = 1.2; EXPRESSED IN BONE MARROW, SIGNAL = 1.3; SWISSPROT HIT: P03364, EVALUE 5.00e-03
HFPSWKGQRFVLTGIDTYSGYVFAYPAHNSSAKTTIHGLTECLIHCHSISHSIAFDQGTHLWVKKCGNGLTFMEFTGLIMFLNTLKQLD

SEQ ID NO: 28377 - protein, 96 aa, Homo sapiens
  MAP TO CHR6.1; EXPRESSED IN BRAIN, SIGNAL =   4; EXPRESSED IN HEART, SIGNAL =  10; EXPRESSED IN LUNG, SIGNAL = 1.1e+02; SWISSPROT HIT: P30482, EVALUE 3.00e-53
SDPPKTHVTHHPISDHEVTLRCWALGFYPAEITLTWQRDGEDQTQDTELVETRPAGDRTFQKWAAVVVPSGEEQRYTCHVQHEGLPKPLTLRWGKE

SEQ ID NO: 28378 - protein, 34 aa, Homo sapiens
  MAP TO CHR7.1; EXPRESSED IN FETAL LIVER, SIGNAL = 0.49; EXPRESSED IN BRAIN, SIGNAL = 0.46; EXPRESSED IN LUNG, SIGNAL = 0.63; EXPRESSED IN HEART, SIGNAL = 0.72; EXPRESSED IN BONE MARROW, SIGNAL = 0.41; SWISSPROT HIT: Q00037, EVALUE 5.00e+00
YFSCSGHHSYREGDRKLKEHMAAICEYYTSHYYI

SEQ ID NO: 28379 - protein, 20 aa, Homo sapiens
  MAP TO CHR7.1; EXPRESSED IN HELA, SIGNAL = 0.59; EXPRESSED IN BRAIN, SIGNAL = 1.1; EXPRESSED IN BONE MARROW, SIGNAL = 1.1; EXPRESSED IN FETAL LIVER, SIGNAL = 1.2
LADWVNKKKRFPRHSPLIQS

SEQ ID NO: 28380 - protein, 46 aa, Homo sapiens
  MAP TO CHR12.1; EXPRESSED IN PLACENTA, SIGNAL = 6.8; EXPRESSED IN FETAL LIVER, SIGNAL = 7.5; EXPRESSED IN LUNG, SIGNAL = 6.1; EXPRESSED IN BRAIN, SIGNAL = 8.9; EXPRESSED IN HELA, SIGNAL = 5.1; EXPRESSED IN HEART, SIGNAL = 5.3; EXPRESSED IN BONE MARROW, SIGNAL =  11; EXPRESSED IN ADULT LIVER, SIGNAL =   8
PRYSANTSRSWRRRASGTTLSSSTSCWTSSWTLASRRPPTARSCRS

SEQ ID NO: 28381 - protein, 90 aa, Homo sapiens
  MAP TO CHR12.1; EXPRESSED IN FETAL LIVER, SIGNAL = 0.68; EXPRESSED IN LUNG, SIGNAL = 0.76; EXPRESSED IN HELA, SIGNAL = 0.75; EXPRESSED IN BRAIN, SIGNAL = 0.85; EXPRESSED IN HEART, SIGNAL = 0.72; EXPRESSED IN ADULT LIVER, SIGNAL = 0.65; EXPRESSED IN BONE MARROW, SIGNAL = 0.97; SWISSPROT HIT: P51805, EVALUE 4.00e-10
ALFFNRCLFASFLTIALQTKLVYLTSILEVLTRDLMEQCSNMQPKLMLRRTESVVEKLLTNWMSVCLSGFLRVSVTSLSNVRGKTIGSYF

SEQ ID NO: 28382 - protein, 47 aa, Homo sapiens
  MAP TO CHR19.1; EXPRESSED IN PLACENTA, SIGNAL =   4; EXPRESSED IN FETAL LIVER, SIGNAL = 3.5; EXPRESSED IN BRAIN, SIGNAL = 3.9; EXPRESSED IN HEART, SIGNAL = 3.6; EXPRESSED IN BONE MARROW, SIGNAL = 4.5; EXPRESSED IN ADULT LIVER, SIGNAL = 3.7; EXPRESSED IN LUNG, SIGNAL = 3.5; EXPRESSED IN HELA, SIGNAL = 4.4
SLLTIAVKAEDAFLQTVQGHEADVLKHFQTDTALQGQALPFGLAREG

SEQ ID NO: 28383 - protein, 148 aa, Homo sapiens
  MAP TO CHR19.1; EXPRESSED IN LUNG, SIGNAL = 0.57; EXPRESSED IN BRAIN, SIGNAL = 0.63; EXPRESSED IN ADULT LIVER, SIGNAL =   1; EXPRESSED IN HEART, SIGNAL = 0.67
EVVEGPNTKPVGAVPWLEVTVLDMALVRLLLPSPKPLGFAMAGVAAVLLKLSFEAPIPKENPVPPEARVAVPKVKPVVCVAGVWVASENRPVEGVLVAGWKGAPKLNPPVPEVEKENPVAGVVVAVFAVPNVNPPVGAPVPPKLNPLM

SEQ ID NO: 28384 - protein, 55 aa, Homo sapiens
  MAP TO CHR17.1; EXPRESSED IN BONE MARROW, SIGNAL = 0.95; EXPRESSED IN HEART, SIGNAL =   1; EXPRESSED IN ADULT LIVER, SIGNAL = 0.79; EXPRESSED IN FETAL LIVER, SIGNAL = 0.8; EXPRESSED IN LUNG, SIGNAL = 1.2; EXPRESSED IN BRAIN, SIGNAL = 0.94; SWISSPROT HIT: O75616, EVALUE 4.00e-25
RCVSCVAGSAFSGPRLASASRSNGQGSALDHFLGFSQPDSSVTPCVPAVSMNRGK

SEQ ID NO: 28385 - protein, 68 aa, Homo sapiens
  MAP TO CHR7.1; EXPRESSED IN ADULT LIVER, SIGNAL = 1.6; EXPRESSED IN FETAL LIVER, SIGNAL =   1; EXPRESSED IN LUNG, SIGNAL = 1.4; EXPRESSED IN HELA, SIGNAL = 0.61; EXPRESSED IN BRAIN, SIGNAL = 0.62; EXPRESSED IN HEART, SIGNAL = 1.2; EXPRESSED IN BONE MARROW, SIGNAL = 0.56; SWISSPROT HIT: Q15166, EVALUE 3.00e-34
SVNDIVVLGPEQFYATRDHYFTNSLLSFFEMILDLRWTYVLFYSPREVKVVAKGFCSANGITVSADQK

SEQ ID NO: 28386 - protein, 57 aa, Homo sapiens
  MAP TO CHR19.1; EXPRESSED IN ADULT LIVER, SIGNAL = 3.1; EXPRESSED IN PLACENTA, SIGNAL = 3.6; EXPRESSED IN FETAL LIVER, SIGNAL = 2.3; EXPRESSED IN HELA, SIGNAL = 3.7; EXPRESSED IN BRAIN, SIGNAL = 2.6; EXPRESSED IN BONE MARROW, SIGNAL = 2.5; EXPRESSED IN HEART, SIGNAL = 1.2; SWISSPROT HIT: Q00918, EVALUE 4.70e+00
VTFRPLIDLGASSPLAHADSPGRLLGSHARLTDARGLLSLIPPAARLEALARARKEA

SEQ ID NO: 28387 - protein, 68 aa, Homo sapiens
  MAP TO CHR18.1; EXPRESSED IN FETAL LIVER, SIGNAL = 8.9; EXPRESSED IN LUNG, SIGNAL = 4.1; EXPRESSED IN HELA, SIGNAL =  10; EXPRESSED IN BRAIN, SIGNAL = 7.2; EXPRESSED IN BONE MARROW, SIGNAL = 7.3; EXPRESSED IN HEART, SIGNAL = 4.7; EXPRESSED IN PLACENTA, SIGNAL = 9.5; SWISSPROT HIT: P39191, EVALUE 9.20e+00
SDARPNSLSLVSKSSRAYHMHILFICFFVLNKIWPHCVGATPEKKNKIHPPRENGDCESLEKFTYFAH

SEQ ID NO: 28388 - protein, 55 aa, Homo sapiens
  MAP TO CHR19.1; EXPRESSED IN HEART, SIGNAL = 3.3; EXPRESSED IN BONE MARROW, SIGNAL = 4.4; EXPRESSED IN PLACENTA, SIGNAL = 6.6; EXPRESSED IN FETAL LIVER, SIGNAL = 5.3; EXPRESSED IN HELA, SIGNAL = 6.6; EXPRESSED IN BRAIN, SIGNAL =   6; EXPRESSED IN LUNG, SIGNAL = 3.2; SWISSPROT HIT: P38150, EVALUE 1.20e+00
VLRFFLEYQWFVDFAVYSGGVYLFTEAYYYMLGPAKETNIAVFWCLLTVTFSMYP

SEQ ID NO: 28389 - protein, 55 aa, Homo sapiens
  MAP TO CHR5.1; EXPRESSED IN FETAL LIVER, SIGNAL = 0.36; EXPRESSED IN HELA, SIGNAL = 0.4; EXPRESSED IN BRAIN, SIGNAL = 0.46; SWISSPROT HIT: Q36976, EVALUE 2.10e+00
VEFSGVPATGKNLGLSHCDKLLRHPFHGITSVRFNLPMTSVVFPLVALMTSPGFV

SEQ ID NO: 28390 - protein, 62 aa, Homo sapiens
  MAP TO CHR9.1; EXPRESSED IN FETAL LIVER, SIGNAL =   5; EXPRESSED IN LUNG, SIGNAL = 3.5; EXPRESSED IN HELA, SIGNAL = 7.7; EXPRESSED IN BRAIN, SIGNAL = 4.1; EXPRESSED IN HEART, SIGNAL = 3.1; EXPRESSED IN ADULT LIVER, SIGNAL = 4.1; EXPRESSED IN BONE MARROW, SIGNAL = 5.1; EXPRESSED IN PLACENTA, SIGNAL =   6; SWISSPROT HIT: O22212, EVALUE 1.00e-11
AIHGNFLLTGAYDNTAKIWTHPGWSPLKTLAGHEGKVMGLDISSDGQLIATCSYDRTFKLWM

SEQ ID NO: 28391 - protein, 70 aa, Homo sapiens
  MAP TO AC007873.4; EXPRESSED IN BRAIN, SIGNAL = 0.41; EXPRESSED IN HEART, SIGNAL = 0.56; EXPRESSED IN FETAL LIVER, SIGNAL = 0.54; SWISSPROT HIT: P27694, EVALUE 4.00e-33
WPPSQVYYFSKGTLKIANKQFTAVKNDYEMTFNNETSVMPCEDDHHLPTVQFDFTGIDDLENKSKDSLVG

SEQ ID NO: 28392 - protein, 51 aa, Homo sapiens
  MAP TO CHR7.1; EXPRESSED IN FETAL LIVER, SIGNAL = 2.8; EXPRESSED IN LUNG, SIGNAL = 1.1; EXPRESSED IN HELA, SIGNAL = 1.8; EXPRESSED IN BRAIN, SIGNAL = 2.7; EXPRESSED IN BONE MARROW, SIGNAL =   3; EXPRESSED IN HEART, SIGNAL =   1; EXPRESSED IN ADULT LIVER, SIGNAL = 1.6
SFVHTLLIFLWFQWDPGGGTHSERGNETLALRVPIITALSIKMFAFAFQEC

SEQ ID NO: 28393 - protein, 120 aa, Homo sapiens
  MAP TO CHR4.1; EXPRESSED IN ADULT LIVER, SIGNAL = 0.5; EXPRESSED IN FETAL LIVER, SIGNAL = 0.92; EXPRESSED IN LUNG, SIGNAL = 4.6; EXPRESSED IN HELA, SIGNAL = 0.74; EXPRESSED IN BRAIN, SIGNAL =   1; EXPRESSED IN HEART, SIGNAL = 2.2; EXPRESSED IN BONE MARROW, SIGNAL = 1.2; SWISSPROT HIT: P32969, EVALUE 2.00e-38
ICSHAQKMIKGVILGFCDKMRSLCSHFPINVIMQENSSIVEVRTFLSEKYICRVRVSPGVACSISQAQKDEFILKGNDIELVSNSAALTQQTTTAKNQDIRTFWMVSMSLKKGQFSRLMS

SEQ ID NO: 28394 - protein, 125 aa, Homo sapiens
  MAP TO CHR17.1; EXPRESSED IN ADULT LIVER, SIGNAL = 1.5; EXPRESSED IN FETAL LIVER, SIGNAL = 2.3; EXPRESSED IN LUNG, SIGNAL = 1.9; EXPRESSED IN BONE MARROW, SIGNAL = 2.1; EXPRESSED IN PLACENTA, SIGNAL = 1.7; EXPRESSED IN BRAIN, SIGNAL = 2.3; EXPRESSED IN HELA, SIGNAL = 2.5; EXPRESSED IN HEART, SIGNAL = 2.1; SWISSPROT HIT: P35499, EVALUE 1.00e-58
WQLRVFKLAKSWPTLNMLIKIIGNSVGALGNLTLVLAIIVFIFAVVGMQLFGKSYKECVCKIALDCNLPRWHMHDFFHSFLIVFRILCGEWIETMWDCMEVAGQAMCLTVFLMVMVIGNLVVSEA

SEQ ID NO: 28395 - protein, 87 aa, Homo sapiens
  MAP TO CHRX.1; EXPRESSED IN HELA, SIGNAL =   1; EXPRESSED IN BRAIN, SIGNAL = 0.84; EXPRESSED IN FETAL LIVER, SIGNAL = 0.67; EXPRESSED IN LUNG, SIGNAL = 0.94; EXPRESSED IN PLACENTA, SIGNAL = 1.3; SWISSPROT HIT: P03290, EVALUE 4.20e-01
PAPHRRHPTWRRPCASSGSCCTAARSCLPSSTRWRPRAASPCATAAPWPRSPWWPCRAGSTMPRGCSSNCWPTSSRRTSRARTTPSC

SEQ ID NO: 28396 - protein, 60 aa, Homo sapiens
  MAP TO CHR2.1; EXPRESSED IN HELA, SIGNAL = 2.8; EXPRESSED IN BRAIN, SIGNAL = 2.6; EXPRESSED IN HEART, SIGNAL = 1.8; EXPRESSED IN ADULT LIVER, SIGNAL = 2.3; EXPRESSED IN BONE MARROW, SIGNAL = 2.7; EXPRESSED IN LUNG, SIGNAL = 1.9; EXPRESSED IN PLACENTA, SIGNAL = 2.1; EXPRESSED IN FETAL LIVER, SIGNAL = 2.7
SPFIVVCLKCDLQERLLCPSLLAGTADGSLRMDDPKGDFITLYQMASQSSASHYKLQVIK

SEQ ID NO: 28397 - protein, 49 aa, Homo sapiens
  MAP TO CHR3.1; EXPRESSED IN PLACENTA, SIGNAL = 4.5; EXPRESSED IN FETAL LIVER, SIGNAL = 4.1; EXPRESSED IN LUNG, SIGNAL =   3; EXPRESSED IN BRAIN, SIGNAL = 5.1; EXPRESSED IN HEART, SIGNAL = 3.5; EXPRESSED IN ADULT LIVER, SIGNAL = 6.1; EXPRESSED IN BONE MARROW, SIGNAL = 5.9; SWISSPROT HIT: P32049, EVALUE 2.80e+00
SLIPGRSPQLTVGVCVDGFHEEGISSIQALFHTGPGVLRSSGVQACEKR

SEQ ID NO: 28398 - protein, 29 aa, Homo sapiens
  MAP TO CHR5.1; EXPRESSED IN PLACENTA, SIGNAL = 1.2; EXPRESSED IN FETAL LIVER, SIGNAL =   3; EXPRESSED IN BRAIN, SIGNAL = 0.87; EXPRESSED IN LUNG, SIGNAL =   1; EXPRESSED IN ADULT LIVER, SIGNAL = 2.2; EXPRESSED IN HEART, SIGNAL = 1.6
FCRSLRRGRRWKLMGERHYSSSVGLVGIA

SEQ ID NO: 28399 - protein, 101 aa, Homo sapiens
  MAP TO CHR19.1; EXPRESSED IN PLACENTA, SIGNAL = 3.9; EXPRESSED IN LUNG, SIGNAL = 4.1; EXPRESSED IN HELA, SIGNAL = 6.4; EXPRESSED IN BRAIN, SIGNAL = 3.4; EXPRESSED IN HEART, SIGNAL = 2.5; EXPRESSED IN ADULT LIVER, SIGNAL = 2.3; SWISSPROT HIT: Q00839, EVALUE 2.00e-09
FLLANFTLPDVGDFLDEVLFIELQREEADKLVRQYNEEGRKAGPPPEKRFDNRGGGGFRGRGGGGGFQRYENRGPPGGNRGGFQNRGGGSGGGGNYRGGET

SEQ ID NO: 28400 - protein, 98 aa, Homo sapiens
  MAP TO CHR5.1; EXPRESSED IN PLACENTA, SIGNAL = 1.2; EXPRESSED IN FETAL LIVER, SIGNAL = 0.86; EXPRESSED IN LUNG, SIGNAL = 1.5; EXPRESSED IN HELA, SIGNAL = 1.1; EXPRESSED IN BRAIN, SIGNAL = 1.1; EXPRESSED IN HEART, SIGNAL = 1.7; SWISSPROT HIT: Q9Y5E5, EVALUE 2.60e-02
YLVVAVATVSCVFLAFVLVLLALRLRRWHKSRLLQASEGGLANVPTSHFVGMDGVQAFLQTYSHEVSLTADSRKSHLIFPQPNYVDMLISQESCEKND

SEQ ID NO: 28401 - protein, 68 aa, Homo sapiens
  MAP TO CHR14.1; EXPRESSED IN LUNG, SIGNAL = 1.3; EXPRESSED IN BRAIN, SIGNAL = 0.93; EXPRESSED IN HEART, SIGNAL = 1.1; SWISSPROT HIT: P43138, EVALUE 2.00e-34
QWVKEEAPDILCLQETKCSENKLPAELQELPGLSHQYWSAPSDKEGYSGVGLLSRQCPLKVSYGIGET

SEQ ID NO: 28402 - protein, 26 aa, Homo sapiens
  MAP TO CHRX.1; EXPRESSED IN FETAL LIVER, SIGNAL = 6.1; EXPRESSED IN LUNG, SIGNAL = 8.7; EXPRESSED IN HELA, SIGNAL = 3.9; EXPRESSED IN BRAIN, SIGNAL = 6.3; EXPRESSED IN HEART, SIGNAL = 7.8; EXPRESSED IN ADULT LIVER, SIGNAL = 4.1; EXPRESSED IN BONE MARROW, SIGNAL = 8.4; EXPRESSED IN PLACENTA, SIGNAL = 4.3
SLGMQMSTPRHIINKLMNVSTCMKIN

SEQ ID NO: 28403 - protein, 55 aa, Homo sapiens
  MAP TO CHR4.1; EXPRESSED IN PLACENTA, SIGNAL =  26; EXPRESSED IN FETAL LIVER, SIGNAL =  35; EXPRESSED IN LUNG, SIGNAL =  36; EXPRESSED IN BRAIN, SIGNAL =  33; EXPRESSED IN HELA, SIGNAL =  16; EXPRESSED IN HEART, SIGNAL =  35; EXPRESSED IN BONE MARROW, SIGNAL =  40; SWISSPROT HIT: P35611, EVALUE 4.00e-24
YFQVKINLQGDIVDRGSTNLGVNQAGFTLHSAIYAARPDVKCVVHIHTPAGAAVS

SEQ ID NO: 28404 - protein, 54 aa, Homo sapiens
  MAP TO CHR5.1; EXPRESSED IN HEART, SIGNAL =  22; EXPRESSED IN ADULT LIVER, SIGNAL =  23; EXPRESSED IN PLACENTA, SIGNAL =  24; EXPRESSED IN FETAL LIVER, SIGNAL =  30; EXPRESSED IN LUNG, SIGNAL =  21; EXPRESSED IN BRAIN, SIGNAL =  31; SWISSPROT HIT: P10863, EVALUE 4.70e+00
VPAASSNASSRACVSGSTVRKSAPSAVLDKNISDVVLSTGLSRSSWSKINDSTC

SEQ ID NO: 28405 - protein, 73 aa, Homo sapiens
  MAP TO CHR19.1; EXPRESSED IN BRAIN, SIGNAL = 1.1; EXPRESSED IN LUNG, SIGNAL = 2.1; EXPRESSED IN BONE MARROW, SIGNAL = 1.6; EXPRESSED IN HEART, SIGNAL = 1.6; EXPRESSED IN ADULT LIVER, SIGNAL = 3.2; EXPRESSED IN PLACENTA, SIGNAL = 2.7
SSSSVWLRPLMAGEPGWTWDRSSKPGLREGETVSGLVSHEPVLCSEVAMVVVVLGGMGSSSSSSRKDASGISG

SEQ ID NO: 28406 - protein, 47 aa, Homo sapiens
  MAP TO CHR20.1; EXPRESSED IN FETAL LIVER, SIGNAL = 5.5; EXPRESSED IN HELA, SIGNAL =   4; EXPRESSED IN LUNG, SIGNAL = 4.2; EXPRESSED IN BRAIN, SIGNAL = 5.9; EXPRESSED IN HEART, SIGNAL = 4.3; EXPRESSED IN BONE MARROW, SIGNAL = 7.5; EXPRESSED IN PLACENTA, SIGNAL = 6.3; SWISSPROT HIT: P08579, EVALUE 9.00e-20
ELKRSLYALFSQFGHVVDIVALKTMKMRGQAFVIFKELGSSTNALRQ

SEQ ID NO: 28407 - protein, 108 aa, Homo sapiens
  MAP TO CHR17.1; EXPRESSED IN HEART, SIGNAL = 2.1; EXPRESSED IN BONE MARROW, SIGNAL = 2.7; EXPRESSED IN PLACENTA, SIGNAL =   3; EXPRESSED IN FETAL LIVER, SIGNAL = 3.7; EXPRESSED IN BRAIN, SIGNAL = 2.7; EXPRESSED IN LUNG, SIGNAL = 1.7; SWISSPROT HIT: Q92197, EVALUE 7.40e+00
RWNSQRPESMRRHSTSYSMRLPASPTTPCWRPQAVAAARLPPVKMRRPLNCGTVSAASTSSATALTMTGSSATSLPIATDQTLRESGHGRPYLPSCGTRPIGHPMLLL

SEQ ID NO: 28408 - protein, 34 aa, Homo sapiens
  MAP TO CHR2.1; EXPRESSED IN HELA, SIGNAL = 0.74; EXPRESSED IN BRAIN, SIGNAL = 0.71; EXPRESSED IN HEART, SIGNAL = 0.49; EXPRESSED IN BONE MARROW, SIGNAL = 0.65; EXPRESSED IN FETAL LIVER, SIGNAL = 0.75; EXPRESSED IN LUNG, SIGNAL = 0.57
SRESKSKISVQPHSSSSAMQIREHYCVRMWQRED

SEQ ID NO: 28409 - protein, 51 aa, Homo sapiens
  MAP TO CHR19.1; EXPRESSED IN ADULT LIVER, SIGNAL = 1.2; EXPRESSED IN FETAL LIVER, SIGNAL = 1.4; EXPRESSED IN BONE MARROW, SIGNAL = 1.5; EXPRESSED IN PLACENTA, SIGNAL = 1.5; EXPRESSED IN LUNG, SIGNAL = 1.1; EXPRESSED IN BRAIN, SIGNAL = 1.4; EXPRESSED IN HELA, SIGNAL = 0.91; EXPRESSED IN HEART, SIGNAL = 1.4
PGACEVNRQNRAGYSALMLAALTSVRQEEEDMAVVQRLFCMGDVNAKASQV

SEQ ID NO: 28410 - protein, 101 aa, Homo sapiens
  MAP TO CHR2.1; EXPRESSED IN LUNG, SIGNAL = 0.66; EXPRESSED IN BRAIN, SIGNAL = 0.89; EXPRESSED IN HEART, SIGNAL =  14; EXPRESSED IN BONE MARROW, SIGNAL =   2; SWISSPROT HIT: P11799, EVALUE 4.00e-10
FHKGIPPKIEALPSDISIDEGKVLTVACAFTGEPTPEVTWSCGGRKIHSQEQGRFHIENTDDLTTLIIMDVQKQDGGLYTLSLGNEFGSDSATVNIHIRSI

SEQ ID NO: 28411 - protein, 82 aa, Homo sapiens
  MAP TO CHR18.1; EXPRESSED IN BRAIN, SIGNAL = 0.9; EXPRESSED IN LUNG, SIGNAL = 0.7; EXPRESSED IN HEART, SIGNAL = 0.85; EXPRESSED IN BONE MARROW, SIGNAL = 0.93; EXPRESSED IN ADULT LIVER, SIGNAL = 1.1; EXPRESSED IN FETAL LIVER, SIGNAL = 0.7; SWISSPROT HIT: P53841, EVALUE 2.60e+00
VLYQLTRPLVTLVFLTSGFSGNCIGCGERGFRYFTEFSNHINLKLTTQPKKQKHLKYYLVRSSQGVLSKGPLICWKGSQFPG

SEQ ID NO: 28412 - protein, 59 aa, Homo sapiens
  MAP TO CHR19.1; EXPRESSED IN PLACENTA, SIGNAL = 3.9; EXPRESSED IN LUNG, SIGNAL = 1.9; EXPRESSED IN BRAIN, SIGNAL = 3.4; EXPRESSED IN FETAL LIVER, SIGNAL = 3.1; EXPRESSED IN HELA, SIGNAL =   4; EXPRESSED IN HEART, SIGNAL = 2.4; EXPRESSED IN BONE MARROW, SIGNAL = 3.6; EXPRESSED IN ADULT LIVER, SIGNAL = 3.4
LTREGRQRDSRFLVQQAAHHWWWHGEAWRQPVSRDPRARRHRSPGQGRGFRGMAEQQRP

SEQ ID NO: 28413 - protein, 62 aa, Homo sapiens
  MAP TO CHR12.1; EXPRESSED IN LUNG, SIGNAL = 1.2; EXPRESSED IN BRAIN, SIGNAL = 2.6; EXPRESSED IN PLACENTA, SIGNAL = 1.9; EXPRESSED IN FETAL LIVER, SIGNAL = 2.4; EXPRESSED IN HELA, SIGNAL = 2.2; EXPRESSED IN HEART, SIGNAL = 0.98; EXPRESSED IN BONE MARROW, SIGNAL = 2.8; EXPRESSED IN ADULT LIVER, SIGNAL = 1.8; SWISSPROT HIT: P17403, EVALUE 5.00e-28
LKAALYAAPYKSDFLKALSKGQNVTEEECLEKIRLFLVNYTATIDVIYEMYTQMNAELNYKV

SEQ ID NO: 28414 - protein, 90 aa, Homo sapiens
  MAP TO CHR7.1; EXPRESSED IN BONE MARROW, SIGNAL = 0.63; EXPRESSED IN FETAL LIVER, SIGNAL = 0.74; EXPRESSED IN LUNG, SIGNAL = 0.59; EXPRESSED IN BRAIN, SIGNAL = 0.64; SWISSPROT HIT: Q13228, EVALUE 1.10e+00
FSYRFVNILLPPDAKEIATRFRWWQPRHDGLDQNDWAIDNVLISGSADQRTVMLDTFSSAPVPQHERSPADAGPVGRIAFDMFMEDKTSG

SEQ ID NO: 28415 - protein, 52 aa, Homo sapiens
  MAP TO CHR5.1; EXPRESSED IN FETAL LIVER, SIGNAL =   1; EXPRESSED IN HELA, SIGNAL = 0.79; EXPRESSED IN BRAIN, SIGNAL = 0.69; EXPRESSED IN HEART, SIGNAL = 0.58; EXPRESSED IN BONE MARROW, SIGNAL = 0.79; SWISSPROT HIT: O51316, EVALUE 4.80e+00
HLEHSSDKPVKVYRIQLEQFSGKGIVLLDNIRAKYCVSCFNRKEDSGSYNHL

SEQ ID NO: 28416 - protein, 65 aa, Homo sapiens
  MAP TO CHR12.1; EXPRESSED IN BONE MARROW, SIGNAL = 1.2; EXPRESSED IN ADULT LIVER, SIGNAL = 2.1; EXPRESSED IN FETAL LIVER, SIGNAL = 1.1; EXPRESSED IN LUNG, SIGNAL = 3.9; EXPRESSED IN PLACENTA, SIGNAL = 5.4; EXPRESSED IN BRAIN, SIGNAL = 1.2; EXPRESSED IN HELA, SIGNAL = 1.5; EXPRESSED IN HEART, SIGNAL = 3.2; SWISSPROT HIT: P26504, EVALUE 7.80e+00
ASLAALPGGAFALHGIENLMVHNRAIGAVQGHLHGLRPCRRAAGALVLHIVDVNGVHGFAGTFAL

SEQ ID NO: 28417 - protein, 100 aa, Homo sapiens
  MAP TO CHR6.1; EXPRESSED IN BRAIN, SIGNAL = 0.92; EXPRESSED IN HEART, SIGNAL = 1.6; EXPRESSED IN LUNG, SIGNAL = 2.5; EXPRESSED IN FETAL LIVER, SIGNAL = 0.9; SWISSPROT HIT: P08564, EVALUE 7.80e+00
PGLRVRAVPWMLSALWGPRSPYSVRLYRVPERRSRSTAECRVPGTISSRCSSGRGCGSRVLGDGTPKRSRKESKAPGGASQLSLSELVVTSVTDSWDRRG

SEQ ID NO: 28418 - protein, 44 aa, Homo sapiens
  MAP TO CHR7.1; EXPRESSED IN LUNG, SIGNAL = 0.63; EXPRESSED IN BRAIN, SIGNAL = 0.44; EXPRESSED IN HEART, SIGNAL = 0.83
ICILLQCNTFPHREKQSTLTNRGFNDALPRSTCIASSKKAQDRL

SEQ ID NO: 28419 - protein, 47 aa, Homo sapiens
  MAP TO CHR5.1; EXPRESSED IN LUNG, SIGNAL = 1.3; EXPRESSED IN HELA, SIGNAL = 1.6; EXPRESSED IN BRAIN, SIGNAL = 1.9; EXPRESSED IN HEART, SIGNAL = 1.8; EXPRESSED IN ADULT LIVER, SIGNAL = 2.8; EXPRESSED IN FETAL LIVER, SIGNAL = 1.4; SWISSPROT HIT: O27179, EVALUE 8.30e+00
FCCLSLKRLIYTFVQKIPEPFPLNAIKLLFNEAFGRPPSHLKSEVSR

SEQ ID NO: 28420 - protein, 59 aa, Homo sapiens
  MAP TO CHR5.1; EXPRESSED IN FETAL LIVER, SIGNAL = 0.76; EXPRESSED IN LUNG, SIGNAL = 0.58; EXPRESSED IN BRAIN, SIGNAL = 0.75; EXPRESSED IN HEART, SIGNAL = 0.64; EXPRESSED IN ADULT LIVER, SIGNAL = 0.69; EXPRESSED IN BONE MARROW, SIGNAL = 0.81; SWISSPROT HIT: P21849, EVALUE 2.50e-01
CLSSREVETTEQSDSRFLRTTDPKSAAVDSNMGETTTSSSDSKPAGGERIPCDMTAGAA

SEQ ID NO: 28421 - protein, 24 aa, Homo sapiens
  MAP TO CHR1.1; EXPRESSED IN BRAIN, SIGNAL = 1.7; EXPRESSED IN LUNG, SIGNAL = 1.5; EXPRESSED IN HEART, SIGNAL = 1.7; EXPRESSED IN ADULT LIVER, SIGNAL = 1.7; EXPRESSED IN BONE MARROW, SIGNAL = 1.7; EXPRESSED IN PLACENTA, SIGNAL = 1.3; EXPRESSED IN FETAL LIVER, SIGNAL = 1.6
HHGNGSLNHHYGDTVLQIMTRGIV

SEQ ID NO: 28422 - protein, 64 aa, Homo sapiens
  MAP TO CHR1.1; EXPRESSED IN LUNG, SIGNAL = 2.5; EXPRESSED IN FETAL LIVER, SIGNAL = 1.7; EXPRESSED IN BRAIN, SIGNAL = 2.5; EXPRESSED IN HEART, SIGNAL = 2.3; EXPRESSED IN ADULT LIVER, SIGNAL = 1.9
ALVRLSCGSLYSVYLSSTLSMSVLAYWNSLLEWLKMMSAISQSHSTLSSYAFFIRPNFRLVKVT

SEQ ID NO: 28423 - protein, 81 aa, Homo sapiens
  MAP TO AC027045.2; EXPRESSED IN BONE MARROW, SIGNAL = 0.5; EXPRESSED IN ADULT LIVER, SIGNAL = 0.46; EXPRESSED IN FETAL LIVER, SIGNAL = 0.55; EXPRESSED IN BRAIN, SIGNAL = 0.44; EXPRESSED IN LUNG, SIGNAL = 0.8; EXPRESSED IN HEART, SIGNAL = 0.58; SWISSPROT HIT: Q09851, EVALUE 8.00e-04
TLSLVQQTFTPKLVLLDLSDISCVPDVAKEVLDCYGCVDILINNASVKVKGPAHKISLELDKKIMDANYFGPITLTKGLVS

SEQ ID NO: 28424 - protein, 82 aa, Homo sapiens
  MAP TO CHR5.1; EXPRESSED IN BONE MARROW, SIGNAL = 0.51; EXPRESSED IN FETAL LIVER, SIGNAL = 0.41; EXPRESSED IN LUNG, SIGNAL = 0.69; EXPRESSED IN BRAIN, SIGNAL = 0.63; EXPRESSED IN HEART, SIGNAL = 0.78
GLKAMRSVLGGPSPEHTLGLLCCEYDQLPTALEHTSVGLPGAHAPSVGSAEHRSAVYSSSVSTKRLDTAQMAMIRYTLTSTS

SEQ ID NO: 28425 - protein, 109 aa, Homo sapiens
  MAP TO CHR17.1; EXPRESSED IN BONE MARROW, SIGNAL = 1.3; EXPRESSED IN ADULT LIVER, SIGNAL =   1; EXPRESSED IN FETAL LIVER, SIGNAL = 1.3; EXPRESSED IN LUNG, SIGNAL = 1.4; EXPRESSED IN BRAIN, SIGNAL = 1.1; EXPRESSED IN HEART, SIGNAL = 1.3; SWISSPROT HIT: O88843, EVALUE 3.20e+00
HRDGEQPPRHLYHRGIAEIAGEERDVDGGRHEDDLEVRPRGQQALEDAQEEIVVEMPLMDFIHNQDLILGQAGFPLDLSQEQPHCQEYNLGGRRTCALKADLVADLGWE

SEQ ID NO: 28426 - protein, 50 aa, Homo sapiens
  MAP TO CHR19.1; EXPRESSED IN HEART, SIGNAL = 2.4; EXPRESSED IN BONE MARROW, SIGNAL = 1.4; EXPRESSED IN ADULT LIVER, SIGNAL = 0.67; EXPRESSED IN LUNG, SIGNAL = 2.6; EXPRESSED IN BRAIN, SIGNAL = 1.5; EXPRESSED IN FETAL LIVER, SIGNAL = 1.9; EXPRESSED IN PLACENTA, SIGNAL = 2.2; EXPRESSED IN HELA, SIGNAL = 2.2; SWISSPROT HIT: Q99961, EVALUE 5.00e-23
ASRAKLTMLNTVSKIRGQVKNPGYPQSEGLLGECMIRHGKELGGESNFGE

SEQ ID NO: 28427 - protein, 29 aa, Homo sapiens
  MAP TO CHR20.1; EXPRESSED IN BRAIN, SIGNAL = 1.1; EXPRESSED IN HEART, SIGNAL = 0.95; EXPRESSED IN BONE MARROW, SIGNAL =   1; EXPRESSED IN ADULT LIVER, SIGNAL = 1.2; EXPRESSED IN FETAL LIVER, SIGNAL = 1.1; EXPRESSED IN LUNG, SIGNAL = 1.7
GDGKVRKAALTSEDRGRGPGPWAQRCLIA

SEQ ID NO: 28428 - protein, 27 aa, Homo sapiens
  MAP TO CHR11.1; EXPRESSED IN ADULT LIVER, SIGNAL = 0.63; EXPRESSED IN BRAIN, SIGNAL = 1.2; EXPRESSED IN HEART, SIGNAL = 0.53; EXPRESSED IN BONE MARROW, SIGNAL = 1.4
IALQAYQSLSSIFNMINVYCICCGVVC

SEQ ID NO: 28429 - protein, 18 aa, Homo sapiens
  MAP TO CHR2.1; EXPRESSED IN LUNG, SIGNAL = 2.5; EXPRESSED IN BRAIN, SIGNAL = 2.1; EXPRESSED IN BONE MARROW, SIGNAL = 1.6; EXPRESSED IN HEART, SIGNAL = 2.3; EXPRESSED IN ADULT LIVER, SIGNAL = 4.6; EXPRESSED IN PLACENTA, SIGNAL = 1.8; EXPRESSED IN FETAL LIVER, SIGNAL = 1.7
VKFGIFVHQVRDKHVQNA

SEQ ID NO: 28430 - protein, 31 aa, Homo sapiens
  MAP TO AC002345.1; EXPRESSED IN LUNG, SIGNAL = 3.3; EXPRESSED IN BRAIN, SIGNAL = 1.9; EXPRESSED IN HEART, SIGNAL =   2; EXPRESSED IN ADULT LIVER, SIGNAL = 1.6; EXPRESSED IN BONE MARROW, SIGNAL = 2.2; EXPRESSED IN PLACENTA, SIGNAL = 2.7; SWISSPROT HIT: Q10368, EVALUE 6.60e+00
PAGSPQECLSSTSEPNWGPWECRWRLRWRML

SEQ ID NO: 28431 - protein, 80 aa, Homo sapiens
  MAP TO CHR5.1; EXPRESSED IN ADULT LIVER, SIGNAL = 0.79; EXPRESSED IN BRAIN, SIGNAL = 0.68; EXPRESSED IN LUNG, SIGNAL = 0.67; EXPRESSED IN BONE MARROW, SIGNAL = 0.71; EXPRESSED IN HEART, SIGNAL = 0.79; SWISSPROT HIT: Q13591, EVALUE 9.00e-42
VSLAGLSGDFLRAGRYSAHTVNGAWSAWTSWSQCSRDCSRGIRNRKRVCNNPEPKYGGMPCLGPSLEYQECNILPCPGKW

SEQ ID NO: 28432 - protein, 50 aa, Homo sapiens
  MAP TO CHR12.1; EXPRESSED IN BONE MARROW, SIGNAL = 1.2; EXPRESSED IN FETAL LIVER, SIGNAL = 1.2; EXPRESSED IN HELA, SIGNAL =   2; EXPRESSED IN BRAIN, SIGNAL = 1.2; EXPRESSED IN LUNG, SIGNAL = 0.85; EXPRESSED IN HEART, SIGNAL = 0.98; SWISSPROT HIT: O44248, EVALUE 4.30e-01
LLTCSLCSGAHVCHSARAQRRPRVTAHTPWGFSTPELKATRRPQRGRTRA

SEQ ID NO: 28433 - protein, 42 aa, Homo sapiens
  MAP TO CHR14.1; EXPRESSED IN HEART, SIGNAL = 0.87; EXPRESSED IN ADULT LIVER, SIGNAL =   2; EXPRESSED IN PLACENTA, SIGNAL = 3.5; EXPRESSED IN HELA, SIGNAL = 1.7; EXPRESSED IN BRAIN, SIGNAL = 1.2
LCRLREGPIHHLQRQFQEHAVSANEQPESRGHGCVLLCERHS

SEQ ID NO: 28434 - protein, 55 aa, Homo sapiens
  MAP TO CHR1.1; EXPRESSED IN HELA, SIGNAL = 2.7; EXPRESSED IN BRAIN, SIGNAL = 1.8; EXPRESSED IN FETAL LIVER, SIGNAL = 1.9; EXPRESSED IN LUNG, SIGNAL = 2.5; EXPRESSED IN HEART, SIGNAL = 2.2; EXPRESSED IN BONE MARROW, SIGNAL = 1.8; EXPRESSED IN ADULT LIVER, SIGNAL = 1.9; EXPRESSED IN PLACENTA, SIGNAL = 1.6; SWISSPROT HIT: Q13751, EVALUE 6.00e-30
SACECDPDGAVPGAPCDPVTGQCVCKEHVQGERCDLCKPGFTGLTYANPQGCHRE

SEQ ID NO: 28435 - protein, 88 aa, Homo sapiens
  MAP TO CHR1.1; EXPRESSED IN PLACENTA, SIGNAL = 1.7; EXPRESSED IN FETAL LIVER, SIGNAL = 1.3; EXPRESSED IN LUNG, SIGNAL = 1.9; EXPRESSED IN BRAIN, SIGNAL = 1.6; EXPRESSED IN HEART, SIGNAL = 1.6; EXPRESSED IN BONE MARROW, SIGNAL = 1.8; SWISSPROT HIT: P51010, EVALUE 6.90e+00
HCGPPVKVGAYGGQVINGVLAHVQLTVGPVGPQIHPVVISPVPECIIGIDILSSWQNPHIGSLTGRVRATMVRKIKWKPLKLPLPRKM

SEQ ID NO: 28436 - protein, 43 aa, Homo sapiens
  MAP TO CHR2.1; EXPRESSED IN LUNG, SIGNAL = 0.69; EXPRESSED IN HELA, SIGNAL =   1; EXPRESSED IN BRAIN, SIGNAL = 1.1; EXPRESSED IN HEART, SIGNAL = 1.6; EXPRESSED IN ADULT LIVER, SIGNAL = 1.2; EXPRESSED IN BONE MARROW, SIGNAL = 1.3; EXPRESSED IN FETAL LIVER, SIGNAL = 0.93; SWISSPROT HIT: P58008, EVALUE 1.30e+00
LASLYTFSWWNFRLFQNSFTNFFFWDNFLGYFGCFKDIYLSYF

SEQ ID NO: 28437 - protein, 71 aa, Homo sapiens
  MAP TO CHR3.1; EXPRESSED IN HELA, SIGNAL = 1.6; EXPRESSED IN LUNG, SIGNAL = 1.6; EXPRESSED IN BONE MARROW, SIGNAL = 1.9; EXPRESSED IN ADULT LIVER, SIGNAL = 2.4; EXPRESSED IN PLACENTA, SIGNAL = 2.5; EXPRESSED IN FETAL LIVER, SIGNAL = 1.6; EXPRESSED IN BRAIN, SIGNAL = 1.7; SWISSPROT HIT: P70211, EVALUE 2.30e+00
HLNPWIISLVPRVALNPEFWRSLLPSTSCPQLGFEGTKRRNWTLRSVPSKRLALWKSAHFGCGVGGASPGG

SEQ ID NO: 28438 - protein, 74 aa, Homo sapiens
  MAP TO CHR12.1; EXPRESSED IN FETAL LIVER, SIGNAL = 3.1; EXPRESSED IN BRAIN, SIGNAL = 1.3; EXPRESSED IN LUNG, SIGNAL = 1.3; EXPRESSED IN HEART, SIGNAL = 1.3; EXPRESSED IN BONE MARROW, SIGNAL =   2; SWISSPROT HIT: Q9USI5, EVALUE 3.10e-01
VTEDKYEILQSVDDAAIVIKNTKEPPLSLTIHLTSPVVREEMEKVLAGGREAETRRQDFENVVFPHYSNVLFSF

SEQ ID NO: 28439 - protein, 59 aa, Homo sapiens
  MAP TO CHR17.1; EXPRESSED IN FETAL LIVER, SIGNAL = 1.4; EXPRESSED IN LUNG, SIGNAL =   3; EXPRESSED IN HELA, SIGNAL = 0.76; EXPRESSED IN BRAIN, SIGNAL = 1.5; EXPRESSED IN HEART, SIGNAL = 2.4; EXPRESSED IN BONE MARROW, SIGNAL = 1.7; SWISSPROT HIT: Q11011, EVALUE 6.00e-32
EWWTHLWLNEGFASWIEYLCVDHCFPEYDIWTQFVSADYTRAQELDALDNSHPIEVSHT

SEQ ID NO: 28440 - protein, 35 aa, Homo sapiens
  MAP TO CHR17.1; EXPRESSED IN LUNG, SIGNAL = 0.63; EXPRESSED IN BRAIN, SIGNAL = 0.44; EXPRESSED IN HEART, SIGNAL = 0.67; EXPRESSED IN BONE MARROW, SIGNAL = 0.43; EXPRESSED IN FETAL LIVER, SIGNAL = 0.7
LKLETGEEVVRKHPSVSNKFMFPGTNYVPQLFTSN

SEQ ID NO: 28441 - protein, 54 aa, Homo sapiens
  MAP TO CHR3.1; EXPRESSED IN BONE MARROW, SIGNAL = 1.3; EXPRESSED IN ADULT LIVER, SIGNAL = 1.4; EXPRESSED IN PLACENTA, SIGNAL = 1.5; EXPRESSED IN FETAL LIVER, SIGNAL = 1.1; EXPRESSED IN LUNG, SIGNAL = 1.7; EXPRESSED IN HEART, SIGNAL = 1.6; EXPRESSED IN BRAIN, SIGNAL = 1.4; EXPRESSED IN HELA, SIGNAL = 1.2; SWISSPROT HIT: P51178, EVALUE 9.00e-25
LGFNPWWDTEFAFEVVVPDLALIRFLVEDYDASSKNDFIGQSTIPLNSLKQGEC

SEQ ID NO: 28442 - protein, 65 aa, Homo sapiens
  MAP TO CHR7.1; EXPRESSED IN HELA, SIGNAL = 0.7; EXPRESSED IN BRAIN, SIGNAL = 0.44; EXPRESSED IN BONE MARROW, SIGNAL = 0.45; EXPRESSED IN HEART, SIGNAL = 0.73
LLFTDHEDPIEWLGLQTFPVLQSMPLCPTLCSVWLVPRQMCAIGGMPERDMDSTDLSACNLQGRN

SEQ ID NO: 28443 - protein, 67 aa, Homo sapiens
  MAP TO CHR12.1; EXPRESSED IN ADULT LIVER, SIGNAL = 0.68; EXPRESSED IN BONE MARROW, SIGNAL = 0.47; EXPRESSED IN FETAL LIVER, SIGNAL = 0.63; EXPRESSED IN HELA, SIGNAL = 0.58; EXPRESSED IN LUNG, SIGNAL = 0.85; EXPRESSED IN BRAIN, SIGNAL = 0.47; EXPRESSED IN HEART, SIGNAL = 0.88; SWISSPROT HIT: P51611, EVALUE 1.00e+00
PHGKGLPRISGFLITEPICLSACCPAFWTLTWESVSTSVSLGTMLGRQDDSCLGAQYAIAPRSSTDP

SEQ ID NO: 28444 - protein, 48 aa, Homo sapiens
  MAP TO CHR19.1; EXPRESSED IN ADULT LIVER, SIGNAL = 1.6; EXPRESSED IN FETAL LIVER, SIGNAL = 1.6; EXPRESSED IN LUNG, SIGNAL = 1.5; EXPRESSED IN HELA, SIGNAL = 1.4; EXPRESSED IN BRAIN, SIGNAL = 1.3; EXPRESSED IN HEART, SIGNAL = 1.5; EXPRESSED IN BONE MARROW, SIGNAL = 1.3
GSKCLGTHKEHIPRICLASDFTSHDQDQAGFRPLGSLFLAALGKQHRV

SEQ ID NO: 28445 - protein, 76 aa, Homo sapiens
  MAP TO CHR17.1; EXPRESSED IN FETAL LIVER, SIGNAL = 1.4; EXPRESSED IN BRAIN, SIGNAL = 0.91; EXPRESSED IN LUNG, SIGNAL =   1; EXPRESSED IN HEART, SIGNAL = 1.6; EXPRESSED IN ADULT LIVER, SIGNAL = 1.9; SWISSPROT HIT: P51452, EVALUE 2.00e-33
TTSPLFLTGRVLVHCREGYSRSPTLVIAYLMMRQKMDVKSALSIVRQNREIGPNDGFLAQLCQLNDRLAKEGKLKP

SEQ ID NO: 28446 - protein, 43 aa, Homo sapiens
  MAP TO CHR7.1; EXPRESSED IN BONE MARROW, SIGNAL = 1.2; EXPRESSED IN HEART, SIGNAL = 0.74; EXPRESSED IN FETAL LIVER, SIGNAL = 1.2; EXPRESSED IN BRAIN, SIGNAL = 1.1; EXPRESSED IN LUNG, SIGNAL = 0.71; SWISSPROT HIT: P75712, EVALUE 3.80e+00
KRLTHFIILLVGWSYMENQDILRIAQDQIWTILGPLYHFRIGK

SEQ ID NO: 28447 - protein, 65 aa, Homo sapiens
  MAP TO CHR16.1; EXPRESSED IN ADULT LIVER, SIGNAL = 4.1; EXPRESSED IN BONE MARROW, SIGNAL = 2.8; EXPRESSED IN PLACENTA, SIGNAL = 3.4; EXPRESSED IN FETAL LIVER, SIGNAL = 2.5; EXPRESSED IN LUNG, SIGNAL = 1.6; EXPRESSED IN BRAIN, SIGNAL = 2.7; EXPRESSED IN HEART, SIGNAL = 2.1
AESSSSTWRDCTAWSGLRRPRTRLGFRSCTHTGCRARTRSVQVACCIRSTTPWRRPALAWASGGR

SEQ ID NO: 28448 - protein, 95 aa, Homo sapiens
  MAP TO CHR1.1; EXPRESSED IN HEART, SIGNAL = 1.3; EXPRESSED IN ADULT LIVER, SIGNAL = 1.1; EXPRESSED IN FETAL LIVER, SIGNAL = 1.1; EXPRESSED IN LUNG, SIGNAL = 1.4; EXPRESSED IN HELA, SIGNAL = 1.2; EXPRESSED IN BRAIN, SIGNAL = 1.1; EXPRESSED IN BONE MARROW, SIGNAL = 0.96; EXPRESSED IN PLACENTA, SIGNAL = 1.5; SWISSPROT HIT: P28825, EVALUE 3.20e+00
LPSGRAVIMGLDDDHLHSHRSTEQVDHLLVGQSGHGYFADLHEAAPLAKASLPGKAKRFHICDNSFKIHMEAKLAQPVPPQGHFHSLAASRHYLR

SEQ ID NO: 28449 - protein, 47 aa, Homo sapiens
  MAP TO CHR7.1; EXPRESSED IN PLACENTA, SIGNAL = 1.8; EXPRESSED IN BRAIN, SIGNAL = 1.8; EXPRESSED IN HELA, SIGNAL =   2; EXPRESSED IN LUNG, SIGNAL = 0.95; EXPRESSED IN HEART, SIGNAL = 1.7; EXPRESSED IN ADULT LIVER, SIGNAL = 2.5; EXPRESSED IN BONE MARROW, SIGNAL = 1.8; SWISSPROT HIT: Q05921, EVALUE 3.00e-02
LMLLSTLSPWSFYFQDGWTPVHAAVDTGNVDSLKLLMYHRIPAHGNS

SEQ ID NO: 28450 - protein, 50 aa, Homo sapiens
  MAP TO CHR7.1; EXPRESSED IN HEART, SIGNAL = 1.1; EXPRESSED IN ADULT LIVER, SIGNAL = 0.89; EXPRESSED IN FETAL LIVER, SIGNAL =   1; EXPRESSED IN BRAIN, SIGNAL = 1.1; EXPRESSED IN HELA, SIGNAL = 1.1; EXPRESSED IN LUNG, SIGNAL =   1; SWISSPROT HIT: P25159, EVALUE 5.70e-01
VTPHTLVDGSVGRAGPGPAQRVPPPICMFRFRLVSKLVPLPALPKVSEEQ

SEQ ID NO: 28451 - protein, 62 aa, Homo sapiens
  MAP TO CHR1.1; EXPRESSED IN ADULT LIVER, SIGNAL =   2; EXPRESSED IN BONE MARROW, SIGNAL =   1; EXPRESSED IN FETAL LIVER, SIGNAL = 1.6; EXPRESSED IN HELA, SIGNAL = 0.85; EXPRESSED IN BRAIN, SIGNAL = 0.95; EXPRESSED IN LUNG, SIGNAL = 0.97; EXPRESSED IN HEART, SIGNAL = 1.3; SWISSPROT HIT: O25455, EVALUE 8.40e-02
QVHQEHLYQEHNFIKAEGHLKQTEKIYTQQIQSEDVELTSMKGEVTSMKKVLEEYKKKFSDI

SEQ ID NO: 28452 - protein, 49 aa, Homo sapiens
  MAP TO CHR5.1; EXPRESSED IN ADULT LIVER, SIGNAL = 1.6; EXPRESSED IN FETAL LIVER, SIGNAL = 0.98; EXPRESSED IN LUNG, SIGNAL = 1.4; EXPRESSED IN HELA, SIGNAL = 0.67; EXPRESSED IN BRAIN, SIGNAL = 1.2; EXPRESSED IN BONE MARROW, SIGNAL = 1.3; EXPRESSED IN HEART, SIGNAL = 1.6; SWISSPROT HIT: P16471, EVALUE 5.00e-13
DQSFLAVCFLDFTMNDTTVWISVAVLSAVICLIIVWAVALKGYRYFTVS

SEQ ID NO: 28453 - protein, 61 aa, Homo sapiens
  MAP TO CHR19.1; EXPRESSED IN HEART, SIGNAL = 1.2; EXPRESSED IN ADULT LIVER, SIGNAL = 0.78; EXPRESSED IN BONE MARROW, SIGNAL = 1.5; EXPRESSED IN FETAL LIVER, SIGNAL = 1.2; EXPRESSED IN PLACENTA, SIGNAL = 1.2; EXPRESSED IN LUNG, SIGNAL = 1.6; EXPRESSED IN BRAIN, SIGNAL = 1.5; EXPRESSED IN HELA, SIGNAL = 0.92
SCLWCPQISENFYFDLNSDSMKGLLRAHGTHPAISTLARSAIFSVTYPSPDIFLVIKVPAG

SEQ ID NO: 28454 - protein, 50 aa, Homo sapiens
  MAP TO CHR6.1; EXPRESSED IN ADULT LIVER, SIGNAL = 3.6; EXPRESSED IN BRAIN, SIGNAL = 3.5; EXPRESSED IN BONE MARROW, SIGNAL = 3.5; EXPRESSED IN FETAL LIVER, SIGNAL = 3.4; EXPRESSED IN PLACENTA, SIGNAL = 3.9; EXPRESSED IN LUNG, SIGNAL = 2.1; EXPRESSED IN HELA, SIGNAL = 3.9; EXPRESSED IN HEART, SIGNAL =   2
LARETRMRQPPENFCVGRFCISGSKPRPARIRRALASAAAAPVARNSSYT

SEQ ID NO: 28455 - protein, 91 aa, Homo sapiens
  MAP TO CHR2.1; EXPRESSED IN BRAIN, SIGNAL = 0.97; EXPRESSED IN HEART, SIGNAL = 3.4; EXPRESSED IN BONE MARROW, SIGNAL =   1; EXPRESSED IN FETAL LIVER, SIGNAL = 0.67; SWISSPROT HIT: Q90688, EVALUE 1.00e-03
FSEIELDFAVPLKDVTVPERRQARFECVLTREANVIWSKGPDIIKSSDKFDIIADGKKHILVINDSQFDDEGVYTAEVEGKKTSARLFVTG

SEQ ID NO: 28456 - protein, 70 aa, Homo sapiens
  MAP TO CHR19.1; EXPRESSED IN LUNG, SIGNAL = 1.7; EXPRESSED IN BRAIN, SIGNAL = 3.7; EXPRESSED IN HEART, SIGNAL = 2.5; EXPRESSED IN ADULT LIVER, SIGNAL = 3.7; EXPRESSED IN BONE MARROW, SIGNAL = 3.6; EXPRESSED IN PLACENTA, SIGNAL =   4; EXPRESSED IN FETAL LIVER, SIGNAL = 4.5; SWISSPROT HIT: Q63413, EVALUE 7.00e-19
MAEQDVENDLLDYDEEEEPQAPQESTPAPPKKDIKGSYVSIHSSGFRDFLLKPELLRAIVDCGFEHPSEG

SEQ ID NO: 28457 - protein, 97 aa, Homo sapiens
  MAP TO CHR1.1; EXPRESSED IN HELA, SIGNAL = 0.75; EXPRESSED IN BRAIN, SIGNAL = 0.64; EXPRESSED IN HEART, SIGNAL = 0.77; EXPRESSED IN BONE MARROW, SIGNAL = 0.43; EXPRESSED IN ADULT LIVER, SIGNAL = 0.48; EXPRESSED IN FETAL LIVER, SIGNAL = 0.55; EXPRESSED IN LUNG, SIGNAL = 0.58; SWISSPROT HIT: Q61792, EVALUE 3.50e-02
RQALTRKEIRFRCVNLVRNRRGDTTKHIKYHKQFITYRSQREEGSTLHRANRKGADQDTHTQPVGRKQEKGHKGPEGQRLYWSPQHYPSRFPVRSSN

SEQ ID NO: 28458 - protein, 80 aa, Homo sapiens
  MAP TO CHR5.1; EXPRESSED IN BONE MARROW, SIGNAL = 4.7; EXPRESSED IN ADULT LIVER, SIGNAL = 4.8; EXPRESSED IN PLACENTA, SIGNAL = 3.7; EXPRESSED IN FETAL LIVER, SIGNAL = 3.4; EXPRESSED IN HEART, SIGNAL = 2.6; EXPRESSED IN LUNG, SIGNAL = 2.3; EXPRESSED IN BRAIN, SIGNAL = 4.5; EXPRESSED IN HELA, SIGNAL = 2.6; SWISSPROT HIT: O74711, EVALUE 3.40e+00
VRNSSPTFLPLTYVSHVHIKFIRETASHLVSGIDHHDVCPPHGGVLLAKVAGVGATGYVVWTFMHECLSAISNVLGMNKK

SEQ ID NO: 28459 - protein, 73 aa, Homo sapiens
  MAP TO CHR20.1; EXPRESSED IN HEART, SIGNAL =   4; EXPRESSED IN ADULT LIVER, SIGNAL = 2.1; EXPRESSED IN FETAL LIVER, SIGNAL = 3.2; EXPRESSED IN LUNG, SIGNAL = 4.4; EXPRESSED IN HELA, SIGNAL = 3.2; EXPRESSED IN BRAIN, SIGNAL = 3.3; EXPRESSED IN BONE MARROW, SIGNAL = 3.4; EXPRESSED IN PLACENTA, SIGNAL = 2.6
ARCRPGRPGLWGQPSWLGGLLCRGGAAGPAADPLPLPVLPSATLHPPRPWLPWNLINQAGRPLSLCRRTRWAG

SEQ ID NO: 28460 - protein, 44 aa, Homo sapiens
  MAP TO CHR7.1; EXPRESSED IN BRAIN, SIGNAL = 0.88; EXPRESSED IN BONE MARROW, SIGNAL = 0.99; EXPRESSED IN FETAL LIVER, SIGNAL = 0.63; EXPRESSED IN LUNG, SIGNAL = 0.58; SWISSPROT HIT: Q04735, EVALUE 4.00e-08
DKLFLCPFCFTASLLKGLKHANIVLLHDIIHTKETLTLVFEYVV

SEQ ID NO: 28461 - protein, 53 aa, Homo sapiens
  MAP TO CHR7.1; EXPRESSED IN BONE MARROW, SIGNAL = 3.8; EXPRESSED IN HEART, SIGNAL = 5.5; EXPRESSED IN ADULT LIVER, SIGNAL = 0.9; EXPRESSED IN FETAL LIVER, SIGNAL = 3.3; EXPRESSED IN LUNG, SIGNAL = 6.3; EXPRESSED IN HELA, SIGNAL = 3.3; EXPRESSED IN BRAIN, SIGNAL = 3.6
LQGYRIHYPLQLLRGIILISLSSLTLIVMSNSVSKNTRWCGEAELLGTDGNSY

SEQ ID NO: 28462 - protein, 58 aa, Homo sapiens
  MAP TO CHR1.1; EXPRESSED IN HELA, SIGNAL = 2.3; EXPRESSED IN BRAIN, SIGNAL = 1.7; EXPRESSED IN BONE MARROW, SIGNAL = 1.7; EXPRESSED IN HEART, SIGNAL = 2.6; EXPRESSED IN PLACENTA, SIGNAL = 2.2; EXPRESSED IN FETAL LIVER, SIGNAL = 2.3; EXPRESSED IN LUNG, SIGNAL = 2.5
VPATVGPAVTHEGWVATQHDVEDHAQAPQVTALVVECGLVREDLHYLRGHVFCRATLW

SEQ ID NO: 28463 - protein, 51 aa, Homo sapiens
  MAP TO CHR1.1; EXPRESSED IN PLACENTA, SIGNAL = 1.4; EXPRESSED IN FETAL LIVER, SIGNAL =   1; EXPRESSED IN LUNG, SIGNAL = 0.82; EXPRESSED IN HELA, SIGNAL = 1.3; EXPRESSED IN BRAIN, SIGNAL = 1.8; EXPRESSED IN HEART, SIGNAL =   1; EXPRESSED IN ADULT LIVER, SIGNAL = 2.2; EXPRESSED IN BONE MARROW, SIGNAL = 1.3; SWISSPROT HIT: Q9UBM4, EVALUE 2.00e-22
SSIDNDAFRLLHALQDLILPENQLEALPVLPSGIEFLDVRLNRLQSSGIQP

SEQ ID NO: 28464 - protein, 74 aa, Homo sapiens
  MAP TO CHR1.1; EXPRESSED IN FETAL LIVER, SIGNAL = 1.7; EXPRESSED IN BRAIN, SIGNAL =   2; EXPRESSED IN HELA, SIGNAL = 2.1; EXPRESSED IN BONE MARROW, SIGNAL = 2.1; EXPRESSED IN ADULT LIVER, SIGNAL = 1.5; EXPRESSED IN LUNG, SIGNAL = 1.9; EXPRESSED IN PLACENTA, SIGNAL =   2; EXPRESSED IN HEART, SIGNAL = 2.2
TLRTQCQPETAADVEQQHQGLTVPSCPSSSTTTTERTVKRPRVGGRPTRTKELAAGKTTCALSNSSQNNPFPRV

SEQ ID NO: 28465 - protein, 85 aa, Homo sapiens
  MAP TO CHR17.1; EXPRESSED IN FETAL LIVER, SIGNAL = 0.33; EXPRESSED IN BRAIN, SIGNAL = 0.46; EXPRESSED IN ADULT LIVER, SIGNAL = 0.55; EXPRESSED IN BONE MARROW, SIGNAL = 0.52; SWISSPROT HIT: Q12809, EVALUE 9.00e-17
QLLRDFPDELRADIAMHLNREILQLPLFGAASRGCLRALSLHIKTSFCAPGEYLLRRGDALQAHYYVCSGSLEVLRDNMVLAILG

SEQ ID NO: 28466 - protein, 78 aa, Homo sapiens
  MAP TO CHR19.1; EXPRESSED IN PLACENTA, SIGNAL = 2.5; EXPRESSED IN FETAL LIVER, SIGNAL =   2; EXPRESSED IN LUNG, SIGNAL = 3.7; EXPRESSED IN HELA, SIGNAL = 2.9; EXPRESSED IN BRAIN, SIGNAL = 1.8; EXPRESSED IN HEART, SIGNAL = 3.5; EXPRESSED IN BONE MARROW, SIGNAL = 1.9; SWISSPROT HIT: P26770, EVALUE 8.90e+00
QSHQQYPPSHATPLPKKAYSKMDSKSYGMYEDYENEQYGEYEGDEEEDMGKEDYDDFTKELNQYRRAKEGSSRGRGEP

SEQ ID NO: 28467 - protein, 45 aa, Homo sapiens
  MAP TO CHR1.1; EXPRESSED IN BONE MARROW, SIGNAL = 0.88; EXPRESSED IN LUNG, SIGNAL = 0.69; EXPRESSED IN HELA, SIGNAL = 0.87; EXPRESSED IN BRAIN, SIGNAL = 0.87; EXPRESSED IN HEART, SIGNAL =   1
VYLLSLYMKLFFPESSLRAEAEQDTSGPPMPSPGSGPQQASFSAP

SEQ ID NO: 28468 - protein, 73 aa, Homo sapiens
  MAP TO CHR8.1; EXPRESSED IN BONE MARROW, SIGNAL = 7.4; EXPRESSED IN ADULT LIVER, SIGNAL = 9.6; EXPRESSED IN PLACENTA, SIGNAL = 5.2; EXPRESSED IN FETAL LIVER, SIGNAL = 6.1; EXPRESSED IN BRAIN, SIGNAL = 6.9; EXPRESSED IN HEART, SIGNAL =   6; EXPRESSED IN LUNG, SIGNAL =   5; EXPRESSED IN HELA, SIGNAL = 4.1; SWISSPROT HIT: Q60803, EVALUE 3.60e+00
RVTQCKYKRIGCPWHGPFHELTVHEAACAHPTKTGSELMEILDGMDQSHRKEMQLYNSIFSLLSFEKIGYTGE

SEQ ID NO: 28469 - protein, 71 aa, Homo sapiens
  MAP TO CHR6.1; EXPRESSED IN FETAL LIVER, SIGNAL = 4.2; EXPRESSED IN HELA, SIGNAL = 3.7; EXPRESSED IN BRAIN, SIGNAL = 3.6; EXPRESSED IN PLACENTA, SIGNAL = 3.1; EXPRESSED IN LUNG, SIGNAL = 4.1; EXPRESSED IN HEART, SIGNAL = 3.5; EXPRESSED IN BONE MARROW, SIGNAL = 3.5; EXPRESSED IN ADULT LIVER, SIGNAL = 3.9; SWISSPROT HIT: Q15776, EVALUE 2.00e-40
QRIHTGEKPYECDECGKTFRRSSHLIGHQRSHTGEKPYKCNECGRAFSQKSGLIEHQRIHTGERPYKCKEC

SEQ ID NO: 28470 - protein, 43 aa, Homo sapiens
  MAP TO CHR14.1; EXPRESSED IN BONE MARROW, SIGNAL = 0.99; EXPRESSED IN ADULT LIVER, SIGNAL = 0.63; EXPRESSED IN FETAL LIVER, SIGNAL = 0.9; EXPRESSED IN BRAIN, SIGNAL = 0.94; EXPRESSED IN HEART, SIGNAL = 0.58; SWISSPROT HIT: P55541, EVALUE 6.40e+00
LVSIQGQYVALACSRHGSRVLDAIWSGAALRARKEIAAELGEY

SEQ ID NO: 28471 - protein, 73 aa, Homo sapiens
  MAP TO CHR1.1; EXPRESSED IN LUNG, SIGNAL = 1.9; EXPRESSED IN BRAIN, SIGNAL = 2.4; EXPRESSED IN HEART, SIGNAL = 1.6; EXPRESSED IN ADULT LIVER, SIGNAL = 2.8; EXPRESSED IN BONE MARROW, SIGNAL = 2.7; EXPRESSED IN PLACENTA, SIGNAL = 1.8; EXPRESSED IN FETAL LIVER, SIGNAL = 2.2; EXPRESSED IN HELA, SIGNAL = 1.6; SWISSPROT HIT: O43909, EVALUE 1.10e-01
TESRQSILKLESELENKDEILRDKFSLMNENRELKVRVAAQNERLDLCQQEIESSRVELRSLEKIISQLPVSM

SEQ ID NO: 28472 - protein, 80 aa, Homo sapiens
  MAP TO CHR7.1; EXPRESSED IN PLACENTA, SIGNAL = 1.6; EXPRESSED IN FETAL LIVER, SIGNAL = 1.4; EXPRESSED IN HELA, SIGNAL = 3.4; EXPRESSED IN LUNG, SIGNAL = 0.96; EXPRESSED IN BRAIN, SIGNAL = 1.7; EXPRESSED IN HEART, SIGNAL = 0.87; EXPRESSED IN ADULT LIVER, SIGNAL = 1.3
VVDFTIVTEPQIRIFLHSNWLHSKQRVNYRQPVKSKAAVGVSIDILKTECIWTSVCNLHSTQTLNRKAIITAKQRPNATH

SEQ ID NO: 28473 - protein, 42 aa, Homo sapiens
  MAP TO CHR17.1; EXPRESSED IN HELA, SIGNAL = 3.7; EXPRESSED IN BRAIN, SIGNAL = 4.2; EXPRESSED IN HEART, SIGNAL = 2.1; EXPRESSED IN ADULT LIVER, SIGNAL = 5.6; EXPRESSED IN PLACENTA, SIGNAL = 3.8; EXPRESSED IN FETAL LIVER, SIGNAL = 3.7; EXPRESSED IN LUNG, SIGNAL =   2
THPQLVSRRLSPTCRDAMPKSAMRMLFFSSKSRFSGFRSLWL

SEQ ID NO: 28474 - protein, 67 aa, Homo sapiens
  MAP TO CHRX.1; EXPRESSED IN FETAL LIVER, SIGNAL = 3.2; EXPRESSED IN HELA, SIGNAL =   4; EXPRESSED IN BRAIN, SIGNAL = 4.2; EXPRESSED IN BONE MARROW, SIGNAL = 3.3; EXPRESSED IN ADULT LIVER, SIGNAL = 5.1; EXPRESSED IN PLACENTA, SIGNAL = 5.3; EXPRESSED IN LUNG, SIGNAL = 5.4; EXPRESSED IN HEART, SIGNAL =   4; SWISSPROT HIT: Q15904, EVALUE 1.00e-20
QNALDLAPSSLVLPAVDWYAVSTLTTYLQEKLGASPLHVDLATLRELKLNASLPALLLIRLPYTARY

SEQ ID NO: 28475 - protein, 70 aa, Homo sapiens
  MAP TO CHR22.1; EXPRESSED IN FETAL LIVER, SIGNAL = 0.92; EXPRESSED IN LUNG, SIGNAL = 0.74; EXPRESSED IN HELA, SIGNAL = 0.91; EXPRESSED IN BRAIN, SIGNAL = 0.79; EXPRESSED IN BONE MARROW, SIGNAL = 0.88; EXPRESSED IN HEART, SIGNAL = 1.1; EXPRESSED IN ADULT LIVER, SIGNAL = 1.3; SWISSPROT HIT: Q9Z0J4, EVALUE 2.60e+00
WQVSGWQGALASASQRPCAKPPRAAEASRQQAKLLPHSMNGSAEATVLALLPGISSSWHQAVPRGQGHLT

SEQ ID NO: 28476 - protein, 54 aa, Homo sapiens
  MAP TO CHR15.1; EXPRESSED IN HELA, SIGNAL = 0.43; EXPRESSED IN BRAIN, SIGNAL = 0.44; EXPRESSED IN LUNG, SIGNAL = 0.69; EXPRESSED IN HEART, SIGNAL = 0.56; EXPRESSED IN BONE MARROW, SIGNAL = 0.39
GISGTIYFIHLLGNSEDWLMFCNHHNKEKGKVHRHTELSNLHRIGGWQVPHYTH

SEQ ID NO: 28477 - protein, 57 aa, Homo sapiens
  MAP TO CHR10.1; EXPRESSED IN LUNG, SIGNAL = 0.65; EXPRESSED IN BRAIN, SIGNAL = 0.8; EXPRESSED IN HEART, SIGNAL = 0.63; EXPRESSED IN ADULT LIVER, SIGNAL =   1; EXPRESSED IN BONE MARROW, SIGNAL = 0.77; SWISSPROT HIT: P13674, EVALUE 2.00e-26
RRQKKLFCRYHDGNRNPKFILAPAKQEDEWDKPRIIRFHDIISDAEIEIVKDLQNQG

SEQ ID NO: 28478 - protein, 46 aa, Homo sapiens
  MAP TO CHR19.1; EXPRESSED IN HELA, SIGNAL = 0.83; EXPRESSED IN BRAIN, SIGNAL = 0.6; EXPRESSED IN HEART, SIGNAL = 0.98; EXPRESSED IN BONE MARROW, SIGNAL = 0.6; SWISSPROT HIT: P54834, EVALUE 2.80e+00
LTSCHSRTPLQARSLLETDCCPPRAGAPSWAGEGPLTPPGATVPAC

SEQ ID NO: 28479 - protein, 113 aa, Homo sapiens
  MAP TO CHR1.1; EXPRESSED IN ADULT LIVER, SIGNAL = 0.9; EXPRESSED IN BONE MARROW, SIGNAL = 0.74; EXPRESSED IN FETAL LIVER, SIGNAL = 0.56; EXPRESSED IN BRAIN, SIGNAL = 0.75; EXPRESSED IN HEART, SIGNAL = 0.63
VSYSRLHSSDWNLCTVFGILLGYPVPYTFHLNQGDDNCLALTPLRVFTARISWLLGQPPILLYSFSVPESLFPGLRDILNTWEKDLRTRFRTQNDFADLSISSEIVTLPAVAL

SEQ ID NO: 28480 - protein, 104 aa, Homo sapiens
  MAP TO CHR17.1; EXPRESSED IN BONE MARROW, SIGNAL =  11; EXPRESSED IN ADULT LIVER, SIGNAL = 6.9; EXPRESSED IN HELA, SIGNAL = 7.2; EXPRESSED IN PLACENTA, SIGNAL = 6.7; EXPRESSED IN LUNG, SIGNAL =  12; EXPRESSED IN FETAL LIVER, SIGNAL = 9.8; EXPRESSED IN BRAIN, SIGNAL = 9.2; EXPRESSED IN HEART, SIGNAL =  11; SWISSPROT HIT: Q38953, EVALUE 4.00e-13
KQMSMPIASSRGDVESVRRCLAHSLFMSTAELQPDGTYATTDTHQPVAIHPSSVLFHCKPACVVYTELLYTNKCYMRDLCVIDAQWLYEAAPEYFRRKLRTARN

SEQ ID NO: 28481 - protein, 84 aa, Homo sapiens
  MAP TO CHR15.1; EXPRESSED IN FETAL LIVER, SIGNAL = 0.75; EXPRESSED IN LUNG, SIGNAL = 3.3; EXPRESSED IN HELA, SIGNAL = 0.69; EXPRESSED IN BRAIN, SIGNAL = 1.9; EXPRESSED IN HEART, SIGNAL =  11; EXPRESSED IN ADULT LIVER, SIGNAL = 1.8; EXPRESSED IN BONE MARROW, SIGNAL = 1.4; SWISSPROT HIT: P35148, EVALUE 1.30e-01
PSLLHGSEDTSGLHDVISASITPFDFGGISLLEDDDGISIDDKFPILRLDDAVELAMGGIILEHVDHVVEVNKGIIDGNNIHFA

SEQ ID NO: 28482 - protein, 164 aa, Homo sapiens
  MAP TO CHR5.1; EXPRESSED IN HEART, SIGNAL = 2.7; EXPRESSED IN PLACENTA, SIGNAL = 3.2; EXPRESSED IN FETAL LIVER, SIGNAL = 3.1; EXPRESSED IN BONE MARROW, SIGNAL = 2.7; EXPRESSED IN ADULT LIVER, SIGNAL = 4.1; EXPRESSED IN LUNG, SIGNAL = 1.9; EXPRESSED IN BRAIN, SIGNAL = 3.2; EXPRESSED IN HELA, SIGNAL = 3.2; SWISSPROT HIT: Q9UN66, EVALUE 7.00e-46
GVLYALCSFDYEQFRDLQMQVTASDSGSPPLSSNVSLRLFVLDQNDNAPEILYPALPTDGSTGVELAPRSAEPGYLVTKVVAVDRDSGQNAWLSYRLFKASEPGLFSVGLHTGEVRTARALLDRDALKQSLVVAVQDHGQPPLSATVTLTVAIADSIPDILADL

SEQ ID NO: 28483 - protein, 51 aa, Homo sapiens
  MAP TO CHR2.1; EXPRESSED IN HELA, SIGNAL = 3.3; EXPRESSED IN BRAIN, SIGNAL = 2.9; EXPRESSED IN PLACENTA, SIGNAL = 3.4; EXPRESSED IN FETAL LIVER, SIGNAL = 2.7; EXPRESSED IN LUNG, SIGNAL = 1.7; EXPRESSED IN HEART, SIGNAL = 1.9; EXPRESSED IN BONE MARROW, SIGNAL = 3.1; EXPRESSED IN ADULT LIVER, SIGNAL = 3.6; SWISSPROT HIT: P53146, EVALUE 4.30e-01
EKQSAAELDLVLQRHQNLQEKLAEEMLGLARSLKTNTLAAQSVIKKDNQVW

SEQ ID NO: 28484 - protein, 64 aa, Homo sapiens
  MAP TO CHR17.1; EXPRESSED IN FETAL LIVER, SIGNAL = 0.69; EXPRESSED IN LUNG, SIGNAL = 0.83; EXPRESSED IN HELA, SIGNAL = 0.43; EXPRESSED IN BRAIN, SIGNAL = 0.54; EXPRESSED IN BONE MARROW, SIGNAL = 0.52; EXPRESSED IN HEART, SIGNAL = 0.87; SWISSPROT HIT: P53193, EVALUE 4.20e-01
EEEEEYETMTIGESVHDDLYDKKVDEEAEAKMLEKYKQERLEEMFPDEVDTPRDVAARIRLVNK

SEQ ID NO: 28485 - protein, 141 aa, Homo sapiens
  MAP TO CHR17.1; EXPRESSED IN HEART, SIGNAL = 1.6; EXPRESSED IN ADULT LIVER, SIGNAL = 1.5; EXPRESSED IN FETAL LIVER, SIGNAL = 1.4; EXPRESSED IN LUNG, SIGNAL = 1.8; EXPRESSED IN BRAIN, SIGNAL = 1.4; EXPRESSED IN HELA, SIGNAL = 2.6; EXPRESSED IN BONE MARROW, SIGNAL = 1.2; EXPRESSED IN PLACENTA, SIGNAL = 1.4; SWISSPROT HIT: Q10839, EVALUE 6.70e-02
GADGECGTSRKYPESRVQSLSKVHPELIHQVDLVGNSEEDDKAVVTVEKHAHPRGLGGGQGFLHVIVPGRDLGVEPLHAPGGAVAAEPAFWALPVHASVADAYPTEVVLLQLHLPVVDPLLVAVQAQHLRAVCEPLGMRPV

SEQ ID NO: 28486 - protein, 53 aa, Homo sapiens
  MAP TO CHR17.1; EXPRESSED IN LUNG, SIGNAL =   1; EXPRESSED IN HELA, SIGNAL = 1.2; EXPRESSED IN BRAIN, SIGNAL = 0.93; EXPRESSED IN ADULT LIVER, SIGNAL = 1.3; EXPRESSED IN BONE MARROW, SIGNAL =   1
QRASPVPQGGRVDLEEASTIHEDFGTHVAHGDQLGPALEPGVVLLQDLGERAG

SEQ ID NO: 28487 - protein, 68 aa, Homo sapiens
  MAP TO CHR11.1; EXPRESSED IN BRAIN, SIGNAL = 0.71; EXPRESSED IN HEART, SIGNAL =   1; EXPRESSED IN BONE MARROW, SIGNAL = 0.66; EXPRESSED IN LUNG, SIGNAL = 1.1; EXPRESSED IN FETAL LIVER, SIGNAL = 0.48; SWISSPROT HIT: gi461671, EVALUE 1.30e-02
QPLPSPPKCTHHGAEEGSVGSSAPLPPWGPAASPGTQTPGSQGELRPVLAAGEAQPVIGMSHPLARQP

SEQ ID NO: 28488 - protein, 66 aa, Homo sapiens
  MAP TO CHR5.1; EXPRESSED IN LUNG, SIGNAL = 1.2; EXPRESSED IN HELA, SIGNAL = 2.5; EXPRESSED IN BRAIN, SIGNAL = 1.6; EXPRESSED IN HEART, SIGNAL = 1.1; EXPRESSED IN ADULT LIVER, SIGNAL = 1.2; EXPRESSED IN BONE MARROW, SIGNAL = 1.8; EXPRESSED IN PLACENTA, SIGNAL = 1.6; EXPRESSED IN FETAL LIVER, SIGNAL = 1.6; SWISSPROT HIT: O14727, EVALUE 6.00e-03
CVSSAPINSLLLVDENVLATGDDTGGIRLWDQRKEGPLMDMRQHEEYIADMALDPAKKLLLTARYN

SEQ ID NO: 28489 - protein, 100 aa, Homo sapiens
  MAP TO CHR14.1; EXPRESSED IN ADULT LIVER, SIGNAL = 0.48; EXPRESSED IN BONE MARROW, SIGNAL = 0.53; EXPRESSED IN FETAL LIVER, SIGNAL = 0.62; EXPRESSED IN LUNG, SIGNAL = 1.1; EXPRESSED IN BRAIN, SIGNAL = 0.53; EXPRESSED IN HEART, SIGNAL = 0.79; SWISSPROT HIT: P70398, EVALUE 8.10e+00
HGIKGGYLKGRKPPTVMWMTVDLYQGWGGISRAMFLVRQGASKGLALFFPKMPPMTVRGKPTSSQTVRSSRMVVAGRACVEPLAQCTEFTTLHVRKKGTA

SEQ ID NO: 28490 - protein, 71 aa, Homo sapiens
  MAP TO CHR17.1; EXPRESSED IN HELA, SIGNAL = 2.2; EXPRESSED IN HEART, SIGNAL = 1.9; EXPRESSED IN PLACENTA, SIGNAL = 1.9; EXPRESSED IN FETAL LIVER, SIGNAL = 2.7; EXPRESSED IN BRAIN, SIGNAL = 2.3; EXPRESSED IN LUNG, SIGNAL = 1.6; EXPRESSED IN BONE MARROW, SIGNAL = 2.7; EXPRESSED IN ADULT LIVER, SIGNAL = 2.7; SWISSPROT HIT: Q39575, EVALUE 4.00e-12
LAGHWVFLANCHLSLSWMPNLDKLVEQLQVEDPHPSFRLWLSSIPHPDFPISILQVSIKMTTEPPKVCGHR

SEQ ID NO: 28491 - protein, 69 aa, Homo sapiens
  MAP TO CHR13.1; EXPRESSED IN LUNG, SIGNAL = 0.97; EXPRESSED IN FETAL LIVER, SIGNAL = 0.61; EXPRESSED IN HELA, SIGNAL = 1.1; EXPRESSED IN BRAIN, SIGNAL = 0.68; EXPRESSED IN HEART, SIGNAL = 0.61; EXPRESSED IN BONE MARROW, SIGNAL = 0.63; SWISSPROT HIT: P75919, EVALUE 3.40e+00
GDKNSSKLLEHQAQGRERWEFRLERWGLARWPQAQARVIPRGWVPEGRLRNSQVNEFGRPWRGSVSDGR

SEQ ID NO: 28492 - protein, 78 aa, Homo sapiens
  MAP TO CHR11.1; EXPRESSED IN PLACENTA, SIGNAL = 2.2; EXPRESSED IN FETAL LIVER, SIGNAL = 2.2; EXPRESSED IN BRAIN, SIGNAL = 2.2; EXPRESSED IN HELA, SIGNAL = 1.8; EXPRESSED IN LUNG, SIGNAL = 2.4; EXPRESSED IN HEART, SIGNAL = 2.6; EXPRESSED IN ADULT LIVER, SIGNAL = 2.8; EXPRESSED IN BONE MARROW, SIGNAL = 2.2; SWISSPROT HIT: P24994, EVALUE 5.30e+00
GIGFRFASYINNDMVLQKEPAGAVIWGFGTPGATVTVTLRQGQETIMKKVTSVKGKAAHLPFSYCPLLPPAGLSENEC

SEQ ID NO: 28493 - protein, 91 aa, Homo sapiens
  MAP TO AC013470.9; EXPRESSED IN ADULT LIVER, SIGNAL = 1.2; EXPRESSED IN BONE MARROW, SIGNAL = 1.1; EXPRESSED IN FETAL LIVER, SIGNAL = 0.87; EXPRESSED IN BRAIN, SIGNAL = 0.92; EXPRESSED IN HEART, SIGNAL = 1.1; SWISSPROT HIT: P17867, EVALUE 5.10e+00
LEELTYFFPEDHAEDVQQEFFPSWPTPSGLTEYSTLTLCQETLANSSIGRLCLAFLGKRLDSVIEMCVKDVLLKDDLSWAEAGVALLENEC

SEQ ID NO: 28494 - protein, 43 aa, Homo sapiens
  MAP TO CHR2.1; EXPRESSED IN LUNG, SIGNAL = 0.67; EXPRESSED IN HELA, SIGNAL =   2; EXPRESSED IN BRAIN, SIGNAL = 1.8; EXPRESSED IN BONE MARROW, SIGNAL = 1.7; EXPRESSED IN ADULT LIVER, SIGNAL = 1.2; EXPRESSED IN PLACENTA, SIGNAL = 1.7
RPFAPSEIGISPFVFPLLSVQKGSQQSCLVSCYLKTLASLLCG

SEQ ID NO: 28495 - protein, 69 aa, Homo sapiens
  MAP TO CHR17.1; EXPRESSED IN BRAIN, SIGNAL = 0.78; EXPRESSED IN BONE MARROW, SIGNAL =   1; EXPRESSED IN HEART, SIGNAL = 0.69; EXPRESSED IN LUNG, SIGNAL = 0.82; EXPRESSED IN HELA, SIGNAL = 1.2; SWISSPROT HIT: P23477, EVALUE 2.70e+00
RPKRTKASMSEFLESEDGEVEQQRTYSSGHNRLYFHSDTCLPLRPQEMEVDSEDEKDPEWLREKTITVI

SEQ ID NO: 28496 - protein, 67 aa, Homo sapiens
  MAP TO CHR7.1; EXPRESSED IN FETAL LIVER, SIGNAL = 0.64; EXPRESSED IN BRAIN, SIGNAL = 0.69; EXPRESSED IN BONE MARROW, SIGNAL = 0.75; EXPRESSED IN ADULT LIVER, SIGNAL = 1.2; EXPRESSED IN LUNG, SIGNAL = 0.74; SWISSPROT HIT: Q09461, EVALUE 8.00e-13
FVLVGAVTVISPLELIRTKMQSKKFSYVELHRFVSKKVSEDGWISLWRGWAPTVLRDVPFSGRIYLI

SEQ ID NO: 28497 - protein, 38 aa, Homo sapiens
  MAP TO CHR7.1; EXPRESSED IN BONE MARROW, SIGNAL = 0.83; EXPRESSED IN ADULT LIVER, SIGNAL = 1.2; EXPRESSED IN FETAL LIVER, SIGNAL = 0.65; EXPRESSED IN LUNG, SIGNAL =   1; EXPRESSED IN HELA, SIGNAL =   1; EXPRESSED IN BRAIN, SIGNAL = 0.91; EXPRESSED IN HEART, SIGNAL = 0.92
GKAGLSAVRGLSSAMGIGVSLLLQFSLTPGGYRSVGRS

SEQ ID NO: 28498 - protein, 31 aa, Homo sapiens
  MAP TO CHR6.1; EXPRESSED IN BRAIN, SIGNAL =   2; EXPRESSED IN HEART, SIGNAL = 0.86; EXPRESSED IN BONE MARROW, SIGNAL = 1.6; EXPRESSED IN ADULT LIVER, SIGNAL =   5; EXPRESSED IN PLACENTA, SIGNAL = 1.5; EXPRESSED IN FETAL LIVER, SIGNAL = 2.8; EXPRESSED IN HELA, SIGNAL = 1.6
RNLILFVVAEKLILSNERFLPSPEKKKQNSF

SEQ ID NO: 28499 - protein, 41 aa, Homo sapiens
  MAP TO CHR19.1; EXPRESSED IN HEART, SIGNAL = 3.1; EXPRESSED IN ADULT LIVER, SIGNAL = 4.3; EXPRESSED IN PLACENTA, SIGNAL = 3.9; EXPRESSED IN FETAL LIVER, SIGNAL = 2.8; EXPRESSED IN LUNG, SIGNAL =   3; EXPRESSED IN HELA, SIGNAL = 3.6; EXPRESSED IN BRAIN, SIGNAL = 2.9
IPSHSFWCCSLASLSGFSASSFTVRSISTWSSRDFFPACSS

SEQ ID NO: 28500 - protein, 82 aa, Homo sapiens
  MAP TO CHR11.1; EXPRESSED IN HELA, SIGNAL = 0.77; EXPRESSED IN BRAIN, SIGNAL = 0.85; EXPRESSED IN HEART, SIGNAL = 0.67; EXPRESSED IN ADULT LIVER, SIGNAL = 0.93; EXPRESSED IN BONE MARROW, SIGNAL = 0.9; EXPRESSED IN FETAL LIVER, SIGNAL = 0.64; SWISSPROT HIT: O08677, EVALUE 2.30e+00
AGAGELEQREDVTEVVIDGVRITESQSQHASSVGHGTRKGHQIGTKHKAGAHCRRHGNVIQKWVTDGHSDHTPLTSAHNIQK

SEQ ID NO: 28501 - protein, 145 aa, Homo sapiens
  MAP TO CHR19.1; EXPRESSED IN LUNG, SIGNAL = 0.93; EXPRESSED IN HELA, SIGNAL = 1.1; EXPRESSED IN BRAIN, SIGNAL = 0.91; EXPRESSED IN HEART, SIGNAL = 0.75; EXPRESSED IN ADULT LIVER, SIGNAL = 0.77; EXPRESSED IN BONE MARROW, SIGNAL = 0.79; SWISSPROT HIT: Q01656, EVALUE 2.00e-23
WKPPPVIPKEESRSGANKYLYFVCNEPGLPWTRLPHVTPAQIVNARKIKKFFTGYLDTPVVSYPPFPGNEANYLRAQIARISAATQVSPLGFYQFSEEEGDEEEEGGAGRDSYEENPDFEGIPVLELVDSMANWVHHTQHILPQV

SEQ ID NO: 28502 - protein, 107 aa, Homo sapiens
  MAP TO CHR17.1; EXPRESSED IN PLACENTA, SIGNAL =  10; EXPRESSED IN FETAL LIVER, SIGNAL = 9.6; EXPRESSED IN LUNG, SIGNAL = 4.5; EXPRESSED IN HELA, SIGNAL = 9.1; EXPRESSED IN BRAIN, SIGNAL = 9.6; EXPRESSED IN HEART, SIGNAL = 4.8; EXPRESSED IN ADULT LIVER, SIGNAL =  10; EXPRESSED IN BONE MARROW, SIGNAL = 8.8; SWISSPROT HIT: O15353, EVALUE 7.00e-26
LGNLWEQLKDDSLALDPLVLVTSSPTSSSMPPPQPPPHCFPPGPCLTETGSGAGDLAAPGSGGSGALGDLHLTTLYSAFMELEPTPPTAPAGPSVYLSPSSKPVALA

SEQ ID NO: 28503 - protein, 60 aa, Homo sapiens
  MAP TO CHR22.1; EXPRESSED IN HEART, SIGNAL =   1; EXPRESSED IN PLACENTA, SIGNAL = 2.4; EXPRESSED IN FETAL LIVER, SIGNAL = 0.94; EXPRESSED IN LUNG, SIGNAL = 1.3; EXPRESSED IN BRAIN, SIGNAL = 1.1
RTWTGRSCTWVGRHCTLRLLQQPEQRCTSTQGGHTRKLALVRSMRRREISNTSVRVLHSA

SEQ ID NO: 28504 - protein, 42 aa, Homo sapiens
  MAP TO CHR18.1; EXPRESSED IN FETAL LIVER, SIGNAL = 2.8; EXPRESSED IN LUNG, SIGNAL = 1.7; EXPRESSED IN HELA, SIGNAL = 4.5; EXPRESSED IN BRAIN, SIGNAL = 2.1; EXPRESSED IN HEART, SIGNAL = 1.2; EXPRESSED IN BONE MARROW, SIGNAL = 2.9; EXPRESSED IN ADULT LIVER, SIGNAL = 1.5; SWISSPROT HIT: Q15357, EVALUE 1.00e-18
FMDKKLSLKLNGGRHVQGILRGFDPFMNLVIDECVEMATSGQ

SEQ ID NO: 28505 - protein, 66 aa, Homo sapiens
  MAP TO CHR19.1; EXPRESSED IN BONE MARROW, SIGNAL = 2.6; EXPRESSED IN PLACENTA, SIGNAL = 3.1; EXPRESSED IN FETAL LIVER, SIGNAL = 2.3; EXPRESSED IN BRAIN, SIGNAL = 2.4; EXPRESSED IN HEART, SIGNAL = 1.7; SWISSPROT HIT: P90747, EVALUE 6.00e-08
EWRSIDGSIVLPLARGSPKALALEYALCLTGDGLAHLQATDPQQLLRLIPHVQVFARVAPKQKVCA

SEQ ID NO: 28506 - protein, 24 aa, Homo sapiens
  MAP TO CHR19.1; EXPRESSED IN HEART, SIGNAL = 1.1; EXPRESSED IN ADULT LIVER, SIGNAL =   2; EXPRESSED IN FETAL LIVER, SIGNAL = 2.7; EXPRESSED IN HELA, SIGNAL = 2.9; EXPRESSED IN BRAIN, SIGNAL = 3.1; EXPRESSED IN BONE MARROW, SIGNAL = 3.2; EXPRESSED IN PLACENTA, SIGNAL = 2.9; EXPRESSED IN LUNG, SIGNAL = 0.95
LTLIGLSSSFLVNLITMSPRIVRP

SEQ ID NO: 28507 - protein, 74 aa, Homo sapiens
  MAP TO CHR3.1; EXPRESSED IN HELA, SIGNAL = 1.4; EXPRESSED IN BONE MARROW, SIGNAL = 1.4; EXPRESSED IN LUNG, SIGNAL = 1.6; EXPRESSED IN PLACENTA, SIGNAL = 1.3; EXPRESSED IN BRAIN, SIGNAL = 1.4; EXPRESSED IN HEART, SIGNAL = 1.2; EXPRESSED IN ADULT LIVER, SIGNAL = 0.58; EXPRESSED IN FETAL LIVER, SIGNAL = 1.1; SWISSPROT HIT: P54289, EVALUE 7.00e-15
ASLRPLTTLLFLQFNEKAQPVSCFTHLVQANVRNKKVFKEAVQGMVAKGTTGYKAGFEYAFDQLQNVSPMGGQV

SEQ ID NO: 28508 - protein, 49 aa, Homo sapiens
  MAP TO CHR5.1; EXPRESSED IN LUNG, SIGNAL = 0.87; EXPRESSED IN HELA, SIGNAL = 1.5; EXPRESSED IN BRAIN, SIGNAL = 0.92; EXPRESSED IN BONE MARROW, SIGNAL = 0.98; EXPRESSED IN HEART, SIGNAL = 0.64; EXPRESSED IN ADULT LIVER, SIGNAL = 1.3; EXPRESSED IN PLACENTA, SIGNAL = 1.4; SWISSPROT HIT: P34670, EVALUE 6.00e-06
DQRNLGMSMRVERSTLDQVKKRFEVNKKKMEEKQKDYDFEERMKELREE

SEQ ID NO: 28509 - protein, 77 aa, Homo sapiens
  MAP TO CHR22.1; EXPRESSED IN HELA, SIGNAL = 1.2; EXPRESSED IN BRAIN, SIGNAL = 1.1; EXPRESSED IN HEART, SIGNAL = 0.88; EXPRESSED IN ADULT LIVER, SIGNAL = 1.9; EXPRESSED IN BONE MARROW, SIGNAL = 1.3; EXPRESSED IN FETAL LIVER, SIGNAL = 1.1; EXPRESSED IN PLACENTA, SIGNAL = 1.5
PSGVLSLCHFVILAQTLSTGEQHFLPLFPLPVGPLAPSQKHSRALSIPPVLGGGEAGRRGPQLGPPIVRQGPHPMSP

SEQ ID NO: 28510 - protein, 68 aa, Homo sapiens
  MAP TO CHR16.1; EXPRESSED IN FETAL LIVER, SIGNAL = 1.9; EXPRESSED IN BRAIN, SIGNAL = 1.9; EXPRESSED IN HELA, SIGNAL = 1.3; EXPRESSED IN LUNG, SIGNAL = 1.8; EXPRESSED IN HEART, SIGNAL = 2.6; EXPRESSED IN ADULT LIVER, SIGNAL = 2.2; EXPRESSED IN BONE MARROW, SIGNAL = 1.9; SWISSPROT HIT: Q9Y4W6, EVALUE 7.00e-14
VQFGVSEKLGQVSFDFSRHGKTLVEKLYGEASAQLLDDEVRHLVSATYRCTLDLLTRCREHVEKVSVA

SEQ ID NO: 28511 - protein, 60 aa, Homo sapiens
  MAP TO CHR17.1; EXPRESSED IN LUNG, SIGNAL = 0.58; EXPRESSED IN FETAL LIVER, SIGNAL = 0.44; EXPRESSED IN BRAIN, SIGNAL = 0.52; EXPRESSED IN HEART, SIGNAL = 2.1
HPPWPPVSGSASSHPSAPAARPHLDDAAGPSPSAPGSSSSAPGGRWCPVPSSAPQPSWQP

SEQ ID NO: 28512 - protein, 63 aa, Homo sapiens
  MAP TO CHR17.1; EXPRESSED IN BRAIN, SIGNAL = 2.8; EXPRESSED IN HEART, SIGNAL = 2.5; EXPRESSED IN BONE MARROW, SIGNAL = 2.5; EXPRESSED IN ADULT LIVER, SIGNAL = 5.7; EXPRESSED IN PLACENTA, SIGNAL = 1.9; EXPRESSED IN LUNG, SIGNAL = 2.2; EXPRESSED IN FETAL LIVER, SIGNAL = 2.1
PQSHGSCGSLDSLGATCSWWVSGAADARVWPAWLHPSATTPPSRSRSPNIIGSRSSEMVRLGF

SEQ ID NO: 28513 - protein, 131 aa, Homo sapiens
  MAP TO CHR7.1; EXPRESSED IN HEART, SIGNAL =   3; EXPRESSED IN ADULT LIVER, SIGNAL = 2.9; EXPRESSED IN BONE MARROW, SIGNAL = 2.2; EXPRESSED IN PLACENTA, SIGNAL =   3; EXPRESSED IN FETAL LIVER, SIGNAL = 4.7; EXPRESSED IN BRAIN, SIGNAL = 1.9; EXPRESSED IN LUNG, SIGNAL = 2.1; SWISSPROT HIT: P07942, EVALUE 4.00e-71
SIAYSLLACDCDPRGIETPQCDQSTGQCVCVEGVEGPRCDKCTRGYSGVFPDCTPCHQCFALWDVIIAELTNRTHRFLEKAKALKISGVIGPYRETVDSVERKVSEIKDILAQSPAAEPLKNIGNLFEEAE

SEQ ID NO: 28514 - protein, 80 aa, Homo sapiens
  MAP TO CHR7.1; EXPRESSED IN FETAL LIVER, SIGNAL = 0.54; EXPRESSED IN LUNG, SIGNAL = 0.64; EXPRESSED IN BRAIN, SIGNAL = 0.37; EXPRESSED IN BONE MARROW, SIGNAL = 0.41; EXPRESSED IN HEART, SIGNAL = 0.77; SWISSPROT HIT: O43316, EVALUE 3.00e-39
SHLTQVSNGCVSKILGRYYRTGVLEPKGIGGSKPRLATPPVVARIAQLKGECPALFAWEIQRQLCAEGLCTQDKTPSVST

SEQ ID NO: 28515 - protein, 57 aa, Homo sapiens
  MAP TO AC019085.3; EXPRESSED IN PLACENTA, SIGNAL = 4.4; EXPRESSED IN FETAL LIVER, SIGNAL = 3.8; EXPRESSED IN LUNG, SIGNAL = 3.5; EXPRESSED IN HELA, SIGNAL = 4.2; EXPRESSED IN BRAIN, SIGNAL = 3.9; EXPRESSED IN BONE MARROW, SIGNAL = 4.4; EXPRESSED IN ADULT LIVER, SIGNAL = 2.7; EXPRESSED IN HEART, SIGNAL = 2.5; SWISSPROT HIT: Q10961, EVALUE 5.60e-01
GSSHLVTRAEIMSVMVALTSASISSTGPGMGSCWQRCSALRICCRFCQMISANFSHL

SEQ ID NO: 28516 - protein, 61 aa, Homo sapiens
  MAP TO CHR1.1; EXPRESSED IN BRAIN, SIGNAL = 1.8; EXPRESSED IN ADULT LIVER, SIGNAL =   2; EXPRESSED IN BONE MARROW, SIGNAL = 1.9; EXPRESSED IN LUNG, SIGNAL = 1.2; EXPRESSED IN FETAL LIVER, SIGNAL = 1.4; SWISSPROT HIT: Q08372, EVALUE 7.90e+00
FSLVSPEAVGFLSAVGVFIILMLLLFLYINKKFCFENVGGFPDLGSEYSTRKNSQDKICKY

SEQ ID NO: 28517 - protein, 48 aa, Homo sapiens
  MAP TO CHR7.1; EXPRESSED IN FETAL LIVER, SIGNAL = 0.98; EXPRESSED IN BRAIN, SIGNAL = 0.94; EXPRESSED IN LUNG, SIGNAL = 1.2; EXPRESSED IN HEART, SIGNAL = 0.55; EXPRESSED IN BONE MARROW, SIGNAL = 1.1; EXPRESSED IN ADULT LIVER, SIGNAL = 0.64; SWISSPROT HIT: O95859, EVALUE 3.00e-26
FKCCGVVYFTDWLEMTEMDWPPDSCCVREFPGCSKQAHQEDLSDLYQE

SEQ ID NO: 28518 - protein, 28 aa, Homo sapiens
  MAP TO CHR6.1; EXPRESSED IN HELA, SIGNAL = 3.5; EXPRESSED IN BONE MARROW, SIGNAL = 5.8; EXPRESSED IN HEART, SIGNAL =   4; EXPRESSED IN LUNG, SIGNAL = 4.3; EXPRESSED IN BRAIN, SIGNAL = 5.4; EXPRESSED IN ADULT LIVER, SIGNAL = 8.9; EXPRESSED IN FETAL LIVER, SIGNAL = 5.3; EXPRESSED IN PLACENTA, SIGNAL = 4.4
KGRGTARCSLGDFLLSTYINTSVLKAYS

SEQ ID NO: 28519 - protein, 37 aa, Homo sapiens
  MAP TO CHR19.1; EXPRESSED IN LUNG, SIGNAL = 0.71; EXPRESSED IN HELA, SIGNAL = 0.55; EXPRESSED IN BRAIN, SIGNAL = 0.52; EXPRESSED IN HEART, SIGNAL = 0.83; EXPRESSED IN BONE MARROW, SIGNAL = 0.5
APSLGRVMRCPKCLLCLSALLTLLGLKVYIEWTSESR

SEQ ID NO: 28520 - protein, 57 aa, Homo sapiens
  MAP TO CHR12.1; EXPRESSED IN FETAL LIVER, SIGNAL = 0.76; EXPRESSED IN HELA, SIGNAL = 0.76; EXPRESSED IN BONE MARROW, SIGNAL = 0.77; EXPRESSED IN ADULT LIVER, SIGNAL = 0.99; EXPRESSED IN PLACENTA, SIGNAL = 1.7; EXPRESSED IN LUNG, SIGNAL = 1.2; EXPRESSED IN BRAIN, SIGNAL = 0.82; EXPRESSED IN HEART, SIGNAL = 1.5; SWISSPROT HIT: P04275, EVALUE 2.00e-29
GKRSLSCRPPMVKLVCPADNLRAEGLECTKTCQNYDLECMSMGCVSGCLCPPGMVSH

SEQ ID NO: 28521 - protein, 95 aa, Homo sapiens
  MAP TO CHR12.1; EXPRESSED IN ADULT LIVER, SIGNAL =   2; EXPRESSED IN HELA, SIGNAL = 1.1; EXPRESSED IN BRAIN, SIGNAL = 0.98; EXPRESSED IN LUNG, SIGNAL = 0.98; EXPRESSED IN HEART, SIGNAL = 1.1; EXPRESSED IN BONE MARROW, SIGNAL = 1.6; SWISSPROT HIT: P78560, EVALUE 7.00e-34
FGSFQGEMEARDKQVLRSLRLELGAEVLVEGLVLQYLYQEGILTENHIQEINAQTTGLRKTMLLLDILPSRGPKAFDTFLDSLQEFPWVREKLKK

SEQ ID NO: 28522 - protein, 56 aa, Homo sapiens
  MAP TO CHR19.1; EXPRESSED IN HEART, SIGNAL = 0.87; EXPRESSED IN BONE MARROW, SIGNAL = 1.8; EXPRESSED IN ADULT LIVER, SIGNAL = 0.85; EXPRESSED IN FETAL LIVER, SIGNAL = 1.5; EXPRESSED IN BRAIN, SIGNAL = 1.5; EXPRESSED IN LUNG, SIGNAL = 1.7
RAFLLHKKAISAVHSLLCGHDTDPRYAEATVKARVAELYLPLLSIARDTLPRLHDF

SEQ ID NO: 28523 - protein, 83 aa, Homo sapiens
  MAP TO CHR11.1; EXPRESSED IN BRAIN, SIGNAL = 0.97; EXPRESSED IN BONE MARROW, SIGNAL =   1; EXPRESSED IN HEART, SIGNAL = 0.61; EXPRESSED IN ADULT LIVER, SIGNAL = 0.91; EXPRESSED IN FETAL LIVER, SIGNAL = 0.76; EXPRESSED IN LUNG, SIGNAL = 0.57; EXPRESSED IN HELA, SIGNAL = 0.92; SWISSPROT HIT: Q15620, EVALUE 3.00e-31
SLINLICLNSHLHTPMYFFLFNLSFIDLCYSFVFTPKMLMSFISERNIISFPGCITQLFFFCFFVHSECYVLTAMAYDRYVAI

SEQ ID NO: 28524 - protein, 84 aa, Homo sapiens
  MAP TO CHR7.1; EXPRESSED IN BRAIN, SIGNAL = 0.79; EXPRESSED IN BONE MARROW, SIGNAL = 0.7; SWISSPROT HIT: Q46654, EVALUE 6.10e+00
IGITWTLLHEMDYQKYISVRHDYILLPEDALTNTTRLRWWQPFVISNGIVVSGVERAQWALDNILIGGAEINPSQLVDTFDDGK

SEQ ID NO: 28525 - protein, 60 aa, Homo sapiens
  MAP TO CHR5.1; EXPRESSED IN FETAL LIVER, SIGNAL = 2.7; EXPRESSED IN HELA, SIGNAL = 3.1; EXPRESSED IN BRAIN, SIGNAL = 2.6; EXPRESSED IN LUNG, SIGNAL = 0.63; EXPRESSED IN BONE MARROW, SIGNAL = 2.2; EXPRESSED IN HEART, SIGNAL = 0.79; EXPRESSED IN PLACENTA, SIGNAL = 3.6; SWISSPROT HIT: P30414, EVALUE 5.00e-02
LSSFISQLHPKARGQGFATNFPRSTDFSAAREGPMTKPFEIPEAIFYLRPHFLLLSLPSP

SEQ ID NO: 28526 - protein, 56 aa, Homo sapiens
  MAP TO CHR19.1; EXPRESSED IN FETAL LIVER, SIGNAL = 1.1; EXPRESSED IN HELA, SIGNAL = 0.94; EXPRESSED IN BRAIN, SIGNAL = 0.96; EXPRESSED IN HEART, SIGNAL = 0.71; EXPRESSED IN BONE MARROW, SIGNAL = 1.1; SWISSPROT HIT: P24864, EVALUE 3.00e-27
AGYQWCDIENCVKWMVPFAMVIRETGSSKLKHFRGVADEDAHNIQTHRDSLDLLVS

SEQ ID NO: 28527 - protein, 69 aa, Homo sapiens
  MAP TO CHR17.1; EXPRESSED IN ADULT LIVER, SIGNAL = 1.7; EXPRESSED IN BONE MARROW, SIGNAL = 1.5; EXPRESSED IN LUNG, SIGNAL = 1.1; EXPRESSED IN HELA, SIGNAL = 1.4; EXPRESSED IN BRAIN, SIGNAL = 1.4; EXPRESSED IN HEART, SIGNAL = 1.3; SWISSPROT HIT: Q09884, EVALUE 3.00e-03
VPSVFSLIVVDECHHTHKDTVYNVIMSQYLELKLQRAQPLPQVLGLTASPGTGGASKLDGAINHVLQVS

SEQ ID NO: 28528 - protein, 45 aa, Homo sapiens
  MAP TO CHR5.1; EXPRESSED IN LUNG, SIGNAL = 1.4; EXPRESSED IN HELA, SIGNAL = 1.2; EXPRESSED IN BRAIN, SIGNAL = 1.2; EXPRESSED IN ADULT LIVER, SIGNAL = 0.7; EXPRESSED IN BONE MARROW, SIGNAL = 1.4
VFLAESSMKSEEISSSTPTSFLAMQVYAPVSSYRTLLMWSSLPLA

SEQ ID NO: 28529 - protein, 94 aa, Homo sapiens
  MAP TO CHRX.1; EXPRESSED IN HELA, SIGNAL = 2.1; EXPRESSED IN HEART, SIGNAL = 2.8; EXPRESSED IN BONE MARROW, SIGNAL = 2.3; EXPRESSED IN FETAL LIVER, SIGNAL = 2.1; EXPRESSED IN BRAIN, SIGNAL = 2.8; EXPRESSED IN LUNG, SIGNAL = 3.2; SWISSPROT HIT: Q13474, EVALUE 4.00e-31
AIGLGVSLHGRILQGELRRLKWQHEEAAEAPSLADGSTEAATDHRNEELLAEARILRQHKSRLETRMQILEDHNKQLESQLQRLRELLLQVRME

SEQ ID NO: 28530 - protein, 79 aa, Homo sapiens
  MAP TO CHR14.1; EXPRESSED IN HELA, SIGNAL = 2.8; EXPRESSED IN BRAIN, SIGNAL = 2.8; EXPRESSED IN HEART, SIGNAL =   2; EXPRESSED IN PLACENTA, SIGNAL = 5.3; EXPRESSED IN FETAL LIVER, SIGNAL = 2.7; EXPRESSED IN LUNG, SIGNAL =  15; SWISSPROT HIT: P01790, EVALUE 1.00e-31
VQCEVQLVESGGGLVQPGGSLRLSCAASGFTFSDHYMDWVRQAPGKGLEWVGRTRNKANSYTTEYAASVKGRFTISRDD

SEQ ID NO: 28531 - protein, 44 aa, Homo sapiens
  MAP TO CHR7.1; EXPRESSED IN PLACENTA, SIGNAL = 3.4; EXPRESSED IN FETAL LIVER, SIGNAL = 1.2; EXPRESSED IN HELA, SIGNAL = 2.9; EXPRESSED IN BRAIN, SIGNAL = 1.3; EXPRESSED IN LUNG, SIGNAL = 0.81; EXPRESSED IN HEART, SIGNAL = 0.89; EXPRESSED IN ADULT LIVER, SIGNAL = 0.88; SWISSPROT HIT: P11369, EVALUE 1.00e-05
CRKWKQFWQFLIKLNIHLPTNPSIPLLGIYPRKMKKYVHIKSFM

SEQ ID NO: 28532 - protein, 129 aa, Homo sapiens
  MAP TO CHR2.1; EXPRESSED IN FETAL LIVER, SIGNAL = 1.2; EXPRESSED IN LUNG, SIGNAL = 1.1; EXPRESSED IN HELA, SIGNAL = 1.4; EXPRESSED IN HEART, SIGNAL = 1.1; EXPRESSED IN BONE MARROW, SIGNAL = 1.5; EXPRESSED IN PLACENTA, SIGNAL = 1.8; EXPRESSED IN BRAIN, SIGNAL = 1.3; EXPRESSED IN ADULT LIVER, SIGNAL = 0.9; SWISSPROT HIT: O43174, EVALUE 2.00e-23
LLQGFQIPKGWSVMYSIRDTHDTAPVFKDVNVFDPDRFSQARSEDKDGRFHYLPFGGGVRTCLGKHLAKLFLKVLAVELASTSRFELATRTFPRITLVPVLHPVDGLSVKFFGLDSNQNEILPETEAML

SEQ ID NO: 28533 - protein, 109 aa, Homo sapiens
  MAP TO CHR3.1; EXPRESSED IN PLACENTA, SIGNAL =  43; EXPRESSED IN LUNG, SIGNAL =  29; EXPRESSED IN FETAL LIVER, SIGNAL =  21; EXPRESSED IN BRAIN, SIGNAL =  24; EXPRESSED IN HEART, SIGNAL =  15; SWISSPROT HIT: P02572, EVALUE 3.00e-33
NWDDMKKIWHHTFYNELRVAPEEHLVLLTEALVNPKANREKMTQIMFETFNTLSMYVAIQAMLSLYASGCTTGIVNGPWRWGHSYSAHLRGLSPPPCRPASGPGWWGPD

SEQ ID NO: 28534 - protein, 53 aa, Homo sapiens
  MAP TO CHR1.1; EXPRESSED IN FETAL LIVER, SIGNAL = 1.5; EXPRESSED IN LUNG, SIGNAL = 1.1; EXPRESSED IN HELA, SIGNAL =   2; EXPRESSED IN BRAIN, SIGNAL = 1.5; EXPRESSED IN BONE MARROW, SIGNAL = 1.7; EXPRESSED IN ADULT LIVER, SIGNAL = 0.93; EXPRESSED IN PLACENTA, SIGNAL =   2; EXPRESSED IN HEART, SIGNAL = 0.84; SWISSPROT HIT: P17879, EVALUE 4.80e+00
FQVQQLQGVYSLQEQHFWTLCSDVYVGTLKLIVAPDADARWILSQTHNIFTQV

SEQ ID NO: 28535 - protein, 55 aa, Homo sapiens
  MAP TO CHR10.1; EXPRESSED IN ADULT LIVER, SIGNAL = 0.49; EXPRESSED IN LUNG, SIGNAL = 1.1; EXPRESSED IN HELA, SIGNAL = 0.43; EXPRESSED IN BRAIN, SIGNAL = 0.44; EXPRESSED IN HEART, SIGNAL = 1.1; SWISSPROT HIT: O15403, EVALUE 3.00e-09
VFEAPLGSVVSNHLSCQVGIMLGGLLASTGLILSSFATSLKHLYLTLGVLTGKGT

SEQ ID NO: 28536 - protein, 38 aa, Homo sapiens
  MAP TO CHR12.1; EXPRESSED IN FETAL LIVER, SIGNAL = 0.71; EXPRESSED IN BRAIN, SIGNAL = 0.72; EXPRESSED IN LUNG, SIGNAL = 0.59; EXPRESSED IN BONE MARROW, SIGNAL = 0.79; EXPRESSED IN HEART, SIGNAL = 0.62; SWISSPROT HIT: P33203, EVALUE 2.20e+00
TVIHSGERTHPHVAHYFWEVLKQSWCKTGKNKSGEIYA

SEQ ID NO: 28537 - protein, 48 aa, Homo sapiens
  MAP TO CHR7.1; EXPRESSED IN FETAL LIVER, SIGNAL = 1.9; EXPRESSED IN LUNG, SIGNAL = 3.2; EXPRESSED IN BRAIN, SIGNAL =   2; EXPRESSED IN HEART, SIGNAL = 3.1; SWISSPROT HIT: P45862, EVALUE 8.20e+00
KILPYLCHSCVIFLGSKVSKKSKAIEADNRGHHKIAVRIKEKNSPTEC

SEQ ID NO: 28538 - protein, 38 aa, Homo sapiens
  MAP TO CHR2.1; EXPRESSED IN FETAL LIVER, SIGNAL = 0.33; EXPRESSED IN BRAIN, SIGNAL = 0.42; EXPRESSED IN BONE MARROW, SIGNAL = 0.49
CEIQAHCLLLTDYNDCNKQGNLCSNKQVITVDNKCVNM

SEQ ID NO: 28539 - protein, 80 aa, Homo sapiens
  MAP TO AC027045.2; EXPRESSED IN BRAIN, SIGNAL = 0.62; EXPRESSED IN HEART, SIGNAL = 0.76; EXPRESSED IN BONE MARROW, SIGNAL = 0.62; EXPRESSED IN LUNG, SIGNAL = 0.78; EXPRESSED IN HELA, SIGNAL = 0.5; SWISSPROT HIT: Q05728, EVALUE 6.20e+00
ALRIPEGLARGLGSRLERDVWSAPSSLRLPRKASRAPRGSALGMSQRTVPGEQASYGTFQRVKYHTLSLGRKKTLPESSF

SEQ ID NO: 28540 - protein, 66 aa, Homo sapiens
  MAP TO CHR8.1; EXPRESSED IN FETAL LIVER, SIGNAL = 2.8; EXPRESSED IN HELA, SIGNAL = 2.7; EXPRESSED IN BRAIN, SIGNAL = 3.3; EXPRESSED IN LUNG, SIGNAL = 2.1; EXPRESSED IN PLACENTA, SIGNAL =   3; EXPRESSED IN HEART, SIGNAL = 2.5; EXPRESSED IN BONE MARROW, SIGNAL = 3.8; EXPRESSED IN ADULT LIVER, SIGNAL = 4.4; SWISSPROT HIT: P72227, EVALUE 4.30e+00
TPTILGELCGADEGGNLKAVFSAILAWGEGDQVFRCLKLFFFHLHLGSRQGQVEFSIFHFFVVTLK

SEQ ID NO: 28541 - protein, 105 aa, Homo sapiens
  MAP TO CHR2.1; EXPRESSED IN FETAL LIVER, SIGNAL = 0.28; EXPRESSED IN BRAIN, SIGNAL = 0.44; EXPRESSED IN HEART, SIGNAL = 0.47; EXPRESSED IN BONE MARROW, SIGNAL = 0.46; SWISSPROT HIT: O70468, EVALUE 4.00e-17
YLVPPSAPTRPEVYHVSANAMSIRWEEPYHDGGSKIIGYWVEKKERNTILWVKENKVPCLECNYKVTGLVEGLEYQFRTYALNAAGVSKASEASRPIMAQNPVGM

SEQ ID NO: 28542 - protein, 79 aa, Homo sapiens
  MAP TO CHR19.1; EXPRESSED IN LUNG, SIGNAL = 2.3; EXPRESSED IN HELA, SIGNAL = 0.79; EXPRESSED IN BRAIN, SIGNAL = 2.3; EXPRESSED IN HEART, SIGNAL = 2.6; EXPRESSED IN ADULT LIVER, SIGNAL = 2.1; EXPRESSED IN FETAL LIVER, SIGNAL =   2; SWISSPROT HIT: Q9Y2Q1, EVALUE 4.00e-38
THKIIHTGEKPYKCEECGKAFNLSSHLTTHKIIHTGEKPYKCEECGKAFNQSSTLSKHKVIHTGEKPYKCGECGKAFNQ

SEQ ID NO: 28543 - protein, 61 aa, Homo sapiens
  MAP TO CHR9.1; EXPRESSED IN ADULT LIVER, SIGNAL = 3.4; EXPRESSED IN PLACENTA, SIGNAL = 3.9; EXPRESSED IN FETAL LIVER, SIGNAL = 4.1; EXPRESSED IN LUNG, SIGNAL = 2.9; EXPRESSED IN BRAIN, SIGNAL = 3.7; EXPRESSED IN HEART, SIGNAL = 3.2; EXPRESSED IN BONE MARROW, SIGNAL = 3.4; SWISSPROT HIT: P48634, EVALUE 4.00e-15
AVIPRHGLQSLGKVAAARRMPPPANLPSLKSENKGNDPNIVIVPKDGTGWANKQDQQDPKR

SEQ ID NO: 28544 - protein, 62 aa, Homo sapiens
  MAP TO CHR7.1; EXPRESSED IN HELA, SIGNAL = 0.78; EXPRESSED IN BRAIN, SIGNAL = 0.89; EXPRESSED IN HEART, SIGNAL = 0.84; EXPRESSED IN BONE MARROW, SIGNAL = 0.95; EXPRESSED IN ADULT LIVER, SIGNAL = 0.55; EXPRESSED IN LUNG, SIGNAL = 0.83; SWISSPROT HIT: P20824, EVALUE 3.20e-01
PSLPRQRACSPTEFVQRQTAHYLQEWNIKERRSGTCSPYTPLSSPEKPGIYHQNCGGNVMHS

SEQ ID NO: 28545 - protein, 42 aa, Homo sapiens
  MAP TO CHR19.1; EXPRESSED IN PLACENTA, SIGNAL =  27; EXPRESSED IN LUNG, SIGNAL = 7.9; EXPRESSED IN HELA, SIGNAL =  14; EXPRESSED IN BRAIN, SIGNAL = 1.8; EXPRESSED IN HEART, SIGNAL = 3.6; EXPRESSED IN FETAL LIVER, SIGNAL = 7.9; SWISSPROT HIT: Q02543, EVALUE 9.00e-15
LSTDRDMGARHRARAHSIQIMKVEEIAASKCRRPAVKQFHVS

SEQ ID NO: 28546 - protein, 86 aa, Homo sapiens
  MAP TO CHR6.1; EXPRESSED IN LUNG, SIGNAL = 7.8; EXPRESSED IN HELA, SIGNAL = 7.8; EXPRESSED IN FETAL LIVER, SIGNAL = 8.6; EXPRESSED IN BRAIN, SIGNAL = 9.8; EXPRESSED IN HEART, SIGNAL = 6.3; EXPRESSED IN ADULT LIVER, SIGNAL =  14; EXPRESSED IN BONE MARROW, SIGNAL = 9.8; EXPRESSED IN PLACENTA, SIGNAL = 9.9; SWISSPROT HIT: O15056, EVALUE 9.00e-46
SFLVLVTGCTSVGRIPDAEIYKITATDFYPLQEEAKEEERLIALKKILSSGVFYFSWPNDGSRFDLTVRTQKQGDDSSEWGNSFFW

SEQ ID NO: 28547 - protein, 86 aa, Homo sapiens
  MAP TO CHR7.1; EXPRESSED IN ADULT LIVER, SIGNAL = 0.76; EXPRESSED IN FETAL LIVER, SIGNAL = 1.2; EXPRESSED IN LUNG, SIGNAL = 0.85; EXPRESSED IN HELA, SIGNAL = 1.3; EXPRESSED IN BRAIN, SIGNAL = 1.2; EXPRESSED IN HEART, SIGNAL = 0.58; SWISSPROT HIT: Q08759, EVALUE 1.00e-06
SLDDFLFSGKWTEEEEKRLAEVVHELTSTEPGDIVTQGVSWAAVAERVGTRSEKQCRSKWLNYLNWKQSGGTEWTKEDEINLILRF

SEQ ID NO: 28548 - protein, 28 aa, Homo sapiens
  MAP TO AC007910.3; EXPRESSED IN FETAL LIVER, SIGNAL = 0.44; EXPRESSED IN LUNG, SIGNAL = 0.84; EXPRESSED IN BRAIN, SIGNAL = 0.35; EXPRESSED IN HEART, SIGNAL = 0.72; EXPRESSED IN BONE MARROW, SIGNAL = 0.33
ISGPNTAAYSFKSSVSPWSLFVYTSKVT

SEQ ID NO: 28549 - protein, 140 aa, Homo sapiens
  MAP TO CHRX.1; EXPRESSED IN BRAIN, SIGNAL = 1.2; EXPRESSED IN HEART, SIGNAL = 0.97; EXPRESSED IN BONE MARROW, SIGNAL = 0.59; EXPRESSED IN LUNG, SIGNAL = 0.73
QVLLGLHHAAVHGGKPHHHPSGHHLLQGRDHCPVDRVQRGLGHLLPHGPGVELPHRHCDRGQHGDHPGPREDQEVRAHVVHGGLRVLHPRGLHLPHRGEGHRLRGLQDGVRPADRALHQDPQPPAAAAPLAPDPLHPPVG

SEQ ID NO: 28550 - protein, 87 aa, Homo sapiens
  MAP TO CHR22.1; EXPRESSED IN FETAL LIVER, SIGNAL = 2.5; EXPRESSED IN BRAIN, SIGNAL = 2.3; EXPRESSED IN LUNG, SIGNAL = 3.7; EXPRESSED IN HELA, SIGNAL = 1.8; EXPRESSED IN HEART, SIGNAL = 3.3; EXPRESSED IN BONE MARROW, SIGNAL = 2.8; EXPRESSED IN ADULT LIVER, SIGNAL = 0.73; SWISSPROT HIT: P10162, EVALUE 8.00e-05
ASPTPSPHPQVTMLPAKQAELTRRSQAEPPHPWSPEKRPEGDRQLQGSPLPPRTSARTPERELRTQRPLESGQAGPRQPLGVWQSQE

SEQ ID NO: 28551 - protein, 137 aa, Homo sapiens
  MAP TO CHR5.1; EXPRESSED IN BRAIN, SIGNAL = 0.79; EXPRESSED IN HEART, SIGNAL = 0.68; EXPRESSED IN BONE MARROW, SIGNAL = 0.59; SWISSPROT HIT: Q9Y5H5, EVALUE 6.00e-74
IAQDLGLELAELVPRLFQLDSKGRGDLLEVNLQNGILFVNSRIDREELCGRSAECSIHLEVIVDRPLQVFHVDVEVKDINDNPPVFPATQKNLFIAESRPLDSRFPLEGASDADIGENALLTYRLSPNEYFFLDVPT

SEQ ID NO: 28552 - protein, 103 aa, Homo sapiens
  MAP TO CHR20.1; EXPRESSED IN PLACENTA, SIGNAL = 3.5; EXPRESSED IN LUNG, SIGNAL = 1.6; EXPRESSED IN HELA, SIGNAL = 1.6; EXPRESSED IN BRAIN, SIGNAL = 1.3; EXPRESSED IN HEART, SIGNAL = 1.3; SWISSPROT HIT: P28356, EVALUE 7.70e-02
LLLNCTFTFTQTISKSWNKCGVGVGGGADAPQEPGPSASFPGPGQGREHQAVQSPGTSSPRARALQASSSSHINTDTLNKNSISSSQGIKTSLKYVQQRARGG

SEQ ID NO: 28553 - protein, 81 aa, Homo sapiens
  MAP TO CHR17.1; EXPRESSED IN FETAL LIVER, SIGNAL = 0.53; EXPRESSED IN BRAIN, SIGNAL = 0.56; EXPRESSED IN HEART, SIGNAL = 0.5; EXPRESSED IN BONE MARROW, SIGNAL = 0.52; EXPRESSED IN ADULT LIVER, SIGNAL = 1.2; SWISSPROT HIT: P00618, EVALUE 7.20e+00
HGLSLPLIQTIFTTPCQIPYFDFPYGGLVSFARLVFIRMGFLTVSLSVKQRMGPHPLNMNHFLVIQKRVKDQHSEAITTTK

SEQ ID NO: 28554 - protein, 40 aa, Homo sapiens
  MAP TO CHR5.1; EXPRESSED IN BONE MARROW, SIGNAL = 0.7; EXPRESSED IN LUNG, SIGNAL = 0.87; EXPRESSED IN BRAIN, SIGNAL = 0.66; EXPRESSED IN HEART, SIGNAL = 0.78
ALTWSGSPLGRNIYSLFSHSLIPLRSLWWNLRFRLRLWTG

SEQ ID NO: 28555 - protein, 30 aa, Homo sapiens
  MAP TO CHR6.1; EXPRESSED IN ADULT LIVER, SIGNAL = 0.77; EXPRESSED IN FETAL LIVER, SIGNAL = 0.54; EXPRESSED IN HELA, SIGNAL = 0.55; EXPRESSED IN BRAIN, SIGNAL = 0.55
RLLVLFKKPLPLETHRVFSIGKDQMMLIRP

SEQ ID NO: 28556 - protein, 34 aa, Homo sapiens
  MAP TO CHR1.1; EXPRESSED IN ADULT LIVER, SIGNAL =  17; EXPRESSED IN PLACENTA, SIGNAL =  56; EXPRESSED IN BRAIN, SIGNAL = 3.5; EXPRESSED IN LUNG, SIGNAL =  37; EXPRESSED IN HEART, SIGNAL = 9.7
GYGNGPRRTWRRKLTNTQRSSRPTGSWSEPNKDC

SEQ ID NO: 28557 - protein, 40 aa, Homo sapiens
  MAP TO CHR16.1; EXPRESSED IN BONE MARROW, SIGNAL = 1.9; EXPRESSED IN ADULT LIVER, SIGNAL = 4.2; EXPRESSED IN LUNG, SIGNAL = 1.7; EXPRESSED IN FETAL LIVER, SIGNAL = 1.5; EXPRESSED IN HELA, SIGNAL = 2.3; EXPRESSED IN BRAIN, SIGNAL = 2.1; EXPRESSED IN HEART, SIGNAL = 1.8; SWISSPROT HIT: Q9Y4W6, EVALUE 3.00e-07
RGGGLFGVGETAAKILKSNIDVLFADVAGCEESNWKLWNL

SEQ ID NO: 28558 - protein, 50 aa, Homo sapiens
  MAP TO CHR19.1; EXPRESSED IN HELA, SIGNAL = 4.2; EXPRESSED IN BRAIN, SIGNAL = 3.3; EXPRESSED IN LUNG, SIGNAL = 1.2; EXPRESSED IN HEART, SIGNAL = 1.2; EXPRESSED IN BONE MARROW, SIGNAL = 2.6; EXPRESSED IN ADULT LIVER, SIGNAL = 1.8; EXPRESSED IN PLACENTA, SIGNAL = 3.7; EXPRESSED IN FETAL LIVER, SIGNAL = 2.6
GHPQRLWACAWASRSLKESKSCSSHGWFRMHCWTTSSWPRSSAPPSMARV

SEQ ID NO: 28559 - protein, 49 aa, Homo sapiens
  MAP TO CHR12.1; EXPRESSED IN LUNG, SIGNAL = 4.9; EXPRESSED IN BRAIN, SIGNAL = 3.8; EXPRESSED IN HEART, SIGNAL = 3.5; EXPRESSED IN ADULT LIVER, SIGNAL = 3.6; EXPRESSED IN PLACENTA, SIGNAL = 5.1
IRTGVISGSWDSLAPLPCLLPSLWTRSHHTLLGGLFLAEGPVFQPQPVS

SEQ ID NO: 28560 - protein, 64 aa, Homo sapiens
  MAP TO CHR19.1; EXPRESSED IN LUNG, SIGNAL = 1.9; EXPRESSED IN HEART, SIGNAL =   2; EXPRESSED IN FETAL LIVER, SIGNAL =   3; EXPRESSED IN BRAIN, SIGNAL = 3.6; EXPRESSED IN BONE MARROW, SIGNAL = 4.3; EXPRESSED IN ADULT LIVER, SIGNAL = 2.7; EXPRESSED IN PLACENTA, SIGNAL =   3; EXPRESSED IN HELA, SIGNAL = 2.4; SWISSPROT HIT: P25172, EVALUE 1.20e+00
TSAQRKREAQNCKLCYFYFLMRGAICAGWSLSGGSQDLSVKFKCRITLQAVTPRLSPGAEVAVL

SEQ ID NO: 28561 - protein, 53 aa, Homo sapiens
  MAP TO CHR20.1; EXPRESSED IN HELA, SIGNAL = 0.99; EXPRESSED IN LUNG, SIGNAL = 1.6; EXPRESSED IN BRAIN, SIGNAL = 0.97; EXPRESSED IN HEART, SIGNAL = 0.86; EXPRESSED IN BONE MARROW, SIGNAL = 1.2; EXPRESSED IN ADULT LIVER, SIGNAL = 1.7; SWISSPROT HIT: P11387, EVALUE 4.00e-22
SSRVVESKKKAVQRLEEQLMKLEVQATDREENKQIALGTSKLNYLDPRITVAW

SEQ ID NO: 28562 - protein, 52 aa, Homo sapiens
  MAP TO CHR8.1; EXPRESSED IN ADULT LIVER, SIGNAL = 1.4; EXPRESSED IN FETAL LIVER, SIGNAL =   2; EXPRESSED IN HELA, SIGNAL =   3; EXPRESSED IN BRAIN, SIGNAL = 2.2; EXPRESSED IN LUNG, SIGNAL = 1.2; EXPRESSED IN HEART, SIGNAL =   1; EXPRESSED IN BONE MARROW, SIGNAL = 2.5
LQNKIFIYRGKEYERREDFSLRLLTQFPNAEKMTSTTPPGEDIKSSPKQCIL

SEQ ID NO: 28563 - protein, 40 aa, Homo sapiens
  MAP TO CHR2.1; EXPRESSED IN FETAL LIVER, SIGNAL = 0.34; EXPRESSED IN LUNG, SIGNAL = 0.76; EXPRESSED IN BRAIN, SIGNAL = 0.39; EXPRESSED IN HEART, SIGNAL = 0.7; EXPRESSED IN ADULT LIVER, SIGNAL = 0.43
QQMEKKKQENKMRRDQLNDQYLELLEKQRLYFKTVKEFKE

SEQ ID NO: 28564 - protein, 40 aa, Homo sapiens
  MAP TO CHR19.1; EXPRESSED IN FETAL LIVER, SIGNAL =   4; EXPRESSED IN BONE MARROW, SIGNAL = 4.3; EXPRESSED IN PLACENTA, SIGNAL = 5.7; EXPRESSED IN LUNG, SIGNAL = 2.9; EXPRESSED IN BRAIN, SIGNAL = 4.1; EXPRESSED IN HELA, SIGNAL = 6.7; EXPRESSED IN HEART, SIGNAL = 2.6; EXPRESSED IN ADULT LIVER, SIGNAL = 4.8
VLGPGVSRADECRLLIPGTPVGRPVVLTELQELHPAKLPP

SEQ ID NO: 28565 - protein, 63 aa, Homo sapiens
  MAP TO CHR2.1; EXPRESSED IN BONE MARROW, SIGNAL = 3.2; EXPRESSED IN ADULT LIVER, SIGNAL = 3.9; EXPRESSED IN PLACENTA, SIGNAL = 3.9; EXPRESSED IN FETAL LIVER, SIGNAL =   4; EXPRESSED IN LUNG, SIGNAL = 3.4; EXPRESSED IN HELA, SIGNAL = 4.5; EXPRESSED IN BRAIN, SIGNAL = 4.4; EXPRESSED IN HEART, SIGNAL = 2.5; SWISSPROT HIT: Q09288, EVALUE 3.20e+00
PCGHKPVMTHASFGCSKMLSHVCNAFHIILHTHCHLSSPQHTEKMCLLCALRFCCTIKHNDPL

SEQ ID NO: 28566 - protein, 63 aa, Homo sapiens
  MAP TO CHR1.1; EXPRESSED IN BRAIN, SIGNAL = 6.2; EXPRESSED IN LUNG, SIGNAL = 4.3; EXPRESSED IN HEART, SIGNAL = 4.8; EXPRESSED IN ADULT LIVER, SIGNAL = 5.9; EXPRESSED IN BONE MARROW, SIGNAL = 7.6; EXPRESSED IN PLACENTA, SIGNAL = 5.8; EXPRESSED IN FETAL LIVER, SIGNAL = 5.2; EXPRESSED IN HELA, SIGNAL = 6.2; SWISSPROT HIT: P35658, EVALUE 3.50e+00
TCPAIQTCPSFVPANLFILSPPSGVCLSPSNQGIREEGEEDPELTPPLNSRERRKGEKREKKI

SEQ ID NO: 28567 - protein, 54 aa, Homo sapiens
  MAP TO CHR12.1; EXPRESSED IN HELA, SIGNAL = 0.57; EXPRESSED IN BRAIN, SIGNAL = 0.69; EXPRESSED IN HEART, SIGNAL = 0.97; EXPRESSED IN BONE MARROW, SIGNAL = 0.7; EXPRESSED IN LUNG, SIGNAL = 0.94; SWISSPROT HIT: O32124, EVALUE 3.60e+00
SIQVELEAEAEKMRVSQQELLSVDESVYTPDSDVAAPQINRNLIQKAGYLNLRK

SEQ ID NO: 28568 - protein, 57 aa, Homo sapiens
  MAP TO CHR2.1; EXPRESSED IN PLACENTA, SIGNAL = 1.5; EXPRESSED IN LUNG, SIGNAL = 0.71; EXPRESSED IN HELA, SIGNAL = 2.1; EXPRESSED IN BRAIN, SIGNAL = 1.7; EXPRESSED IN BONE MARROW, SIGNAL = 1.3; SWISSPROT HIT: P00203, EVALUE 1.20e+00
HTWSGCGPCTELAPVSVEWPAGSCTHLLKCSLLQGAENSEPSRPGTPAASLAKGPRK

SEQ ID NO: 28569 - protein, 17 aa, Homo sapiens
  MAP TO CHR7.1; EXPRESSED IN ADULT LIVER, SIGNAL = 3.3; EXPRESSED IN PLACENTA, SIGNAL = 3.7; EXPRESSED IN FETAL LIVER, SIGNAL = 2.2; EXPRESSED IN LUNG, SIGNAL = 1.9; EXPRESSED IN HELA, SIGNAL = 3.6; EXPRESSED IN BRAIN, SIGNAL = 2.9; EXPRESSED IN HEART, SIGNAL = 1.5
YFKIQNFSLILGYNLDS

SEQ ID NO: 28570 - protein, 54 aa, Homo sapiens
  MAP TO CHR20.1; EXPRESSED IN PLACENTA, SIGNAL = 4.2; EXPRESSED IN FETAL LIVER, SIGNAL = 3.9; EXPRESSED IN HELA, SIGNAL = 2.8; EXPRESSED IN BRAIN, SIGNAL = 4.7; EXPRESSED IN LUNG, SIGNAL = 3.9; EXPRESSED IN HEART, SIGNAL = 4.1; SWISSPROT HIT: P33453, EVALUE 6.20e+00
QDTTASRVAPLIKLIDISAANCVNIHTNWCKTSSYPLRSDFCVQRINHELTVKE

SEQ ID NO: 28571 - protein, 61 aa, Homo sapiens
  MAP TO CHR19.1; EXPRESSED IN BRAIN, SIGNAL = 3.9; EXPRESSED IN LUNG, SIGNAL = 4.3; EXPRESSED IN HEART, SIGNAL = 2.7; EXPRESSED IN BONE MARROW, SIGNAL = 4.9; EXPRESSED IN ADULT LIVER, SIGNAL =   5; EXPRESSED IN FETAL LIVER, SIGNAL =   6
GEPHLREGLVDLDGVQAAGAEPLLALLLLVLLHGLLDAQLGTARTRSLKASSSSLKPSMYW

SEQ ID NO: 28572 - protein, 64 aa, Homo sapiens
  MAP TO CHR7.1; EXPRESSED IN BRAIN, SIGNAL = 2.6; EXPRESSED IN HEART, SIGNAL = 2.2; EXPRESSED IN ADULT LIVER, SIGNAL = 3.4; EXPRESSED IN BONE MARROW, SIGNAL =   3; EXPRESSED IN PLACENTA, SIGNAL = 2.4; EXPRESSED IN LUNG, SIGNAL = 2.1; EXPRESSED IN FETAL LIVER, SIGNAL = 2.3; SWISSPROT HIT: P49819, EVALUE 5.00e-31
GSVWQRLGADVTAVEFLGHVGGVGIDMEISKNFQRILQKQGFKFKLNTKVTGATKKSDGKIDVS

SEQ ID NO: 28573 - protein, 58 aa, Homo sapiens
  MAP TO CHR22.1; EXPRESSED IN BRAIN, SIGNAL = 7.7; EXPRESSED IN HEART, SIGNAL = 6.1; EXPRESSED IN ADULT LIVER, SIGNAL = 7.7; EXPRESSED IN BONE MARROW, SIGNAL = 8.5; EXPRESSED IN LUNG, SIGNAL = 7.5; SWISSPROT HIT: P97819, EVALUE 5.50e-01
REITARIMRTEPRARRTSLHLALPSHCCSNESGAEESCTETHLQCRGAEQGVLLPQIR

SEQ ID NO: 28574 - protein, 52 aa, Homo sapiens
  MAP TO CHR6.1; EXPRESSED IN FETAL LIVER, SIGNAL = 1.8; EXPRESSED IN BRAIN, SIGNAL = 1.5; EXPRESSED IN LUNG, SIGNAL = 1.2; EXPRESSED IN HEART, SIGNAL = 1.3; EXPRESSED IN ADULT LIVER, SIGNAL = 1.5; EXPRESSED IN PLACENTA, SIGNAL = 1.3
KRPAWDLKGQLCDLNAELKRCRERTQTLDQENQQLQDQLRDAQQQVKALGTE

SEQ ID NO: 28575 - protein, 39 aa, Homo sapiens
  MAP TO CHRX.1; EXPRESSED IN FETAL LIVER, SIGNAL = 0.48; EXPRESSED IN LUNG, SIGNAL = 0.63; EXPRESSED IN BRAIN, SIGNAL = 0.45; EXPRESSED IN HEART, SIGNAL = 0.64; EXPRESSED IN BONE MARROW, SIGNAL = 0.48
EKVTGISHQLKCSQVSEHLGILLVKWIWEEHQYHLLTEG

SEQ ID NO: 28576 - protein, 51 aa, Homo sapiens
  MAP TO CHR2.1; EXPRESSED IN HELA, SIGNAL = 0.59; EXPRESSED IN BRAIN, SIGNAL = 0.54; EXPRESSED IN HEART, SIGNAL = 2.6; EXPRESSED IN BONE MARROW, SIGNAL = 0.62; EXPRESSED IN FETAL LIVER, SIGNAL = 0.72; EXPRESSED IN LUNG, SIGNAL =   3; SWISSPROT HIT: P46952, EVALUE 6.00e-24
ADQLLKEPPFPLSTRSIMEPMSLDAWLDSHHRELQAGTPLSLFGDTYETQV

SEQ ID NO: 28577 - protein, 44 aa, Homo sapiens
  MAP TO CHR9.1; EXPRESSED IN ADULT LIVER, SIGNAL = 3.6; EXPRESSED IN BONE MARROW, SIGNAL = 3.7; EXPRESSED IN PLACENTA, SIGNAL = 4.1; EXPRESSED IN LUNG, SIGNAL = 3.4; EXPRESSED IN FETAL LIVER, SIGNAL = 3.4; EXPRESSED IN HELA, SIGNAL =   5; EXPRESSED IN BRAIN, SIGNAL = 4.2; EXPRESSED IN HEART, SIGNAL = 3.3; SWISSPROT HIT: P40484, EVALUE 6.00e-11
DWVAVHVVDFFNRINLIYGTICEFCTERTCPVMSGGPKYEYRWQ

SEQ ID NO: 28578 - protein, 48 aa, Homo sapiens
  MAP TO CHR19.1; EXPRESSED IN HEART, SIGNAL = 0.95; EXPRESSED IN LUNG, SIGNAL = 1.8; EXPRESSED IN FETAL LIVER, SIGNAL = 0.5; EXPRESSED IN HELA, SIGNAL = 0.39; EXPRESSED IN BRAIN, SIGNAL = 0.62; SWISSPROT HIT: P15621, EVALUE 7.00e-20
HERTHTGEKPYECNKCGKAFSCSSSIRKHARIHTGEKPYICKQCGKAF

SEQ ID NO: 28579 - protein, 84 aa, Homo sapiens
  MAP TO CHR19.1; EXPRESSED IN PLACENTA, SIGNAL = 7.5; EXPRESSED IN FETAL LIVER, SIGNAL = 9.7; EXPRESSED IN HELA, SIGNAL = 7.2; EXPRESSED IN BRAIN, SIGNAL = 7.1; EXPRESSED IN BONE MARROW, SIGNAL = 8.2; EXPRESSED IN ADULT LIVER, SIGNAL =  11; EXPRESSED IN LUNG, SIGNAL = 3.6; EXPRESSED IN HEART, SIGNAL = 4.1
MVTCGPDPRTSRPHGTRCRPQTGYKLQVRTAGGRGQGAGSVPAGGPGPLPRNPQRYTGGSRLLPQHGPQTPPLGAPQRPSLRKD

SEQ ID NO: 28580 - protein, 62 aa, Homo sapiens
  MAP TO CHR10.1; EXPRESSED IN FETAL LIVER, SIGNAL = 3.6; EXPRESSED IN LUNG, SIGNAL = 1.8; EXPRESSED IN BRAIN, SIGNAL = 4.5; EXPRESSED IN HEART, SIGNAL = 2.5; EXPRESSED IN BONE MARROW, SIGNAL = 3.8; SWISSPROT HIT: O43918, EVALUE 1.20e+00
LASVFSLGAPECRRVISPLFLGHNEARVFGGPLPTAHRAGAWGEGPGGMCSVFQACTIPGGQ

SEQ ID NO: 28581 - protein, 44 aa, Homo sapiens
  MAP TO CHR7.1; EXPRESSED IN BRAIN, SIGNAL = 2.9; EXPRESSED IN HEART, SIGNAL = 2.6; EXPRESSED IN BONE MARROW, SIGNAL = 2.3; EXPRESSED IN FETAL LIVER, SIGNAL = 3.7; EXPRESSED IN LUNG, SIGNAL = 1.9
PVLQVTQILLGVVSCVLGVCLSLGPWTVLSASGCAFWAGSVVSK

SEQ ID NO: 28582 - protein, 90 aa, Homo sapiens
  MAP TO CHR20.1; EXPRESSED IN BONE MARROW, SIGNAL = 6.2; EXPRESSED IN FETAL LIVER, SIGNAL = 6.1; EXPRESSED IN PLACENTA, SIGNAL = 5.8; EXPRESSED IN HELA, SIGNAL =   8; EXPRESSED IN BRAIN, SIGNAL = 4.9; EXPRESSED IN LUNG, SIGNAL = 3.4; EXPRESSED IN ADULT LIVER, SIGNAL = 5.7; EXPRESSED IN HEART, SIGNAL =   4; SWISSPROT HIT: O08529, EVALUE 8.30e-01
PSLQINMYLLSRVLFALSRLAVEKGYIPEPRWDPFPLLTAVVWGLVLWLFEYHRSTLQPSLQSSMTYLYEDSNVWHDISDFLVYNKSRPS

SEQ ID NO: 28583 - protein, 65 aa, Homo sapiens
  MAP TO CHR19.1; EXPRESSED IN PLACENTA, SIGNAL = 1.9; EXPRESSED IN LUNG, SIGNAL = 0.78; EXPRESSED IN BRAIN, SIGNAL = 1.2; EXPRESSED IN HEART, SIGNAL = 0.96; EXPRESSED IN ADULT LIVER, SIGNAL = 0.87; EXPRESSED IN BONE MARROW, SIGNAL = 0.92; SWISSPROT HIT: Q99676, EVALUE 1.00e-09
NEFQKMYGKEKMYECKVCGETFLHSSSLKEHQKIHTRGNPFENKGKVCEETFIPGQSLKRRQKTY

SEQ ID NO: 28584 - protein, 167 aa, Homo sapiens
  MAP TO CHR5.1; EXPRESSED IN PLACENTA, SIGNAL = 2.3; EXPRESSED IN FETAL LIVER, SIGNAL = 1.1; EXPRESSED IN BRAIN, SIGNAL = 1.2; EXPRESSED IN LUNG, SIGNAL = 1.7; EXPRESSED IN HEART, SIGNAL = 3.1; EXPRESSED IN ADULT LIVER, SIGNAL = 1.8; SWISSPROT HIT: O54732, EVALUE 6.30e+00
GPERQRARDPVPRPPHRRFHWRGAGASLRRARLPGDQGGGGGQRLGPERLAVLPPAQGQRAGTLLGGSAHGRGAHGASPAGQRRAQAEPRGGRPGPRPAPSLRHCHAHRGRGRQDPRHPGRPGQPRALRQTQRFGPHSVPGGGGGRGLLRLPGLRHRAAGAQAAALA

SEQ ID NO: 28585 - protein, 147 aa, Homo sapiens
  MAP TO CHR7.1; EXPRESSED IN LUNG, SIGNAL = 0.98; EXPRESSED IN HELA, SIGNAL = 0.83; EXPRESSED IN BRAIN, SIGNAL = 0.63; EXPRESSED IN HEART, SIGNAL = 0.96; EXPRESSED IN BONE MARROW, SIGNAL = 0.62; EXPRESSED IN FETAL LIVER, SIGNAL = 0.56; SWISSPROT HIT: Q9UDV6, EVALUE 3.00e-76
PEESLRPRPRLKPQTKKAKLHQCDVCLRSFSCKVSLVTHQRCHLQEGPSAGQHVQERFSPNSLVALPGHIPWRKSRSSLICGYCGKSFSHPSDLVRHQRIHTGERPYSCTECEKSFVQKQHLLQHQKIHQRERGGLALEPGRPNGLL

SEQ ID NO: 28586 - protein, 160 aa, Homo sapiens
  MAP TO CHR2.1; EXPRESSED IN ADULT LIVER, SIGNAL = 7.8; EXPRESSED IN BONE MARROW, SIGNAL =  12; EXPRESSED IN PLACENTA, SIGNAL = 8.2; EXPRESSED IN LUNG, SIGNAL =  11; EXPRESSED IN FETAL LIVER, SIGNAL =  12; EXPRESSED IN HELA, SIGNAL = 9.4; EXPRESSED IN BRAIN, SIGNAL =  13; EXPRESSED IN HEART, SIGNAL =  13
HHGARHLGIYCPAGSHHPGIHFLYMKKMFGSHHNLRLDSHHCCGHHDSHLAGNLNLDNHHLGSHLLHHSLHLSSLLDAYFLFLPLGHHGHSHHVHLSRLLVHDLLVLRMRNVHSHLSLLLGLLFAAGGHLASSATVASLGVEVRFHWVYHLCQAPCPSTP

SEQ ID NO: 28587 - protein, 56 aa, Homo sapiens
  MAP TO CHR17.1; EXPRESSED IN ADULT LIVER, SIGNAL = 1.7; EXPRESSED IN PLACENTA, SIGNAL = 1.4; EXPRESSED IN LUNG, SIGNAL =   4; EXPRESSED IN FETAL LIVER, SIGNAL = 1.3; EXPRESSED IN BRAIN, SIGNAL = 1.5; SWISSPROT HIT: P54931, EVALUE 2.80e+00
ARKWHQALHPVGWAGAKAVREGGVGPRQSGWLRWLWELAGAGDAAEVWKSPCFLSL

SEQ ID NO: 28588 - protein, 70 aa, Homo sapiens
  MAP TO CHR6.1; EXPRESSED IN LUNG, SIGNAL = 4.6; EXPRESSED IN HELA, SIGNAL = 4.8; EXPRESSED IN FETAL LIVER, SIGNAL = 4.8; EXPRESSED IN BRAIN, SIGNAL = 5.4; EXPRESSED IN HEART, SIGNAL = 4.7; EXPRESSED IN ADULT LIVER, SIGNAL = 4.9; EXPRESSED IN BONE MARROW, SIGNAL = 5.4; SWISSPROT HIT: P02812, EVALUE 5.20e+00
PGRPPEHQQPQQHEGVCALPGLAGWGWLQPQGGGGQRLAGRIGQPGAGGSPQCPRCEPGDRPLHPAEVPR

SEQ ID NO: 28589 - protein, 92 aa, Homo sapiens
  MAP TO CHR4.1; EXPRESSED IN BONE MARROW, SIGNAL =   3; EXPRESSED IN ADULT LIVER, SIGNAL = 3.1; EXPRESSED IN LUNG, SIGNAL = 1.9; EXPRESSED IN BRAIN, SIGNAL = 2.7; EXPRESSED IN HEART, SIGNAL = 1.8; EXPRESSED IN PLACENTA, SIGNAL = 1.9; EXPRESSED IN FETAL LIVER, SIGNAL = 2.2; EXPRESSED IN HELA, SIGNAL = 2.1; SWISSPROT HIT: P40394, EVALUE 5.00e-37
SPQVKPGSTCVVFGLGGVGLSVIMGCKSAGASRIIGIDLNKDKFEKAMAVGATECISPKDSTKPISEVLSEMTGNNVGYTFEVIGHLETMVR

SEQ ID NO: 28590 - protein, 66 aa, Homo sapiens
  MAP TO CHR11.1; EXPRESSED IN BRAIN, SIGNAL = 0.76; EXPRESSED IN BONE MARROW, SIGNAL = 0.86; SWISSPROT HIT: Q9GZM6, EVALUE 8.00e-18
TQQAELQLPLFLLFLGIYVVTVVGNLGMILLIAVSPLLHTPMYYFLSSLSFVDFCYSSVITPKMLV

SEQ ID NO: 28591 - protein, 56 aa, Homo sapiens
  MAP TO CHR19.1; EXPRESSED IN ADULT LIVER, SIGNAL = 0.89; EXPRESSED IN LUNG, SIGNAL =   1; EXPRESSED IN FETAL LIVER, SIGNAL = 0.88; EXPRESSED IN HELA, SIGNAL = 1.2; EXPRESSED IN BRAIN, SIGNAL = 1.2; EXPRESSED IN HEART, SIGNAL = 0.94; SWISSPROT HIT: P12789, EVALUE 6.00e-16
PGKRVCLGEGLAKAELFLFFTTILQAFSLESPCPPDTLSLKPTVSGLFNIPPAFQL

SEQ ID NO: 28592 - protein, 100 aa, Homo sapiens
  MAP TO CHR17.1; EXPRESSED IN HEART, SIGNAL = 1.6; EXPRESSED IN BONE MARROW, SIGNAL = 1.7; EXPRESSED IN FETAL LIVER, SIGNAL = 1.5; EXPRESSED IN PLACENTA, SIGNAL = 2.2; EXPRESSED IN BRAIN, SIGNAL = 1.6; SWISSPROT HIT: Q9N2M8, EVALUE 9.70e+00
PGGNASSRTEAQVPNGQGSPGGCVCSSQASPAPRAAAPPRAARGPTPRTEEAAWAAMALTFLLVLLTLATLCTRLHRNFRRGESIYWGPTADSQDTVAGE

SEQ ID NO: 28593 - protein, 38 aa, Homo sapiens
  MAP TO CHR1.1; EXPRESSED IN BONE MARROW, SIGNAL = 0.62; EXPRESSED IN FETAL LIVER, SIGNAL = 0.75; EXPRESSED IN LUNG, SIGNAL = 0.91; EXPRESSED IN BRAIN, SIGNAL = 0.83; EXPRESSED IN HELA, SIGNAL = 3.7
PDCRARSRAPSSTIPPRAQFTTRTPFLHWAKVLSFSKP

SEQ ID NO: 28594 - protein, 75 aa, Homo sapiens
  MAP TO CHR4.1; EXPRESSED IN HELA, SIGNAL = 0.59; EXPRESSED IN BRAIN, SIGNAL = 0.88; EXPRESSED IN BONE MARROW, SIGNAL =   1; SWISSPROT HIT: Q06157, EVALUE 1.90e+00
FRPFALDNSKDHKSDHVLWKDVFWQLCPYKDTFNNGSWHRGNQYCALGQVSPLFSSMGSHKEPKMQCCPRECHLG

SEQ ID NO: 28595 - protein, 80 aa, Homo sapiens
  MAP TO CHR2.1; EXPRESSED IN ADULT LIVER, SIGNAL = 9.5; EXPRESSED IN BONE MARROW, SIGNAL = 7.1; EXPRESSED IN PLACENTA, SIGNAL = 6.6; EXPRESSED IN LUNG, SIGNAL = 4.4; EXPRESSED IN HELA, SIGNAL = 7.7; EXPRESSED IN FETAL LIVER, SIGNAL =   6; EXPRESSED IN BRAIN, SIGNAL = 8.3; EXPRESSED IN HEART, SIGNAL =   5; SWISSPROT HIT: O76071, EVALUE 8.00e-44
RCQLTGALATACGDDAIRVFQEDPNSDPQQPTFSLTAHLHQAHSQDVNCVAWNPKEPGLLASCSDDGEVAFWKYQRPEGL

SEQ ID NO: 28596 - protein, 48 aa, Homo sapiens
  MAP TO CHR19.1; EXPRESSED IN BONE MARROW, SIGNAL = 0.94; EXPRESSED IN ADULT LIVER, SIGNAL = 1.5; EXPRESSED IN PLACENTA, SIGNAL = 1.8; EXPRESSED IN FETAL LIVER, SIGNAL = 0.9; EXPRESSED IN HELA, SIGNAL = 1.3; EXPRESSED IN BRAIN, SIGNAL =   1; EXPRESSED IN LUNG, SIGNAL = 0.87; SWISSPROT HIT: Q01201, EVALUE 1.00e-16
LEPPGGPDLLDDGFAYDPTAPTLFTMLDLLPPAPPHASAVVCSGGAGA

SEQ ID NO: 28597 - protein, 160 aa, Homo sapiens
  MAP TO CHR19.1; EXPRESSED IN FETAL LIVER, SIGNAL = 0.37; EXPRESSED IN BRAIN, SIGNAL = 0.43; EXPRESSED IN LUNG, SIGNAL = 0.94; EXPRESSED IN HEART, SIGNAL = 0.74; EXPRESSED IN BONE MARROW, SIGNAL = 0.52; SWISSPROT HIT: Q9NY97, EVALUE 1.00e-21
WESRRYSDLLLWDFLDVPFNQTLKDLLLLAWLGRHCPTVSFVLRAQDDAFVHTPALLAHLRALPPASARSLYLGEVFTQAMPLRKPGGPFYVPESFFEGGYPAYASGGGYVIAGRLAPWLLRAAARVAPFPFEDVYTGLCIRALGLVPQAHPGFLTAWPA

SEQ ID NO: 28598 - protein, 18 aa, Homo sapiens
  MAP TO CHR18.1; EXPRESSED IN FETAL LIVER, SIGNAL = 0.52; EXPRESSED IN BRAIN, SIGNAL = 0.66; EXPRESSED IN HELA, SIGNAL = 0.49; EXPRESSED IN HEART, SIGNAL = 0.5; EXPRESSED IN ADULT LIVER, SIGNAL = 0.56; EXPRESSED IN BONE MARROW, SIGNAL = 0.73
QHSLYSGLRTPFIIFFPL

SEQ ID NO: 28599 - protein, 68 aa, Homo sapiens
  MAP TO CHR17.1; EXPRESSED IN FETAL LIVER, SIGNAL = 0.78; EXPRESSED IN LUNG, SIGNAL = 1.2; EXPRESSED IN BRAIN, SIGNAL = 0.73; EXPRESSED IN HELA, SIGNAL = 0.89; EXPRESSED IN HEART, SIGNAL = 0.97; EXPRESSED IN ADULT LIVER, SIGNAL = 0.95; SWISSPROT HIT: P10482, EVALUE 4.40e+00
PDGSRGGGQRADEVGHGVWNVDGQGRDVWLYGLHWRLRRLLLLSLLAGQGSERYLDVCAREPECAPGK

SEQ ID NO: 28600 - protein, 70 aa, Homo sapiens
  MAP TO CHR12.1; EXPRESSED IN HEART, SIGNAL = 3.7; EXPRESSED IN BONE MARROW, SIGNAL = 2.1; EXPRESSED IN ADULT LIVER, SIGNAL = 2.9; EXPRESSED IN HELA, SIGNAL = 2.4; EXPRESSED IN PLACENTA, SIGNAL = 4.9; EXPRESSED IN LUNG, SIGNAL = 5.3; EXPRESSED IN FETAL LIVER, SIGNAL = 2.7; EXPRESSED IN BRAIN, SIGNAL = 2.7; SWISSPROT HIT: P04275, EVALUE 3.00e-30
ACRKEECKRVSPPSCPPHRLPTLRKTQCCDEYECACNCVNSTVSCPLGYLASTATNDCGCTTTTCLPDKV

SEQ ID NO: 28601 - protein, 74 aa, Homo sapiens
  MAP TO CHR17.1; EXPRESSED IN ADULT LIVER, SIGNAL = 0.69; EXPRESSED IN LUNG, SIGNAL = 0.67; EXPRESSED IN FETAL LIVER, SIGNAL = 0.62; EXPRESSED IN BRAIN, SIGNAL = 0.53; EXPRESSED IN HEART, SIGNAL = 0.65
SPGNVGNKRRDRRVEALVAMNEGVLVDLPDLPVHVPGLEVVLQQACVVSHAAADLGLDLLDVLILLFKGPRKML

SEQ ID NO: 28602 - protein, 55 aa, Homo sapiens
  MAP TO CHR7.1; EXPRESSED IN PLACENTA, SIGNAL =   2; EXPRESSED IN FETAL LIVER, SIGNAL =   2; EXPRESSED IN LUNG, SIGNAL = 1.5; EXPRESSED IN BRAIN, SIGNAL = 2.4; EXPRESSED IN HELA, SIGNAL = 2.1; EXPRESSED IN BONE MARROW, SIGNAL = 2.8; EXPRESSED IN ADULT LIVER, SIGNAL = 2.7; EXPRESSED IN HEART, SIGNAL = 1.4
VWLDLTFLLFLSRKHLVDGTRVMIGRFLMGRLQWDKELDLDHLEQSTRESGMVSM

SEQ ID NO: 28603 - protein, 120 aa, Homo sapiens
  MAP TO CHR19.1; EXPRESSED IN BRAIN, SIGNAL = 2.5; EXPRESSED IN HEART, SIGNAL = 2.3; EXPRESSED IN BONE MARROW, SIGNAL = 2.2; EXPRESSED IN ADULT LIVER, SIGNAL = 1.8; EXPRESSED IN LUNG, SIGNAL = 2.3; EXPRESSED IN FETAL LIVER, SIGNAL =   2; EXPRESSED IN HELA, SIGNAL = 2.3; SWISSPROT HIT: Q01149, EVALUE 4.40e+00
LCSFPGDTGNWYSSDEDEGGSSVTSILKTLRQQTSSRPPASVGELSSSGLGDPRLQKGHPTGSRLADPRLSRDPRLTRHVEASGGSGPGDSGPSDPRLARALPTSKPEGSLHSSPVGPSS

SEQ ID NO: 28604 - protein, 42 aa, Homo sapiens
  MAP TO CHR14.1; EXPRESSED IN PLACENTA, SIGNAL = 1.4; EXPRESSED IN FETAL LIVER, SIGNAL = 1.1; EXPRESSED IN LUNG, SIGNAL = 1.4; EXPRESSED IN BRAIN, SIGNAL = 1.2; EXPRESSED IN HELA, SIGNAL = 1.4; EXPRESSED IN BONE MARROW, SIGNAL = 1.1; SWISSPROT HIT: Q9XT97, EVALUE 4.00e-16
GVKLGLGDFIFYSVLVGKASATASGDWNTTIACFVAILIVSI

SEQ ID NO: 28605 - protein, 34 aa, Homo sapiens
  MAP TO CHR5.1; EXPRESSED IN HELA, SIGNAL = 6.2; EXPRESSED IN BRAIN, SIGNAL = 6.8; EXPRESSED IN LUNG, SIGNAL = 3.6; EXPRESSED IN HEART, SIGNAL = 4.3; EXPRESSED IN BONE MARROW, SIGNAL = 7.3; EXPRESSED IN PLACENTA, SIGNAL = 6.7; EXPRESSED IN FETAL LIVER, SIGNAL = 5.3
CHMRLQFKRIRSLPVMCVVYSLLCAVIFMGGKLG

SEQ ID NO: 28606 - protein, 71 aa, Homo sapiens
  MAP TO CHR19.1; EXPRESSED IN PLACENTA, SIGNAL = 1.2; EXPRESSED IN FETAL LIVER, SIGNAL = 1.1; EXPRESSED IN LUNG, SIGNAL = 1.2; EXPRESSED IN HELA, SIGNAL = 1.1; EXPRESSED IN BRAIN, SIGNAL = 1.6; EXPRESSED IN HEART, SIGNAL = 1.3; EXPRESSED IN ADULT LIVER, SIGNAL = 0.99; EXPRESSED IN BONE MARROW, SIGNAL = 1.5; SWISSPROT HIT: P97849, EVALUE 4.00e-34
QVVQYIGEICRYLLKQPVREAERRHRVRLAVGNGLRPAIWEEFTERFGVRQIGEFYGATECNCSIANMDGK

SEQ ID NO: 28607 - protein, 52 aa, Homo sapiens
  MAP TO CHR5.1; EXPRESSED IN HELA, SIGNAL = 0.75; EXPRESSED IN BRAIN, SIGNAL = 0.69; EXPRESSED IN HEART, SIGNAL = 0.69; EXPRESSED IN FETAL LIVER, SIGNAL = 0.57; SWISSPROT HIT: P37003, EVALUE 8.10e+00
RGQHAWSHLLTIHLQDVGLEQLLVAGSMAGVIAHVDGGHLGDVQGIILSKVL

SEQ ID NO: 28608 - protein, 79 aa, Homo sapiens
  MAP TO CHR6.1; EXPRESSED IN HEART, SIGNAL = 1.2; EXPRESSED IN BONE MARROW, SIGNAL =   1; EXPRESSED IN FETAL LIVER, SIGNAL = 1.1; EXPRESSED IN LUNG, SIGNAL = 1.2; EXPRESSED IN HELA, SIGNAL = 0.94; EXPRESSED IN BRAIN, SIGNAL =   1; SWISSPROT HIT: O78482, EVALUE 8.70e+00
PVSQNAWGHGRQTLGTVEKLPQKSVTNKERKRKELCLPLNEAKNGKRVWCRSGTQPAFSKWGRPNFPTSSQRKTTFKTT

SEQ ID NO: 28609 - protein, 156 aa, Homo sapiens
  MAP TO CHR11.1; EXPRESSED IN BRAIN, SIGNAL = 0.79; EXPRESSED IN HELA, SIGNAL = 0.9; EXPRESSED IN BONE MARROW, SIGNAL = 0.85; EXPRESSED IN HEART, SIGNAL = 0.95; EXPRESSED IN FETAL LIVER, SIGNAL = 0.77; EXPRESSED IN LUNG, SIGNAL = 0.82; SWISSPROT HIT: Q15620, EVALUE 2.00e-62
GSYLMAFSGAMAHTGCMLRLTFCDANTIDHYFCDILPLLQLSCTSTYINELVVFTVVGINIIVPTVTIFISYGFILSSILHISSKEGRSKAFSTCSSHIIAVSLFFGSGAFMYLNPSSAGSMDKRKLSSVFYTNVVPMLNPLIYSLRNKDVKFALR

SEQ ID NO: 28610 - protein, 70 aa, Homo sapiens
  MAP TO CHR5.1; EXPRESSED IN BONE MARROW, SIGNAL = 0.74; EXPRESSED IN LUNG, SIGNAL = 0.99; EXPRESSED IN HELA, SIGNAL = 0.71; EXPRESSED IN BRAIN, SIGNAL = 0.72; EXPRESSED IN HEART, SIGNAL = 0.77; SWISSPROT HIT: O33232, EVALUE 5.90e+00
SSDEFHLGIGVHRHHVVALGRLHARLGVALTVEPLVQKEVTTLLEVQAAVTAHEALGMVELVPCLDDGAP

SEQ ID NO: 28611 - protein, 41 aa, Homo sapiens
  MAP TO CHR5.1; EXPRESSED IN FETAL LIVER, SIGNAL = 0.99; EXPRESSED IN LUNG, SIGNAL = 0.63; EXPRESSED IN BRAIN, SIGNAL = 1.2; EXPRESSED IN BONE MARROW, SIGNAL = 1.2; SWISSPROT HIT: P07897, EVALUE 2.20e+00
KRQHWGAKIGMPVPIYSHEFPGLRVVPLPGNHPLLPSISLP

SEQ ID NO: 28612 - protein, 46 aa, Homo sapiens
  MAP TO CHR15.1; EXPRESSED IN HELA, SIGNAL = 1.1; EXPRESSED IN BRAIN, SIGNAL = 0.9; EXPRESSED IN HEART, SIGNAL = 0.98; EXPRESSED IN BONE MARROW, SIGNAL = 0.91; EXPRESSED IN FETAL LIVER, SIGNAL = 0.99; SWISSPROT HIT: Q60886, EVALUE 3.00e-17
GAMAHTGCMLRLTFCDANTIDHYFCDILPLLQLSCTSTYINELVVF

SEQ ID NO: 28613 - protein, 115 aa, Homo sapiens
  MAP TO CHR20.1; EXPRESSED IN FETAL LIVER, SIGNAL = 0.55; EXPRESSED IN LUNG, SIGNAL = 0.83; EXPRESSED IN BRAIN, SIGNAL = 0.59; EXPRESSED IN HEART, SIGNAL = 0.82; EXPRESSED IN ADULT LIVER, SIGNAL = 0.7; EXPRESSED IN BONE MARROW, SIGNAL = 0.52; SWISSPROT HIT: P55041, EVALUE 2.00e-02
MTLNTEQEAKTPLHRRASTPLPLSPRGHQPGRLSTVPSTQSQHPRLGQSASLNPPTQKPSPAPDDWSSESSDSEGSWEALYRVVLLGDPGVGKTSLASLFAGKQERDLHEQLGGR

SEQ ID NO: 28614 - protein, 37 aa, Homo sapiens
  MAP TO CHR19.1; EXPRESSED IN LUNG, SIGNAL = 2.1; EXPRESSED IN BRAIN, SIGNAL = 2.7; EXPRESSED IN HEART, SIGNAL = 2.5; EXPRESSED IN ADULT LIVER, SIGNAL = 2.6; EXPRESSED IN BONE MARROW, SIGNAL = 1.8; EXPRESSED IN PLACENTA, SIGNAL = 2.3; EXPRESSED IN FETAL LIVER, SIGNAL = 2.1; EXPRESSED IN HELA, SIGNAL =   4; SWISSPROT HIT: P21524, EVALUE 2.20e+00
HLHGRNAPAASHSQVGSLAGRNVGDSSCGMPAVPSPL

SEQ ID NO: 28615 - protein, 138 aa, Homo sapiens
  MAP TO CHR16.1; EXPRESSED IN FETAL LIVER, SIGNAL = 1.4; EXPRESSED IN LUNG, SIGNAL = 1.6; EXPRESSED IN BRAIN, SIGNAL = 1.6; EXPRESSED IN HEART, SIGNAL = 2.8; EXPRESSED IN BONE MARROW, SIGNAL = 1.6; EXPRESSED IN ADULT LIVER, SIGNAL = 1.7; SWISSPROT HIT: P04530, EVALUE 2.30e-01
SKGSGSSSLQVTKHDVLLATLKSNLSALEDKFLKDPQWKNLKLLRDEIADKAEWPQNSVDVTWSFTSQTLLLLLCLKETMIRLAANFNPGKPNPRTPEVAPALSPDALSISQQKTVQFVLQFVVTLGICPYLMPGVGV

SEQ ID NO: 28616 - protein, 73 aa, Homo sapiens
  MAP TO CHR7.1; EXPRESSED IN FETAL LIVER, SIGNAL = 0.72; EXPRESSED IN LUNG, SIGNAL = 0.79; EXPRESSED IN HELA, SIGNAL = 0.94; EXPRESSED IN BRAIN, SIGNAL = 0.64; EXPRESSED IN BONE MARROW, SIGNAL = 0.69; EXPRESSED IN HEART, SIGNAL = 0.87; SWISSPROT HIT: P08581, EVALUE 3.00e-31
HILFQTLLRNSSGCEARRDEYRTEFTTALQRVDLFMGQFSEVLLTSISTFIKGDLTIANLGTSEGRFMQVSAF

SEQ ID NO: 28617 - protein, 127 aa, Homo sapiens
  MAP TO CHR6.1; EXPRESSED IN ADULT LIVER, SIGNAL = 0.72; EXPRESSED IN FETAL LIVER, SIGNAL = 1.3; EXPRESSED IN LUNG, SIGNAL = 1.3; EXPRESSED IN HELA, SIGNAL = 1.7; EXPRESSED IN BRAIN, SIGNAL = 1.1; EXPRESSED IN BONE MARROW, SIGNAL =   1; EXPRESSED IN HEART, SIGNAL = 1.1; SWISSPROT HIT: P47079, EVALUE 4.20e-01
SKNSQLFAASQKFRKNTAPSLSSRKNMDLAKSGIKILVPKSPVKSRTAVDGFQSESPEKLDPVEQGQEDTVAPEVAAEKPVGALLGPGAERARMGSRPRIHPLVPQVPGPVTAAMATGLAVNGKGEC

SEQ ID NO: 28618 - protein, 102 aa, Homo sapiens
  MAP TO CHR7.1; EXPRESSED IN BRAIN, SIGNAL = 5.9; EXPRESSED IN ADULT LIVER, SIGNAL = 4.2; EXPRESSED IN FETAL LIVER, SIGNAL =  12; EXPRESSED IN LUNG, SIGNAL = 4.2; EXPRESSED IN HELA, SIGNAL =  15; EXPRESSED IN HEART, SIGNAL = 3.5; EXPRESSED IN BONE MARROW, SIGNAL = 6.9; EXPRESSED IN PLACENTA, SIGNAL = 8.9; SWISSPROT HIT: P11464, EVALUE 2.00e-03
DGPYGLQVNSDKGLKVGEVFTVDLGEAILFDCSADSHPPNTYSWIRRTDNTTYIIKHGPRLEVASEKVAQKTMDYVCCAYNNITGRQDETHFTVIITSVGMC

SEQ ID NO: 28619 - protein, 56 aa, Homo sapiens
  MAP TO CHR16.1; EXPRESSED IN HELA, SIGNAL = 4.4; EXPRESSED IN BONE MARROW, SIGNAL = 5.2; EXPRESSED IN HEART, SIGNAL = 2.9; EXPRESSED IN FETAL LIVER, SIGNAL = 4.2; EXPRESSED IN LUNG, SIGNAL = 2.7; EXPRESSED IN BRAIN, SIGNAL = 4.7; SWISSPROT HIT: Q9Y4W6, EVALUE 4.00e-17
GSCFRFMTCLQWPEKNAPCILFIDEIDAIGRKRGQGHFGGQSEQENTLNQMLVEMD

SEQ ID NO: 28620 - protein, 130 aa, Homo sapiens
  MAP TO CHR5.1; EXPRESSED IN LUNG, SIGNAL = 0.91; EXPRESSED IN FETAL LIVER, SIGNAL = 0.47; EXPRESSED IN HELA, SIGNAL = 0.5; EXPRESSED IN BRAIN, SIGNAL = 0.74; EXPRESSED IN HEART, SIGNAL = 1.2
LTLSSCSSRWWHPSHSPPWRAAPLPPPAGCPRGRPPSQSLLCRSLPRSSPQLSGAGFRSQGRVPPPGPRPRRGAAGQEVPAGWPLQCSGSAGGTGLGGSAAGKASPPGCSGSPRCGGSGAGRGACPQCRP

SEQ ID NO: 28621 - protein, 73 aa, Homo sapiens
  MAP TO CHR19.1; EXPRESSED IN BONE MARROW, SIGNAL = 0.88; EXPRESSED IN HEART, SIGNAL = 1.1; EXPRESSED IN FETAL LIVER, SIGNAL = 0.91; EXPRESSED IN HELA, SIGNAL = 1.2; EXPRESSED IN BRAIN, SIGNAL = 0.87; SWISSPROT HIT: P78621, EVALUE 7.20e+00
KHTFYRRAKTGLRCCPSNSRRSSIPTMPWRRSSFSPWPFLWETPSHTIRATEASRKTQRSEQLRRNLGATSES

SEQ ID NO: 28622 - protein, 70 aa, Homo sapiens
  MAP TO CHR15.1; EXPRESSED IN ADULT LIVER, SIGNAL = 2.9; EXPRESSED IN FETAL LIVER, SIGNAL = 2.4; EXPRESSED IN LUNG, SIGNAL = 1.7; EXPRESSED IN HELA, SIGNAL =   5; EXPRESSED IN BRAIN, SIGNAL = 3.3; EXPRESSED IN HEART, SIGNAL = 1.6; SWISSPROT HIT: Q9Y3R5, EVALUE 5.40e+00
FFIIIHRIWSRDRFCAFIWNVYRRMVTYYCPGIRCQSKFYFAIVVTWKRRVRRFMTNIRLHFGLKINVSR

SEQ ID NO: 28623 - protein, 83 aa, Homo sapiens
  MAP TO CHR5.1; EXPRESSED IN FETAL LIVER, SIGNAL = 0.9; EXPRESSED IN HELA, SIGNAL = 0.92; EXPRESSED IN BRAIN, SIGNAL =   1; EXPRESSED IN LUNG, SIGNAL = 1.1; EXPRESSED IN HEART, SIGNAL = 1.1; EXPRESSED IN ADULT LIVER, SIGNAL = 0.72; EXPRESSED IN BONE MARROW, SIGNAL = 0.98; SWISSPROT HIT: Q9Y5I0, EVALUE 3.00e-34
DVNVYLIIAICAVSSLLVLTLLLYTALRCSAPPTEGACAPGKPTLVCSSAAGSWSYSQQRRPRVCSGEGPHKTDLMAFSPSLP

SEQ ID NO: 28624 - protein, 53 aa, Homo sapiens
  MAP TO CHR19.1; EXPRESSED IN ADULT LIVER, SIGNAL = 2.4; EXPRESSED IN PLACENTA, SIGNAL = 2.6; EXPRESSED IN FETAL LIVER, SIGNAL = 1.4; EXPRESSED IN BRAIN, SIGNAL = 1.2; EXPRESSED IN LUNG, SIGNAL = 2.4; EXPRESSED IN HEART, SIGNAL = 2.2
TSSLQALVCGLYGHSRSISHTGRWEIGKSCLPADSLGRRTATIAEGILDHSLG

SEQ ID NO: 28625 - protein, 61 aa, Homo sapiens
  MAP TO CHR15.1; EXPRESSED IN BONE MARROW, SIGNAL =   1; EXPRESSED IN FETAL LIVER, SIGNAL = 0.96; EXPRESSED IN HELA, SIGNAL = 1.1; EXPRESSED IN LUNG, SIGNAL = 1.4; EXPRESSED IN BRAIN, SIGNAL = 1.2; SWISSPROT HIT: P34679, EVALUE 8.00e-05
QDFDHHCPWVNNCIGRRNYRYFFLFLLSLSAHMVGVVAFGLVYVLNHAEGLGAAHTTITYP

SEQ ID NO: 28626 - protein, 41 aa, Homo sapiens
  MAP TO CHR17.1; EXPRESSED IN HELA, SIGNAL = 1.6; EXPRESSED IN BRAIN, SIGNAL = 1.5; EXPRESSED IN HEART, SIGNAL = 0.71; EXPRESSED IN BONE MARROW, SIGNAL = 1.5; EXPRESSED IN ADULT LIVER, SIGNAL = 1.1; EXPRESSED IN FETAL LIVER, SIGNAL = 1.3; EXPRESSED IN LUNG, SIGNAL = 0.64
LIKPLPTSECEANKAAPFQGTSTPSQPVCLFIARMEIINAS

SEQ ID NO: 28627 - protein, 78 aa, Homo sapiens
  MAP TO CHR5.1; EXPRESSED IN HEART, SIGNAL = 0.77; EXPRESSED IN BONE MARROW, SIGNAL = 1.2; EXPRESSED IN ADULT LIVER, SIGNAL = 0.7; EXPRESSED IN PLACENTA, SIGNAL = 1.3; EXPRESSED IN FETAL LIVER, SIGNAL = 0.87; EXPRESSED IN HELA, SIGNAL = 1.3; EXPRESSED IN BRAIN, SIGNAL = 0.97
RRDGHLVLLQLQPQGMWLVQLLRTRLEPSRSDWEASWPGWLEQEEEGLGMEEMPVVPGNQRSRCSHPWGTLGSRSKAR

SEQ ID NO: 28628 - protein, 96 aa, Homo sapiens
  MAP TO CHR19.1; EXPRESSED IN HELA, SIGNAL = 0.49; EXPRESSED IN BRAIN, SIGNAL = 0.61; EXPRESSED IN LUNG, SIGNAL = 1.2; EXPRESSED IN BONE MARROW, SIGNAL = 1.1; EXPRESSED IN ADULT LIVER, SIGNAL =  15; SWISSPROT HIT: Q9PJJ9, EVALUE 1.10e+00
EAHLAQQEYINEVQSLGFGLGLEEVINTLAREGAAPLLDDGICEVVHQAAGPAETLPIRGEIIQEVYVQEDLLVSFCHKGTELQDGGNIFTGLPAG

SEQ ID NO: 28629 - protein, 53 aa, Homo sapiens
  MAP TO CHR19.1; EXPRESSED IN BONE MARROW, SIGNAL = 1.2; EXPRESSED IN ADULT LIVER, SIGNAL = 2.4; EXPRESSED IN HELA, SIGNAL = 0.7; EXPRESSED IN FETAL LIVER, SIGNAL = 1.2; EXPRESSED IN BRAIN, SIGNAL = 0.99; EXPRESSED IN LUNG, SIGNAL = 3.8; EXPRESSED IN HEART, SIGNAL = 2.7; SWISSPROT HIT: P17024, EVALUE 6.00e-22
LQMHGRTHTGEKPYKCKQCGKAFGCPSNLRRHGRTHTGEKPYKCNQCGKVFRC

SEQ ID NO: 28630 - protein, 68 aa, Homo sapiens
  MAP TO CHR14.1; EXPRESSED IN FETAL LIVER, SIGNAL = 2.3; EXPRESSED IN BONE MARROW, SIGNAL = 2.2; EXPRESSED IN ADULT LIVER, SIGNAL = 4.3; EXPRESSED IN LUNG, SIGNAL = 2.1; EXPRESSED IN PLACENTA, SIGNAL = 2.5; EXPRESSED IN BRAIN, SIGNAL = 2.6; EXPRESSED IN HEART, SIGNAL = 2.1; EXPRESSED IN HELA, SIGNAL = 2.3; SWISSPROT HIT: P36645, EVALUE 2.00e+00
PQPGALLEQPVSIPDDDLVQATFQQLQKPPSPARPRLLQDTVQRLMLPHGRLSLVTGQSGQGKTAFLV

SEQ ID NO: 28631 - protein, 47 aa, Homo sapiens
  MAP TO CHR22.1; EXPRESSED IN LUNG, SIGNAL = 2.5; EXPRESSED IN HELA, SIGNAL = 2.6; EXPRESSED IN BRAIN, SIGNAL = 2.8; EXPRESSED IN HEART, SIGNAL = 2.9; EXPRESSED IN ADULT LIVER, SIGNAL = 2.5; EXPRESSED IN BONE MARROW, SIGNAL = 2.8; EXPRESSED IN PLACENTA, SIGNAL = 1.9
TYIPLYMAFPCWFCRRVLAKSMGNTQVTPTSPATPPLMSLAVMLGQG

SEQ ID NO: 28632 - protein, 53 aa, Homo sapiens
  MAP TO CHR12.1; EXPRESSED IN BRAIN, SIGNAL = 1.2; EXPRESSED IN HEART, SIGNAL = 1.5; EXPRESSED IN BONE MARROW, SIGNAL = 1.3; EXPRESSED IN ADULT LIVER, SIGNAL = 1.6; EXPRESSED IN HELA, SIGNAL = 1.3; EXPRESSED IN LUNG, SIGNAL = 1.4
HLPTASPGGPPTKPPTKAMAPVTRAPFPECLTAAFIFLSPEREHSSFMMSSTM

SEQ ID NO: 28633 - protein, 140 aa, Homo sapiens
  MAP TO CHR19.1; EXPRESSED IN HEART, SIGNAL = 0.64; EXPRESSED IN BONE MARROW, SIGNAL = 0.7; EXPRESSED IN FETAL LIVER, SIGNAL = 1.3; EXPRESSED IN BRAIN, SIGNAL = 1.1; SWISSPROT HIT: Q9UL59, EVALUE 4.00e-18
IYECEDCGLGFVDLTDLTDHQKVHSRKCLVDSREYTHSVIHTHSISEYQRDYTGEQLYECPKCGESFIHSSFLFEHQRIHEQDQLYSMKGCDDGFIALLPMKPRRNRAAERNPALAGSAIRCLLCGQGFIHSSALNEHMR

SEQ ID NO: 28634 - protein, 75 aa, Homo sapiens
  MAP TO CHR19.1; EXPRESSED IN HELA, SIGNAL = 1.3; EXPRESSED IN BRAIN, SIGNAL = 1.3; EXPRESSED IN BONE MARROW, SIGNAL = 1.3; EXPRESSED IN ADULT LIVER, SIGNAL = 1.5; EXPRESSED IN PLACENTA, SIGNAL = 1.4; EXPRESSED IN FETAL LIVER, SIGNAL = 1.5; EXPRESSED IN LUNG, SIGNAL = 2.3
GAEAQRSPASPGPAGGDRPGWWPGSSAGGGGRQRLAVSERKGLAPRGSRFPARVGSMGCNYTAPAGSRQGGSGSW

SEQ ID NO: 28635 - protein, 32 aa, Homo sapiens
  MAP TO CHR3.1; EXPRESSED IN BONE MARROW, SIGNAL = 6.1; EXPRESSED IN ADULT LIVER, SIGNAL = 7.2; EXPRESSED IN HEART, SIGNAL = 3.4; EXPRESSED IN PLACENTA, SIGNAL =   4; EXPRESSED IN FETAL LIVER, SIGNAL = 5.4; EXPRESSED IN LUNG, SIGNAL = 3.5; EXPRESSED IN BRAIN, SIGNAL = 5.8; EXPRESSED IN HELA, SIGNAL = 4.2
NQTLKCPRCNLTGLMMRMWPHASQRTSTSRPL

SEQ ID NO: 28636 - protein, 75 aa, Homo sapiens
  MAP TO CHR5.1; EXPRESSED IN LUNG, SIGNAL = 1.4; EXPRESSED IN BRAIN, SIGNAL = 1.8; EXPRESSED IN HEART, SIGNAL = 1.5; EXPRESSED IN ADULT LIVER, SIGNAL = 2.1
RGNGSPKWQERLQRGVWSKRLRKSPLARFWKAQRNGELADRRWQPAGAHMGWEWHQQLRGSCGPRQVGLGLGPPR

SEQ ID NO: 28637 - protein, 33 aa, Homo sapiens
  MAP TO CHR5.1; EXPRESSED IN BRAIN, SIGNAL = 0.69; EXPRESSED IN ADULT LIVER, SIGNAL = 0.45; EXPRESSED IN BONE MARROW, SIGNAL = 0.68; EXPRESSED IN FETAL LIVER, SIGNAL = 0.52
ADIIYRRQLELKQDSSSCPFPQGNSVLHPALCI

SEQ ID NO: 28638 - protein, 69 aa, Homo sapiens
  MAP TO CHR14.1; EXPRESSED IN HEART, SIGNAL = 1.1; EXPRESSED IN BONE MARROW, SIGNAL = 1.5; EXPRESSED IN ADULT LIVER, SIGNAL = 0.91; EXPRESSED IN PLACENTA, SIGNAL = 1.6; EXPRESSED IN FETAL LIVER, SIGNAL = 1.5; EXPRESSED IN BRAIN, SIGNAL = 1.4; EXPRESSED IN LUNG, SIGNAL =   2; SWISSPROT HIT: P27695, EVALUE 3.00e-24
THFIEPEAKKSKTAAKKNDKEAAGEGPALYEDPPDQKTSPSGKPATLKICSWNVDGLRAWIKKKGLDVS

SEQ ID NO: 28639 - protein, 57 aa, Homo sapiens
  MAP TO CHR19.1; EXPRESSED IN PLACENTA, SIGNAL = 3.9; EXPRESSED IN FETAL LIVER, SIGNAL = 2.8; EXPRESSED IN HELA, SIGNAL = 3.7; EXPRESSED IN BRAIN, SIGNAL = 2.9; EXPRESSED IN BONE MARROW, SIGNAL = 2.5; SWISSPROT HIT: P71789, EVALUE 6.10e+00
GNLSSHPFPPWQLHRAGTALPWMTRLGAGPRPTADAELARLGKAGVAWGEVTHPGLR

SEQ ID NO: 28640 - protein, 70 aa, Homo sapiens
  MAP TO CHR17.1; EXPRESSED IN BRAIN, SIGNAL = 1.4; EXPRESSED IN ADULT LIVER, SIGNAL = 1.7; EXPRESSED IN PLACENTA, SIGNAL = 2.1; EXPRESSED IN FETAL LIVER, SIGNAL = 2.1; EXPRESSED IN LUNG, SIGNAL = 0.84; EXPRESSED IN HELA, SIGNAL = 4.5; SWISSPROT HIT: Q09714, EVALUE 2.60e+00
SLPCKVINLVDQTSENAPTTVSRDVEEKPAHAPARPEAPVDSMLKDMATIILSTFLLIGWVAFIITYPLV

SEQ ID NO: 28641 - protein, 51 aa, Homo sapiens
  MAP TO CHR7.1; EXPRESSED IN HEART, SIGNAL = 0.82; EXPRESSED IN BONE MARROW, SIGNAL = 0.58; EXPRESSED IN LUNG, SIGNAL = 0.86; EXPRESSED IN BRAIN, SIGNAL = 0.55
ALTGLHILHVEVQVISDLSHKHGLVASRSLLLLQHWHHLLHGLLLIVGPDL

SEQ ID NO: 28642 - protein, 141 aa, Homo sapiens
  MAP TO CHR7.1; EXPRESSED IN HEART, SIGNAL = 1.3; EXPRESSED IN BONE MARROW, SIGNAL = 1.2; EXPRESSED IN FETAL LIVER, SIGNAL = 1.3; EXPRESSED IN LUNG, SIGNAL = 3.8; EXPRESSED IN BRAIN, SIGNAL = 0.96; SWISSPROT HIT: Q05209, EVALUE 4.00e-65
SCLVEGDAKEEILQPPEPHPVPPILTPSPPSAFPTVTTVWQDNDRYHPKPVLHMVSSEQHSADLNRNYSKSTELPGKNESTIEQIDKKLERNLSFEIKKVPLQEGPKSFDGNTLLNRGHAIKIKSASPCIADKISKPQELS

SEQ ID NO: 28643 - protein, 49 aa, Homo sapiens
  MAP TO CHR5.1; EXPRESSED IN LUNG, SIGNAL = 0.67; EXPRESSED IN BRAIN, SIGNAL = 0.51; EXPRESSED IN FETAL LIVER, SIGNAL = 0.38; SWISSPROT HIT: P15141, EVALUE 6.30e+00
TYSLIIRSGAKHSRFALDCLYDLHPRANAIRNIQEYCSRVIWSSRCKFL

SEQ ID NO: 28644 - protein, 99 aa, Homo sapiens
  MAP TO CHR5.1; EXPRESSED IN PLACENTA, SIGNAL = 2.5; EXPRESSED IN FETAL LIVER, SIGNAL = 2.3; EXPRESSED IN LUNG, SIGNAL = 4.5; EXPRESSED IN HELA, SIGNAL = 3.8; EXPRESSED IN BRAIN, SIGNAL = 3.1; EXPRESSED IN HEART, SIGNAL = 3.5; EXPRESSED IN ADULT LIVER, SIGNAL = 1.5; EXPRESSED IN BONE MARROW, SIGNAL = 2.5; SWISSPROT HIT: Q9Y5I0, EVALUE 4.00e-45
TVSELMPRSVGAGHVVAKVRAVDADSGYNAWLSYELQLAAVGARIPFRVGLYTGEISTTRPLDEVDAPHHRLLVLVKDHGEPALTATATVLLSLVESGQ

SEQ ID NO: 28645 - protein, 70 aa, Homo sapiens
  MAP TO CHR17.1; EXPRESSED IN ADULT LIVER, SIGNAL = 8.8; EXPRESSED IN BONE MARROW, SIGNAL = 9.3; EXPRESSED IN PLACENTA, SIGNAL = 5.8; EXPRESSED IN FETAL LIVER, SIGNAL =   8; EXPRESSED IN LUNG, SIGNAL = 5.7; EXPRESSED IN HELA, SIGNAL = 5.7; EXPRESSED IN BRAIN, SIGNAL = 8.7; EXPRESSED IN HEART, SIGNAL =   7; SWISSPROT HIT: P78716, EVALUE 3.00e-04
LGEKRQELLAQANKLRTGLFKIDETREKVQVMSLELEDAKKKVAEFQKQCEEYLVIIVQQKREADEQQKV

SEQ ID NO: 28646 - protein, 20 aa, Homo sapiens
  MAP TO CHR2.1; EXPRESSED IN HELA, SIGNAL =   3; EXPRESSED IN BRAIN, SIGNAL =   3; EXPRESSED IN HEART, SIGNAL =   2; EXPRESSED IN ADULT LIVER, SIGNAL = 3.3; EXPRESSED IN PLACENTA, SIGNAL = 1.9; EXPRESSED IN FETAL LIVER, SIGNAL =   2
RGSISQHSSRPPGEKMTLPR

SEQ ID NO: 28647 - protein, 87 aa, Homo sapiens
  MAP TO CHR12.1; EXPRESSED IN HEART, SIGNAL = 1.7; EXPRESSED IN FETAL LIVER, SIGNAL =   3; EXPRESSED IN BONE MARROW, SIGNAL = 3.1; EXPRESSED IN ADULT LIVER, SIGNAL =   3; EXPRESSED IN PLACENTA, SIGNAL =   3; EXPRESSED IN LUNG, SIGNAL =   2; EXPRESSED IN BRAIN, SIGNAL =   3; EXPRESSED IN HELA, SIGNAL = 3.8
GLTWALLGESLGGSELAEMGSEAGLGRGHCWQTRSGVQAGMGLGAPRRRLLPPREQESGGALEWGPSLLGAGQGGVCWTPVGAVEWG

SEQ ID NO: 28648 - protein, 130 aa, Homo sapiens
  MAP TO CHR5.1; EXPRESSED IN BONE MARROW, SIGNAL = 2.4; EXPRESSED IN LUNG, SIGNAL = 1.2; EXPRESSED IN BRAIN, SIGNAL = 2.9; EXPRESSED IN HELA, SIGNAL = 5.5; EXPRESSED IN HEART, SIGNAL = 1.4; EXPRESSED IN ADULT LIVER, SIGNAL = 1.9; EXPRESSED IN FETAL LIVER, SIGNAL = 2.3; EXPRESSED IN PLACENTA, SIGNAL = 3.2; SWISSPROT HIT: Q9UN74, EVALUE 2.00e-64
QESRRLLLLLLLLAAWEAGNGQLHYSVSEEAKHGTFVGRIAQDLGLELAELVPRLFRVASKGRGGLLEVNLQNGILFVNSRIDREELCRRSAECSIHLEVIVDRPLQVFHVDVEVRDINDNPPVFPATQK

SEQ ID NO: 28649 - protein, 50 aa, Homo sapiens
  MAP TO CHR17.1; EXPRESSED IN BRAIN, SIGNAL = 1.4; EXPRESSED IN HELA, SIGNAL = 1.9; EXPRESSED IN ADULT LIVER, SIGNAL = 1.5; EXPRESSED IN BONE MARROW, SIGNAL = 1.4; EXPRESSED IN FETAL LIVER, SIGNAL = 1.4
RVPPHQGHIAPVNAEVGCQGVVARQKWRLALGTAGVAIGGCHHLQASRKR

SEQ ID NO: 28650 - protein, 141 aa, Homo sapiens
  MAP TO CHR4.1; EXPRESSED IN HEART, SIGNAL = 1.1; EXPRESSED IN ADULT LIVER, SIGNAL = 1.1; EXPRESSED IN PLACENTA, SIGNAL = 1.5; EXPRESSED IN FETAL LIVER, SIGNAL = 1.2; EXPRESSED IN HELA, SIGNAL = 1.2; EXPRESSED IN LUNG, SIGNAL = 2.1; EXPRESSED IN BRAIN, SIGNAL = 1.4; SWISSPROT HIT: P38990, EVALUE 6.10e+00
PKASEAPATQLALRHLTMNSKVGTDQAVGNTAWHADTGRERLQQGFHVIVCNVRPHLSLRLGTASILPFLGSFVAPARVQPSCLLPLLLLKTVSEWGASARITVTSKGVTCDTSRNLHIAVFFRLLSQSRVSIRVASSVAL

SEQ ID NO: 28651 - protein, 96 aa, Homo sapiens
  MAP TO CHR14.1; EXPRESSED IN FETAL LIVER, SIGNAL = 0.34; EXPRESSED IN BRAIN, SIGNAL = 0.41; EXPRESSED IN BONE MARROW, SIGNAL = 0.47; SWISSPROT HIT: P01738, EVALUE 6.00e-34
TVSEGASLELRCNYSYGATPYLFWYVQSPGQGLQLLLKYFSGDTLVQGIKGFEAEFKRSQSSFNLRKPSVHWSDAAEYFCAVGATVPGSAGGAEHK

SEQ ID NO: 28652 - protein, 118 aa, Homo sapiens
  MAP TO CHR14.1; EXPRESSED IN BRAIN, SIGNAL =   1; EXPRESSED IN HEART, SIGNAL = 1.2; EXPRESSED IN BONE MARROW, SIGNAL = 1.1; EXPRESSED IN FETAL LIVER, SIGNAL = 0.85; EXPRESSED IN LUNG, SIGNAL = 1.3; EXPRESSED IN HELA, SIGNAL = 1.2
HSAARPLVLLRVCAQLPLQSLSLCHSEHRSTQRSLTLELSLSPSGKKWFLYGTWLQNLCSFPCHWPSWLSGGAVDLLQDIGHTKKGKGTVWFHRSSSQSGNPLQRGALGLLSGPLNLH

SEQ ID NO: 28653 - protein, 47 aa, Homo sapiens
  MAP TO CHR14.1; EXPRESSED IN FETAL LIVER, SIGNAL = 2.2; EXPRESSED IN HEART, SIGNAL = 1.8; EXPRESSED IN BONE MARROW, SIGNAL =   3; EXPRESSED IN ADULT LIVER, SIGNAL = 2.3; EXPRESSED IN PLACENTA, SIGNAL = 2.9; EXPRESSED IN LUNG, SIGNAL = 1.6; EXPRESSED IN BRAIN, SIGNAL = 2.7; EXPRESSED IN HELA, SIGNAL = 3.3
VCCSLVPLAALGGSFIQKPHYRETILRSDLSPQIPNGKGSSGNFKEQ

SEQ ID NO: 28654 - protein, 52 aa, Homo sapiens
  MAP TO CHR19.1; EXPRESSED IN HELA, SIGNAL = 1.3; EXPRESSED IN BRAIN, SIGNAL = 0.95; EXPRESSED IN BONE MARROW, SIGNAL =   1; EXPRESSED IN ADULT LIVER, SIGNAL = 1.4; EXPRESSED IN PLACENTA, SIGNAL = 1.4; EXPRESSED IN FETAL LIVER, SIGNAL =   1
NSPPQLTHPKAGSPTPAGAFLPPGLGLGSRGRAGRCEGESCRELCLGKVGGT

SEQ ID NO: 28655 - protein, 35 aa, Homo sapiens
  MAP TO CHR5.1; EXPRESSED IN HEART, SIGNAL = 0.98; EXPRESSED IN BONE MARROW, SIGNAL = 1.1; EXPRESSED IN FETAL LIVER, SIGNAL = 0.81; EXPRESSED IN LUNG, SIGNAL = 0.63; EXPRESSED IN HELA, SIGNAL = 1.2; EXPRESSED IN BRAIN, SIGNAL = 1.2; SWISSPROT HIT: P98095, EVALUE 8.60e+00
SQFNSKNLAHLQNKLLLSLAHYHPRKSCTGTECPE

SEQ ID NO: 28656 - protein, 36 aa, Homo sapiens
  MAP TO CHR7.1; EXPRESSED IN BONE MARROW, SIGNAL = 1.7; EXPRESSED IN HELA, SIGNAL = 1.3; EXPRESSED IN FETAL LIVER, SIGNAL = 1.2; EXPRESSED IN BRAIN, SIGNAL = 1.7; EXPRESSED IN LUNG, SIGNAL = 0.84; EXPRESSED IN HEART, SIGNAL = 1.1
QYPFSREKSFTWMSLPNHLLKNKAIELKTFHESLVS

SEQ ID NO: 28657 - protein, 71 aa, Homo sapiens
  MAP TO CHR20.1; EXPRESSED IN FETAL LIVER, SIGNAL = 0.96; EXPRESSED IN LUNG, SIGNAL = 0.68; EXPRESSED IN HELA, SIGNAL = 0.94; EXPRESSED IN BRAIN, SIGNAL =   1; EXPRESSED IN HEART, SIGNAL = 1.2; EXPRESSED IN BONE MARROW, SIGNAL = 1.1; SWISSPROT HIT: P51130, EVALUE 7.70e+00
SLTFLVHSTILLSVKVSNISWKNTLSFCWIREIVMSETGRLATWAMTSATRPEPSTTTQGVPLVVALSMVC

SEQ ID NO: 28658 - protein, 57 aa, Homo sapiens
  MAP TO CHR11.1; EXPRESSED IN HEART, SIGNAL = 1.7; EXPRESSED IN BONE MARROW, SIGNAL = 0.44; EXPRESSED IN LUNG, SIGNAL = 1.7; EXPRESSED IN BRAIN, SIGNAL = 0.45; SWISSPROT HIT: O14521, EVALUE 6.00e-17
FFRGLGQVVTDYVHGDALQKAAKAGLLALSALTFAGLCYFNYHDVGICKAVAMLWKL

SEQ ID NO: 28659 - protein, 65 aa, Homo sapiens
  MAP TO CHR9.1; EXPRESSED IN FETAL LIVER, SIGNAL = 1.2; EXPRESSED IN LUNG, SIGNAL = 1.2; EXPRESSED IN HELA, SIGNAL = 0.89; EXPRESSED IN BRAIN, SIGNAL = 1.1; EXPRESSED IN BONE MARROW, SIGNAL = 0.98; EXPRESSED IN HEART, SIGNAL = 1.1; EXPRESSED IN ADULT LIVER, SIGNAL = 0.94; SWISSPROT HIT: P30953, EVALUE 6.00e-11
FLLLGLPIRPEQQAVFFALFLGMYLTTVLGNLLIMLLIQLDSHLHTPMYFFLSHLALTDISFSSV

SEQ ID NO: 28660 - protein, 77 aa, Homo sapiens
  MAP TO CHR5.1; EXPRESSED IN BONE MARROW, SIGNAL = 4.5; EXPRESSED IN PLACENTA, SIGNAL =   3; EXPRESSED IN FETAL LIVER, SIGNAL =   4; EXPRESSED IN LUNG, SIGNAL = 2.2; EXPRESSED IN HELA, SIGNAL = 4.1; EXPRESSED IN BRAIN, SIGNAL = 4.4; EXPRESSED IN ADULT LIVER, SIGNAL = 3.8; EXPRESSED IN HEART, SIGNAL = 1.9; SWISSPROT HIT: P31806, EVALUE 8.70e+00
SLPCPSPSLTPTPLAIHVSVSLPGQDAVLVGGGTERLWDIQEGVATIQDSRHLLRACPELVIHQLRQGFPQLILITR

SEQ ID NO: 28661 - protein, 63 aa, Homo sapiens
  MAP TO CHR6.1; EXPRESSED IN ADULT LIVER, SIGNAL = 1.6; EXPRESSED IN BONE MARROW, SIGNAL = 1.8; EXPRESSED IN PLACENTA, SIGNAL = 1.4; EXPRESSED IN FETAL LIVER, SIGNAL = 1.5; EXPRESSED IN LUNG, SIGNAL = 0.95; EXPRESSED IN BRAIN, SIGNAL = 1.7; EXPRESSED IN HEART, SIGNAL = 1.7
GWCRVTGGRIPLPSPGRSVSLKNTFPFLFPCAADDLHGRWSVIFCPDQRLRSAVLGTARASGR

SEQ ID NO: 28662 - protein, 126 aa, Homo sapiens
  MAP TO CHR3.1; EXPRESSED IN BRAIN, SIGNAL = 0.7; EXPRESSED IN BONE MARROW, SIGNAL = 0.57; EXPRESSED IN HEART, SIGNAL = 1.7; EXPRESSED IN ADULT LIVER, SIGNAL = 3.2; EXPRESSED IN HELA, SIGNAL =   1; EXPRESSED IN LUNG, SIGNAL = 5.9; SWISSPROT HIT: P48794, EVALUE 1.00e-09
QETCQYLKDYLTRLLVPYVVNVSWATQYCSRAQCHGHGRCVRRNPSASTFLHLSTNSFRLVPGHAPGEPQLRPVGELSWADIDHLQTHFRCQCYLGWSGEQCQWDHRQAAGGASEAWAGSHLTSLL

SEQ ID NO: 28663 - protein, 56 aa, Homo sapiens
  MAP TO AC015913.4; EXPRESSED IN FETAL LIVER, SIGNAL = 0.85; EXPRESSED IN HELA, SIGNAL = 0.82; EXPRESSED IN BRAIN, SIGNAL =   1; EXPRESSED IN HEART, SIGNAL = 1.7; EXPRESSED IN BONE MARROW, SIGNAL = 0.94; EXPRESSED IN ADULT LIVER, SIGNAL = 1.1; EXPRESSED IN LUNG, SIGNAL = 1.5; SWISSPROT HIT: O14939, EVALUE 9.00e-25
PFCSRWLVVKDSFLLYMCLETGAISFVQLFDPGFEVQVGKRSTEARHGVRIDTSHR

SEQ ID NO: 28664 - protein, 98 aa, Homo sapiens
  MAP TO CHR22.1; EXPRESSED IN ADULT LIVER, SIGNAL =   1; EXPRESSED IN FETAL LIVER, SIGNAL = 0.77; EXPRESSED IN PLACENTA, SIGNAL = 1.6; EXPRESSED IN LUNG, SIGNAL = 0.64; EXPRESSED IN HELA, SIGNAL = 1.2; EXPRESSED IN BRAIN, SIGNAL = 0.97; EXPRESSED IN HEART, SIGNAL = 1.1; SWISSPROT HIT: Q9Y6J0, EVALUE 5.00e-51
WKCLGESLLAMYNHLTTCEPPRPSLGKRIDLSDYQDPSQPLESSMVVTPVNVIQPSTVSTNPAVAVAEPVVSYTSVATTSFPLHSPGLLETGAPVGKQ

SEQ ID NO: 28665 - protein, 52 aa, Homo sapiens
  MAP TO CHR2.1; EXPRESSED IN ADULT LIVER, SIGNAL = 1.3; EXPRESSED IN FETAL LIVER, SIGNAL = 1.1; EXPRESSED IN LUNG, SIGNAL = 0.71; EXPRESSED IN HELA, SIGNAL = 1.3; EXPRESSED IN BRAIN, SIGNAL = 1.3; EXPRESSED IN BONE MARROW, SIGNAL = 1.2; SWISSPROT HIT: O06865, EVALUE 3.70e+00
PHLPVLYQAGKAAGKRLWRWRLSGWGPHQCHSTPLYRMRGDRLCCPGGDTGT

SEQ ID NO: 28666 - protein, 118 aa, Homo sapiens
  MAP TO CHR5.1; EXPRESSED IN HELA, SIGNAL = 1.8; EXPRESSED IN BRAIN, SIGNAL = 0.92; EXPRESSED IN LUNG, SIGNAL = 1.6; EXPRESSED IN HEART, SIGNAL = 1.1; EXPRESSED IN BONE MARROW, SIGNAL = 0.98; EXPRESSED IN PLACENTA, SIGNAL = 1.1; SWISSPROT HIT: Q15696, EVALUE 1.00e-69
TYQQFLDFYEDVLPEFKNVGKVIQFKVSCNLEPHLRGNVYVQYQSEEECQAALSLFNGRWYAGRQLQCEFCPVTRWKMAICGLFEIQQCPRGKHCNFLHVFRNPNNEFWEANRDIYLS

SEQ ID NO: 28667 - protein, 60 aa, Homo sapiens
  MAP TO CHR7.1; EXPRESSED IN BONE MARROW, SIGNAL = 1.1; EXPRESSED IN HEART, SIGNAL = 0.96; EXPRESSED IN ADULT LIVER, SIGNAL = 1.2; EXPRESSED IN FETAL LIVER, SIGNAL = 1.1; EXPRESSED IN LUNG, SIGNAL = 1.2; EXPRESSED IN HELA, SIGNAL =   1; EXPRESSED IN BRAIN, SIGNAL = 0.96; SWISSPROT HIT: P15056, EVALUE 3.00e-29
RKTRHVNILLFMGYSTKPQLAIVTQWCEGSSLYHHLHIIETKFEMIKLIDIARQTAQGME

SEQ ID NO: 28668 - protein, 54 aa, Homo sapiens
  MAP TO CHR12.1; EXPRESSED IN PLACENTA, SIGNAL = 1.7; EXPRESSED IN FETAL LIVER, SIGNAL = 1.2; EXPRESSED IN BRAIN, SIGNAL = 1.1; EXPRESSED IN ADULT LIVER, SIGNAL = 0.45; EXPRESSED IN LUNG, SIGNAL = 1.8; EXPRESSED IN HELA, SIGNAL = 1.5; EXPRESSED IN HEART, SIGNAL = 1.5; EXPRESSED IN BONE MARROW, SIGNAL = 1.2; SWISSPROT HIT: Q9Y6Q5, EVALUE 5.00e-24
ISRNYKGDVAMSKIEHFMPLLVQREEEGALAPLLSHGQVHFLWIKHSNLYCIHP

SEQ ID NO: 28669 - protein, 74 aa, Homo sapiens
  MAP TO CHR14.1; EXPRESSED IN PLACENTA, SIGNAL = 1.3; EXPRESSED IN FETAL LIVER, SIGNAL = 1.1; EXPRESSED IN HELA, SIGNAL = 1.1; EXPRESSED IN BRAIN, SIGNAL = 1.2; EXPRESSED IN BONE MARROW, SIGNAL = 0.98; SWISSPROT HIT: P45016, EVALUE 4.30e+00
VCAQLPLQSLSLCHSEHRSTPLSLTLELSLSPSGKKWFLYGMWLQNLCCFPCHQPSWLSGGAVDLLQDIGHTRK

SEQ ID NO: 28670 - protein, 53 aa, Homo sapiens
  MAP TO CHR7.1; EXPRESSED IN LUNG, SIGNAL = 0.78; EXPRESSED IN HELA, SIGNAL = 2.9; EXPRESSED IN BRAIN, SIGNAL = 2.3; EXPRESSED IN ADULT LIVER, SIGNAL = 2.3; EXPRESSED IN BONE MARROW, SIGNAL = 1.9; EXPRESSED IN PLACENTA, SIGNAL = 1.3; EXPRESSED IN FETAL LIVER, SIGNAL = 1.7
IFGCKTSKHWVWNQKGRRGNNNKKIPCQECGETWQSQPHDWHCRALKPGTAVE

SEQ ID NO: 28671 - protein, 79 aa, Homo sapiens
  MAP TO CHR7.1; EXPRESSED IN ADULT LIVER, SIGNAL = 0.39; EXPRESSED IN FETAL LIVER, SIGNAL = 0.76; EXPRESSED IN HELA, SIGNAL = 1.3; EXPRESSED IN BRAIN, SIGNAL = 0.73; EXPRESSED IN LUNG, SIGNAL = 1.2; EXPRESSED IN HEART, SIGNAL = 0.96; EXPRESSED IN BONE MARROW, SIGNAL = 0.63; SWISSPROT HIT: Q9UDV7, EVALUE 3.00e-17
QHRRKRRSTPLTSSTLPSQATEKSSYFQTTEISLWTVVAAIQAVEKKMESQAARLQSLEGRTGTAEKKLADCEKMAVEF

SEQ ID NO: 28672 - protein, 109 aa, Homo sapiens
  MAP TO CHR14.1; EXPRESSED IN FETAL LIVER, SIGNAL = 5.7; EXPRESSED IN LUNG, SIGNAL = 2.7; EXPRESSED IN HELA, SIGNAL = 7.7; EXPRESSED IN BRAIN, SIGNAL = 6.3; EXPRESSED IN HEART, SIGNAL = 3.4; EXPRESSED IN BONE MARROW, SIGNAL = 6.5; EXPRESSED IN ADULT LIVER, SIGNAL = 5.8; SWISSPROT HIT: P06322, EVALUE 1.00e-23
TRGNSVTQMEGPVTLSEEAFLTINCTYTATGYPSLFWYVQYPGEGLQLLLKATKADDKGSNKGFEATYRKETTSFHLEKGSVQVSDSAVYFCALSDTVTGTAGGAEHKL

SEQ ID NO: 28673 - protein, 77 aa, Homo sapiens
  MAP TO CHR14.1; EXPRESSED IN HELA, SIGNAL = 0.44; EXPRESSED IN BRAIN, SIGNAL = 0.81; EXPRESSED IN BONE MARROW, SIGNAL = 0.8; EXPRESSED IN HEART, SIGNAL = 0.42; EXPRESSED IN FETAL LIVER, SIGNAL = 0.69; SWISSPROT HIT: Q9Z1T6, EVALUE 1.90e+00
PDSSGSSGSIEEPQLGECSHCGRKFLSFRLERHSNICSRMRGSKRKVFDSSRARAKGTELEQYLNWKGPASAKVTRA

SEQ ID NO: 28674 - protein, 63 aa, Homo sapiens
  MAP TO CHRX.1; EXPRESSED IN PLACENTA, SIGNAL = 3.5; EXPRESSED IN FETAL LIVER, SIGNAL = 5.1; EXPRESSED IN HELA, SIGNAL = 3.5; EXPRESSED IN BRAIN, SIGNAL = 5.4; EXPRESSED IN LUNG, SIGNAL = 3.4; EXPRESSED IN HEART, SIGNAL =   3; EXPRESSED IN ADULT LIVER, SIGNAL = 6.9; EXPRESSED IN BONE MARROW, SIGNAL = 4.8; SWISSPROT HIT: P51793, EVALUE 6.00e-35
GTLAGVIDLAVDWMTDLKEGVCLSAFWYSHEQCCWTSNETTFEDRDKCPLWQKWSELLVNQSE

SEQ ID NO: 28675 - protein, 40 aa, Homo sapiens
  MAP TO CHR9.1; EXPRESSED IN BRAIN, SIGNAL = 0.52; EXPRESSED IN HEART, SIGNAL = 0.67; EXPRESSED IN LUNG, SIGNAL = 0.61; SWISSPROT HIT: P35820, EVALUE 2.90e+00
LTACPWSTPPGAWGPLRSNTAAPRLHRPILAPPERPRLQA

SEQ ID NO: 28676 - protein, 86 aa, Homo sapiens
  MAP TO CHR19.1; EXPRESSED IN ADULT LIVER, SIGNAL = 4.7; EXPRESSED IN BONE MARROW, SIGNAL = 3.7; EXPRESSED IN PLACENTA, SIGNAL = 5.2; EXPRESSED IN FETAL LIVER, SIGNAL = 3.8; EXPRESSED IN LUNG, SIGNAL = 3.3; EXPRESSED IN HEART, SIGNAL = 3.5; EXPRESSED IN BRAIN, SIGNAL = 4.9; EXPRESSED IN HELA, SIGNAL = 6.9
QHPHLGRGPRALGSGSQQGRHSERSLPCCHSGRAHRAAAPGHTHPHPLHTPSPGSQPGKHSGKSQAGSCRPLGHTGLGSGCIHPHL

SEQ ID NO: 28677 - protein, 35 aa, Homo sapiens
  MAP TO CHR6.1; EXPRESSED IN LUNG, SIGNAL = 0.89; EXPRESSED IN HELA, SIGNAL = 0.95; EXPRESSED IN BRAIN, SIGNAL = 0.78; EXPRESSED IN BONE MARROW, SIGNAL = 0.78; EXPRESSED IN HEART, SIGNAL = 0.81; EXPRESSED IN ADULT LIVER, SIGNAL = 0.7; EXPRESSED IN FETAL LIVER, SIGNAL = 0.97
KTFDPSNGRGRKQRDEIRGISEKEILKHKGQKSES

SEQ ID NO: 28678 - protein, 59 aa, Homo sapiens
  MAP TO CHR7.1; EXPRESSED IN FETAL LIVER, SIGNAL = 0.99; EXPRESSED IN LUNG, SIGNAL = 1.4; EXPRESSED IN HELA, SIGNAL = 0.83; EXPRESSED IN BRAIN, SIGNAL = 0.84; EXPRESSED IN HEART, SIGNAL = 1.3; EXPRESSED IN BONE MARROW, SIGNAL = 0.71; SWISSPROT HIT: Q03674, EVALUE 7.20e-01
EKGALPAVPAGNWLSGTSRGHEGLLGQEVVDNATLSGETRLGLRSCVTPGKSREQPVLR

SEQ ID NO: 28679 - protein, 46 aa, Homo sapiens
  MAP TO CHR7.1; EXPRESSED IN BONE MARROW, SIGNAL = 0.98; EXPRESSED IN HELA, SIGNAL = 0.97; EXPRESSED IN LUNG, SIGNAL = 1.8; EXPRESSED IN BRAIN, SIGNAL = 1.1; EXPRESSED IN HEART, SIGNAL = 1.9; SWISSPROT HIT: Q9CPH8, EVALUE 5.20e-02
DFLHLFEKNMIPERTVEFQHIIPISAVTGEGIEELKNCIRKSLDEQ

SEQ ID NO: 28680 - protein, 38 aa, Homo sapiens
  MAP TO AL159162.5; EXPRESSED IN PLACENTA, SIGNAL =  24; EXPRESSED IN LUNG, SIGNAL =  11; EXPRESSED IN BRAIN, SIGNAL =  15; EXPRESSED IN HEART, SIGNAL =  12
AGMMFWRALWLSRHSFLEGPFTVFWVAVMAWTVVMSPS

SEQ ID NO: 28681 - protein, 64 aa, Homo sapiens
  MAP TO CHRX.1; EXPRESSED IN FETAL LIVER, SIGNAL = 0.41; EXPRESSED IN LUNG, SIGNAL = 0.79; EXPRESSED IN BRAIN, SIGNAL = 0.5; SWISSPROT HIT: Q02173, EVALUE 2.00e-03
VFPHVTGLYNSVDSWMIVPNIKQNHYTVHGLQSGTRYIFIVKAINQAGSRNSEPTRLKTNSTLW

SEQ ID NO: 28682 - protein, 67 aa, Homo sapiens
  MAP TO CHR17.1; EXPRESSED IN BONE MARROW, SIGNAL = 2.9; EXPRESSED IN PLACENTA, SIGNAL =  19; EXPRESSED IN FETAL LIVER, SIGNAL =   5; EXPRESSED IN LUNG, SIGNAL = 3.8; EXPRESSED IN BRAIN, SIGNAL = 0.89; EXPRESSED IN HEART, SIGNAL = 0.66; SWISSPROT HIT: O14345, EVALUE 2.70e+00
PLRPRSLPLTPQYGEKNDHQWLTAVAAKQRQKAGFTLRRKRYLSSSGFSVLYTFKETSLVTHYRNDP

SEQ ID NO: 28683 - protein, 87 aa, Homo sapiens
  MAP TO CHR17.1; EXPRESSED IN ADULT LIVER, SIGNAL = 2.2; EXPRESSED IN PLACENTA, SIGNAL = 2.7; EXPRESSED IN FETAL LIVER, SIGNAL = 2.8; EXPRESSED IN LUNG, SIGNAL = 2.7; EXPRESSED IN HELA, SIGNAL = 5.1; EXPRESSED IN BRAIN, SIGNAL = 2.6; EXPRESSED IN HEART, SIGNAL = 2.2
SGSCKWIRTPAIIYSVHTMTTLIPILSTFLFEDFSKASGFKGQRPETLHERLTLVSVYAPYLLIPFILLIFMLRSPYYKYEEKRKKK

SEQ ID NO: 28684 - protein, 66 aa, Homo sapiens
  MAP TO CHR7.1; EXPRESSED IN FETAL LIVER, SIGNAL = 3.4; EXPRESSED IN HELA, SIGNAL = 1.7; EXPRESSED IN BRAIN, SIGNAL = 3.9; EXPRESSED IN LUNG, SIGNAL = 4.2; EXPRESSED IN PLACENTA, SIGNAL = 2.8; EXPRESSED IN HEART, SIGNAL =   4; EXPRESSED IN ADULT LIVER, SIGNAL =   2; SWISSPROT HIT: O60628, EVALUE 2.20e-02
LAFQLFPQAVINTMCGQGMQAFDYLEASKVIYTNGCIDKLVNWIHSNLFLLGGVALGLAIPQVTYP

SEQ ID NO: 28685 - protein, 68 aa, Homo sapiens
  MAP TO CHR5.1; EXPRESSED IN BRAIN, SIGNAL = 0.54; EXPRESSED IN HEART, SIGNAL = 0.58; EXPRESSED IN ADULT LIVER, SIGNAL = 0.82; EXPRESSED IN BONE MARROW, SIGNAL = 0.62
LKPHTRSQQIFNQFQVSLLRCLHQRCGAAKFYISPCLNKKVCNFRKSSTASQSKSSFLSFFCLGIYIC

SEQ ID NO: 28686 - protein, 94 aa, Homo sapiens
  MAP TO CHR16.1; EXPRESSED IN PLACENTA, SIGNAL = 3.3; EXPRESSED IN LUNG, SIGNAL = 3.3; EXPRESSED IN FETAL LIVER, SIGNAL = 3.2; EXPRESSED IN HELA, SIGNAL = 3.2; EXPRESSED IN BRAIN, SIGNAL = 3.8; EXPRESSED IN HEART, SIGNAL = 3.5; EXPRESSED IN ADULT LIVER, SIGNAL = 3.5; EXPRESSED IN BONE MARROW, SIGNAL = 3.8; SWISSPROT HIT: P52272, EVALUE 1.10e+00
DGLGPEVLDSLPELDDRGLAVSKLVTSEVGQAGTGTVFMVEDLHTVGSVPGVATCGPGQRGGKGLDQVIEAPGQHHDVVGVAVEDDHHGGIAQA

SEQ ID NO: 28687 - protein, 51 aa, Homo sapiens
  MAP TO CHR17.1; EXPRESSED IN BRAIN, SIGNAL = 0.42; EXPRESSED IN HEART, SIGNAL = 0.57; EXPRESSED IN ADULT LIVER, SIGNAL = 0.57; SWISSPROT HIT: Q9LW85, EVALUE 6.30e+00
QAQEEQHQEVQKAKEADIEKLNQALCLRYKVKEGPRSGAMKNWGSSTGPLG

SEQ ID NO: 28688 - protein, 37 aa, Homo sapiens
  MAP TO CHR12.1; EXPRESSED IN BONE MARROW, SIGNAL = 0.65; EXPRESSED IN BRAIN, SIGNAL = 0.6; EXPRESSED IN HEART, SIGNAL = 0.58
KPVNRQAGSLRRRDRQSFDRNDRTTANQNPGYAWAKS

SEQ ID NO: 28689 - protein, 79 aa, Homo sapiens
  MAP TO CHR1.1; EXPRESSED IN FETAL LIVER, SIGNAL =   4; EXPRESSED IN HELA, SIGNAL = 4.5; EXPRESSED IN LUNG, SIGNAL = 6.1; EXPRESSED IN BRAIN, SIGNAL =   4; EXPRESSED IN HEART, SIGNAL = 4.8; EXPRESSED IN BONE MARROW, SIGNAL =   4; EXPRESSED IN ADULT LIVER, SIGNAL = 0.68; EXPRESSED IN PLACENTA, SIGNAL = 5.1
GPLKGFLEALGRLQKKFYSKGLRLECPIRTYLVTARSAASSGARALKTLRSWGLETDEALFLAGAPKGPLLEKIRPHIF

SEQ ID NO: 28690 - protein, 68 aa, Homo sapiens
  MAP TO CHR5.1; EXPRESSED IN HELA, SIGNAL = 1.6; EXPRESSED IN BRAIN, SIGNAL = 1.4; EXPRESSED IN BONE MARROW, SIGNAL = 1.4; EXPRESSED IN ADULT LIVER, SIGNAL = 1.5; EXPRESSED IN PLACENTA, SIGNAL = 1.4; EXPRESSED IN FETAL LIVER, SIGNAL = 1.5; SWISSPROT HIT: P14591, EVALUE 2.00e+00
RPIQSRGKGARSQDVEGQLSLCHELPARYRGGERPEQEQGQLSCASVPDASTSHQEPEKRYPRTLGPW

SEQ ID NO: 28691 - protein, 69 aa, Homo sapiens
  MAP TO CHR17.1; EXPRESSED IN HELA, SIGNAL = 0.86; EXPRESSED IN BRAIN, SIGNAL = 0.66; EXPRESSED IN BONE MARROW, SIGNAL = 0.72; EXPRESSED IN HEART, SIGNAL = 0.62; EXPRESSED IN ADULT LIVER, SIGNAL = 0.78
LSLRCWCRSRMRRKETKRWGPLELSPPLCFFPSAASSSARSFRGSRSGSSSPPGPKARTNRSPASKEDA

SEQ ID NO: 28692 - protein, 74 aa, Homo sapiens
  MAP TO CHR19.1; EXPRESSED IN HELA, SIGNAL = 1.8; EXPRESSED IN BRAIN, SIGNAL = 1.3; EXPRESSED IN HEART, SIGNAL = 0.78; EXPRESSED IN BONE MARROW, SIGNAL = 1.6; EXPRESSED IN PLACENTA, SIGNAL = 1.9; EXPRESSED IN FETAL LIVER, SIGNAL = 1.3; EXPRESSED IN LUNG, SIGNAL = 1.1; SWISSPROT HIT: Q15139, EVALUE 5.00e-13
QEIPLSEILTVESAQNFSLVPPGTNPHCFEIVTANATYFVGEMPGGTPGGPSGQGAEAARGWETAIRQALMPVI

SEQ ID NO: 28693 - protein, 101 aa, Homo sapiens
  MAP TO CHR19.1; EXPRESSED IN PLACENTA, SIGNAL = 6.5; EXPRESSED IN FETAL LIVER, SIGNAL = 6.3; EXPRESSED IN LUNG, SIGNAL = 3.7; EXPRESSED IN HELA, SIGNAL =   7; EXPRESSED IN BRAIN, SIGNAL = 6.8; EXPRESSED IN HEART, SIGNAL = 3.6; EXPRESSED IN ADULT LIVER, SIGNAL = 8.1; EXPRESSED IN BONE MARROW, SIGNAL = 7.7; SWISSPROT HIT: Q05469, EVALUE 1.00e-52
DTPEMSLSAETLSPSTPSDVNFLLPPEDAGEEAEAKNELSPMDRGLGVRAAFPEGFHPRRSSQGATQMPLYSSPIVKNPFMSPLLAPDSMLKSLPPVHIVV

SEQ ID NO: 28694 - protein, 67 aa, Homo sapiens
  MAP TO CHR14.1; EXPRESSED IN BRAIN, SIGNAL = 0.62; EXPRESSED IN HEART, SIGNAL = 0.51; EXPRESSED IN ADULT LIVER, SIGNAL = 0.4; EXPRESSED IN BONE MARROW, SIGNAL = 0.71; SWISSPROT HIT: Q9Z8M1, EVALUE 2.70e+00
ASCAGKQSGQNAEALSTPSRNKNIIPGGKEHGPSQVPLSCFPGRRFKGDKSTNERQTNHRDHSRGNG

SEQ ID NO: 28695 - protein, 25 aa, Homo sapiens
  MAP TO CHR6.1; EXPRESSED IN PLACENTA, SIGNAL = 1.5; EXPRESSED IN FETAL LIVER, SIGNAL = 1.4; EXPRESSED IN LUNG, SIGNAL = 0.71; EXPRESSED IN HELA, SIGNAL = 1.7; EXPRESSED IN BRAIN, SIGNAL = 1.7; EXPRESSED IN ADULT LIVER, SIGNAL = 1.1; EXPRESSED IN BONE MARROW, SIGNAL = 1.7; EXPRESSED IN HEART, SIGNAL = 0.71
DEPILKAKFSKNKSSRKRKLDYCKG

SEQ ID NO: 28696 - protein, 55 aa, Homo sapiens
  MAP TO CHR22.1; EXPRESSED IN BRAIN, SIGNAL = 0.3; EXPRESSED IN HEART, SIGNAL = 0.72; EXPRESSED IN FETAL LIVER, SIGNAL = 0.32
VHSPSSYQELFLRRLLPHLGVEVNGEEGAGAVEDGGQGAHERGQHDRKHQASQSW

SEQ ID NO: 28697 - protein, 59 aa, Homo sapiens
  MAP TO CHR12.1; EXPRESSED IN PLACENTA, SIGNAL = 2.1; EXPRESSED IN FETAL LIVER, SIGNAL = 1.8; EXPRESSED IN LUNG, SIGNAL = 1.2; EXPRESSED IN BRAIN, SIGNAL = 2.2; EXPRESSED IN BONE MARROW, SIGNAL = 2.4; EXPRESSED IN HEART, SIGNAL = 1.3; EXPRESSED IN ADULT LIVER, SIGNAL = 1.9; SWISSPROT HIT: Q09222, EVALUE 4.70e+00
SKPSKPSKPQITVMILNWASHHAVLLSTGDAVMKAFHSDLQFSGHELVLAEYTGQGTAA

SEQ ID NO: 28698 - protein, 62 aa, Homo sapiens
  MAP TO CHR2.1; EXPRESSED IN HELA, SIGNAL = 1.3; EXPRESSED IN BRAIN, SIGNAL = 1.1; EXPRESSED IN HEART, SIGNAL = 1.3; EXPRESSED IN ADULT LIVER, SIGNAL = 1.4; EXPRESSED IN BONE MARROW, SIGNAL = 1.1; EXPRESSED IN PLACENTA, SIGNAL = 1.5; EXPRESSED IN FETAL LIVER, SIGNAL = 1.1; EXPRESSED IN LUNG, SIGNAL = 1.2
DMQLKRLEGKTRLFHGDGIKYLLVVEIPLFELQWLFFLLSQLPSVLQELEETFLELTLYFLK

SEQ ID NO: 28699 - protein, 49 aa, Homo sapiens
  MAP TO CHR1.1; EXPRESSED IN PLACENTA, SIGNAL = 6.6; EXPRESSED IN FETAL LIVER, SIGNAL = 7.7; EXPRESSED IN LUNG, SIGNAL = 5.5; EXPRESSED IN HELA, SIGNAL = 5.4; EXPRESSED IN BRAIN, SIGNAL = 8.5; EXPRESSED IN HEART, SIGNAL = 6.7; EXPRESSED IN ADULT LIVER, SIGNAL = 8.4; EXPRESSED IN BONE MARROW, SIGNAL =  10; SWISSPROT HIT: P45331, EVALUE 9.70e-01
ICFDLFPLINCRECKMEIEDKKQELLEMDQALKERNWELKQRAAQVDFS

SEQ ID NO: 28700 - protein, 73 aa, Homo sapiens
  MAP TO CHR6.1; EXPRESSED IN HEART, SIGNAL =  11; EXPRESSED IN ADULT LIVER, SIGNAL =  16; EXPRESSED IN BONE MARROW, SIGNAL =  17; EXPRESSED IN PLACENTA, SIGNAL =  10; EXPRESSED IN FETAL LIVER, SIGNAL =  13; EXPRESSED IN HELA, SIGNAL = 7.1; EXPRESSED IN BRAIN, SIGNAL =  15; EXPRESSED IN LUNG, SIGNAL =  11; SWISSPROT HIT: Q9GZK4, EVALUE 1.00e-36
RKAFGTCSSHLTVVTLFYSSVIAVYLQPKNPYAQGRGKFFGLFYAVGTPSLNPLVYTLRNKEIKRALRRLLGK

SEQ ID NO: 28701 - protein, 57 aa, Homo sapiens
  MAP TO CHR17.1; EXPRESSED IN BONE MARROW, SIGNAL =  23; EXPRESSED IN ADULT LIVER, SIGNAL =  17; EXPRESSED IN FETAL LIVER, SIGNAL =  16; EXPRESSED IN BRAIN, SIGNAL =  18; EXPRESSED IN LUNG, SIGNAL =  15; EXPRESSED IN HEART, SIGNAL =  17
HTMRHQCGMTYLGDTPRTPLLSAISSGADSELVINVGVYVQYYEFSFRTYIYILKMI

SEQ ID NO: 28702 - protein, 55 aa, Homo sapiens
  MAP TO AL359813.20; EXPRESSED IN BRAIN, SIGNAL = 0.75; EXPRESSED IN HEART, SIGNAL = 0.92; EXPRESSED IN ADULT LIVER, SIGNAL = 0.72; EXPRESSED IN BONE MARROW, SIGNAL = 0.82; EXPRESSED IN LUNG, SIGNAL = 1.1; EXPRESSED IN FETAL LIVER, SIGNAL = 0.53
LTNALDTVHEQVNFLARPQLSDEDIIMHWSDSALWKEISLVPQGDPCHMPGIHWR

SEQ ID NO: 28703 - protein, 140 aa, Homo sapiens
  MAP TO CHR17.1; EXPRESSED IN HELA, SIGNAL = 0.85; EXPRESSED IN BRAIN, SIGNAL = 0.75; EXPRESSED IN HEART, SIGNAL = 1.2; EXPRESSED IN ADULT LIVER, SIGNAL = 0.79; EXPRESSED IN BONE MARROW, SIGNAL = 0.98; EXPRESSED IN LUNG, SIGNAL = 1.1; EXPRESSED IN FETAL LIVER, SIGNAL = 0.95; EXPRESSED IN PLACENTA, SIGNAL = 1.7
GPVSFPPPPYLARSIDPLPRPPSPAQNPQDPPLVPLTLALPPAPPSSCHQNTSGSFRRPESPRPRVSFPKTPEVGPGPPPGPLSKAPQPVPPGVGELPARGPRLFDFPPTPLEDQFEEPAEFKILPDGLANIMKMLDESI

SEQ ID NO: 28704 - protein, 82 aa, Homo sapiens
  MAP TO CHR13.1; EXPRESSED IN BONE MARROW, SIGNAL = 0.79; EXPRESSED IN FETAL LIVER, SIGNAL = 0.83; EXPRESSED IN LUNG, SIGNAL = 0.71; EXPRESSED IN BRAIN, SIGNAL = 0.79; EXPRESSED IN HEART, SIGNAL = 0.81; SWISSPROT HIT: P32293, EVALUE 3.70e-01
QGDDSDEEDLCISNKWTFQRTSRRWSRVDDLYTLLPRGDRNGSPGGTGMRNTTSSESVLTDLSEPEVCSIHSESSGGSDSRS

SEQ ID NO: 28705 - protein, 51 aa, Homo sapiens
  MAP TO CHR17.1; EXPRESSED IN FETAL LIVER, SIGNAL = 0.76; EXPRESSED IN LUNG, SIGNAL = 0.82; EXPRESSED IN BRAIN, SIGNAL = 0.9; EXPRESSED IN HEART, SIGNAL = 0.7; EXPRESSED IN BONE MARROW, SIGNAL =   1; EXPRESSED IN ADULT LIVER, SIGNAL = 1.3; SWISSPROT HIT: P41233, EVALUE 3.00e-05
SEMADLENLSKLTGVCPQSNVQFDFLTVRENLRLFAKIKGILPQEVDKEVQ

SEQ ID NO: 28706 - protein, 123 aa, Homo sapiens
  MAP TO CHR9.1; EXPRESSED IN LUNG, SIGNAL = 0.66; EXPRESSED IN BRAIN, SIGNAL = 0.79; EXPRESSED IN HEART, SIGNAL = 0.69; EXPRESSED IN BONE MARROW, SIGNAL = 0.88; SWISSPROT HIT: Q19020, EVALUE 7.10e+00
YFFPFLPCRVLYEGKERLIPGCEVILATPYGRCANVNNSSTTSQRIFITYRRAPPVRPQNSLAVTDICVIVTSKGETPPHTFCKVDKNLNCGMVRIKFSSSKFHMKPKRDTFWIPVYCWVYTH

SEQ ID NO: 28707 - protein, 65 aa, Homo sapiens
  MAP TO CHR17.1; EXPRESSED IN HELA, SIGNAL = 1.2; EXPRESSED IN BRAIN, SIGNAL = 1.6; EXPRESSED IN HEART, SIGNAL = 2.8; EXPRESSED IN ADULT LIVER, SIGNAL = 2.5; EXPRESSED IN LUNG, SIGNAL = 3.3; EXPRESSED IN BONE MARROW, SIGNAL = 1.9; EXPRESSED IN FETAL LIVER, SIGNAL = 1.8; EXPRESSED IN PLACENTA, SIGNAL = 1.2; SWISSPROT HIT: P23098, EVALUE 7.00e-07
QVSILNKYSEAIRGNLTKIMRLKIVALVTIEIHARDVLEKLYKSGLMDVNSFDWLSQLRFYWEKV

SEQ ID NO: 28708 - protein, 52 aa, Homo sapiens
  MAP TO CHR7.1; EXPRESSED IN PLACENTA, SIGNAL = 1.3; EXPRESSED IN HELA, SIGNAL =   1; EXPRESSED IN BRAIN, SIGNAL = 1.3; EXPRESSED IN BONE MARROW, SIGNAL = 1.2; EXPRESSED IN ADULT LIVER, SIGNAL = 1.4; EXPRESSED IN FETAL LIVER, SIGNAL = 1.3; EXPRESSED IN LUNG, SIGNAL = 1.1
TSQSPTSFFIPQTYRVSNAPVLRNIRRSSSRNHRLLSRETTLEGTLSSRKIK

SEQ ID NO: 28709 - protein, 55 aa, Homo sapiens
  MAP TO CHR7.1; EXPRESSED IN HELA, SIGNAL = 0.57; EXPRESSED IN BRAIN, SIGNAL = 0.54; EXPRESSED IN HEART, SIGNAL = 0.69; EXPRESSED IN ADULT LIVER, SIGNAL = 1.1; EXPRESSED IN BONE MARROW, SIGNAL = 0.49; SWISSPROT HIT: P08581, EVALUE 7.00e-25
SVSNSILECYTPAQTISTEFAVKLKIDLANRETSIFSYREDPIVYEIHPTKSFIR

SEQ ID NO: 28710 - protein, 61 aa, Homo sapiens
  MAP TO CHR7.1; EXPRESSED IN PLACENTA, SIGNAL = 8.9; EXPRESSED IN FETAL LIVER, SIGNAL =  16; EXPRESSED IN BRAIN, SIGNAL =  15; EXPRESSED IN HELA, SIGNAL =   9; EXPRESSED IN LUNG, SIGNAL =  10; EXPRESSED IN HEART, SIGNAL =  10; EXPRESSED IN ADULT LIVER, SIGNAL =  18; EXPRESSED IN BONE MARROW, SIGNAL =  19; SWISSPROT HIT: P14994, EVALUE 1.60e+00
SELKNFSAKISVILFQIRRKLNLHKPWVEFLLYQVQNLHILQKPLHLIPAMMEVHLSHQTQ

SEQ ID NO: 28711 - protein, 67 aa, Homo sapiens
  MAP TO AC015947.3; EXPRESSED IN FETAL LIVER, SIGNAL = 0.82; EXPRESSED IN LUNG, SIGNAL = 0.61; EXPRESSED IN HELA, SIGNAL = 0.77; EXPRESSED IN BRAIN, SIGNAL = 0.98; EXPRESSED IN BONE MARROW, SIGNAL = 0.94; EXPRESSED IN HEART, SIGNAL = 0.65; EXPRESSED IN ADULT LIVER, SIGNAL = 0.61; SWISSPROT HIT: O14448, EVALUE 1.60e+00
TKGNVGGRARKREGSWVGGWSAPLLHSHGPGKLGLSGTSMAGSPFKGEFSSRLVNYAGPPSGRPVRQ

SEQ ID NO: 28712 - protein, 96 aa, Homo sapiens
  MAP TO CHR22.1; EXPRESSED IN ADULT LIVER, SIGNAL = 0.59; EXPRESSED IN BONE MARROW, SIGNAL = 1.2; EXPRESSED IN PLACENTA, SIGNAL = 1.5; EXPRESSED IN FETAL LIVER, SIGNAL = 1.5; EXPRESSED IN LUNG, SIGNAL = 3.3; EXPRESSED IN BRAIN, SIGNAL = 1.2; EXPRESSED IN HEART, SIGNAL = 3.1; SWISSPROT HIT: P10741, EVALUE 7.70e+00
QAWSRPSPVDDQLQQHGMGQLRELGVTRNMVIVLQQGHHVEVTGHAVRELPGGEAHRPGAGEDVYDGTLQVGEVCAQALHAGLAAQQVRHPHRSWG

SEQ ID NO: 28713 - protein, 136 aa, Homo sapiens
  MAP TO CHR5.1; EXPRESSED IN FETAL LIVER, SIGNAL = 0.96; EXPRESSED IN LUNG, SIGNAL = 0.69; EXPRESSED IN HELA, SIGNAL = 1.2; EXPRESSED IN BRAIN, SIGNAL = 1.4; EXPRESSED IN BONE MARROW, SIGNAL = 1.1; EXPRESSED IN HEART, SIGNAL = 0.75; EXPRESSED IN ADULT LIVER, SIGNAL = 0.68; SWISSPROT HIT: Q9Y5H7, EVALUE 5.00e-73
VTARDGGSPSLWATASVSVEVADVNDNAPAFAQPQYTVFVKENNPPGCHIFTVSARDADAQENALVSYSLVERRVGERPLSSYVSVHAESGKVYALQPLDHEEVELLQFQVSARDAGVPPLGSNVTLQVFVLDEND

SEQ ID NO: 28714 - protein, 69 aa, Homo sapiens
  MAP TO CHRX.1; EXPRESSED IN BONE MARROW, SIGNAL = 0.96; EXPRESSED IN ADULT LIVER, SIGNAL = 0.6; EXPRESSED IN FETAL LIVER, SIGNAL =   1; EXPRESSED IN LUNG, SIGNAL = 0.59; EXPRESSED IN HELA, SIGNAL = 1.3; EXPRESSED IN BRAIN, SIGNAL = 0.84; SWISSPROT HIT: Q93008, EVALUE 3.00e-35
VVIHEDFIQSCFDRLKASYDTLCVLDGDKDSVNCARQEAVRMVRVLTVLREYINECDSDYHEERTILPM

SEQ ID NO: 28715 - protein, 29 aa, Homo sapiens
  MAP TO CHR3.1; EXPRESSED IN LUNG, SIGNAL = 2.9; EXPRESSED IN HELA, SIGNAL = 3.1; EXPRESSED IN BRAIN, SIGNAL = 1.7; EXPRESSED IN HEART, SIGNAL = 1.6; EXPRESSED IN ADULT LIVER, SIGNAL = 1.4
LEFLWNQPQFQQMRQIIQQSPSLLPVLLQ

SEQ ID NO: 28716 - protein, 44 aa, Homo sapiens
  MAP TO CHR10.1; EXPRESSED IN LUNG, SIGNAL = 0.69; EXPRESSED IN BRAIN, SIGNAL = 0.59; EXPRESSED IN HEART, SIGNAL = 0.68; EXPRESSED IN ADULT LIVER, SIGNAL = 0.57; EXPRESSED IN BONE MARROW, SIGNAL = 0.66; SWISSPROT HIT: Q12979, EVALUE 1.40e-02
CVNEIEQRGLTETGLYRILGCDSTVKAEREIPQSENCTPRQQSG

SEQ ID NO: 28717 - protein, 75 aa, Homo sapiens [sequence omitted]

SEQ ID NO: 28718 - protein, 83 aa, Homo sapiens
  MAP TO AC024740.3; EXPRESSED IN FETAL LIVER, SIGNAL = 0.66; EXPRESSED IN HELA, SIGNAL = 1.9; EXPRESSED IN LUNG, SIGNAL = 1.1; EXPRESSED IN BRAIN, SIGNAL = 0.7; EXPRESSED IN HEART, SIGNAL = 0.86; SWISSPROT HIT: P33609, EVALUE 2.40e-01
LYSTLPALLDSNPFTAGAELPGPGAELGAMPPGLRPTLGVFQAALELTSQCELHPDLVSQTFGYLFFFSNASLLNSLMERGEG

SEQ ID NO: 28719 - protein, 117 aa, Homo sapiens
  MAP TO CHR8.1; EXPRESSED IN BRAIN, SIGNAL = 3.9; EXPRESSED IN HEART, SIGNAL = 3.3; EXPRESSED IN BONE MARROW, SIGNAL = 4.6; EXPRESSED IN ADULT LIVER, SIGNAL = 3.1; EXPRESSED IN PLACENTA, SIGNAL = 4.8; EXPRESSED IN FETAL LIVER, SIGNAL = 3.9; EXPRESSED IN LUNG, SIGNAL = 2.6; SWISSPROT HIT: P49717, EVALUE 8.00e-63
GILLQLFGGTRKDFSHTGRGKFRAEINILLCGDPGTSKSQLLQYVYNLVPRGQYTSGKGSSAVGLTAYVMKDPETRQLVLQTGALVLSDNGICCIDEFDKMNESTRSVLHEVMEQQT

SEQ ID NO: 28720 - protein, 50 aa, Homo sapiens
  MAP TO CHR1.1; EXPRESSED IN FETAL LIVER, SIGNAL = 0.58; EXPRESSED IN HELA, SIGNAL = 0.38; EXPRESSED IN BRAIN, SIGNAL = 0.61; EXPRESSED IN BONE MARROW, SIGNAL = 0.74; SWISSPROT HIT: P36558, EVALUE 4.80e+00
LFPSGDSSHKIPISNFERGHNQATVLQNLYRFIHPNPGNWPPIYCKVISG

SEQ ID NO: 28721 - protein, 53 aa, Homo sapiens
  MAP TO CHR6.1; EXPRESSED IN PLACENTA, SIGNAL = 4.1; EXPRESSED IN LUNG, SIGNAL =   2; EXPRESSED IN HELA, SIGNAL = 1.7; EXPRESSED IN BRAIN, SIGNAL = 0.99; EXPRESSED IN HEART, SIGNAL = 1.4; SWISSPROT HIT: P15959, EVALUE 6.20e+00
RAFTPQREGTLMGTAIGTCFGYWLGVSSFIYFLAYLCNAQITMLQMLALLVRS

SEQ ID NO: 28722 - protein, 40 aa, Homo sapiens
  MAP TO CHR10.1; EXPRESSED IN BRAIN, SIGNAL = 0.82; EXPRESSED IN HEART, SIGNAL = 0.6; EXPRESSED IN BONE MARROW, SIGNAL = 0.93; EXPRESSED IN ADULT LIVER, SIGNAL = 0.81; EXPRESSED IN FETAL LIVER, SIGNAL = 0.62; SWISSPROT HIT: Q60481, EVALUE 6.50e+00
PLTTQEPQCPPAPLDSSTFCLSQISPLQDFLQNLPRVSLS

SEQ ID NO: 28723 - protein, 57 aa, Homo sapiens
  MAP TO CHR19.1; EXPRESSED IN LUNG, SIGNAL = 1.2; EXPRESSED IN HEART, SIGNAL = 1.1; EXPRESSED IN FETAL LIVER, SIGNAL = 2.2; EXPRESSED IN BRAIN, SIGNAL = 2.2; EXPRESSED IN HELA, SIGNAL = 2.1; EXPRESSED IN BONE MARROW, SIGNAL = 1.9; EXPRESSED IN ADULT LIVER, SIGNAL = 4.2; EXPRESSED IN PLACENTA, SIGNAL = 1.9; SWISSPROT HIT: P02674, EVALUE 8.60e-02
ALQLGGLCGVPGRGTQESGEGPGAAWDGESRPESSTFSGDEEEKGEGLEVKPRLLEP

SEQ ID NO: 28724 - protein, 17 aa, Homo sapiens
  MAP TO CHR17.1; EXPRESSED IN FETAL LIVER, SIGNAL = 1.1; EXPRESSED IN HELA, SIGNAL = 1.3; EXPRESSED IN BRAIN, SIGNAL = 1.3; EXPRESSED IN HEART, SIGNAL = 0.61; EXPRESSED IN ADULT LIVER, SIGNAL = 1.2; EXPRESSED IN BONE MARROW, SIGNAL = 1.3
SCSNTKRNNSLTSSKNC

SEQ ID NO: 28725 - protein, 54 aa, Homo sapiens
  MAP TO CHR9.1; EXPRESSED IN ADULT LIVER, SIGNAL = 5.6; EXPRESSED IN BONE MARROW, SIGNAL = 5.1; EXPRESSED IN PLACENTA, SIGNAL = 4.9; EXPRESSED IN FETAL LIVER, SIGNAL = 4.6; EXPRESSED IN HELA, SIGNAL = 4.2; EXPRESSED IN BRAIN, SIGNAL = 4.8; EXPRESSED IN LUNG, SIGNAL = 2.7; EXPRESSED IN HEART, SIGNAL = 2.5; SWISSPROT HIT: P57783, EVALUE 9.60e-01
SCRYPHDVVNHLSCDEARNHYGGVVSLIPLILDLMKEWIAHSEKLPRKVLQHVS

SEQ ID NO: 28726 - protein, 35 aa, Homo sapiens
  MAP TO CHR17.1; EXPRESSED IN ADULT LIVER, SIGNAL = 1.2; EXPRESSED IN PLACENTA, SIGNAL =   2; EXPRESSED IN FETAL LIVER, SIGNAL = 1.7; EXPRESSED IN LUNG, SIGNAL = 0.71; EXPRESSED IN HELA, SIGNAL = 2.2; EXPRESSED IN BRAIN, SIGNAL = 1.9; EXPRESSED IN BONE MARROW, SIGNAL = 1.9
PLEMLISLFLRLQKQKSQSWLLKATQHEQGDQRPG

SEQ ID NO: 28727 - protein, 65 aa, Homo sapiens
  MAP TO CHR7.1; EXPRESSED IN BONE MARROW, SIGNAL = 1.3; EXPRESSED IN FETAL LIVER, SIGNAL = 1.3; EXPRESSED IN HELA, SIGNAL = 1.3; EXPRESSED IN BRAIN, SIGNAL = 1.4; EXPRESSED IN LUNG, SIGNAL = 0.71; SWISSPROT HIT: P15354, EVALUE 2.10e+00
LRYANVKKCSNEGRALMQLDFQQFLMKLEKLTDIRPIPDKEFVETYIKAYYLTENDMERWIKEHR

SEQ ID NO: 28728 - protein, 36 aa, Homo sapiens
  MAP TO CHR17.1; EXPRESSED IN HELA, SIGNAL = 0.84; EXPRESSED IN BRAIN, SIGNAL = 0.97; EXPRESSED IN ADULT LIVER, SIGNAL = 0.99; EXPRESSED IN FETAL LIVER, SIGNAL = 0.9
LWLWSWRFLVQILHGILHPLLLGVGTDILGQFGLEA

SEQ ID NO: 28729 - protein, 44 aa, Homo sapiens
  MAP TO CHR17.1; EXPRESSED IN BRAIN, SIGNAL = 1.5; EXPRESSED IN LUNG, SIGNAL =   1; EXPRESSED IN HEART, SIGNAL = 0.97; EXPRESSED IN ADULT LIVER, SIGNAL = 1.3; EXPRESSED IN BONE MARROW, SIGNAL = 1.7; EXPRESSED IN FETAL LIVER, SIGNAL = 1.5
EPGWVQLSVGREPRLRTLEGEAALLWSGSSPALSFSVVQPDRNT

SEQ ID NO: 28730 - protein, 72 aa, Homo sapiens
  MAP TO CHR1.1; EXPRESSED IN PLACENTA, SIGNAL = 1.6; EXPRESSED IN FETAL LIVER, SIGNAL = 2.1; EXPRESSED IN LUNG, SIGNAL = 2.1; EXPRESSED IN HEART, SIGNAL = 2.4; EXPRESSED IN HELA, SIGNAL = 1.8; EXPRESSED IN BRAIN, SIGNAL = 2.8; EXPRESSED IN BONE MARROW, SIGNAL = 2.8; EXPRESSED IN ADULT LIVER, SIGNAL = 1.1
PCWPGVGASIMRTPSYECWKVRGPVLCLKPQDHSRHRLSCDPLCCCGCHHHLLLPLFLLLPVPPAPAAPEPI

SEQ ID NO: 28731 - protein, 73 aa, Homo sapiens
  MAP TO CHR22.1; EXPRESSED IN BRAIN, SIGNAL = 6.2; EXPRESSED IN HEART, SIGNAL = 4.5; EXPRESSED IN ADULT LIVER, SIGNAL = 6.7; EXPRESSED IN BONE MARROW, SIGNAL = 6.1; EXPRESSED IN PLACENTA, SIGNAL = 6.3; EXPRESSED IN FETAL LIVER, SIGNAL = 5.6; EXPRESSED IN LUNG, SIGNAL = 3.6
PTSPGAYTSSSLCFSRMERSRCSSQRGSRSPMRMCSCILLAGIFSPVMGDTRYSSGAGAGGKGLEAKRKQMFQ

SEQ ID NO: 28732 - protein, 56 aa, Homo sapiens
  MAP TO CHR7.1; EXPRESSED IN ADULT LIVER, SIGNAL = 2.8; EXPRESSED IN HEART, SIGNAL = 1.6; EXPRESSED IN BONE MARROW, SIGNAL = 2.8; EXPRESSED IN PLACENTA, SIGNAL = 1.9; EXPRESSED IN FETAL LIVER, SIGNAL = 2.3; EXPRESSED IN LUNG, SIGNAL = 1.5; EXPRESSED IN BRAIN, SIGNAL = 2.6; EXPRESSED IN HELA, SIGNAL =   2; SWISSPROT HIT: P36763, EVALUE 6.20e+00
LSSIRNSVTLVCLLHLPAYFGVHLSLFLTAVSIKCDLLHQPTHTANANPFEFHLQF

SEQ ID NO: 28733 - protein, 55 aa, Homo sapiens
  MAP TO CHR1.1; EXPRESSED IN PLACENTA, SIGNAL =  30; EXPRESSED IN FETAL LIVER, SIGNAL =  34; EXPRESSED IN BONE MARROW, SIGNAL =  46; EXPRESSED IN ADULT LIVER, SIGNAL =  41; EXPRESSED IN LUNG, SIGNAL =  26; EXPRESSED IN BRAIN, SIGNAL =  31; EXPRESSED IN HELA, SIGNAL =  14; EXPRESSED IN HEART, SIGNAL =  30; SWISSPROT HIT: P49368, EVALUE 1.00e-24
DMMLNIINSSITTKAISRWSSLACNIALDAVKMVQFEENGRKEIDIKKYARVEKV

SEQ ID NO: 28734 - protein, 51 aa, Homo sapiens
  MAP TO CHR7.1; EXPRESSED IN LUNG, SIGNAL = 3.6; EXPRESSED IN HELA, SIGNAL = 1.3; EXPRESSED IN BRAIN, SIGNAL = 1.3; EXPRESSED IN HEART, SIGNAL =   2; EXPRESSED IN ADULT LIVER, SIGNAL = 0.72; EXPRESSED IN BONE MARROW, SIGNAL = 1.2; EXPRESSED IN FETAL LIVER, SIGNAL =   1; EXPRESSED IN PLACENTA, SIGNAL = 1.5; SWISSPROT HIT: P29619, EVALUE 7.00e-04
VFRLSYVNHAEDLASKLLQCSPKNRLSAQAALSHEYFSDLPPRLWELTDSE

SEQ ID NO: 28735 - protein, 69 aa, Homo sapiens
  MAP TO CHR7.1; EXPRESSED IN FETAL LIVER, SIGNAL = 0.71; EXPRESSED IN LUNG, SIGNAL = 1.2; EXPRESSED IN HELA, SIGNAL = 1.8; EXPRESSED IN BRAIN, SIGNAL = 0.52; EXPRESSED IN HEART, SIGNAL = 1.1; EXPRESSED IN BONE MARROW, SIGNAL = 0.65; SWISSPROT HIT: O04379, EVALUE 8.70e+00
SQCLTPARRQAEGSVSGARSHHLDDAPLHGGDRGSPGGAAALRGGRHVWRCKGNEWSGWPDWRCQCGCR

SEQ ID NO: 28736 - protein, 43 aa, Homo sapiens
  MAP TO CHR19.1; EXPRESSED IN PLACENTA, SIGNAL = 4.7; EXPRESSED IN FETAL LIVER, SIGNAL = 3.6; EXPRESSED IN LUNG, SIGNAL = 2.7; EXPRESSED IN HELA, SIGNAL = 3.8; EXPRESSED IN BRAIN, SIGNAL = 4.1; EXPRESSED IN HEART, SIGNAL = 4.1; EXPRESSED IN BONE MARROW, SIGNAL =   4; SWISSPROT HIT: Q9UZ16, EVALUE 6.40e+00
HVLWVLSHGAKQLPGGWEIEVPEVVQGLRVSAWELSRRNLRQK

SEQ ID NO: 28737 - protein, 26 aa, Homo sapiens
  MAP TO CHR15.1; EXPRESSED IN PLACENTA, SIGNAL = 3.9; EXPRESSED IN LUNG, SIGNAL = 4.2; EXPRESSED IN HELA, SIGNAL = 3.5; EXPRESSED IN BRAIN, SIGNAL = 2.7; EXPRESSED IN BONE MARROW, SIGNAL = 5.1
CTNKNLLLISMPVYNPHTVLGKVGGY

SEQ ID NO: 28738 - protein, 65 aa, Homo sapiens
  MAP TO CHRX.1; EXPRESSED IN BONE MARROW, SIGNAL = 1.3; EXPRESSED IN ADULT LIVER, SIGNAL = 0.94; EXPRESSED IN HEART, SIGNAL = 0.84; EXPRESSED IN FETAL LIVER, SIGNAL = 1.3; EXPRESSED IN BRAIN, SIGNAL = 1.2; EXPRESSED IN HELA, SIGNAL = 2.2; EXPRESSED IN LUNG, SIGNAL = 1.1; SWISSPROT HIT: O17680, EVALUE 2.70e+00
HPRLGSLLAVGTHVNTDCGDLGGTMLVELVATGLATEAMEQKLKAEVTERQAEEGLPYLMPQSRE

SEQ ID NO: 28739 - protein, 93 aa, Homo sapiens
  MAP TO CHR1.1; EXPRESSED IN LUNG, SIGNAL = 5.1; EXPRESSED IN HELA, SIGNAL = 5.9; EXPRESSED IN BRAIN, SIGNAL = 8.5; EXPRESSED IN ADULT LIVER, SIGNAL =  11; EXPRESSED IN BONE MARROW, SIGNAL = 9.7; EXPRESSED IN HEART, SIGNAL = 5.7; EXPRESSED IN PLACENTA, SIGNAL = 7.3; EXPRESSED IN FETAL LIVER, SIGNAL = 7.8; SWISSPROT HIT: Q07805, EVALUE 3.90e+00
LLQGSGLQCCHLEHLLHILYYENFLFHDLCFLHLGTCYMSILDCCCSGKIHIYCPQFLRVYMTDGENHCHPDMVVAAIHPAGVFFSFSECSFL

SEQ ID NO: 28740 - protein, 39 aa, Homo sapiens
  MAP TO CHR22.1; EXPRESSED IN PLACENTA, SIGNAL = 1.7; EXPRESSED IN FETAL LIVER, SIGNAL = 1.4; EXPRESSED IN BRAIN, SIGNAL = 1.7; EXPRESSED IN HEART, SIGNAL = 0.81; EXPRESSED IN ADULT LIVER, SIGNAL = 1.6; EXPRESSED IN BONE MARROW, SIGNAL = 1.5; SWISSPROT HIT: Q16587, EVALUE 8.50e+00
LFITALGPGPAWLPPAISPYHCSGSQPWALQRQSPLGPS

SEQ ID NO: 28741 - protein, 64 aa, Homo sapiens
  MAP TO CHR6.1; EXPRESSED IN FETAL LIVER, SIGNAL = 0.84; EXPRESSED IN LUNG, SIGNAL = 0.61; EXPRESSED IN HELA, SIGNAL = 0.96; EXPRESSED IN BRAIN, SIGNAL = 0.91; EXPRESSED IN HEART, SIGNAL = 0.79; EXPRESSED IN ADULT LIVER, SIGNAL = 1.2; EXPRESSED IN BONE MARROW, SIGNAL =   1; SWISSPROT HIT: Q60707, EVALUE 4.60e+00
LRFRRIDNDVIFFQVPNSGASAKSSTEHVERSPVPSAAEQRAGGNARGVLPGSGALRLARRRLQ

SEQ ID NO: 28742 - protein, 81 aa, Homo sapiens
  MAP TO CHR17.1; EXPRESSED IN LUNG, SIGNAL =   1; EXPRESSED IN HELA, SIGNAL = 2.3; EXPRESSED IN BRAIN, SIGNAL = 1.1; EXPRESSED IN HEART, SIGNAL = 1.2; EXPRESSED IN BONE MARROW, SIGNAL = 1.1; EXPRESSED IN FETAL LIVER, SIGNAL = 0.98; SWISSPROT HIT: O60016, EVALUE 8.10e+00
GPSLPLQLFQPSREGWGARLLGPPPPPRLVDLPFYPGPSLSGVGPANQRSDSGVWPGSWGAHRSPAQQFWPLSRCARTWLE

SEQ ID NO: 28743 - protein, 31 aa, Homo sapiens
  MAP TO CHR17.1; EXPRESSED IN FETAL LIVER, SIGNAL = 1.6; EXPRESSED IN LUNG, SIGNAL = 7.6; EXPRESSED IN BRAIN, SIGNAL = 1.7; EXPRESSED IN BONE MARROW, SIGNAL = 1.9; EXPRESSED IN ADULT LIVER, SIGNAL = 1.3
GNWCVVFGVYFIFWPIRKHVDKVIQVSQAVG

SEQ ID NO: 28744 - protein, 74 aa, Homo sapiens
  MAP TO CHR17.1; EXPRESSED IN BONE MARROW, SIGNAL = 3.3; EXPRESSED IN PLACENTA, SIGNAL = 4.4; EXPRESSED IN FETAL LIVER, SIGNAL = 3.2; EXPRESSED IN LUNG, SIGNAL = 5.1; EXPRESSED IN HELA, SIGNAL = 4.3; EXPRESSED IN BRAIN, SIGNAL = 3.4; EXPRESSED IN HEART, SIGNAL = 3.2
HPVELGPGHGQATVVLQVAAAVVEQFLRQEHEVLLGQAPVALHFGLEFHVERLTQLRPQHFVRHGKWHPALRGR

SEQ ID NO: 28745 - protein, 54 aa, Homo sapiens
  MAP TO CHR2.1; EXPRESSED IN BRAIN, SIGNAL = 0.34; EXPRESSED IN BONE MARROW, SIGNAL = 0.35; EXPRESSED IN FETAL LIVER, SIGNAL = 0.28
PMSNVKFLDNPFSIGQPDLYISNGFQVVQWNSRQIIFIFNFNILCFRNNFWCGT

SEQ ID NO: 28746 - protein, 28 aa, Homo sapiens
  MAP TO CHR2.1; EXPRESSED IN ADULT LIVER, SIGNAL = 0.41; EXPRESSED IN BONE MARROW, SIGNAL = 1.1; EXPRESSED IN FETAL LIVER, SIGNAL = 1.1; EXPRESSED IN HELA, SIGNAL = 0.74; EXPRESSED IN BRAIN, SIGNAL = 1.1
LPSPSYDLPLSKAPEKEWNLNIETLFWP

SEQ ID NO: 28747 - protein, 72 aa, Homo sapiens
  MAP TO CHR18.1; EXPRESSED IN ADULT LIVER, SIGNAL = 1.1; EXPRESSED IN FETAL LIVER, SIGNAL = 0.85; EXPRESSED IN LUNG, SIGNAL = 4.3; EXPRESSED IN BRAIN, SIGNAL = 0.74; SWISSPROT HIT: P18895, EVALUE 4.40e+00
EITGEQNGNRNPGGLQIGDLVNIDLDLEIVQSLQHGHGGWTDGMFETLTTTGTVCGIDEDHDIVVQYPSGNR

SEQ ID NO: 28748 - protein, 67 aa, Homo sapiens
  MAP TO CHR20.1; EXPRESSED IN BRAIN, SIGNAL = 1.3; EXPRESSED IN HEART, SIGNAL = 1.4; EXPRESSED IN BONE MARROW, SIGNAL = 1.5; EXPRESSED IN PLACENTA, SIGNAL = 1.2; EXPRESSED IN FETAL LIVER, SIGNAL = 1.8; EXPRESSED IN LUNG, SIGNAL = 1.1
SMVRHKDGGYSEEEDVKTCARDSGYDSLSNRLSILDRLLHTHPIWLQLSLSEEEAAEVLQAQPPGVR

SEQ ID NO: 28749 - protein, 65 aa, Homo sapiens
  MAP TO CHR1.1; EXPRESSED IN FETAL LIVER, SIGNAL = 1.2; EXPRESSED IN LUNG, SIGNAL = 1.2; EXPRESSED IN BRAIN, SIGNAL = 0.89; EXPRESSED IN HEART, SIGNAL = 0.61
ICLTCLGTAVQEHLVWPGEAAYTWPPKTGLQFFPLLAAHSAEHHALWLGSYGSYVLPQRRVVESA

SEQ ID NO: 28750 - protein, 38 aa, Homo sapiens
  MAP TO CHR2.1; EXPRESSED IN FETAL LIVER, SIGNAL = 4.7; EXPRESSED IN LUNG, SIGNAL = 8.4; EXPRESSED IN HELA, SIGNAL =   5; EXPRESSED IN BRAIN, SIGNAL = 4.3; EXPRESSED IN HEART, SIGNAL = 4.7; EXPRESSED IN BONE MARROW, SIGNAL = 4.1; EXPRESSED IN ADULT LIVER, SIGNAL = 4.6; SWISSPROT HIT: P47838, EVALUE 5.30e-02
LKKQCTKKNEEEAAKYAELLAKRMKEAKDKLQEQIAKR

SEQ ID NO: 28751 - protein, 45 aa, Homo sapiens
  MAP TO CHR10.1; EXPRESSED IN FETAL LIVER, SIGNAL = 0.67; EXPRESSED IN LUNG, SIGNAL = 0.86; EXPRESSED IN BRAIN, SIGNAL = 0.59; EXPRESSED IN HEART, SIGNAL = 0.94; EXPRESSED IN BONE MARROW, SIGNAL = 0.52
HNVLHLHPSKYFYKIILHDKGVWLTKPLPVNNWRLTCHLPKAVQT

SEQ ID NO: 28752 - protein, 68 aa, Homo sapiens
  MAP TO CHR11.1; EXPRESSED IN HELA, SIGNAL = 2.1; EXPRESSED IN BRAIN, SIGNAL = 3.4; EXPRESSED IN HEART, SIGNAL = 2.3; EXPRESSED IN ADULT LIVER, SIGNAL = 3.6; EXPRESSED IN BONE MARROW, SIGNAL = 3.4; EXPRESSED IN PLACENTA, SIGNAL = 2.4; EXPRESSED IN FETAL LIVER, SIGNAL = 2.8; EXPRESSED IN LUNG, SIGNAL = 2.1; SWISSPROT HIT: Q04958, EVALUE 3.50e+00
QAFLLEGDSSSRDVFSCNVGNLQPGSKAAVTLKYVQELPLEADGALRFVLPAVLNPRYQFSGEYLSPL

SEQ ID NO: 28753 - protein, 54 aa, Homo sapiens
  MAP TO CHRX.1; EXPRESSED IN LUNG, SIGNAL = 1.4; EXPRESSED IN HELA, SIGNAL = 1.3; EXPRESSED IN BRAIN, SIGNAL = 1.1; EXPRESSED IN HEART, SIGNAL =   1; EXPRESSED IN ADULT LIVER, SIGNAL = 0.96; EXPRESSED IN BONE MARROW, SIGNAL = 0.98; SWISSPROT HIT: O60488, EVALUE 7.00e-25
ISVKLERFEIPIKVRLSPEPWTPETGLVTDAFKLKRKELRNHYLKDIERMYGGK

SEQ ID NO: 28754 - protein, 72 aa, Homo sapiens
  MAP TO CHR11.1; EXPRESSED IN FETAL LIVER, SIGNAL = 2.9; EXPRESSED IN HELA, SIGNAL = 2.7; EXPRESSED IN BRAIN, SIGNAL = 3.5; EXPRESSED IN LUNG, SIGNAL = 3.4; EXPRESSED IN HEART, SIGNAL = 3.2; EXPRESSED IN ADULT LIVER, SIGNAL = 1.2; EXPRESSED IN BONE MARROW, SIGNAL = 3.4; SWISSPROT HIT: P34710, EVALUE 2.50e+00
WDAPWGILGNDPSQFLNLHFCAEIPLVTFEMNSDVFGDSCAVFAFFPSCRETFAYSPKLLAGVLKIWQWTQG

SEQ ID NO: 28755 - protein, 73 aa, Homo sapiens
  MAP TO CHR14.1; EXPRESSED IN PLACENTA, SIGNAL =  42; EXPRESSED IN LUNG, SIGNAL =  25; EXPRESSED IN HELA, SIGNAL =  34; EXPRESSED IN BRAIN, SIGNAL = 3.9; EXPRESSED IN ADULT LIVER, SIGNAL =  43; SWISSPROT HIT: P12970, EVALUE 7.00e-25
VHRKTCTTVAFTQVNSEDKGALAKLVEAIRTNYNDRYDEIRRHWGGNVLGPKSVARIAKRKKAKAKELATKLG

SEQ ID NO: 28756 - protein, 48 aa, Homo sapiens
  MAP TO CHR16.1; EXPRESSED IN HELA, SIGNAL = 1.5; EXPRESSED IN LUNG, SIGNAL = 0.57; EXPRESSED IN BRAIN, SIGNAL = 1.2; EXPRESSED IN BONE MARROW, SIGNAL = 1.3; EXPRESSED IN HEART, SIGNAL = 0.6; EXPRESSED IN PLACENTA, SIGNAL = 1.5; EXPRESSED IN FETAL LIVER, SIGNAL = 2.1; SWISSPROT HIT: P17735, EVALUE 2.00e-21
QPEKSWEIDLKQLEYLIDEKTACLIVNNPSNPCGSVFSKRHLQKILAG

SEQ ID NO: 28757 - protein, 75 aa, Homo sapiens
  MAP TO CHR18.1; EXPRESSED IN BONE MARROW, SIGNAL = 2.4; EXPRESSED IN PLACENTA, SIGNAL = 1.3; EXPRESSED IN FETAL LIVER, SIGNAL = 1.9; EXPRESSED IN LUNG, SIGNAL = 0.9; EXPRESSED IN HELA, SIGNAL =   2; EXPRESSED IN BRAIN, SIGNAL =   2; SWISSPROT HIT: O14248, EVALUE 9.40e-02
GPRYSVSERRWTQMLAGAEDGGPGPSPRSFHAAAYVPAGRGAMYLLGGLTAGGVTRDFWVLNLTTLQWRQEKVSI

SEQ ID NO: 28758 - protein, 52 aa, Homo sapiens
  MAP TO CHR1.1; EXPRESSED IN LUNG, SIGNAL = 1.8; EXPRESSED IN BRAIN, SIGNAL =   4; EXPRESSED IN HEART, SIGNAL = 2.5; EXPRESSED IN ADULT LIVER, SIGNAL = 3.3; EXPRESSED IN BONE MARROW, SIGNAL = 3.9; EXPRESSED IN PLACENTA, SIGNAL = 3.3; EXPRESSED IN FETAL LIVER, SIGNAL = 3.1; SWISSPROT HIT: P46068, EVALUE 3.70e+00
WFISRCIFTYPSRYTWKYWCNCFCHHDAKFWSDDSRSYLFNSYSHSYSCKVS

SEQ ID NO: 28759 - protein, 85 aa, Homo sapiens
  MAP TO CHR19.1; EXPRESSED IN BRAIN, SIGNAL = 0.38; EXPRESSED IN BONE MARROW, SIGNAL = 0.39; SWISSPROT HIT: P14384, EVALUE 3.10e+00
GPVSIGRRRNVNCLKNVVIWYEDHKHRCPYEPHLAELDPTFGLYTTAVWQCEAGHRYFQDLHSPLKPLSDSDPDSDKGRSAGRGH

SEQ ID NO: 28760 - protein, 80 aa, Homo sapiens
  MAP TO CHR17.1; EXPRESSED IN FETAL LIVER, SIGNAL = 2.1; EXPRESSED IN PLACENTA, SIGNAL = 2.2; EXPRESSED IN LUNG, SIGNAL = 1.2; EXPRESSED IN HELA, SIGNAL = 2.8; EXPRESSED IN BRAIN, SIGNAL = 2.2; EXPRESSED IN HEART, SIGNAL = 1.4; EXPRESSED IN ADULT LIVER, SIGNAL = 2.6; EXPRESSED IN BONE MARROW, SIGNAL =   2; SWISSPROT HIT: P24043, EVALUE 8.10e-01
PCAPRPMPLFCVSWQDFPRDYDVAAPLRGRRDGRGGSFNCDGCRPGIVTQQPCACPLSCLVPYSGSGGGGEDSSQGQSLS

SEQ ID NO: 28761 - protein, 74 aa, Homo sapiens
  MAP TO CHR5.1; EXPRESSED IN LUNG, SIGNAL = 2.6; EXPRESSED IN PLACENTA, SIGNAL = 5.3; EXPRESSED IN FETAL LIVER, SIGNAL =   5; EXPRESSED IN BRAIN, SIGNAL = 4.2; EXPRESSED IN HELA, SIGNAL = 5.6; EXPRESSED IN HEART, SIGNAL = 2.4; EXPRESSED IN BONE MARROW, SIGNAL = 4.8; EXPRESSED IN ADULT LIVER, SIGNAL = 6.1; SWISSPROT HIT: Q9UKU0, EVALUE 2.00e-31
LSLLEKMQTQEILRILRLPELGDLGQFFRSLSATTLVSMGALAAILAYWFTHRPKALQPPCNLLMQSEEVEVSR

SEQ ID NO: 28762 - protein, 72 aa, Homo sapiens
  MAP TO CHR19.1; EXPRESSED IN PLACENTA, SIGNAL = 2.6; EXPRESSED IN FETAL LIVER, SIGNAL = 1.4; EXPRESSED IN HELA, SIGNAL = 1.8; EXPRESSED IN LUNG, SIGNAL = 0.65; EXPRESSED IN BRAIN, SIGNAL = 1.9; EXPRESSED IN BONE MARROW, SIGNAL = 1.5; EXPRESSED IN HEART, SIGNAL = 0.6; SWISSPROT HIT: O75298, EVALUE 3.00e-29
STVADLLYWKDTRTSGVVFTGLMVSLLCLLHFSIVSVAAHLALLLLCGTISLRVYRKVLQAVHRGDGANPFQ

SEQ ID NO: 28763 - protein, 65 aa, Homo sapiens
  MAP TO CHR19.1; EXPRESSED IN ADULT LIVER, SIGNAL = 0.95; EXPRESSED IN BONE MARROW, SIGNAL = 0.98; EXPRESSED IN FETAL LIVER, SIGNAL =   1; EXPRESSED IN BRAIN, SIGNAL =   1; EXPRESSED IN LUNG, SIGNAL = 0.75
KHRIAHKPHSKPKTSDIFEADIANDVKSKDLLADKELWARLEELERQEELLGELDRYLMTNYLSK

SEQ ID NO: 28764 - protein, 50 aa, Homo sapiens
  MAP TO CHR16.1; EXPRESSED IN HELA, SIGNAL = 8.7; EXPRESSED IN LUNG, SIGNAL = 1.4; EXPRESSED IN BRAIN, SIGNAL = 3.8; EXPRESSED IN BONE MARROW, SIGNAL = 1.5; EXPRESSED IN PLACENTA, SIGNAL = 2.6; SWISSPROT HIT: Q9UBX0, EVALUE 6.30e+00
PYHTALAPRKRQMRRTQQVALWMRVKRLRGGRSHMESQMCLSKKPRCSSA

SEQ ID NO: 28765 - protein, 60 aa, Homo sapiens
  MAP TO CHR9.1; EXPRESSED IN HEART, SIGNAL = 3.5; EXPRESSED IN ADULT LIVER, SIGNAL = 2.8; EXPRESSED IN BONE MARROW, SIGNAL = 4.6; EXPRESSED IN PLACENTA, SIGNAL = 2.7; EXPRESSED IN FETAL LIVER, SIGNAL =   3; EXPRESSED IN HELA, SIGNAL = 3.5; EXPRESSED IN BRAIN, SIGNAL = 3.7; EXPRESSED IN LUNG, SIGNAL = 3.3; SWISSPROT HIT: P52623, EVALUE 8.00e-26
VAINLIVQHIQDILNGDICKWHRGGSNGRSYKRTFSEPGDHPGMLTSGKRSHLESSSRPH

SEQ ID NO: 28766 - protein, 106 aa, Homo sapiens
  MAP TO CHR7.1; EXPRESSED IN HEART, SIGNAL =   1; EXPRESSED IN BONE MARROW, SIGNAL = 1.4; EXPRESSED IN FETAL LIVER, SIGNAL = 1.1; EXPRESSED IN LUNG, SIGNAL = 0.75; EXPRESSED IN HELA, SIGNAL = 2.3; EXPRESSED IN BRAIN, SIGNAL = 1.4; SWISSPROT HIT: O15084, EVALUE 1.60e-01
LSFHFRTFLGRDGNPNKRNVHNETSMHLLCMGPQIMISEGALHPRLARPTEDDFRRADCLQMILKWKGAKLDQGEYERAAIDAVDNKKNTPLHYAAASGMKACVEV

SEQ ID NO: 28767 - protein, 81 aa, Homo sapiens
  MAP TO CHR7.1; EXPRESSED IN FETAL LIVER, SIGNAL = 0.95; EXPRESSED IN LUNG, SIGNAL = 1.1; EXPRESSED IN HELA, SIGNAL = 0.93; EXPRESSED IN BRAIN, SIGNAL = 0.89; EXPRESSED IN HEART, SIGNAL =   1; EXPRESSED IN BONE MARROW, SIGNAL = 0.79; SWISSPROT HIT: Q90404, EVALUE 2.40e+00
SFRCDPGFSGPACEMASQTFPMFISESFGSSRLSSYHNFYSIRGAEVSFGCGVLASGKALVFNKDGRRQLITSFLDSSQSR

SEQ ID NO: 28768 - protein, 67 aa, Homo sapiens
  MAP TO CHR11.1; EXPRESSED IN PLACENTA, SIGNAL = 2.2; EXPRESSED IN FETAL LIVER, SIGNAL = 1.8; EXPRESSED IN BRAIN, SIGNAL =   2; EXPRESSED IN LUNG, SIGNAL = 2.7; EXPRESSED IN HEART, SIGNAL = 3.2; EXPRESSED IN BONE MARROW, SIGNAL = 2.3; SWISSPROT HIT: Q04609, EVALUE 2.00e-25
LPLQVKNAMLAGAIGIILYSDPADYFAPEVQPYPKGWNLPGTAAQRGNVLNLNGAGDPLTPGYPAKG

SEQ ID NO: 28769 - protein, 43 aa, Homo sapiens
  MAP TO CHR19.1; EXPRESSED IN LUNG, SIGNAL = 1.2; EXPRESSED IN PLACENTA, SIGNAL = 1.5; EXPRESSED IN BRAIN, SIGNAL = 2.3; EXPRESSED IN HELA, SIGNAL = 2.2; EXPRESSED IN BONE MARROW, SIGNAL = 1.3; EXPRESSED IN HEART, SIGNAL = 1.7; EXPRESSED IN ADULT LIVER, SIGNAL = 3.4; SWISSPROT HIT: P44927, EVALUE 8.40e+00
HMWIKLEQYVFQTASWLKSQADKWKQTQLYVTGKGLVGGPLLP

SEQ ID NO: 28770 - protein, 59 aa, Homo sapiens
  MAP TO CHR7.1; EXPRESSED IN FETAL LIVER, SIGNAL = 1.4; EXPRESSED IN HELA, SIGNAL = 1.3; EXPRESSED IN BRAIN, SIGNAL = 1.5; EXPRESSED IN HEART, SIGNAL = 0.93; EXPRESSED IN BONE MARROW, SIGNAL = 1.6; SWISSPROT HIT: P05220, EVALUE 8.00e+00
ELADIRFVKVTTPLEFPGEHQDQRKEIDKIKNYHLFVIGVSHLSFTCYYHFRTSENYAC

SEQ ID NO: 28771 - protein, 76 aa, Homo sapiens
  MAP TO CHR14.1; EXPRESSED IN FETAL LIVER, SIGNAL = 1.1; EXPRESSED IN BRAIN, SIGNAL = 0.8; EXPRESSED IN HEART, SIGNAL = 0.82; EXPRESSED IN BONE MARROW, SIGNAL = 0.96; SWISSPROT HIT: P18828, EVALUE 1.70e+00
EKEEEPVIKIMVDDAIVIRDNYFSLPVNKTDTSKAPLHFPIPVIRYVVKEVSLVWHLYGGKDFGIVPPTSPAKSYM

SEQ ID NO: 28772 - protein, 26 aa, Homo sapiens
  MAP TO CHR20.1; EXPRESSED IN ADULT LIVER, SIGNAL = 2.9; EXPRESSED IN PLACENTA, SIGNAL =   4; EXPRESSED IN HELA, SIGNAL = 5.1; EXPRESSED IN FETAL LIVER, SIGNAL = 3.8; EXPRESSED IN LUNG, SIGNAL = 3.7; EXPRESSED IN BRAIN, SIGNAL = 3.6; EXPRESSED IN HEART, SIGNAL = 2.6; EXPRESSED IN BONE MARROW, SIGNAL = 3.1
ISCLGHSVTHVQMEKSFSIELAKYLQ

SEQ ID NO: 28773 - protein, 22 aa, Homo sapiens
  MAP TO CHR17.1; EXPRESSED IN ADULT LIVER, SIGNAL = 2.8; EXPRESSED IN BONE MARROW, SIGNAL = 2.1; EXPRESSED IN PLACENTA, SIGNAL = 2.1; EXPRESSED IN FETAL LIVER, SIGNAL = 2.5; EXPRESSED IN LUNG, SIGNAL = 1.3; EXPRESSED IN HELA, SIGNAL = 1.7; EXPRESSED IN BRAIN, SIGNAL = 2.2; EXPRESSED IN HEART, SIGNAL = 1.5
LGLISLVYRLYGNVPRSLWLPE

SEQ ID NO: 28774 - protein, 39 aa, Homo sapiens
  MAP TO CHR20.1; EXPRESSED IN LUNG, SIGNAL = 2.2; EXPRESSED IN BRAIN, SIGNAL = 3.6; EXPRESSED IN PLACENTA, SIGNAL = 3.4; EXPRESSED IN FETAL LIVER, SIGNAL =   3; EXPRESSED IN HELA, SIGNAL = 2.8; EXPRESSED IN HEART, SIGNAL = 1.7; EXPRESSED IN BONE MARROW, SIGNAL = 3.7; EXPRESSED IN ADULT LIVER, SIGNAL = 2.8
GGTWQVPKAALGLSSSCKQASVSSHQIERVKRPQYGGWA

SEQ ID NO: 28775 - protein, 60 aa, Homo sapiens
  MAP TO CHR6.1; EXPRESSED IN BONE MARROW, SIGNAL = 2.3; EXPRESSED IN ADULT LIVER, SIGNAL = 2.7; EXPRESSED IN LUNG, SIGNAL = 1.2; EXPRESSED IN FETAL LIVER, SIGNAL = 2.1; EXPRESSED IN PLACENTA, SIGNAL = 2.5; EXPRESSED IN BRAIN, SIGNAL = 2.8; EXPRESSED IN HELA, SIGNAL = 2.6; EXPRESSED IN HEART, SIGNAL = 1.6; SWISSPROT HIT: O00294, EVALUE 8.00e-29
PTQKEERAPSPPVEVDEPREFVLRPAPQGRTVRCRLTRDKKGMDRGMYPSYFLHLDTEKK

SEQ ID NO: 28776 - protein, 66 aa, Homo sapiens
  MAP TO CHR5.1; EXPRESSED IN HELA, SIGNAL = 1.5; EXPRESSED IN LUNG, SIGNAL = 0.87; EXPRESSED IN BONE MARROW, SIGNAL = 1.6; EXPRESSED IN HEART, SIGNAL = 0.87; EXPRESSED IN ADULT LIVER, SIGNAL = 1.7; EXPRESSED IN PLACENTA, SIGNAL = 1.2; EXPRESSED IN BRAIN, SIGNAL = 1.7; SWISSPROT HIT: P16591, EVALUE 4.00e-27
DWYHGAIPRIEAQELLKKQGDFLVRESHGKPGEYVLSVYSDGQRRHFIIQYVDVRFQFSSYVYFDV

SEQ ID NO: 28777 - protein, 56 aa, Homo sapiens
  MAP TO CHR17.1; EXPRESSED IN BRAIN, SIGNAL = 0.6; EXPRESSED IN HELA, SIGNAL = 0.75; EXPRESSED IN BONE MARROW, SIGNAL = 0.65; SWISSPROT HIT: Q13145, EVALUE 4.70e+00
LFLAQLLSCKWAPSFATFLSHYDLCLRTSALEFQCLLDHTGHRECCLPLLVFPSSA

SEQ ID NO: 28778 - protein, 76 aa, Homo sapiens
  MAP TO CHR19.1; EXPRESSED IN PLACENTA, SIGNAL =   6; EXPRESSED IN FETAL LIVER, SIGNAL = 7.1; EXPRESSED IN LUNG, SIGNAL = 3.2; EXPRESSED IN HELA, SIGNAL = 6.3; EXPRESSED IN BRAIN, SIGNAL = 5.1; EXPRESSED IN HEART, SIGNAL = 4.2; EXPRESSED IN ADULT LIVER, SIGNAL = 7.2; EXPRESSED IN BONE MARROW, SIGNAL = 5.2
RAVAPPNSCLAVPRHPLPPLLPHRIRAAPLSWTRCCSPRSRCRTPSSSTAIHGPPFARLARNSSRASSGRACNAKV

SEQ ID NO: 28779 - protein, 76 aa, Homo sapiens
  MAP TO CHR1.1; EXPRESSED IN BONE MARROW, SIGNAL = 0.52; EXPRESSED IN FETAL LIVER, SIGNAL = 0.3; EXPRESSED IN BRAIN, SIGNAL = 0.47; SWISSPROT HIT: P57109, EVALUE 1.40e+00
SINQQVPKVVGVEEIADALTRLQAPQVVVLVQGWGEADQRGAARQGRGQELVLSLLQEWVRQLQQAVSSLQGDQGW

SEQ ID NO: 28780 - protein, 67 aa, Homo sapiens
  MAP TO CHR7.1; EXPRESSED IN LUNG, SIGNAL = 0.95; EXPRESSED IN HELA, SIGNAL = 1.4; EXPRESSED IN BRAIN, SIGNAL = 1.2; EXPRESSED IN HEART, SIGNAL = 0.63; EXPRESSED IN ADULT LIVER, SIGNAL = 1.2; EXPRESSED IN BONE MARROW, SIGNAL = 1.1; SWISSPROT HIT: P17624, EVALUE 2.00e-04
QVNLSKVGEYWWNAILEGEEPIDIDKINKERSMATVDEEEQAVLDRLTFDYHQKLQGKPQSHELVRA

SEQ ID NO: 28781 - protein, 43 aa, Homo sapiens
  MAP TO CHR6.1; EXPRESSED IN FETAL LIVER, SIGNAL = 0.82; EXPRESSED IN HELA, SIGNAL = 1.2; EXPRESSED IN BRAIN, SIGNAL = 1.2; EXPRESSED IN BONE MARROW, SIGNAL = 1.1; EXPRESSED IN HEART, SIGNAL = 0.5
QVCIETYISSCHQRSINTAVRATLSQMLSDLTLQLRQRQENTV

SEQ ID NO: 28782 - protein, 49 aa, Homo sapiens
  MAP TO CHR7.1; EXPRESSED IN HEART, SIGNAL =   1; EXPRESSED IN BONE MARROW, SIGNAL = 0.8; EXPRESSED IN FETAL LIVER, SIGNAL = 0.79; EXPRESSED IN LUNG, SIGNAL = 0.96; EXPRESSED IN BRAIN, SIGNAL = 0.77
YHLLESQPRNQPVNVGGSWPCFMMTIGVLLSLPEGSVSRYILAKKSCKD

SEQ ID NO: 28783 - protein, 17 aa, Homo sapiens
  MAP TO AC026530.3; EXPRESSED IN BRAIN, SIGNAL = 0.41; EXPRESSED IN HEART, SIGNAL = 0.52; EXPRESSED IN BONE MARROW, SIGNAL = 0.41
ILMISLEFSTLFKFIIS

SEQ ID NO: 28784 - protein, 64 aa, Homo sapiens
  MAP TO CHR17.1; EXPRESSED IN HELA, SIGNAL = 0.8; EXPRESSED IN FETAL LIVER, SIGNAL = 0.94; EXPRESSED IN BRAIN, SIGNAL = 0.78; EXPRESSED IN ADULT LIVER, SIGNAL = 1.6; EXPRESSED IN BONE MARROW, SIGNAL = 0.84; SWISSPROT HIT: P98133, EVALUE 6.90e-01
CHSQNGASVLPMGGDHACPGGQEYHHLAAHGCREDPGGCLCGQAAPRDCGWSQGGCIGQQGEWS

SEQ ID NO: 28785 - protein, 95 aa, Homo sapiens
  MAP TO CHRX.1; EXPRESSED IN BRAIN, SIGNAL = 0.82; EXPRESSED IN ADULT LIVER, SIGNAL = 0.7; EXPRESSED IN PLACENTA, SIGNAL = 1.2; EXPRESSED IN FETAL LIVER, SIGNAL = 1.9; EXPRESSED IN LUNG, SIGNAL = 1.6; SWISSPROT HIT: Q15233, EVALUE 4.00e-48
RTLAEIAKVELDNMPLRGKQLRVRFACHSASLTVRNLPQYVSNELLEEAFSVFGQVERAVVIVDDRGRPSGKGIVEFSGKPAARKALDRCSEGSF

SEQ ID NO: 28786 - protein, 72 aa, Homo sapiens
  MAP TO CHR17.1; EXPRESSED IN HEART, SIGNAL = 9.5; EXPRESSED IN BONE MARROW, SIGNAL = 9.2; EXPRESSED IN ADULT LIVER, SIGNAL = 4.3; EXPRESSED IN PLACENTA, SIGNAL = 9.6; EXPRESSED IN FETAL LIVER, SIGNAL = 8.3; EXPRESSED IN LUNG, SIGNAL =  12; EXPRESSED IN HELA, SIGNAL = 8.9; EXPRESSED IN BRAIN, SIGNAL = 8.5
HSQWALGHGHHHRFGESFSLQLPRSLHRGINTPTCLDRPPARGLRRGCLPRPGRQVTCPINATGPQALPSSP

SEQ ID NO: 28787 - protein, 90 aa, Homo sapiens
  MAP TO CHR17.1; EXPRESSED IN HELA, SIGNAL = 1.3; EXPRESSED IN BRAIN, SIGNAL =   1; EXPRESSED IN LUNG, SIGNAL = 1.4; EXPRESSED IN HEART, SIGNAL = 1.2; EXPRESSED IN ADULT LIVER, SIGNAL = 0.68; EXPRESSED IN BONE MARROW, SIGNAL =   1; EXPRESSED IN FETAL LIVER, SIGNAL = 0.99; SWISSPROT HIT: O75616, EVALUE 7.00e-44
IPHVQVDCLKQKSVLLELTAALTEGVVNGKKLKMRQAFHSHPGTHCPSPAVKDPNTQSVGNPQRIGWPHFKEIFMLSALSQEDVKTLKVS

SEQ ID NO: 28788 - protein, 51 aa, Homo sapiens
  MAP TO CHR3.1; EXPRESSED IN FETAL LIVER, SIGNAL = 4.9; EXPRESSED IN LUNG, SIGNAL =   4; EXPRESSED IN HELA, SIGNAL =   3; EXPRESSED IN BRAIN, SIGNAL = 4.8; EXPRESSED IN HEART, SIGNAL =   5; EXPRESSED IN ADULT LIVER, SIGNAL = 6.5; EXPRESSED IN PLACENTA, SIGNAL = 3.3
LTVILTLRIWRHWMGSVSTHVMSRITSAINRAATNPSNCRSLIICKRVKVK

SEQ ID NO: 28789 - protein, 43 aa, Homo sapiens
  MAP TO CHR20.1; EXPRESSED IN FETAL LIVER, SIGNAL = 1.7; EXPRESSED IN HELA, SIGNAL = 2.5; EXPRESSED IN LUNG, SIGNAL = 1.1; EXPRESSED IN BRAIN, SIGNAL = 2.5; EXPRESSED IN HEART, SIGNAL = 2.9; EXPRESSED IN ADULT LIVER, SIGNAL = 1.8
FLFFSRDQSGCWMLKCKQTQYPSDQLANPSKQISTVPTRFSCH

SEQ ID NO: 28790 - protein, 76 aa, Homo sapiens
  MAP TO CHR7.1; EXPRESSED IN BONE MARROW, SIGNAL = 2.7; EXPRESSED IN ADULT LIVER, SIGNAL = 3.6; EXPRESSED IN PLACENTA, SIGNAL = 4.9; EXPRESSED IN BRAIN, SIGNAL = 2.5; EXPRESSED IN HEART, SIGNAL = 3.3; EXPRESSED IN LUNG, SIGNAL = 3.8; EXPRESSED IN FETAL LIVER, SIGNAL = 3.5; EXPRESSED IN HELA, SIGNAL = 2.9; SWISSPROT HIT: P07942, EVALUE 2.00e-31
SLLFTEDSADLDSIEAVANEVLKMEMPSTPQQLQNLTEDIRERVESLSQVEVILQHSAADIARAEMLLEEAKRARY

SEQ ID NO: 28791 - protein, 62 aa, Homo sapiens
  MAP TO CHR17.1; EXPRESSED IN BONE MARROW, SIGNAL =   1; EXPRESSED IN HELA, SIGNAL = 0.63; EXPRESSED IN BRAIN, SIGNAL =   1; EXPRESSED IN HEART, SIGNAL = 0.89
LTWAIPSMKAKGLSKLKIHSKDAGRCLYSDVNPRHPQKTVRRNTTRPVRKDFFTKMLIKKAK

SEQ ID NO: 28792 - protein, 77 aa, Homo sapiens
  MAP TO CHR4.1; EXPRESSED IN BRAIN, SIGNAL = 0.44; EXPRESSED IN BONE MARROW, SIGNAL = 0.43; EXPRESSED IN FETAL LIVER, SIGNAL = 0.36; SWISSPROT HIT: P32298, EVALUE 4.00e-30
ISCICYVAPEVVNNEKYTFSPDWWGLGCLIYEMIQGHSPFKKYKEKVKWEEVDQRIKNDTEEYSEKFSEDAKSICRM

SEQ ID NO: 28793 - protein, 46 aa, Homo sapiens
  MAP TO CHR2.1; EXPRESSED IN FETAL LIVER, SIGNAL = 0.52; EXPRESSED IN BRAIN, SIGNAL = 0.82; EXPRESSED IN BONE MARROW, SIGNAL = 0.84; SWISSPROT HIT: Q15032, EVALUE 2.00e-24
PPGGGMVMMQLSVPNNPQSCAHSPPQWKQNKYYCDHQRGQKCVEFS

SEQ ID NO: 28794 - protein, 56 aa, Homo sapiens
  MAP TO CHR5.1; EXPRESSED IN HEART, SIGNAL = 1.8; EXPRESSED IN FETAL LIVER, SIGNAL = 3.3; EXPRESSED IN BONE MARROW, SIGNAL = 3.5; EXPRESSED IN ADULT LIVER, SIGNAL = 2.7; EXPRESSED IN PLACENTA, SIGNAL = 3.8; EXPRESSED IN LUNG, SIGNAL = 1.6; EXPRESSED IN BRAIN, SIGNAL = 3.6; EXPRESSED IN HELA, SIGNAL = 4.5; SWISSPROT HIT: Q24592, EVALUE 8.00e+00
TYSELGRVGLTTARSGSLEFMLGCKLLLELRMLFGFDETDSKLELMMLFLCSSGGE

SEQ ID NO: 28795 - protein, 153 aa, Homo sapiens
  MAP TO CHR5.1; EXPRESSED IN HELA, SIGNAL = 1.5; EXPRESSED IN BRAIN, SIGNAL = 1.6; EXPRESSED IN BONE MARROW, SIGNAL = 1.6; EXPRESSED IN HEART, SIGNAL = 1.3; EXPRESSED IN PLACENTA, SIGNAL = 1.7; SWISSPROT HIT: Q9Y5H6, EVALUE 4.00e-83
NGQVTCSLMPHVPFKLVSTFKNYYSLVLDSALDRERVSAYELVVTARDGGSPSLWATASLSVEVADVNDNAPAFAQPEYTVFVKENNPPGCHIFTVSARDADAQENALVSYSLVERRVGERSLSSYISVHTESGKVYALQPLDHEELELLQFQ

SEQ ID NO: 28796 - protein, 49 aa, Homo sapiens
  MAP TO CHR7.1; EXPRESSED IN FETAL LIVER, SIGNAL = 0.28; EXPRESSED IN BRAIN, SIGNAL = 0.38; EXPRESSED IN HEART, SIGNAL = 0.48; EXPRESSED IN BONE MARROW, SIGNAL = 0.39
GLNVYYSPVLYTVFLHRQHIITTWFLICYHNLVTFKQKFMVYIKAVINT

SEQ ID NO: 28797 - protein, 76 aa, Homo sapiens
  MAP TO CHR5.1; EXPRESSED IN BONE MARROW, SIGNAL = 1.8; EXPRESSED IN HEART, SIGNAL = 1.5; EXPRESSED IN ADULT LIVER, SIGNAL = 3.5; EXPRESSED IN FETAL LIVER, SIGNAL = 2.2; EXPRESSED IN LUNG, SIGNAL = 1.3; EXPRESSED IN BRAIN, SIGNAL =   2; SWISSPROT HIT: P51826, EVALUE 4.00e-08
CSKAVGMPSPVSPKLSPGNSGNYSSGASSASASGSSVTIPQKIHQMAASYVQVTSNFLYATEIWDQAEQLSKEQKG

SEQ ID NO: 28798 - protein, 59 aa, Homo sapiens
  MAP TO CHR7.1; EXPRESSED IN FETAL LIVER, SIGNAL = 0.53; EXPRESSED IN HELA, SIGNAL = 0.39; EXPRESSED IN BRAIN, SIGNAL = 0.54; EXPRESSED IN BONE MARROW, SIGNAL = 0.61; SWISSPROT HIT: O57854, EVALUE 8.00e+00
SPAGNQTRAEMKNPEAQQDVSVSQGFRMLFYTMKPSETSFQTLEEVPDYVKKVRLYWKR

SEQ ID NO: 28799 - protein, 58 aa, Homo sapiens
  MAP TO CHR17.1; EXPRESSED IN FETAL LIVER, SIGNAL = 0.58; EXPRESSED IN HELA, SIGNAL = 0.4; EXPRESSED IN BRAIN, SIGNAL = 0.72
YSLCFRDEFVSVIPVRQEIRCLFIIYPNVMILKDSWEEVIYLSSDIQDIPYPARKPRE

SEQ ID NO: 28800 - protein, 56 aa, Homo sapiens
  MAP TO CHR17.1; EXPRESSED IN HEART, SIGNAL = 1.5; EXPRESSED IN PLACENTA, SIGNAL = 3.6; EXPRESSED IN LUNG, SIGNAL = 2.7; EXPRESSED IN FETAL LIVER, SIGNAL = 1.2; EXPRESSED IN BRAIN, SIGNAL = 1.2; EXPRESSED IN HELA, SIGNAL = 1.6; EXPRESSED IN BONE MARROW, SIGNAL = 1.1; EXPRESSED IN ADULT LIVER, SIGNAL = 0.76; SWISSPROT HIT: Q50625, EVALUE 2.10e+00
GQPPPSRSHPVGAHPLLAQVLAEDEAEQDRCHEQGQQHRHHRDYDDHLAVRHRLWG

SEQ ID NO: 28801 - protein, 80 aa, Homo sapiens
  MAP TO CHR11.1; EXPRESSED IN FETAL LIVER, SIGNAL = 0.79; EXPRESSED IN BRAIN, SIGNAL = 0.86; EXPRESSED IN ADULT LIVER, SIGNAL = 1.4; EXPRESSED IN BONE MARROW, SIGNAL = 0.84; SWISSPROT HIT: Q15620, EVALUE 8.00e-23
NGSFVTEFILAGLTHQPDLQSPLFFLFLVIYVVTLLGNLGLVTLIGLNSHLHTPMYFFLFNLSFIDLCYSSVFTPKMLMN

SEQ ID NO: 28802 - protein, 40 aa, Homo sapiens
  MAP TO CHR6.1; EXPRESSED IN PLACENTA, SIGNAL = 4.7; EXPRESSED IN LUNG, SIGNAL =   1; EXPRESSED IN HELA, SIGNAL =   6; EXPRESSED IN BRAIN, SIGNAL = 2.4; EXPRESSED IN HEART, SIGNAL = 1.8; EXPRESSED IN BONE MARROW, SIGNAL = 2.4; EXPRESSED IN ADULT LIVER, SIGNAL = 5.6
TSDVSRVTLAALRLPAGRFNPILSSFSLKDLPPFLDFALF

SEQ ID NO: 28803 - protein, 49 aa, Homo sapiens
  MAP TO CHR19.1; EXPRESSED IN FETAL LIVER, SIGNAL = 1.4; EXPRESSED IN LUNG, SIGNAL = 1.2; EXPRESSED IN HELA, SIGNAL = 2.3; EXPRESSED IN BRAIN, SIGNAL = 1.6; EXPRESSED IN HEART, SIGNAL = 1.1; EXPRESSED IN BONE MARROW, SIGNAL = 2.1; EXPRESSED IN PLACENTA, SIGNAL = 1.9; SWISSPROT HIT: O43823, EVALUE 1.00e-21
IQFACSVCKFRSFDDEEIQKHLQSKFHKETLRFISTKLPDKTVEFLQVK

SEQ ID NO: 28804 - protein, 66 aa, Homo sapiens
  MAP TO CHR22.1; EXPRESSED IN BRAIN, SIGNAL = 0.52; EXPRESSED IN HELA, SIGNAL = 1.2; EXPRESSED IN LUNG, SIGNAL = 0.6; EXPRESSED IN BONE MARROW, SIGNAL = 0.48; EXPRESSED IN ADULT LIVER, SIGNAL = 0.86; EXPRESSED IN FETAL LIVER, SIGNAL = 0.61; SWISSPROT HIT: Q15040, EVALUE 7.00e-35
RDVGVIALTNVMGFIMNLPSSLCWGPLKLPLKRQHWICVREVGGAYYNLDSKLKMPEWIGGESELR

SEQ ID NO: 28805 - protein, 39 aa, Homo sapiens
  MAP TO CHR6.1; EXPRESSED IN ADULT LIVER, SIGNAL = 3.2; EXPRESSED IN HEART, SIGNAL = 1.7; EXPRESSED IN PLACENTA, SIGNAL = 1.8; EXPRESSED IN FETAL LIVER, SIGNAL = 2.1; EXPRESSED IN HELA, SIGNAL = 1.9; EXPRESSED IN LUNG, SIGNAL = 1.8; EXPRESSED IN BRAIN, SIGNAL = 2.4
IGRLWSEIKQDCTMEDKHLGIQYTSKCFFFFVFKTGCYF

SEQ ID NO: 28806 - protein, 49 aa, Homo sapiens
  MAP TO CHR4.1; EXPRESSED IN BRAIN, SIGNAL = 0.67; EXPRESSED IN BONE MARROW, SIGNAL = 0.67; EXPRESSED IN FETAL LIVER, SIGNAL = 0.52
YSFLRSSYITDLLCNRAVGSSRKLARTLDKKLNYSRGHLEAGRLGHAEK

SEQ ID NO: 28807 - protein, 52 aa, Homo sapiens
  MAP TO CHR11.1; EXPRESSED IN ADULT LIVER, SIGNAL = 4.7; EXPRESSED IN FETAL LIVER, SIGNAL = 5.3; EXPRESSED IN LUNG, SIGNAL = 5.1; EXPRESSED IN HELA, SIGNAL = 7.2; EXPRESSED IN HEART, SIGNAL = 4.4; EXPRESSED IN BONE MARROW, SIGNAL =   6; EXPRESSED IN PLACENTA, SIGNAL = 5.3; EXPRESSED IN BRAIN, SIGNAL = 7.6; SWISSPROT HIT: P49589, EVALUE 2.00e-23
SLQVLLEEAKDLLSDWLDSTLGCDVTDNSIFSKLPKFWEGDFHRDMEALNVS

SEQ ID NO: 28808 - protein, 90 aa, Homo sapiens
  MAP TO CHRX.1; EXPRESSED IN BRAIN, SIGNAL = 4.2; EXPRESSED IN HEART, SIGNAL = 3.8; EXPRESSED IN ADULT LIVER, SIGNAL = 5.2; EXPRESSED IN BONE MARROW, SIGNAL = 4.4; EXPRESSED IN PLACENTA, SIGNAL = 4.8; EXPRESSED IN FETAL LIVER, SIGNAL = 3.9; EXPRESSED IN LUNG, SIGNAL = 3.2
SFASGNAPCTAGTVPTRASRTTALFQPPGAPWTCPIILLPPPPLLCPPHHLPLHGSPAVPSGLKTVLLGLGWARIARSRSGASCCFSWSL

SEQ ID NO: 28809 - protein, 67 aa, Homo sapiens
  MAP TO CHR19.1; EXPRESSED IN BRAIN, SIGNAL = 1.7; EXPRESSED IN HELA, SIGNAL = 1.7; EXPRESSED IN BONE MARROW, SIGNAL = 1.7; EXPRESSED IN HEART, SIGNAL = 1.3; EXPRESSED IN PLACENTA, SIGNAL = 1.6; EXPRESSED IN FETAL LIVER, SIGNAL = 1.3; EXPRESSED IN LUNG, SIGNAL = 1.2; SWISSPROT HIT: P15094, EVALUE 3.70e-02
CSVTGTVAVAQVLAYLEAVTGQGPQDARLQTLANSLDPNGEGPKATVDLDTFLVVMRDWIAACQLHG

SEQ ID NO: 28810 - protein, 48 aa, Homo sapiens
  MAP TO CHR4.1; EXPRESSED IN BONE MARROW, SIGNAL = 0.86; EXPRESSED IN FETAL LIVER, SIGNAL = 0.81; EXPRESSED IN BRAIN, SIGNAL = 0.86; SWISSPROT HIT: P36123, EVALUE 6.30e+00
CFVFSDFYYDNKCYQADIFEKISTLHLSLQGKGDILTSKKVFLKKLVY

SEQ ID NO: 28811 - protein, 34 aa, Homo sapiens
  MAP TO CHR7.1; EXPRESSED IN FETAL LIVER, SIGNAL = 0.76; EXPRESSED IN BRAIN, SIGNAL = 0.72; EXPRESSED IN HEART, SIGNAL = 0.84; EXPRESSED IN BONE MARROW, SIGNAL = 0.74
HECSGHRCDEASDCFITASLPGFTLKKELGSGSP

SEQ ID NO: 28812 - protein, 59 aa, Homo sapiens
  MAP TO CHR3.1; EXPRESSED IN FETAL LIVER, SIGNAL = 0.67; EXPRESSED IN HELA, SIGNAL = 0.85; EXPRESSED IN BRAIN, SIGNAL = 0.52; EXPRESSED IN ADULT LIVER, SIGNAL =   1; EXPRESSED IN BONE MARROW, SIGNAL = 0.44; SWISSPROT HIT: Q61085, EVALUE 2.00e-08
SLLFQVGEVYQQLHAAMSQAPVKENIPYSWASLACVKAHHYAALAHYFTAILLIDHQGK

SEQ ID NO: 28813 - protein, 101 aa, Homo sapiens
  MAP TO CHR5.1; EXPRESSED IN FETAL LIVER, SIGNAL = 0.83; EXPRESSED IN HELA, SIGNAL = 0.89; EXPRESSED IN BRAIN, SIGNAL = 0.97; EXPRESSED IN HEART, SIGNAL = 0.7; EXPRESSED IN BONE MARROW, SIGNAL = 0.99
VHGRNLLSIDYDRNIRTEKIYDDHRKFTLRIIYDQVGRPFLWLPSSGLAAVNVSYFFNGRLAGLQRGAMSERTDIDKQGRIVSRMFADGKVWSYSYLDKVG

SEQ ID NO: 28814 - protein, 48 aa, Homo sapiens
  MAP TO CHR7.1; EXPRESSED IN BONE MARROW, SIGNAL = 2.8; EXPRESSED IN ADULT LIVER, SIGNAL = 1.9; EXPRESSED IN PLACENTA, SIGNAL = 3.1; EXPRESSED IN HELA, SIGNAL = 3.4; EXPRESSED IN FETAL LIVER, SIGNAL = 2.5; EXPRESSED IN LUNG, SIGNAL =   2; EXPRESSED IN BRAIN, SIGNAL = 3.2; EXPRESSED IN HEART, SIGNAL =   2
SEVNEILYVKELGNYKTPHKGEVFGRIKVTFWFIQELKVNALRYCTKV

SEQ ID NO: 28815 - protein, 48 aa, Homo sapiens
  MAP TO CHR19.1; EXPRESSED IN HELA, SIGNAL = 1.6; EXPRESSED IN ADULT LIVER, SIGNAL = 2.3; EXPRESSED IN BONE MARROW, SIGNAL = 1.3; EXPRESSED IN HEART, SIGNAL = 0.97; EXPRESSED IN FETAL LIVER, SIGNAL = 1.2; EXPRESSED IN LUNG, SIGNAL = 1.4; EXPRESSED IN PLACENTA, SIGNAL = 1.7; EXPRESSED IN BRAIN, SIGNAL = 1.1
SSGAVLAHEGHDAGRRPCLGQEWVLQQLGCRGPLGRVSHQQAVQEALQ

SEQ ID NO: 28816 - protein, 31 aa, Homo sapiens
  MAP TO CHR17.1; EXPRESSED IN ADULT LIVER, SIGNAL = 0.61; EXPRESSED IN BONE MARROW, SIGNAL = 0.83; EXPRESSED IN HELA, SIGNAL = 1.1; EXPRESSED IN BRAIN, SIGNAL = 0.9; EXPRESSED IN LUNG, SIGNAL =   1; EXPRESSED IN HEART, SIGNAL = 1.1
VSGARGVPLKPFSTLHQMEISASRTESSYND

SEQ ID NO: 28817 - protein, 62 aa, Homo sapiens
  MAP TO CHR5.1; EXPRESSED IN FETAL LIVER, SIGNAL = 1.2; EXPRESSED IN LUNG, SIGNAL = 1.6; EXPRESSED IN HELA, SIGNAL = 1.8; EXPRESSED IN BRAIN, SIGNAL = 1.3; EXPRESSED IN HEART, SIGNAL = 1.3; EXPRESSED IN BONE MARROW, SIGNAL = 0.98; EXPRESSED IN ADULT LIVER, SIGNAL = 1.4; SWISSPROT HIT: Q05813, EVALUE 1.60e+00
YLEHNARGLVEVHYLVDNRLEKVLVTWERAKDGHLAPQGDGETGNKRKKGVERACSPGKGPP

SEQ ID NO: 28818 - protein, 91 aa, Homo sapiens
  MAP TO CHR19.1; EXPRESSED IN BRAIN, SIGNAL = 1.3; EXPRESSED IN HEART, SIGNAL = 1.4; EXPRESSED IN BONE MARROW, SIGNAL = 1.5; EXPRESSED IN ADULT LIVER, SIGNAL = 1.6; EXPRESSED IN PLACENTA, SIGNAL = 1.8; EXPRESSED IN FETAL LIVER, SIGNAL = 1.2; EXPRESSED IN LUNG, SIGNAL = 1.4; SWISSPROT HIT: Q62101, EVALUE 2.00e-42
QVKLCDFGFARIIGEKSFRRSVVGTPAYLAPEVLLNQGYNRSLDMWSVGVIMYVSLSGTFPFNEDEDINDQIQNAAFMYPASPWSHISAGG

SEQ ID NO: 28819 - protein, 144 aa, Homo sapiens
  MAP TO CHR19.1; EXPRESSED IN HEART, SIGNAL = 0.65; EXPRESSED IN BONE MARROW, SIGNAL = 0.84; EXPRESSED IN FETAL LIVER, SIGNAL = 1.1; EXPRESSED IN LUNG, SIGNAL = 0.66; EXPRESSED IN BRAIN, SIGNAL = 1.1; SWISSPROT HIT: P52742, EVALUE 2.00e-24
ESQPIDFGAMPYVCDECGRSFSVISEFVEHQIMHTRENLYEYGESFIHSVAVSEVQKSQVGGKRFECKDCGETFNKSAALAEHRKIHARGYLVECKNQECEEAFMPSPTFSELQKIYGKDKFYECRVCKETFLHSSALIEHQKI

SEQ ID NO: 28820 - protein, 90 aa, Homo sapiens
  MAP TO CHR12.1; EXPRESSED IN LUNG, SIGNAL = 0.99; EXPRESSED IN BRAIN, SIGNAL = 1.3; EXPRESSED IN ADULT LIVER, SIGNAL = 1.7; EXPRESSED IN BONE MARROW, SIGNAL = 1.5; EXPRESSED IN FETAL LIVER, SIGNAL = 1.4; EXPRESSED IN PLACENTA, SIGNAL =   2; EXPRESSED IN HELA, SIGNAL = 1.6; EXPRESSED IN HEART, SIGNAL = 1.3; SWISSPROT HIT: P02458, EVALUE 3.00e+00
PDPLPPPLSPIITAAAPPALSPLGELEYPFGAKGDSDPESPLAAPILETPISPPPEANCTDPEPVPPMILPPSPGSPVGPASPILMEPLP

SEQ ID NO: 28821 - protein, 53 aa, Homo sapiens
  MAP TO CHR11.1; EXPRESSED IN BRAIN, SIGNAL = 1.1; EXPRESSED IN HEART, SIGNAL = 0.69; EXPRESSED IN BONE MARROW, SIGNAL = 1.2; EXPRESSED IN FETAL LIVER, SIGNAL = 1.1; EXPRESSED IN HELA, SIGNAL = 1.4; EXPRESSED IN LUNG, SIGNAL = 0.83; SWISSPROT HIT: P31056, EVALUE 2.10e+00
KTGIWTFVDLDLCHMEVLGWDLNATCSASWVLTISKMLSLSQGFLIHAFYSWK

SEQ ID NO: 28822 - protein, 62 aa, Homo sapiens
  MAP TO CHR5.1; EXPRESSED IN LUNG, SIGNAL = 2.1; EXPRESSED IN HELA, SIGNAL = 1.5; EXPRESSED IN BRAIN, SIGNAL = 2.7; EXPRESSED IN HEART, SIGNAL = 1.6; EXPRESSED IN ADULT LIVER, SIGNAL = 1.4; EXPRESSED IN BONE MARROW, SIGNAL = 3.3; EXPRESSED IN PLACENTA, SIGNAL = 2.3; EXPRESSED IN FETAL LIVER, SIGNAL = 2.2; SWISSPROT HIT: Q9Y5E4, EVALUE 7.00e-28
TMETALAKTPQKRQVMFLAILLLLWEAGSEAVRYSIPEETESGYSVANLAKDLGLGVGELAT

SEQ ID NO: 28823 - protein, 76 aa, Homo sapiens
  MAP TO CHR17.1; EXPRESSED IN HEART, SIGNAL = 0.69; EXPRESSED IN ADULT LIVER, SIGNAL = 1.1; EXPRESSED IN FETAL LIVER, SIGNAL = 0.99; EXPRESSED IN LUNG, SIGNAL = 0.62; EXPRESSED IN HELA, SIGNAL = 1.2; EXPRESSED IN BRAIN, SIGNAL = 0.86; SWISSPROT HIT: P45018, EVALUE 8.40e-01
QVVYQPQEAEPTTSKSEKLDPRPFLRVLESIDHKYPPEERGDLLVFLSGMAEISAVLEAAQTYASHTQRWVVLPLH

SEQ ID NO: 28824 - protein, 77 aa, Homo sapiens
  MAP TO CHR14.1; EXPRESSED IN HEART, SIGNAL = 0.77; EXPRESSED IN HELA, SIGNAL = 0.83; EXPRESSED IN FETAL LIVER, SIGNAL = 0.58; EXPRESSED IN BRAIN, SIGNAL = 0.92; EXPRESSED IN LUNG, SIGNAL = 0.73
PQKVKAYTTPTTTMFPSVAMMAIHSKTASLEDRGGSSGWPWPLAAAWTLAEELNREYSVLKSSLGESMKAPPIMGSC

SEQ ID NO: 28825 - protein, 50 aa, Homo sapiens
  MAP TO CHR7.1; EXPRESSED IN HELA, SIGNAL = 0.86; EXPRESSED IN BRAIN, SIGNAL = 0.99; EXPRESSED IN BONE MARROW, SIGNAL = 1.1; EXPRESSED IN HEART, SIGNAL = 0.54; EXPRESSED IN FETAL LIVER, SIGNAL = 0.82
ANFTGEPTFLRSEDVFGCVRFAFAHKQQMNLFKTCITRRKTNLSQDKING

SEQ ID NO: 28826 - protein, 80 aa, Homo sapiens
  MAP TO CHR4.1; EXPRESSED IN ADULT LIVER, SIGNAL = 2.7; EXPRESSED IN BONE MARROW, SIGNAL = 2.2; EXPRESSED IN PLACENTA, SIGNAL =   2; EXPRESSED IN FETAL LIVER, SIGNAL = 2.7; EXPRESSED IN LUNG, SIGNAL = 3.1; EXPRESSED IN HELA, SIGNAL = 1.7; EXPRESSED IN BRAIN, SIGNAL = 2.2; EXPRESSED IN HEART, SIGNAL =   3; SWISSPROT HIT: P40394, EVALUE 1.00e-38
FDVSNSITGRGVLADGTTRFTCKGKPVHHFMNTSTFTEYTVVDESSVAKIDDAAPPEKVCLIGCGFSTGYGAAVKTGKVR

SEQ ID NO: 28827 - protein, 71 aa, Homo sapiens
  MAP TO CHR11.1; EXPRESSED IN FETAL LIVER, SIGNAL = 0.88; EXPRESSED IN HELA, SIGNAL = 0.86; EXPRESSED IN BRAIN, SIGNAL = 0.96; EXPRESSED IN LUNG, SIGNAL = 0.57; EXPRESSED IN HEART, SIGNAL = 0.93; EXPRESSED IN ADULT LIVER, SIGNAL = 1.2; SWISSPROT HIT: Q03522, EVALUE 3.40e+00
FQKYKPYNNGAANQKWHYMKNIKALVAFHSTALDKEITSANYAGVCTSSVIKEENIDQPVSGSFLSKIKEK

SEQ ID NO: 28828 - protein, 58 aa, Homo sapiens
  MAP TO CHR17.1; EXPRESSED IN ADULT LIVER, SIGNAL = 2.1; EXPRESSED IN LUNG, SIGNAL = 2.5; EXPRESSED IN HEART, SIGNAL = 1.4; EXPRESSED IN PLACENTA, SIGNAL = 4.1; EXPRESSED IN FETAL LIVER, SIGNAL = 3.5; EXPRESSED IN BRAIN, SIGNAL = 3.3; EXPRESSED IN HELA, SIGNAL = 4.7; EXPRESSED IN BONE MARROW, SIGNAL = 3.6
FGLQLGPLILAGWPNGISYSSLTHGTWSSSISSTVTASQWSCGSFWPLGLRVKIGKSF

SEQ ID NO: 28829 - protein, 42 aa, Homo sapiens
  MAP TO CHR5.1; EXPRESSED IN BONE MARROW, SIGNAL = 1.4; EXPRESSED IN ADULT LIVER, SIGNAL = 2.1; EXPRESSED IN HEART, SIGNAL = 0.98; EXPRESSED IN FETAL LIVER, SIGNAL = 1.1; EXPRESSED IN LUNG, SIGNAL = 0.85; EXPRESSED IN PLACENTA, SIGNAL = 1.5; EXPRESSED IN BRAIN, SIGNAL = 1.7; EXPRESSED IN HELA, SIGNAL = 1.2
PHLGLAAPEDVDHDLHDRLVHAQRPHQVRVLVEDFVVHDVPV

SEQ ID NO: 28830 - protein, 165 aa, Homo sapiens
  MAP TO CHR12.1; EXPRESSED IN BONE MARROW, SIGNAL = 0.95; EXPRESSED IN PLACENTA, SIGNAL = 1.2; EXPRESSED IN FETAL LIVER, SIGNAL =   1; EXPRESSED IN LUNG, SIGNAL = 0.96; EXPRESSED IN HELA, SIGNAL = 1.3; EXPRESSED IN BRAIN, SIGNAL = 0.79; EXPRESSED IN HEART, SIGNAL = 0.97; SWISSPROT HIT: O08753, EVALUE 8.20e-02
LPRVWWGDSAPGLCEEGPPAEGEAAGPGPLSSTAPRGGALPKRPCSRAGGHCAKEPGPIAPSTNSSPVLKTKPQPIPNFLSHSPTCDCSLCASPVLTAVCLRWVLVTAGVRLAMGHQAQGLDLLQVVLKGCPEAAERLTQALQASLNHKTPPSLVPSLLDEILAQ

SEQ ID NO: 28831 - protein, 45 aa, Homo sapiens
  MAP TO CHR10.1; EXPRESSED IN HEART, SIGNAL = 1.2; EXPRESSED IN BONE MARROW, SIGNAL = 1.2; EXPRESSED IN ADULT LIVER, SIGNAL = 1.1; EXPRESSED IN PLACENTA, SIGNAL = 2.2; EXPRESSED IN FETAL LIVER, SIGNAL = 1.2; EXPRESSED IN BRAIN, SIGNAL = 1.2; SWISSPROT HIT: O34595, EVALUE 2.90e+00
FPSPLSFRYVLERGCSAAAVHFWVVPAYHAEPSLNQALVFSSSVN

SEQ ID NO: 28832 - protein, 67 aa, Homo sapiens
  MAP TO CHR7.1; EXPRESSED IN LUNG, SIGNAL = 0.76; EXPRESSED IN HELA, SIGNAL = 0.43; EXPRESSED IN BRAIN, SIGNAL = 0.81; EXPRESSED IN BONE MARROW, SIGNAL = 0.97; SWISSPROT HIT: P00175, EVALUE 6.00e+00
VACSYTVMIIILKLAFCLRAIGVKTYRKTTVEILEGKKGDPGVSQAIQRYATKSVTFLSVQKVNKPE

SEQ ID NO: 28833 - protein, 39 aa, Homo sapiens
  MAP TO CHR9.1; EXPRESSED IN BRAIN, SIGNAL = 0.78; EXPRESSED IN BONE MARROW, SIGNAL = 0.9; EXPRESSED IN FETAL LIVER, SIGNAL = 0.82; EXPRESSED IN HELA, SIGNAL = 0.79
LTFPKSRTSKRSKGSNSSLFLNPNLSWQTFRKVRMFFKH

SEQ ID NO: 28834 - protein, 57 aa, Homo sapiens
  MAP TO CHR5.1; EXPRESSED IN HELA, SIGNAL = 2.5; EXPRESSED IN BRAIN, SIGNAL = 2.2; EXPRESSED IN HEART, SIGNAL = 1.7; EXPRESSED IN BONE MARROW, SIGNAL = 2.3; EXPRESSED IN ADULT LIVER, SIGNAL = 1.7; EXPRESSED IN PLACENTA, SIGNAL =   2; EXPRESSED IN FETAL LIVER, SIGNAL = 2.3; EXPRESSED IN LUNG, SIGNAL = 2.3; SWISSPROT HIT: Q9Z0S8, EVALUE 7.00e-04
QPTLPGRGWLVSPFGANPWWWSVAAALPALLLSILIFMDQQITAVILNRMEYRLQVR

SEQ ID NO: 28835 - protein, 52 aa, Homo sapiens
  MAP TO CHR4.1; EXPRESSED IN BRAIN, SIGNAL = 0.45; EXPRESSED IN HELA, SIGNAL = 0.45; EXPRESSED IN BONE MARROW, SIGNAL = 0.49; EXPRESSED IN HEART, SIGNAL = 0.79; EXPRESSED IN ADULT LIVER, SIGNAL = 0.39; EXPRESSED IN FETAL LIVER, SIGNAL = 0.6; EXPRESSED IN LUNG, SIGNAL = 0.77
HLPCFLGKGQSHQDDMLSQSQGESSFHNREVELTQQMRLIIQQVQGKEIMRS

SEQ ID NO: 28836 - protein, 57 aa, Homo sapiens
  MAP TO CHR11.1; EXPRESSED IN PLACENTA, SIGNAL = 4.2; EXPRESSED IN FETAL LIVER, SIGNAL = 2.2; EXPRESSED IN BRAIN, SIGNAL = 2.2; EXPRESSED IN HEART, SIGNAL = 1.5; EXPRESSED IN BONE MARROW, SIGNAL = 2.3; EXPRESSED IN ADULT LIVER, SIGNAL = 1.4
SGPGSLRSCVKVVQSSWESRCLRSSTSRPPSTSTLSVNFCDFPILVRSPRVTSSFTC

SEQ ID NO: 28837 - protein, 56 aa, Homo sapiens
  MAP TO CHR19.1; EXPRESSED IN ADULT LIVER, SIGNAL =   3; EXPRESSED IN HEART, SIGNAL = 2.4; EXPRESSED IN FETAL LIVER, SIGNAL = 1.6; EXPRESSED IN LUNG, SIGNAL = 1.7; EXPRESSED IN PLACENTA, SIGNAL = 1.3; EXPRESSED IN HELA, SIGNAL = 1.4; EXPRESSED IN BRAIN, SIGNAL = 1.5; EXPRESSED IN BONE MARROW, SIGNAL = 1.6; SWISSPROT HIT: P12694, EVALUE 3.00e-27
GVLMYRDYPLELFMAQCYGNISDLGKGRQMPVHYGCKERHFVTISSPLATQIPQGE

SEQ ID NO: 28838 - protein, 107 aa, Homo sapiens
  MAP TO CHR6.1; EXPRESSED IN ADULT LIVER, SIGNAL = 1.6; EXPRESSED IN BONE MARROW, SIGNAL = 0.98; EXPRESSED IN FETAL LIVER, SIGNAL =   1; EXPRESSED IN HELA, SIGNAL = 1.4; EXPRESSED IN BRAIN, SIGNAL = 0.81; EXPRESSED IN LUNG, SIGNAL =   1; EXPRESSED IN HEART, SIGNAL = 1.2
GRTGPGIGFQTSPGSRSHSEESAGPPLSSQHCVCRPPQSTPSRFPPPPPSNVSLRRSSPIPGHKADCRISLGCQALSACRGPASHFSGPLTGRARDERCLDPGPHQL

SEQ ID NO: 28839 - protein, 146 aa, Homo sapiens
  MAP TO CHR11.1; EXPRESSED IN BONE MARROW, SIGNAL = 1.5; EXPRESSED IN ADULT LIVER, SIGNAL =   1; EXPRESSED IN PLACENTA, SIGNAL = 1.5; EXPRESSED IN HELA, SIGNAL = 1.4; EXPRESSED IN FETAL LIVER, SIGNAL = 1.6; EXPRESSED IN BRAIN, SIGNAL = 1.4; EXPRESSED IN LUNG, SIGNAL = 0.63
RSADVCCDPHVLRLGLWHAATGSSDRSGDGSAVGPVLCPPLPMPLRCLHLPGGGLCGPYRLHGLASYGRAAAGRGRLALDRAGSWQWCTLLYHLRPDHRPQQILFSCALLSGAYHVHLLCGPDARRLVSCRKPGACGTLQTDQGQL

SEQ ID NO: 28840 - protein, 69 aa, Homo sapiens
  MAP TO CHR12.1; EXPRESSED IN PLACENTA, SIGNAL =   2; EXPRESSED IN FETAL LIVER, SIGNAL = 1.7; EXPRESSED IN LUNG, SIGNAL = 2.3; EXPRESSED IN HELA, SIGNAL = 1.9; EXPRESSED IN BRAIN, SIGNAL = 2.6; EXPRESSED IN HEART, SIGNAL = 1.5; EXPRESSED IN BONE MARROW, SIGNAL = 1.6; SWISSPROT HIT: P29350, EVALUE 5.00e-34
VPCRVGDQVTHIRIQNSGDFYDLYGGEKFATLTELVEYYTQQQGVLQDRDGTIIHLKYPLNCSDPTSER

SEQ ID NO: 28841 - protein, 45 aa, Homo sapiens
  MAP TO CHR17.1; EXPRESSED IN LUNG, SIGNAL = 0.76; EXPRESSED IN HELA, SIGNAL = 0.88; EXPRESSED IN BRAIN, SIGNAL = 0.61; EXPRESSED IN HEART, SIGNAL = 0.88; EXPRESSED IN ADULT LIVER, SIGNAL = 1.3; EXPRESSED IN BONE MARROW, SIGNAL = 0.6; SWISSPROT HIT: P52867, EVALUE 4.90e+00
LLLGGLWSAVGASSLGVVTCGSVVKLLNTRHNVRLHSHDVRYGSG

SEQ ID NO: 28842 - protein, 47 aa, Homo sapiens
  MAP TO CHR2.1; EXPRESSED IN BONE MARROW, SIGNAL = 0.55; EXPRESSED IN FETAL LIVER, SIGNAL = 0.64; EXPRESSED IN LUNG, SIGNAL = 0.84; EXPRESSED IN HELA, SIGNAL = 0.53; EXPRESSED IN BRAIN, SIGNAL = 0.41; EXPRESSED IN HEART, SIGNAL = 0.88; SWISSPROT HIT: Q12751, EVALUE 7.50e-01
KAYQSTAVSQDHSTSLAYSSIHTQAECSNRNHFCRFLVQKVGIHLHL

SEQ ID NO: 28843 - protein, 48 aa, Homo sapiens
  MAP TO CHR20.1; EXPRESSED IN BONE MARROW, SIGNAL = 0.55; EXPRESSED IN BRAIN, SIGNAL = 0.57; EXPRESSED IN HEART, SIGNAL = 0.65; SWISSPROT HIT: O89091, EVALUE 6.30e+00
FLWRAKDVEGSLVFREPQPMLQTPAMSPTQNSCQPVPRRMGWLTGSQG

SEQ ID NO: 28844 - protein, 141 aa, Homo sapiens
  MAP TO CHR17.1; EXPRESSED IN LUNG, SIGNAL = 0.79; EXPRESSED IN BRAIN, SIGNAL = 0.82; EXPRESSED IN PLACENTA, SIGNAL = 1.3; EXPRESSED IN FETAL LIVER, SIGNAL = 0.76; EXPRESSED IN HELA, SIGNAL = 1.9; EXPRESSED IN HEART, SIGNAL = 0.61; EXPRESSED IN BONE MARROW, SIGNAL = 0.85; EXPRESSED IN ADULT LIVER, SIGNAL = 0.98; SWISSPROT HIT: Q14258, EVALUE 3.00e-84
YRPHPQRFTYCSQVLGLHCYKKGIHYWEVELQKNNFCGVGICYGSMNRQGPESRLGRNSASWCVEWFNTKISAWHNNVEKTLPSTKATRVGVLLNCDHGFVIFFAVADKVHLMYKFRVDFTEALYPAFWVFSAGATLSICS

SEQ ID NO: 28845 - protein, 60 aa, Homo sapiens
  MAP TO CHR17.1; EXPRESSED IN FETAL LIVER, SIGNAL = 0.84; EXPRESSED IN LUNG, SIGNAL = 0.81; EXPRESSED IN BRAIN, SIGNAL = 0.64; EXPRESSED IN HEART, SIGNAL = 0.71; EXPRESSED IN BONE MARROW, SIGNAL = 0.78
RPPDLTALSRHDLEDNLLSSLVILEVLSRQLRDWKSQLAVPHPETQDSSTQTDTSHSGVR

SEQ ID NO: 28846 - protein, 43 aa, Homo sapiens
  MAP TO CHR4.1; EXPRESSED IN HEART, SIGNAL = 8.4; EXPRESSED IN BONE MARROW, SIGNAL =  20; EXPRESSED IN ADULT LIVER, SIGNAL =  11; EXPRESSED IN FETAL LIVER, SIGNAL =  15; EXPRESSED IN LUNG, SIGNAL = 8.3; EXPRESSED IN BRAIN, SIGNAL =  15; EXPRESSED IN PLACENTA, SIGNAL = 8.2; EXPRESSED IN HELA, SIGNAL = 7.3; SWISSPROT HIT: Q9KSN7, EVALUE 8.40e+00
KTKLIPTAEGLKGKSRKWAEKLGCIIRFCSGPIITNLVAQPLN

SEQ ID NO: 28847 - protein, 32 aa, Homo sapiens
  MAP TO CHRX.1; EXPRESSED IN HELA, SIGNAL = 0.78; EXPRESSED IN BRAIN, SIGNAL = 0.78; EXPRESSED IN HEART, SIGNAL = 0.8; EXPRESSED IN ADULT LIVER, SIGNAL = 1.2; EXPRESSED IN FETAL LIVER, SIGNAL = 0.84
NMPEVPFLQVNSLVAAIAIYARGLFLCRHNLW

SEQ ID NO: 28848 - protein, 69 aa, Homo sapiens
  MAP TO AC068936.2; EXPRESSED IN PLACENTA, SIGNAL = 2.4; EXPRESSED IN FETAL LIVER, SIGNAL = 3.2; EXPRESSED IN BRAIN, SIGNAL = 2.1; EXPRESSED IN LUNG, SIGNAL = 1.7; EXPRESSED IN BONE MARROW, SIGNAL = 2.6; EXPRESSED IN HEART, SIGNAL = 2.1; EXPRESSED IN ADULT LIVER, SIGNAL = 2.5; SWISSPROT HIT: P08835, EVALUE 9.50e+00
TFQGMLAFQQRQASLRCCRIVRALFCLIPSGIMSRISCITAARSSRSKCDSTRCFVTVFATPFECRPGS

SEQ ID NO: 28849 - protein, 34 aa, Homo sapiens
  MAP TO CHR7.1; EXPRESSED IN FETAL LIVER, SIGNAL = 3.2; EXPRESSED IN HELA, SIGNAL = 3.5; EXPRESSED IN BRAIN, SIGNAL =   3; EXPRESSED IN LUNG, SIGNAL = 1.5; EXPRESSED IN HEART, SIGNAL = 1.7; EXPRESSED IN BONE MARROW, SIGNAL =   3; EXPRESSED IN ADULT LIVER, SIGNAL = 2.2; EXPRESSED IN PLACENTA, SIGNAL = 3.6
RRYHSLSLLYISTLRQNFPFLPCHKTNRMHHGLS

SEQ ID NO: 28850 - protein, 131 aa, Homo sapiens
  MAP TO CHR19.1; EXPRESSED IN PLACENTA, SIGNAL = 3.2; EXPRESSED IN HELA, SIGNAL = 2.5; EXPRESSED IN FETAL LIVER, SIGNAL = 4.3; EXPRESSED IN LUNG, SIGNAL = 4.6; EXPRESSED IN BRAIN, SIGNAL = 4.1; EXPRESSED IN ADULT LIVER, SIGNAL = 6.6; EXPRESSED IN BONE MARROW, SIGNAL = 4.2; EXPRESSED IN HEART, SIGNAL =   5; SWISSPROT HIT: Q60900, EVALUE 4.00e-51
ACGGSGQSPRDPQSSPLSLIARFSPIAIDGMSGLAGVGLSGGAAGAGWCIFVYNLSPEADESVLWQLFGPFGAVTNVKVIRDFTTNKCKGFGFVTMTNYDEAAMAIASLNGYRLGERVLQVSFKTSKQHKA

SEQ ID NO: 28851 - protein, 56 aa, Homo sapiens
  MAP TO CHR8.1; EXPRESSED IN FETAL LIVER, SIGNAL = 0.4; EXPRESSED IN BRAIN, SIGNAL = 0.38; EXPRESSED IN LUNG, SIGNAL = 0.68; EXPRESSED IN BONE MARROW, SIGNAL = 0.35; SWISSPROT HIT: Q92636, EVALUE 2.00e-26
SIQDPDEKVAMLTQILEFGQTPKQLFVTPHPRRITPKFKSLSQTSSYNASMADSPG

SEQ ID NO: 28852 - protein, 104 aa, Homo sapiens
  MAP TO CHR17.1; EXPRESSED IN BRAIN, SIGNAL = 1.3; EXPRESSED IN HEART, SIGNAL = 1.3; EXPRESSED IN BONE MARROW, SIGNAL = 1.1; EXPRESSED IN FETAL LIVER, SIGNAL = 1.2; EXPRESSED IN LUNG, SIGNAL = 1.9
SGSEPLDSQLCMVGFCLQQLTGLHEDAFHGFPVVVLTWLGHAMHLFLPTDRSTILFSCDRQQYLSGRVFEPHLTISHPVGSITEHCPVIQIITFTFLTKSTHFL

SEQ ID NO: 28853 - protein, 84 aa, Homo sapiens
  MAP TO CHR2.1; EXPRESSED IN BRAIN, SIGNAL = 0.78; EXPRESSED IN LUNG, SIGNAL =   1; EXPRESSED IN BONE MARROW, SIGNAL = 0.92; EXPRESSED IN HELA, SIGNAL = 0.9; SWISSPROT HIT: P57737, EVALUE 2.30e+00
LHQICCCTQHWCRRPPTSKTGPCICCTVLRKRTAWPAQPAQPTGPMVTGVCSDSPPRSTTWDELTSGPRLGATPGCGTSAMGER

SEQ ID NO: 28854 - protein, 68 aa, Homo sapiens
  MAP TO CHR19.1; EXPRESSED IN HELA, SIGNAL = 1.1; EXPRESSED IN BRAIN, SIGNAL = 1.2; EXPRESSED IN HEART, SIGNAL =   1; EXPRESSED IN BONE MARROW, SIGNAL = 1.2; EXPRESSED IN LUNG, SIGNAL = 0.85
GHRLFAHGAGAPGGLGEPGVNAFAVVGVGAGQDLELVALLILIQADGTQVVVPREGADLGLLAGRRLH

SEQ ID NO: 28855 - protein, 39 aa, Homo sapiens
  MAP TO CHRX.1; EXPRESSED IN FETAL LIVER, SIGNAL = 2.2; EXPRESSED IN LUNG, SIGNAL = 1.3; EXPRESSED IN HELA, SIGNAL = 1.8; EXPRESSED IN BRAIN, SIGNAL = 2.3; EXPRESSED IN ADULT LIVER, SIGNAL = 1.6; EXPRESSED IN BONE MARROW, SIGNAL =   2; EXPRESSED IN HEART, SIGNAL = 1.2; EXPRESSED IN PLACENTA, SIGNAL = 1.4
VILHCNDPALCGFCTGDDGGDIQRFNGKQVDDTDKNICR

SEQ ID NO: 28856 - protein, 60 aa, Homo sapiens
  MAP TO CHR3.1; EXPRESSED IN ADULT LIVER, SIGNAL = 3.7; EXPRESSED IN BONE MARROW, SIGNAL = 4.6; EXPRESSED IN FETAL LIVER, SIGNAL = 3.8; EXPRESSED IN HELA, SIGNAL = 5.1; EXPRESSED IN BRAIN, SIGNAL = 4.6; EXPRESSED IN LUNG, SIGNAL = 1.7; EXPRESSED IN HEART, SIGNAL =   2; SWISSPROT HIT: Q21534, EVALUE 8.00e+00
YLSGFYTAWVLSSHRVRLQAPRPSEQCHTWIEFLWHRYHHLPLPGHLHQKPLKKQGFKLS

SEQ ID NO: 28857 - protein, 74 aa, Homo sapiens
  MAP TO CHR7.1; EXPRESSED IN BONE MARROW, SIGNAL = 0.58; EXPRESSED IN FETAL LIVER, SIGNAL = 0.73; EXPRESSED IN LUNG, SIGNAL = 0.59; EXPRESSED IN HELA, SIGNAL = 0.84; EXPRESSED IN BRAIN, SIGNAL = 0.55; EXPRESSED IN HEART, SIGNAL = 0.63; SWISSPROT HIT: P87323, EVALUE 4.20e+00
HRALTVQPSGKRSGVQRRKSGQPRSLSTMAQGPRVAWQRVRLGSSTRSFSHLGMYTAHSRGWITAQQRGAFRRP

SEQ ID NO: 28858 - protein, 67 aa, Homo sapiens
  MAP TO CHR12.1; EXPRESSED IN FETAL LIVER, SIGNAL = 1.4; EXPRESSED IN BRAIN, SIGNAL = 1.6; EXPRESSED IN LUNG, SIGNAL = 0.72; EXPRESSED IN HEART, SIGNAL = 0.75; EXPRESSED IN ADULT LIVER, SIGNAL = 1.4; EXPRESSED IN BONE MARROW, SIGNAL = 1.6; EXPRESSED IN PLACENTA, SIGNAL = 1.7; SWISSPROT HIT: Q93100, EVALUE 9.90e+00
TFVKGCIHGHRQLHDVVNSLGVLHLLCGQALDLFLHQEAEHFIRIFRAPAIPLWERGRVGRSGQPGN

SEQ ID NO: 28859 - protein, 59 aa, Homo sapiens
  MAP TO CHR5.1; EXPRESSED IN HELA, SIGNAL = 1.5; EXPRESSED IN BRAIN, SIGNAL = 1.7; EXPRESSED IN HEART, SIGNAL = 1.7; EXPRESSED IN BONE MARROW, SIGNAL = 1.5; EXPRESSED IN PLACENTA, SIGNAL = 1.5; EXPRESSED IN LUNG, SIGNAL = 1.9; SWISSPROT HIT: P16960, EVALUE 1.00e-29
SLKCSNCYMVWGGDFVSPGQQGRISHTDLVIGCLVDLATGLMTFTANGKESNTFFQVSP

SEQ ID NO: 28860 - protein, 54 aa, Homo sapiens
  MAP TO CHR19.1; EXPRESSED IN PLACENTA, SIGNAL = 1.5; EXPRESSED IN FETAL LIVER, SIGNAL = 0.69; EXPRESSED IN HELA, SIGNAL = 0.71; EXPRESSED IN BRAIN, SIGNAL = 0.95; EXPRESSED IN LUNG, SIGNAL = 0.73; EXPRESSED IN BONE MARROW, SIGNAL = 0.83; EXPRESSED IN ADULT LIVER, SIGNAL = 0.9; SWISSPROT HIT: P03607, EVALUE 4.30e-01
DASRMWTSVLAPHPVALMVSAPTWQGVSAAPAMEGTLALPAIRTSMTVTPVSAG

SEQ ID NO: 28861 - protein, 55 aa, Homo sapiens
  MAP TO CHR1.1; EXPRESSED IN HEART, SIGNAL = 0.77; EXPRESSED IN BONE MARROW, SIGNAL = 0.51; EXPRESSED IN ADULT LIVER, SIGNAL = 0.53; EXPRESSED IN FETAL LIVER, SIGNAL = 0.52; EXPRESSED IN LUNG, SIGNAL = 0.61; EXPRESSED IN BRAIN, SIGNAL = 0.39
SSSVFSYSSLKFQTAFLFLWFQILIRLLPISKRLCISCCWHVFLTLSELHELWPC

SEQ ID NO: 28862 - protein, 63 aa, Homo sapiens
  MAP TO CHR7.1; EXPRESSED IN HELA, SIGNAL = 0.93; EXPRESSED IN BRAIN, SIGNAL = 0.86; EXPRESSED IN LUNG, SIGNAL = 0.99; EXPRESSED IN BONE MARROW, SIGNAL = 0.96; EXPRESSED IN HEART, SIGNAL = 0.91; EXPRESSED IN ADULT LIVER, SIGNAL = 0.51
TYCLPTYNAKDSKPLPLSSSVQDERMHMLLLHCLLSSGYVLGVGLSFSFLVGTEIKKQDTLVL

SEQ ID NO: 28863 - protein, 27 aa, Homo sapiens
  MAP TO CHR7.1; EXPRESSED IN HEART, SIGNAL = 1.2; EXPRESSED IN HELA, SIGNAL = 1.1; EXPRESSED IN BRAIN, SIGNAL = 0.98; EXPRESSED IN LUNG, SIGNAL =   1; SWISSPROT HIT: O84883, EVALUE 8.80e+00
DTCERIEATEAEAGRPIRRSLSCCLDC

SEQ ID NO: 28864 - protein, 37 aa, Homo sapiens
  MAP TO CHR7.1; EXPRESSED IN FETAL LIVER, SIGNAL = 0.41; EXPRESSED IN BRAIN, SIGNAL = 0.58
TLSFPLKTCNYFPQATLHPAKLIKGNTHRKAKSSSAQ

SEQ ID NO: 28865 - protein, 50 aa, Homo sapiens
  MAP TO CHR19.1; EXPRESSED IN ADULT LIVER, SIGNAL = 4.6; EXPRESSED IN LUNG, SIGNAL =   2; EXPRESSED IN PLACENTA, SIGNAL = 4.7; EXPRESSED IN FETAL LIVER, SIGNAL = 3.9; EXPRESSED IN BRAIN, SIGNAL = 4.5; EXPRESSED IN HELA, SIGNAL = 4.8; EXPRESSED IN HEART, SIGNAL =   2; EXPRESSED IN BONE MARROW, SIGNAL =   5
THRRGAVAGVGVVLDLPQPFIEAFPLVGLPVLVFTFVVGEQVLGSQEGSG

SEQ ID NO: 28866 - protein, 58 aa, Homo sapiens
  MAP TO CHR17.1; EXPRESSED IN FETAL LIVER, SIGNAL = 1.4; EXPRESSED IN PLACENTA, SIGNAL = 2.2; EXPRESSED IN LUNG, SIGNAL = 1.4; EXPRESSED IN BRAIN, SIGNAL = 1.5; EXPRESSED IN HEART, SIGNAL = 2.1; EXPRESSED IN ADULT LIVER, SIGNAL =   2; EXPRESSED IN BONE MARROW, SIGNAL = 1.6; SWISSPROT HIT: Q13651, EVALUE 8.00e+00
SDYQHLRPQSIHQRGVLTVDHLCWRVGSDSHIQRAPHPPNMHVWGEALVLDSFTLQVG

SEQ ID NO: 28867 - protein, 41 aa, Homo sapiens
  MAP TO CHR2.1; EXPRESSED IN BRAIN, SIGNAL = 0.44; EXPRESSED IN BONE MARROW, SIGNAL = 0.58; EXPRESSED IN ADULT LIVER, SIGNAL = 0.96; SWISSPROT HIT: P47989, EVALUE 1.00e-19
VRRKNLYKEGDLTHFNQKLEGFTLPRCWEECLASSQYHARK

SEQ ID NO: 28868 - protein, 32 aa, Homo sapiens
  MAP TO CHR9.1; EXPRESSED IN HELA, SIGNAL = 1.2; EXPRESSED IN BRAIN, SIGNAL =   1; EXPRESSED IN LUNG, SIGNAL = 0.89; EXPRESSED IN ADULT LIVER, SIGNAL = 1.4; EXPRESSED IN BONE MARROW, SIGNAL = 1.2; EXPRESSED IN FETAL LIVER, SIGNAL =   1
GTRERVGPGVAGAGLRLKGRGLQAEATARAAQ

SEQ ID NO: 28869 - protein, 51 aa, Homo sapiens
  MAP TO CHR12.1; EXPRESSED IN BRAIN, SIGNAL =  12; EXPRESSED IN LUNG, SIGNAL = 9.8; EXPRESSED IN HEART, SIGNAL =  16; EXPRESSED IN ADULT LIVER, SIGNAL =  22
AGVGSPGVLLLGSHVGHEVHHPVAVAKFIVIPGNELDKVVVEVNAIPSIKG

SEQ ID NO: 28870 - protein, 165 aa, Homo sapiens
  MAP TO CHR17.1; EXPRESSED IN BRAIN, SIGNAL = 0.34; SWISSPROT HIT: Q9UH77, EVALUE 5.00e-26
RALFTSGWNNTEKKVYNIPGISPDMMKLIIEYAYTRTVPITPDNVEKLLAAADQFNIMGIVRGCCEFLKSELCLDNCIGICKFTDYYYCPELRQKAYMFILHNFEEMVKVSAEFLELSVTELKDIIEKDELNVKQEDAVFEAILKWISHDPQNRKQHISILLPKV

SEQ ID NO: 28871 - protein, 47 aa, Homo sapiens
  MAP TO CHR13.1; EXPRESSED IN BONE MARROW, SIGNAL = 0.54; EXPRESSED IN FETAL LIVER, SIGNAL = 0.41; EXPRESSED IN BRAIN, SIGNAL = 0.52; EXPRESSED IN HEART, SIGNAL = 0.43; SWISSPROT HIT: Q01815, EVALUE 3.00e-03
FQIAEYVFVIFMSIELNLKIMADGLFFTPTAVIRDFGGVMDIFIYLV

SEQ ID NO: 28872 - protein, 73 aa, Homo sapiens
  MAP TO CHR7.1; EXPRESSED IN ADULT LIVER, SIGNAL = 1.1; EXPRESSED IN BONE MARROW, SIGNAL = 1.4; EXPRESSED IN BRAIN, SIGNAL = 1.6; EXPRESSED IN LUNG, SIGNAL = 1.5; EXPRESSED IN HEART, SIGNAL = 1.6; SWISSPROT HIT: P08183, EVALUE 2.00e-32
FQVSVDGQDIRTINVRFLREIIGVVSQEPVLFATTIAENIRYGRENVTMDEIEKAVKEANAYDFIMKLPHVSC

SEQ ID NO: 28873 - protein, 56 aa, Homo sapiens
  MAP TO CHR19.1; EXPRESSED IN FETAL LIVER, SIGNAL =   3; EXPRESSED IN LUNG, SIGNAL = 4.3; EXPRESSED IN HELA, SIGNAL = 4.1; EXPRESSED IN BRAIN, SIGNAL = 2.4; EXPRESSED IN HEART, SIGNAL =   3; EXPRESSED IN BONE MARROW, SIGNAL = 2.2; EXPRESSED IN ADULT LIVER, SIGNAL = 1.3; SWISSPROT HIT: P98187, EVALUE 5.00e-21
GRRFHRACRLVHDFTDAVIRERRRTLPTQGIDDFFKDKAKSKTLDFIDVLLLSKVG

SEQ ID NO: 28874 - protein, 73 aa, Homo sapiens
  MAP TO CHRX.1; EXPRESSED IN BRAIN, SIGNAL = 0.83; EXPRESSED IN HEART, SIGNAL = 0.65; SWISSPROT HIT: Q9PRA6, EVALUE 1.90e+00
FFHSSHKIQVWGNKSVRKTHYKRNVIPLPDTCFQSTFFHLHPRYSKQDKQQGCHLGACEKCRPTPGWLAPNLH

SEQ ID NO: 28875 - protein, 70 aa, Homo sapiens
  MAP TO CHR19.1; EXPRESSED IN LUNG, SIGNAL = 3.8; EXPRESSED IN BRAIN, SIGNAL = 9.6; EXPRESSED IN PLACENTA, SIGNAL =  11; EXPRESSED IN FETAL LIVER, SIGNAL =   8; EXPRESSED IN HELA, SIGNAL =   9; EXPRESSED IN HEART, SIGNAL = 4.6; EXPRESSED IN BONE MARROW, SIGNAL = 9.6; EXPRESSED IN ADULT LIVER, SIGNAL = 7.4; SWISSPROT HIT: P00553, EVALUE 3.10e+00
QEALSGFAEAAGTTFVSLVVSGRVVAATEGWWRLGTPEAVLLPWLVGSLPPQTARDYPVYLPHGSPTVSG

SEQ ID NO: 28876 - protein, 72 aa, Homo sapiens
  MAP TO CHR12.1; EXPRESSED IN PLACENTA, SIGNAL = 3.8; EXPRESSED IN LUNG, SIGNAL = 3.2; EXPRESSED IN HELA, SIGNAL = 3.2; EXPRESSED IN BRAIN, SIGNAL = 5.1; EXPRESSED IN BONE MARROW, SIGNAL = 4.1; EXPRESSED IN HEART, SIGNAL = 3.7; EXPRESSED IN ADULT LIVER, SIGNAL = 6.9; SWISSPROT HIT: P09442, EVALUE 1.20e+00
SKPLSTRNSGGCILELPWEACGSISYKKEYGETVGKRKARKKPLKTQRMEKVPLPRNHKAQAESDTVLREWE

SEQ ID NO: 28877 - protein, 62 aa, Homo sapiens
  MAP TO CHR13.1; EXPRESSED IN HELA, SIGNAL = 0.69; EXPRESSED IN BRAIN, SIGNAL = 0.89; EXPRESSED IN BONE MARROW, SIGNAL = 0.67; EXPRESSED IN ADULT LIVER, SIGNAL = 0.73; SWISSPROT HIT: P51587, EVALUE 6.00e-30
PQMLFSKQDFNSNHNLTPSQKAEITELSTILEESGSQFEFTQFRKPSYILQKSTFEVPENQM

SEQ ID NO: 28878 - protein, 81 aa, Homo sapiens
  MAP TO CHR10.1; EXPRESSED IN HEART, SIGNAL = 1.6; EXPRESSED IN ADULT LIVER, SIGNAL =   4; EXPRESSED IN BONE MARROW, SIGNAL = 3.9; EXPRESSED IN PLACENTA, SIGNAL = 5.1; EXPRESSED IN FETAL LIVER, SIGNAL = 3.9; EXPRESSED IN HELA, SIGNAL = 5.8; EXPRESSED IN BRAIN, SIGNAL = 4.1; EXPRESSED IN LUNG, SIGNAL = 1.3; SWISSPROT HIT: Q90722, EVALUE 5.00e-25
APGRSSIIMVYCVFFNFLKVTVQSSPNFTQHVREQSLVTDQLSRRLIRTYQLYSRTSGKHVQVLANKRINAMAEDGDPFGK

SEQ ID NO: 28879 - protein, 58 aa, Homo sapiens
  MAP TO CHR4.1; EXPRESSED IN FETAL LIVER, SIGNAL = 0.72; EXPRESSED IN LUNG, SIGNAL = 0.88; EXPRESSED IN HELA, SIGNAL = 0.83; EXPRESSED IN BRAIN, SIGNAL = 0.88; EXPRESSED IN HEART, SIGNAL = 0.85; EXPRESSED IN ADULT LIVER, SIGNAL = 0.47; EXPRESSED IN BONE MARROW, SIGNAL = 0.8; SWISSPROT HIT: P42681, EVALUE 7.00e-28
EKWEIDPSELAFIKEIGSGQFGVVHLGEWRSHIQVAIKAINEGSMSEEDFIEEAKVMM

SEQ ID NO: 28880 - protein, 55 aa, Homo sapiens
  MAP TO CHR2.1; EXPRESSED IN HEART, SIGNAL = 1.9; EXPRESSED IN BONE MARROW, SIGNAL = 3.4; EXPRESSED IN ADULT LIVER, SIGNAL = 2.9; EXPRESSED IN PLACENTA, SIGNAL = 3.2; EXPRESSED IN FETAL LIVER, SIGNAL = 3.8; EXPRESSED IN HELA, SIGNAL = 3.8; EXPRESSED IN BRAIN, SIGNAL = 3.5; EXPRESSED IN LUNG, SIGNAL = 1.7; SWISSPROT HIT: P47989, EVALUE 5.00e-20
ERIAKSHGSQCGFCTPGIVMSMYTLLRNQPEPTMEEIENAFQGMGLQAQPRRWNG

SEQ ID NO: 28881 - protein, 52 aa, Homo sapiens
  MAP TO CHR2.1; EXPRESSED IN HEART, SIGNAL = 2.9; EXPRESSED IN BONE MARROW, SIGNAL = 3.1; EXPRESSED IN ADULT LIVER, SIGNAL = 0.68; EXPRESSED IN PLACENTA, SIGNAL = 2.5; EXPRESSED IN LUNG, SIGNAL = 2.9; EXPRESSED IN HELA, SIGNAL = 2.8; EXPRESSED IN BRAIN, SIGNAL = 2.7
SLITHIIMMLSSISQLPIPSKPLNLCAQSTLNSLSPSSSQIWHPCFVCSAGE

SEQ ID NO: 28882 - protein, 52 aa, Homo sapiens
  MAP TO CHR19.1; EXPRESSED IN FETAL LIVER, SIGNAL = 0.58; EXPRESSED IN BRAIN, SIGNAL =   1; EXPRESSED IN HEART, SIGNAL = 0.58; EXPRESSED IN BONE MARROW, SIGNAL = 0.61; SWISSPROT HIT: Q20799, EVALUE 5.00e-13
TLKNWWLQQYSHDSADPGILVLLACGTISSTCGQIASYPLALVRTRMQAQGE

SEQ ID NO: 28883 - protein, 45 aa, Homo sapiens
  MAP TO CHR6.1; EXPRESSED IN LUNG, SIGNAL =  78; EXPRESSED IN BRAIN, SIGNAL = 9.5; EXPRESSED IN HEART, SIGNAL =  11; EXPRESSED IN PLACENTA, SIGNAL =  50; SWISSPROT HIT: P30507, EVALUE 6.00e-22
ETRPAGDGTFQKWAAVVVPSGEEQRYTCHVQHEGLPEPLTLRWGK

SEQ ID NO: 28884 - protein, 35 aa, Homo sapiens
  MAP TO CHR19.1; EXPRESSED IN HEART, SIGNAL = 0.67; EXPRESSED IN ADULT LIVER, SIGNAL = 1.3; EXPRESSED IN BONE MARROW, SIGNAL = 1.5; EXPRESSED IN LUNG, SIGNAL = 0.64; EXPRESSED IN HELA, SIGNAL = 1.1; EXPRESSED IN BRAIN, SIGNAL = 2.1
KCRRETHPCFHHPKSVVNILIYFLHLVSVHRFLVC

SEQ ID NO: 28885 - protein, 45 aa, Homo sapiens
  MAP TO CHR2.1; EXPRESSED IN HELA, SIGNAL = 1.4; EXPRESSED IN FETAL LIVER, SIGNAL = 1.7; EXPRESSED IN LUNG, SIGNAL = 2.1; EXPRESSED IN BRAIN, SIGNAL = 1.4; EXPRESSED IN HEART, SIGNAL =   2; EXPRESSED IN BONE MARROW, SIGNAL = 1.4; EXPRESSED IN ADULT LIVER, SIGNAL = 2.2; EXPRESSED IN PLACENTA, SIGNAL = 1.2; SWISSPROT HIT: P47989, EVALUE 8.00e-09
QVASRALKIPTSKIYISETSTNTVPNTSPTAASVSADLNGQAVYV

SEQ ID NO: 28886 - protein, 30 aa, Homo sapiens
  MAP TO CHR1.1; EXPRESSED IN BRAIN, SIGNAL = 2.1; EXPRESSED IN LUNG, SIGNAL = 3.3; EXPRESSED IN HELA, SIGNAL = 1.4; EXPRESSED IN HEART, SIGNAL = 2.8; EXPRESSED IN BONE MARROW, SIGNAL = 2.4; EXPRESSED IN ADULT LIVER, SIGNAL = 2.2; EXPRESSED IN FETAL LIVER, SIGNAL = 2.4; EXPRESSED IN PLACENTA, SIGNAL = 1.6
GSFIFLKGIALNVIYCSDSEFRAVFFSVSC

SEQ ID NO: 28887 - protein, 71 aa, Homo sapiens
  MAP TO CHR7.1; EXPRESSED IN ADULT LIVER, SIGNAL = 0.51; EXPRESSED IN BONE MARROW, SIGNAL = 0.61; EXPRESSED IN FETAL LIVER, SIGNAL = 0.46; EXPRESSED IN HELA, SIGNAL = 0.55; EXPRESSED IN BRAIN, SIGNAL = 0.54; SWISSPROT HIT: O00222, EVALUE 7.00e-35
GLERIARDSSYEQEGKVQFVIDAVYSMAYALHNMHKDLCPGYIGLCPRMSTIDGKELLGYIRAVNFNGKLQ

SEQ ID NO: 28888 - protein, 45 aa, Homo sapiens
  MAP TO CHR5.1; EXPRESSED IN ADULT LIVER, SIGNAL = 5.6; EXPRESSED IN PLACENTA, SIGNAL =  12; EXPRESSED IN FETAL LIVER, SIGNAL = 8.3; EXPRESSED IN HELA, SIGNAL =   8; EXPRESSED IN BRAIN, SIGNAL = 6.6; EXPRESSED IN LUNG, SIGNAL =   3; EXPRESSED IN HEART, SIGNAL = 5.2; EXPRESSED IN BONE MARROW, SIGNAL = 8.1; SWISSPROT HIT: P01438, EVALUE 1.70e+00
TPRPQALSSTAQTCAGHHCQQGKWSDTHPYVHERGGGRDLPSRSL

SEQ ID NO: 28889 - protein, 67 aa, Homo sapiens
  MAP TO CHR22.1; EXPRESSED IN LUNG, SIGNAL = 1.3; EXPRESSED IN HELA, SIGNAL = 0.76; EXPRESSED IN BRAIN, SIGNAL = 0.69; EXPRESSED IN BONE MARROW, SIGNAL = 0.63; EXPRESSED IN HEART, SIGNAL = 1.1; EXPRESSED IN ADULT LIVER, SIGNAL = 0.74; SWISSPROT HIT: Q9Y6J0, EVALUE 6.00e-32
FQIDKNLKSLERCQSLEEIQRLYEAGDYKAVVHLLRPTLCTSGFDRAKHLEFMTSIPERPAQLLLLQ

SEQ ID NO: 28890 - protein, 67 aa, Homo sapiens
  MAP TO CHR17.1; EXPRESSED IN ADULT LIVER, SIGNAL = 1.8; EXPRESSED IN FETAL LIVER, SIGNAL = 1.7; EXPRESSED IN LUNG, SIGNAL = 3.8; EXPRESSED IN HELA, SIGNAL = 0.7; EXPRESSED IN BRAIN, SIGNAL = 0.75; EXPRESSED IN HEART, SIGNAL = 1.4; EXPRESSED IN BONE MARROW, SIGNAL = 0.68; SWISSPROT HIT: P12821, EVALUE 9.00e-35
FTDTGAYWRSWYNSPTFEDDLEHLYQQLEPLYLNLHAFVRRALHRRYGDRYINLRGPIPAHLLGKDL

SEQ ID NO: 28891 - protein, 77 aa, Homo sapiens
  MAP TO CHR7.1; EXPRESSED IN BRAIN, SIGNAL = 0.31; EXPRESSED IN HEART, SIGNAL = 0.47; EXPRESSED IN FETAL LIVER, SIGNAL = 0.27; SWISSPROT HIT: P21439, EVALUE 2.00e-33
GNISFFQINIDGQDIRNFNVNYLREIIGVVSQEPVLFSTTIAENICYGRGNVTMDEIKKAVKEANAYEFIMKLPQVK

SEQ ID NO: 28892 - protein, 52 aa, Homo sapiens
  MAP TO CHR19.1; EXPRESSED IN LUNG, SIGNAL = 6.3; EXPRESSED IN HELA, SIGNAL = 5.9; EXPRESSED IN BRAIN, SIGNAL = 4.9; EXPRESSED IN BONE MARROW, SIGNAL = 4.8; EXPRESSED IN ADULT LIVER, SIGNAL =   3; EXPRESSED IN FETAL LIVER, SIGNAL = 5.1; EXPRESSED IN HEART, SIGNAL = 5.4; EXPRESSED IN PLACENTA, SIGNAL = 5.7
TPKSQFLSGWLGKPQRPAASSPSLPFPSHAPGGGGDRSRSPGRDGAGLVPAL

SEQ ID NO: 28893 - protein, 36 aa, Homo sapiens
  MAP TO CHR7.1; EXPRESSED IN FETAL LIVER, SIGNAL = 0.68; EXPRESSED IN HELA, SIGNAL = 0.52; EXPRESSED IN BRAIN, SIGNAL = 0.76; EXPRESSED IN ADULT LIVER, SIGNAL = 0.46; EXPRESSED IN BONE MARROW, SIGNAL = 0.74
LPGSLSLLEFQMCQTAASSSHQSIKHSRTGKIVPVT

SEQ ID NO: 28894 - protein, 66 aa, Homo sapiens
  MAP TO CHR13.1; EXPRESSED IN FETAL LIVER, SIGNAL = 1.1; EXPRESSED IN LUNG, SIGNAL = 0.89; EXPRESSED IN HELA, SIGNAL = 1.4; EXPRESSED IN BRAIN, SIGNAL = 0.87; EXPRESSED IN HEART, SIGNAL = 0.99; EXPRESSED IN BONE MARROW, SIGNAL = 0.85; SWISSPROT HIT: P21865, EVALUE 2.70e+00
IVGVPKSRRGEIWQFLALQYRLRHRLPNKQQPPDISYKELLKQLTAQQHAILVDLGMFVMWIIIYK

SEQ ID NO: 28895 - protein, 101 aa, Homo sapiens
  MAP TO CHR6.1; EXPRESSED IN BONE MARROW, SIGNAL = 2.8; EXPRESSED IN ADULT LIVER, SIGNAL = 3.4; EXPRESSED IN PLACENTA, SIGNAL = 4.5; EXPRESSED IN FETAL LIVER, SIGNAL = 3.5; EXPRESSED IN HELA, SIGNAL =   4; EXPRESSED IN LUNG, SIGNAL = 4.8; EXPRESSED IN BRAIN, SIGNAL = 3.2; EXPRESSED IN HEART, SIGNAL = 4.9; SWISSPROT HIT: P22105, EVALUE 7.00e-55
FLVPQSDPSPGTPPHLGNLWVTDPTPDSLHLSWTVPEGQFDTFMVQYRDRDGRPQVVPVEGPERSFVVSSLDPDHKYRFTLFGIANKKRYGPLTADGTTGE

SEQ ID NO: 28896 - protein, 106 aa, Homo sapiens
  MAP TO CHR19.1; EXPRESSED IN BONE MARROW, SIGNAL = 0.69; EXPRESSED IN ADULT LIVER, SIGNAL = 0.5; EXPRESSED IN FETAL LIVER, SIGNAL = 1.1; EXPRESSED IN LUNG, SIGNAL = 1.2; EXPRESSED IN HELA, SIGNAL = 0.87; EXPRESSED IN BRAIN, SIGNAL = 0.91; SWISSPROT HIT: P55526, EVALUE 2.00e-01
RLLPPAQDGFEVLGAAELEAVREAFETGGLEAALSWVRSGLERLGSARLDLAVAGKADVGLVVDMLLGLDPGDPGAAPASVPTAPTPFPAPERPNVVLWTVPLGHT

SEQ ID NO: 28897 - protein, 59 aa, Homo sapiens
  MAP TO CHR3.1; EXPRESSED IN ADULT LIVER, SIGNAL = 1.4; EXPRESSED IN LUNG, SIGNAL = 1.7; EXPRESSED IN BRAIN, SIGNAL = 0.64; EXPRESSED IN BONE MARROW, SIGNAL = 0.7; EXPRESSED IN HEART, SIGNAL = 1.4
QHNKSATYSVGMQKTYSMICLAIDDDDKTDKTKKISKKLSFLSWGTNKNRQKSASTLCL

SEQ ID NO: 28898 - protein, 57 aa, Homo sapiens
  MAP TO CHR6.1; EXPRESSED IN ADULT LIVER, SIGNAL = 0.57; EXPRESSED IN BONE MARROW, SIGNAL = 0.51; EXPRESSED IN LUNG, SIGNAL = 0.7; EXPRESSED IN BRAIN, SIGNAL = 0.43; EXPRESSED IN HEART, SIGNAL = 0.66; SWISSPROT HIT: Q06430, EVALUE 2.00e-23
PPHHLTIYFGSAYVALTREFANFVLQNLRAIDLLEWSKDTDSPDEHFWVTLSRIPGM

SEQ ID NO: 28899 - protein, 56 aa, Homo sapiens
  MAP TO CHR19.1; EXPRESSED IN HEART, SIGNAL = 0.71; EXPRESSED IN BONE MARROW, SIGNAL = 1.1; EXPRESSED IN PLACENTA, SIGNAL = 1.6; EXPRESSED IN FETAL LIVER, SIGNAL = 1.1; EXPRESSED IN HELA, SIGNAL =   2; EXPRESSED IN BRAIN, SIGNAL = 1.3; EXPRESSED IN LUNG, SIGNAL = 0.8
IDTRDTGSSEPQPPPEPPRSGPPLPNGLKPEFALALPPEPPPGPEVKGGSCGLEHG

SEQ ID NO: 28900 - protein, 91 aa, Homo sapiens
  MAP TO CHR19.1; EXPRESSED IN PLACENTA, SIGNAL = 4.1; EXPRESSED IN FETAL LIVER, SIGNAL =   2; EXPRESSED IN LUNG, SIGNAL = 3.1; EXPRESSED IN HELA, SIGNAL = 4.8; EXPRESSED IN BRAIN, SIGNAL = 3.2; EXPRESSED IN BONE MARROW, SIGNAL = 2.3; EXPRESSED IN HEART, SIGNAL =   3; SWISSPROT HIT: P22105, EVALUE 6.30e+00
PTCLGARALLDAAAAAPALTHSTAALLPCHIPSQDVVTCIRGRCVKVALPAPTPHRALPRCAGSAGQGWRRWPGGQNGASRCLGLRAWERA

SEQ ID NO: 28901 - protein, 51 aa, Homo sapiens
  MAP TO CHR17.1; EXPRESSED IN HELA, SIGNAL = 0.88; EXPRESSED IN LUNG, SIGNAL = 1.9; EXPRESSED IN BRAIN, SIGNAL = 1.2; EXPRESSED IN HEART, SIGNAL = 1.9; EXPRESSED IN BONE MARROW, SIGNAL = 1.5; EXPRESSED IN PLACENTA, SIGNAL = 1.3; EXPRESSED IN FETAL LIVER, SIGNAL = 1.5; SWISSPROT HIT: Q61084, EVALUE 4.00e-21
LCALGSQNPGRSSPPPGYVPERQQHIARQGSYTSINSEGEFIPETSEQCVS

SEQ ID NO: 28902 - protein, 68 aa, Homo sapiens
  MAP TO CHR7.1; EXPRESSED IN ADULT LIVER, SIGNAL = 2.7; EXPRESSED IN FETAL LIVER, SIGNAL = 2.1; EXPRESSED IN LUNG, SIGNAL = 1.3; EXPRESSED IN HELA, SIGNAL = 1.5; EXPRESSED IN BRAIN, SIGNAL = 1.1; EXPRESSED IN HEART, SIGNAL =   1; SWISSPROT HIT: Q16850, EVALUE 1.00e-33
RDGRPLTDDEVAGMLIGLLLAGQHTSSTTSAWMGFFLARDKTLQKKCYLEQKTVCGENLPPLTYDQVC

SEQ ID NO: 28903 - protein, 39 aa, Homo sapiens
  MAP TO CHR12.1; EXPRESSED IN HELA, SIGNAL = 0.58; EXPRESSED IN BRAIN, SIGNAL = 0.66; EXPRESSED IN LUNG, SIGNAL = 0.64; EXPRESSED IN BONE MARROW, SIGNAL = 0.67; EXPRESSED IN FETAL LIVER, SIGNAL = 0.44
YLVRQSGGNPSSEIAGCPSCPPLGASVADFRHPGRRAWN

SEQ ID NO: 28904 - protein, 52 aa, Homo sapiens
  MAP TO CHR12.1; EXPRESSED IN HELA, SIGNAL = 2.1; EXPRESSED IN BRAIN, SIGNAL = 2.3; EXPRESSED IN LUNG, SIGNAL = 1.3; EXPRESSED IN HEART, SIGNAL = 1.3; EXPRESSED IN ADULT LIVER, SIGNAL = 2.8; EXPRESSED IN BONE MARROW, SIGNAL = 2.5; EXPRESSED IN PLACENTA, SIGNAL = 2.1
PFRPIHQQRSLPEDGLLNISRNSTAKPVNCFLGNTFNKDGGPPAGRAESLAW

SEQ ID NO: 28905 - protein, 117 aa, Homo sapiens
  MAP TO CHR19.1; EXPRESSED IN BONE MARROW, SIGNAL = 0.6; EXPRESSED IN FETAL LIVER, SIGNAL = 1.1; EXPRESSED IN BRAIN, SIGNAL = 0.65; EXPRESSED IN LUNG, SIGNAL = 0.81; SWISSPROT HIT: Q09704, EVALUE 2.80e+00
AQHTSGDGNPPALVVISQGHSVALLGGHDPDGAHAVLALNVGVVAWVPGCQLGIELVVDAGRGEGIGDAVPAERLVLPDDDGLRGGRGHLVGTGQGHRLEEDHHVVGVGHGHLDGPG

SEQ ID NO: 28906 - protein, 96 aa, Homo sapiens
  MAP TO CHR11.1; EXPRESSED IN FETAL LIVER, SIGNAL = 2.9; EXPRESSED IN PLACENTA, SIGNAL = 1.8; EXPRESSED IN LUNG, SIGNAL = 1.8; EXPRESSED IN BRAIN, SIGNAL = 2.8; EXPRESSED IN ADULT LIVER, SIGNAL = 1.6; EXPRESSED IN HEART, SIGNAL =  10; SWISSPROT HIT: Q14896, EVALUE 1.00e-44
PPGPSVSAFSKKPRSVEVAAGSPAVFEAETERAGVKVRWQRGGSDISASNKYGLATEGTRHTLTVREVGPADQGSYAVIAGSSKVKFDLKVIEAGK

SEQ ID NO: 28907 - protein, 87 aa, Homo sapiens
  MAP TO CHR11.1; EXPRESSED IN BRAIN, SIGNAL = 0.52; EXPRESSED IN LUNG, SIGNAL = 0.7; EXPRESSED IN HEART, SIGNAL = 0.83; EXPRESSED IN BONE MARROW, SIGNAL = 0.6; SWISSPROT HIT: Q99816, EVALUE 3.00e-38
MLGLFCFQAEVDKNIELLKKKDEELSSALEKMENQSENNDIDEVIIPTAPLYKQILNLYAEENAIEDTIFYLGEALRRGVIDLDVFL

SEQ ID NO: 28908 - protein, 80 aa, Homo sapiens
  MAP TO CHRX.1; EXPRESSED IN BRAIN, SIGNAL = 0.61; EXPRESSED IN ADULT LIVER, SIGNAL = 0.64; EXPRESSED IN BONE MARROW, SIGNAL = 0.75; EXPRESSED IN FETAL LIVER, SIGNAL = 0.84; EXPRESSED IN LUNG, SIGNAL = 1.1; SWISSPROT HIT: P24866, EVALUE 5.20e-01
QDPPCLPTPPRLFANKSRFSSETLSYLNSSCTGPMCVQIEDYSQVRDSIQAYSLGDVRIWIGTSYTMYGIYEMIPKVGLP

SEQ ID NO: 28909 - protein, 51 aa, Homo sapiens
  MAP TO CHR19.1; EXPRESSED IN FETAL LIVER, SIGNAL = 2.1; EXPRESSED IN LUNG, SIGNAL = 5.5; EXPRESSED IN HELA, SIGNAL = 2.1; EXPRESSED IN BRAIN, SIGNAL = 1.9; EXPRESSED IN HEART, SIGNAL = 4.5; EXPRESSED IN ADULT LIVER, SIGNAL = 0.72; EXPRESSED IN BONE MARROW, SIGNAL =   2
TVQAGHCPGPAPGLLPGAPGRPRPAVLPGDPEAESAFLRWQCWYPLPTLAA

SEQ ID NO: 28910 - protein, 65 aa, Homo sapiens
  MAP TO CHR18.1; EXPRESSED IN BONE MARROW, SIGNAL =  21; EXPRESSED IN ADULT LIVER, SIGNAL =  11; EXPRESSED IN LUNG, SIGNAL = 9.7; EXPRESSED IN HEART, SIGNAL =  10; EXPRESSED IN PLACENTA, SIGNAL =  15; EXPRESSED IN FETAL LIVER, SIGNAL =  16; EXPRESSED IN BRAIN, SIGNAL =  16; EXPRESSED IN HELA, SIGNAL =  10; SWISSPROT HIT: P15024, EVALUE 4.60e+00
LPDRKSPITFPSVHFSLGNRIPAKIELPVEPTIGHIRACHVLKSIITDHIDDGTHHCSPDVIKAS

SEQ ID NO: 28911 - protein, 57 aa, Homo sapiens
  MAP TO CHRX.1; EXPRESSED IN BONE MARROW, SIGNAL = 6.3; EXPRESSED IN ADULT LIVER, SIGNAL = 3.8; EXPRESSED IN PLACENTA, SIGNAL = 6.8; EXPRESSED IN FETAL LIVER, SIGNAL = 5.7; EXPRESSED IN LUNG, SIGNAL = 3.3; EXPRESSED IN BRAIN, SIGNAL = 6.1; EXPRESSED IN HEART, SIGNAL = 2.6; SWISSPROT HIT: P03960, EVALUE 6.10e+00
LAQAADILAVEGVDAGPCDLGSIEVGDGAIAVDFEALHGKPVPGRHWVEAVGQNEPG

SEQ ID NO: 28912 - protein, 105 aa, Homo sapiens
  MAP TO CHR19.1; EXPRESSED IN BRAIN, SIGNAL = 1.2; EXPRESSED IN BONE MARROW, SIGNAL = 1.2; EXPRESSED IN PLACENTA, SIGNAL = 1.6; EXPRESSED IN LUNG, SIGNAL = 1.8; EXPRESSED IN HELA, SIGNAL = 2.1
PHLYRVEPAVAIEREADDVRGVLVPAGVDGVAHDVSGLGEDLLDEGLLAAECDPLAQVGRDAHHQAVTGPAAAPLLLLLLPALQLAHHGLELIVARLLVQQTEVL

SEQ ID NO: 28913 - protein, 54 aa, Homo sapiens
  MAP TO CHR17.1; EXPRESSED IN HELA, SIGNAL = 2.7; EXPRESSED IN BRAIN, SIGNAL = 2.1; EXPRESSED IN LUNG, SIGNAL = 2.6; EXPRESSED IN HEART, SIGNAL = 1.5; EXPRESSED IN BONE MARROW, SIGNAL = 2.1; EXPRESSED IN PLACENTA, SIGNAL = 2.1; EXPRESSED IN FETAL LIVER, SIGNAL = 1.7
HPQLTSKNLEDSSDVKPAPLGEGEELAEEQEQRQNAEDDRQDHGGLDRLQPFWG

SEQ ID NO: 28914 - protein, 72 aa, Homo sapiens
  MAP TO CHR1.1; EXPRESSED IN BONE MARROW, SIGNAL = 4.3; EXPRESSED IN PLACENTA, SIGNAL = 5.8; EXPRESSED IN FETAL LIVER, SIGNAL = 3.8; EXPRESSED IN HELA, SIGNAL = 6.9; EXPRESSED IN BRAIN, SIGNAL = 3.8; EXPRESSED IN LUNG, SIGNAL = 1.8; EXPRESSED IN HEART, SIGNAL = 1.7; SWISSPROT HIT: P36718, EVALUE 8.00e-37
PGAAHKLVCYFTNWAHSRPGPASILPHDLDPFLCTHLIFAFASMNNNQIVAKDLQDEKILYPEFNKLKERCV

SEQ ID NO: 28915 - protein, 91 aa, Homo sapiens
  MAP TO CHR5.1; EXPRESSED IN LUNG, SIGNAL = 1.5; EXPRESSED IN HELA, SIGNAL = 1.1; EXPRESSED IN BRAIN, SIGNAL = 1.5; EXPRESSED IN HEART, SIGNAL = 1.3; EXPRESSED IN ADULT LIVER, SIGNAL = 1.1; EXPRESSED IN BONE MARROW, SIGNAL = 1.6; SWISSPROT HIT: P19353, EVALUE 9.20e-02
LLQDIFYIENQKEYENKKAARKRRTQVLGKKMKQAIKSLNFQEDDDTSRETFASDTNEALASLDESQEGHAEAKLEAEEAIEVDHSHDLDI

SEQ ID NO: 28916 - protein, 86 aa, Homo sapiens
  MAP TO CHRX.1; EXPRESSED IN PLACENTA, SIGNAL = 6.3; EXPRESSED IN FETAL LIVER, SIGNAL = 7.7; EXPRESSED IN LUNG, SIGNAL = 4.3; EXPRESSED IN HELA, SIGNAL = 7.8; EXPRESSED IN BRAIN, SIGNAL = 8.3; EXPRESSED IN BONE MARROW, SIGNAL = 7.3; EXPRESSED IN ADULT LIVER, SIGNAL = 8.6; SWISSPROT HIT: P43515, EVALUE 4.10e+00
FLPSCAPWLRRPGNSSLGIPAEQLLGLGYTSQWEGLAWGLRARGGVVGGVCLTSKNLLQIRENMKELDFGFPGLPDLVALGSGDIW

SEQ ID NO: 28917 - protein, 75 aa, Homo sapiens
  MAP TO CHR7.1; EXPRESSED IN HEART, SIGNAL = 0.53; EXPRESSED IN BONE MARROW, SIGNAL = 0.67; EXPRESSED IN FETAL LIVER, SIGNAL = 0.83; EXPRESSED IN LUNG, SIGNAL = 1.1; EXPRESSED IN HELA, SIGNAL = 0.77; EXPRESSED IN BRAIN, SIGNAL = 0.63; SWISSPROT HIT: P53004, EVALUE 1.00e-36
CLCSPLSWIEEKGPGLKRNRYLSFHFKSGSLENVPNVGVNKNIFLKDQNIFVQKLLGQFSEKELAAEKKRILHCL

SEQ ID NO: 28918 - protein, 88 aa, Homo sapiens
  MAP TO CHR19.1; EXPRESSED IN ADULT LIVER, SIGNAL = 1.4; EXPRESSED IN BONE MARROW, SIGNAL = 1.8; EXPRESSED IN PLACENTA, SIGNAL = 1.7; EXPRESSED IN FETAL LIVER, SIGNAL = 1.6; EXPRESSED IN HEART, SIGNAL = 1.1; EXPRESSED IN LUNG, SIGNAL = 0.95; EXPRESSED IN BRAIN, SIGNAL = 1.9; EXPRESSED IN HELA, SIGNAL = 2.3; SWISSPROT HIT: P32942, EVALUE 7.00e-25
APRLLEVGSERPVSCTLDGLFPASEARVYLALGDQNLSPDVTLEGDAFVATATATASAEQEGARQLVCNVTLGGENRETRENVTIYSK

SEQ ID NO: 28919 - protein, 91 aa, Homo sapiens
  MAP TO CHR9.1; EXPRESSED IN ADULT LIVER, SIGNAL = 6.7; EXPRESSED IN BONE MARROW, SIGNAL =  13; EXPRESSED IN PLACENTA, SIGNAL = 7.3; EXPRESSED IN FETAL LIVER, SIGNAL =  10; EXPRESSED IN LUNG, SIGNAL =   7; EXPRESSED IN HELA, SIGNAL = 6.5; EXPRESSED IN BRAIN, SIGNAL =  11; SWISSPROT HIT: O14656, EVALUE 4.00e-18
GLECDLAQHLAGQHLAKALVVKALKAFVRDPAPTKPLVLSLHGWTGTGKSYVSSLLAHYLFQGGLRSPRVHHFSPVLHFPHPSHIERYKVG

SEQ ID NO: 28920 - protein, 37 aa, Homo sapiens
  MAP TO CHR12.1; EXPRESSED IN FETAL LIVER, SIGNAL =   1; EXPRESSED IN HELA, SIGNAL = 0.62; EXPRESSED IN LUNG, SIGNAL = 1.1; EXPRESSED IN BRAIN, SIGNAL = 0.83; EXPRESSED IN HEART, SIGNAL = 0.92; EXPRESSED IN ADULT LIVER, SIGNAL = 0.84; EXPRESSED IN BONE MARROW, SIGNAL = 0.87
GPYLSQMLHLPVWKLMKLYIVLPHICLYSSSLFGISP

SEQ ID NO: 28921 - protein, 65 aa, Homo sapiens
  MAP TO AC020907.4; EXPRESSED IN FETAL LIVER, SIGNAL = 6.1; EXPRESSED IN LUNG, SIGNAL = 0.77; EXPRESSED IN BRAIN, SIGNAL = 1.1; EXPRESSED IN HEART, SIGNAL = 0.98; SWISSPROT HIT: P05981, EVALUE 2.00e-31
RRNRVLSRWRVFAGAVAQASPHGLQLGVQAVVYHGGYLPFRDPNSEENSNDIALVHLSSPLPLTG

SEQ ID NO: 28922 - protein, 82 aa, Homo sapiens
  MAP TO CHR5.1; EXPRESSED IN FETAL LIVER, SIGNAL = 0.85; EXPRESSED IN HELA, SIGNAL = 0.8; EXPRESSED IN LUNG, SIGNAL = 0.67; EXPRESSED IN BRAIN, SIGNAL = 0.83; EXPRESSED IN HEART, SIGNAL = 1.5; EXPRESSED IN BONE MARROW, SIGNAL = 0.69; EXPRESSED IN ADULT LIVER, SIGNAL = 1.1; SWISSPROT HIT: P96313, EVALUE 3.30e+00
APRRCAFQAEEPGLAGLQHVVGQPRIVSHICVYSHHLGDQVARLRGVQHHIQEREAIALQSWGTAPAVRCHSGRPPTRAGSR

SEQ ID NO: 28923 - protein, 109 aa, Homo sapiens
  MAP TO CHR2.1; EXPRESSED IN ADULT LIVER, SIGNAL = 1.2; EXPRESSED IN FETAL LIVER, SIGNAL = 1.5; EXPRESSED IN BRAIN, SIGNAL = 1.5; EXPRESSED IN LUNG, SIGNAL = 0.7; EXPRESSED IN HEART, SIGNAL = 2.5; SWISSPROT HIT: P52179, EVALUE 4.00e-15
FTDPPDPPIKLKIGLITKNTVHLSWKPPKNDGGSPVTHYIVECLAWDPTGTKKEAWRQCNKRDVEELQFTVEDLVEGGEYEFRVKAVNAAGVSKPSATVGPVTVKDQTC

SEQ ID NO: 28924 - protein, 61 aa, Homo sapiens
  MAP TO CHR11.1; EXPRESSED IN FETAL LIVER, SIGNAL = 2.2; EXPRESSED IN LUNG, SIGNAL = 2.9; EXPRESSED IN BRAIN, SIGNAL = 2.4; EXPRESSED IN HEART, SIGNAL = 2.9; EXPRESSED IN ADULT LIVER, SIGNAL = 3.2; SWISSPROT HIT: P10515, EVALUE 3.00e-25
FFLNRNHVVDVSVAVSTPAGLITPIVFNAHIKGVETIANDVVSLATKAREGKLQPHEFQVG

SEQ ID NO: 28925 - protein, 38 aa, Homo sapiens
  MAP TO CHR7.1; EXPRESSED IN FETAL LIVER, SIGNAL =   3; EXPRESSED IN LUNG, SIGNAL =   4; EXPRESSED IN HELA, SIGNAL = 3.9; EXPRESSED IN BRAIN, SIGNAL = 3.3; EXPRESSED IN HEART, SIGNAL = 3.5; EXPRESSED IN BONE MARROW, SIGNAL = 3.7
RLLTPVLALTPATRRGQNQNAINRGRARRRRAGMVLAF

SEQ ID NO: 28926 - protein, 84 aa, Homo sapiens
  MAP TO CHR19.1; EXPRESSED IN FETAL LIVER, SIGNAL =   2; EXPRESSED IN LUNG, SIGNAL = 2.4; EXPRESSED IN HELA, SIGNAL = 2.4; EXPRESSED IN BRAIN, SIGNAL =   2; EXPRESSED IN HEART, SIGNAL =   2; EXPRESSED IN BONE MARROW, SIGNAL = 1.6
ALPAVYARKMAASQQQASAASSAAGVSGPSSAGGPGPQQQPQPPAQLVGPAQSGLLQQQQQDFDPVQRYKMLIPQLKESLQVIG

SEQ ID NO: 28927 - protein, 44 aa, Homo sapiens
  MAP TO CHR3.1; EXPRESSED IN FETAL LIVER, SIGNAL = 1.6; EXPRESSED IN BRAIN, SIGNAL = 2.2; EXPRESSED IN HEART, SIGNAL = 1.7; EXPRESSED IN ADULT LIVER, SIGNAL = 2.7; EXPRESSED IN BONE MARROW, SIGNAL = 2.3; EXPRESSED IN PLACENTA, SIGNAL = 1.7; EXPRESSED IN LUNG, SIGNAL = 2.4; SWISSPROT HIT: Q48303, EVALUE 9.80e-01
PEASDTELLTTMTRHLHKHPSFCSCQLYVGGRGWNNFITRVYQP

SEQ ID NO: 28928 - protein, 70 aa, Homo sapiens
  MAP TO CHR3.1; EXPRESSED IN BONE MARROW, SIGNAL = 0.82; EXPRESSED IN HEART, SIGNAL = 0.9; EXPRESSED IN ADULT LIVER, SIGNAL = 0.77; EXPRESSED IN BRAIN, SIGNAL = 0.77; SWISSPROT HIT: Q9UJU3, EVALUE 4.50e+00
HILGFGLGDFLGHFLTAFHNVPIFPKQETYPGNQPSKENSHQSEDKRNVPVIGFVRVYSCVQDDQTFSLL

SEQ ID NO: 28929 - protein, 69 aa, Homo sapiens
  MAP TO CHR12.1; EXPRESSED IN BRAIN, SIGNAL = 1.4; EXPRESSED IN BONE MARROW, SIGNAL = 1.5; EXPRESSED IN HEART, SIGNAL = 1.5; EXPRESSED IN ADULT LIVER, SIGNAL = 1.9; EXPRESSED IN LUNG, SIGNAL =   3; SWISSPROT HIT: P08988, EVALUE 3.90e-01
PTFPVAAEAIGFDNLLLDLRGHGQHELQHLTHVVAGVIPSLVHAHCILRGGERLDHLREDHCAPEASQG

SEQ ID NO: 28930 - protein, 67 aa, Homo sapiens
  MAP TO CHR19.1; EXPRESSED IN HEART, SIGNAL = 4.7; EXPRESSED IN PLACENTA, SIGNAL = 6.5; EXPRESSED IN LUNG, SIGNAL = 5.7; EXPRESSED IN FETAL LIVER, SIGNAL = 5.2; EXPRESSED IN BRAIN, SIGNAL = 6.2; EXPRESSED IN HELA, SIGNAL = 6.7; EXPRESSED IN BONE MARROW, SIGNAL = 7.7; EXPRESSED IN ADULT LIVER, SIGNAL = 0.6; SWISSPROT HIT: P40249, EVALUE 4.00e-01
SAGGAGAGCGGMGRRDAWVPTGPVAESPGGHLAPISPGRQGAPWGGPCGQLGAGTLGQAVCGMTQDP

SEQ ID NO: 28931 - protein, 22 aa, Homo sapiens
  MAP TO CHR8.1; EXPRESSED IN BONE MARROW, SIGNAL = 0.91; EXPRESSED IN ADULT LIVER, SIGNAL = 0.95; EXPRESSED IN FETAL LIVER, SIGNAL = 0.8; EXPRESSED IN BRAIN, SIGNAL = 0.84; EXPRESSED IN HEART, SIGNAL = 0.87
TLALGKFPLVFLHSHKKFLFKK

SEQ ID NO: 28932 - protein, 79 aa, Homo sapiens
  MAP TO CHR9.1; EXPRESSED IN BONE MARROW, SIGNAL = 1.8; EXPRESSED IN HEART, SIGNAL = 0.95; EXPRESSED IN PLACENTA, SIGNAL = 1.4; EXPRESSED IN LUNG, SIGNAL = 0.83; EXPRESSED IN HELA, SIGNAL = 1.8; EXPRESSED IN BRAIN, SIGNAL = 1.6; SWISSPROT HIT: Q15406, EVALUE 3.00e-43
DDRAEQRTCLICGDRATGLHYGIISCEGCKGFFKRSICNKRVYRCSRDKNCVMSRKQRNRCQYCRLLKCLQMGMNRKGE

SEQ ID NO: 28933 - protein, 84 aa, Homo sapiens
  MAP TO CHR19.1; EXPRESSED IN LUNG, SIGNAL = 1.2; EXPRESSED IN HELA, SIGNAL = 1.2; EXPRESSED IN BRAIN, SIGNAL = 0.96; EXPRESSED IN HEART, SIGNAL =   1; EXPRESSED IN FETAL LIVER, SIGNAL = 0.96
SPSSHALSLLPHSGFILSVSSRFLARRASSWASRRVELRASALTCLAKAWRSSSWGEERRRSWACWTGLGVEGELDCGGQRVGS

SEQ ID NO: 28934 - protein, 39 aa, Homo sapiens
  MAP TO CHR6.1; EXPRESSED IN ADULT LIVER, SIGNAL = 0.64; EXPRESSED IN FETAL LIVER, SIGNAL = 1.1; EXPRESSED IN BRAIN, SIGNAL = 0.93; EXPRESSED IN HEART, SIGNAL = 0.74; EXPRESSED IN BONE MARROW, SIGNAL = 1.1; SWISSPROT HIT: P40734, EVALUE 2.20e+00
GIYSLCGQNSQRPKWERACPAHFVPRIIGFSSLLETIQG

SEQ ID NO: 28935 - protein, 63 aa, Homo sapiens
  MAP TO CHR22.1; EXPRESSED IN LUNG, SIGNAL = 1.8; EXPRESSED IN HELA, SIGNAL = 1.4; EXPRESSED IN BRAIN, SIGNAL = 1.6; EXPRESSED IN HEART, SIGNAL = 2.3; EXPRESSED IN ADULT LIVER, SIGNAL =   2; EXPRESSED IN BONE MARROW, SIGNAL = 1.7; EXPRESSED IN FETAL LIVER, SIGNAL = 1.7; SWISSPROT HIT: O25943, EVALUE 3.50e+00
GSYPEVSQLQRDLHKGIRAGPALLDEAFAKGQELEAVQLHVVCQRLGHLVGTLDDRLALPRHG

SEQ ID NO: 28936 - protein, 57 aa, Homo sapiens
  MAP TO CHR5.1; EXPRESSED IN BONE MARROW, SIGNAL = 0.66; EXPRESSED IN ADULT LIVER, SIGNAL = 0.58; EXPRESSED IN FETAL LIVER, SIGNAL = 0.49; EXPRESSED IN LUNG, SIGNAL = 0.99; EXPRESSED IN HELA, SIGNAL = 0.43; EXPRESSED IN BRAIN, SIGNAL = 0.67; EXPRESSED IN HEART, SIGNAL = 0.96
KFVFYCFRLRMYNALATFILVAMVSNTSEIVQERSGIFLTMQRCFSLTCLCPRNVPV

SEQ ID NO: 28937 - protein, 73 aa, Homo sapiens
  MAP TO CHR2.1; EXPRESSED IN LUNG, SIGNAL = 2.6; EXPRESSED IN HELA, SIGNAL = 1.6; EXPRESSED IN BRAIN, SIGNAL = 1.5; EXPRESSED IN BONE MARROW, SIGNAL = 1.7; EXPRESSED IN HEART, SIGNAL = 2.6; EXPRESSED IN ADULT LIVER, SIGNAL =   1; SWISSPROT HIT: Q9P5N3, EVALUE 8.80e+00
RSLSPRCLWDAQLMSGKGSLLLPWEVPLHCRTRSHPALLALLSVQPETWDSPKPMWNTFKLMQLLMCVLIGEK

SEQ ID NO: 28938 - protein, 27 aa, Homo sapiens
  MAP TO CHR7.1; EXPRESSED IN LUNG, SIGNAL = 1.5; EXPRESSED IN BRAIN, SIGNAL = 0.92; EXPRESSED IN HEART, SIGNAL = 1.1; EXPRESSED IN ADULT LIVER, SIGNAL = 0.63
KHQCSFVVFFSFLLFKIPLKNVLLSQY

SEQ ID NO: 28939 - protein, 59 aa, Homo sapiens
  MAP TO CHR17.1; EXPRESSED IN HELA, SIGNAL = 2.8; EXPRESSED IN BRAIN, SIGNAL = 3.4; EXPRESSED IN HEART, SIGNAL = 2.9; EXPRESSED IN ADULT LIVER, SIGNAL = 4.9; EXPRESSED IN LUNG, SIGNAL = 4.1; EXPRESSED IN FETAL LIVER, SIGNAL = 3.4; SWISSPROT HIT: Q92791, EVALUE 2.00e-27
QAVFLRAVKLYNSGDFRSSTEDMERALSEYLAVFARCLAGCEGAHEQVDFKDFYPAIAG

SEQ ID NO: 28940 - protein, 73 aa, Homo sapiens
  MAP TO CHR17.1; EXPRESSED IN BRAIN, SIGNAL = 0.64; EXPRESSED IN HEART, SIGNAL = 0.73; EXPRESSED IN ADULT LIVER, SIGNAL =   1; EXPRESSED IN BONE MARROW, SIGNAL = 0.77
AAGKMNISVDLETNYAELVLDVGRVTLGENSRKKMKDCKLRKKQNERVSRAMCALLNSGGGVIKAEIENEDYS

SEQ ID NO: 28941 - protein, 132 aa, Homo sapiens
  MAP TO CHR17.1; EXPRESSED IN HELA, SIGNAL = 3.1; EXPRESSED IN BRAIN, SIGNAL = 4.1; EXPRESSED IN BONE MARROW, SIGNAL = 4.4; EXPRESSED IN HEART, SIGNAL = 3.2; EXPRESSED IN ADULT LIVER, SIGNAL = 2.1; EXPRESSED IN FETAL LIVER, SIGNAL = 3.7; EXPRESSED IN LUNG, SIGNAL = 3.2; SWISSPROT HIT: P11086, EVALUE 4.00e-60
RARVKRVLPIDVHQPQPLGAGSPAPLPADALVSAFCLEAVSPDLASFQRALDHITTLLRPGGHLLLIGALEESWYLAGEARLTVVPVSEEEVREALVRSGYKVRDLRTYIMPAHLQTGVDDVKGVFFAWAQK

SEQ ID NO: 28942 - protein, 44 aa, Homo sapiens
  MAP TO CHR22.1; EXPRESSED IN ADULT LIVER, SIGNAL = 0.47; EXPRESSED IN BONE MARROW, SIGNAL = 0.66; EXPRESSED IN FETAL LIVER, SIGNAL = 0.7; EXPRESSED IN HELA, SIGNAL = 1.5; EXPRESSED IN BRAIN, SIGNAL = 0.49
GKNKRVGKQLASQKILQLLHPHVKNWGSLLRMYGRESSKMVKQV

SEQ ID NO: 28943 - protein, 55 aa, Homo sapiens
  MAP TO CHR11.1; EXPRESSED IN BONE MARROW, SIGNAL =  13; EXPRESSED IN ADULT LIVER, SIGNAL = 8.4; EXPRESSED IN FETAL LIVER, SIGNAL =  11; EXPRESSED IN BRAIN, SIGNAL =  10; EXPRESSED IN PLACENTA, SIGNAL = 9.1; EXPRESSED IN LUNG, SIGNAL =  16; EXPRESSED IN HELA, SIGNAL = 6.1; EXPRESSED IN HEART, SIGNAL =  13; SWISSPROT HIT: Q9ULJ8, EVALUE 2.10e+00
QLKSERELDKIKGLKLEELWLDGNSLCDTFRDQSTYIRSVVACVSPPGDLHPLGG

SEQ ID NO: 28944 - protein, 68 aa, Homo sapiens
  MAP TO CHR12.1; EXPRESSED IN LUNG, SIGNAL = 3.3; EXPRESSED IN BRAIN, SIGNAL = 1.5; EXPRESSED IN HEART, SIGNAL =   2; EXPRESSED IN ADULT LIVER, SIGNAL =   2; EXPRESSED IN BONE MARROW, SIGNAL = 1.2; EXPRESSED IN PLACENTA, SIGNAL = 4.2; EXPRESSED IN FETAL LIVER, SIGNAL = 1.3; SWISSPROT HIT: P54258, EVALUE 7.00e-14
LTAAPYRDLPASLSAPMSAAHQLQAMHAQSAELQRLALEQQQWLHAHHPLHSVPLPAQEDYYRYPRVP

SEQ ID NO: 28945 - protein, 62 aa, Homo sapiens
  MAP TO CHR3.1; EXPRESSED IN PLACENTA, SIGNAL = 2.7; EXPRESSED IN FETAL LIVER, SIGNAL = 2.5; EXPRESSED IN LUNG, SIGNAL = 1.6; EXPRESSED IN HELA, SIGNAL = 3.8; EXPRESSED IN BRAIN, SIGNAL = 2.5; EXPRESSED IN BONE MARROW, SIGNAL = 3.2; SWISSPROT HIT: P32768, EVALUE 3.50e+00
SQGAAADDQGRLPHVLTVADAAPSAWHTAVSTRTWASHLATTWCPLHTTPTCGGPASRAQQH

SEQ ID NO: 28946 - protein, 44 aa, Homo sapiens
  MAP TO CHR16.1; EXPRESSED IN ADULT LIVER, SIGNAL = 0.49; EXPRESSED IN FETAL LIVER, SIGNAL = 0.6; EXPRESSED IN BRAIN, SIGNAL = 0.76; EXPRESSED IN HEART, SIGNAL =   1; EXPRESSED IN BONE MARROW, SIGNAL = 0.68
TDVWTSRFCTCCSNLSITEETFCRSMVLRALSRALVTWAIFLVT

SEQ ID NO: 28947 - protein, 49 aa, Homo sapiens
  MAP TO CHR10.1; EXPRESSED IN LUNG, SIGNAL = 0.99; EXPRESSED IN HELA, SIGNAL =   2; EXPRESSED IN BRAIN, SIGNAL = 2.1; EXPRESSED IN BONE MARROW, SIGNAL =   2; EXPRESSED IN ADULT LIVER, SIGNAL = 2.4; EXPRESSED IN PLACENTA, SIGNAL = 1.7; EXPRESSED IN FETAL LIVER, SIGNAL = 1.4
EAAAQRVGGARRPRRVQKEVEGYTGHSRNYFPKEVTCVPSWGTFQIPTP

SEQ ID NO: 28948 - protein, 61 aa, Homo sapiens
  MAP TO CHR19.1; EXPRESSED IN FETAL LIVER, SIGNAL = 5.2; EXPRESSED IN BRAIN, SIGNAL = 5.2; EXPRESSED IN LUNG, SIGNAL = 3.7; EXPRESSED IN HEART, SIGNAL = 3.5; EXPRESSED IN BONE MARROW, SIGNAL = 6.8; EXPRESSED IN ADULT LIVER, SIGNAL = 4.9; SWISSPROT HIT: Q02818, EVALUE 2.00e-12
ALQTVEMHPAYTEEELRRFEEELAAREAELNAKAQRLSQETEALGRSQGRLEAQKRELQQV

SEQ ID NO: 28949 - protein, 48 aa, Homo sapiens
  MAP TO CHR2.1; EXPRESSED IN HEART, SIGNAL = 0.47; EXPRESSED IN BONE MARROW, SIGNAL = 1.2; EXPRESSED IN ADULT LIVER, SIGNAL = 0.61; EXPRESSED IN BRAIN, SIGNAL = 0.97; EXPRESSED IN LUNG, SIGNAL = 0.73; SWISSPROT HIT: P18714, EVALUE 6.30e+00
GVFRFLDHIKNEDSPGPPVGSHHAFFSDDQEPYPVTDISDLIRDSYEV

SEQ ID NO: 28950 - protein, 71 aa, Homo sapiens
  MAP TO CHR19.1; EXPRESSED IN PLACENTA, SIGNAL = 1.7; EXPRESSED IN FETAL LIVER, SIGNAL = 0.78; EXPRESSED IN LUNG, SIGNAL = 1.6; EXPRESSED IN BRAIN, SIGNAL = 0.77; EXPRESSED IN HEART, SIGNAL = 0.95; EXPRESSED IN BONE MARROW, SIGNAL = 0.85; EXPRESSED IN ADULT LIVER, SIGNAL = 1.1; SWISSPROT HIT: O52605, EVALUE 5.90e+00
WFSRRRGHGRPMAIIGWQLLLLKIPEEAAEPTEFTVQGIVRHWTSEAQARAPQGEDEGRVRGEAFEDVPCE

SEQ ID NO: 28951 - protein, 64 aa, Homo sapiens
  MAP TO CHR20.1; EXPRESSED IN BRAIN, SIGNAL = 2.2; EXPRESSED IN BONE MARROW, SIGNAL = 2.2; EXPRESSED IN HEART, SIGNAL = 1.2; EXPRESSED IN ADULT LIVER, SIGNAL = 1.6; EXPRESSED IN PLACENTA, SIGNAL = 1.7; EXPRESSED IN FETAL LIVER, SIGNAL = 1.9; EXPRESSED IN LUNG, SIGNAL = 1.2; SWISSPROT HIT: Q9WUW3, EVALUE 2.70e+00
AVTHHLVFHAGENDVQHLSKGSLGSGLIDEIFAGQIDIVTCSHCLQDSTLMNFNVWGSHCSQKS

SEQ ID NO: 28952 - protein, 76 aa, Homo sapiens
  MAP TO CHR7.1; EXPRESSED IN ADULT LIVER, SIGNAL = 2.9; EXPRESSED IN PLACENTA, SIGNAL = 3.4; EXPRESSED IN FETAL LIVER, SIGNAL = 3.6; EXPRESSED IN HELA, SIGNAL = 4.2; EXPRESSED IN LUNG, SIGNAL = 1.9; EXPRESSED IN BRAIN, SIGNAL = 3.5; EXPRESSED IN HEART, SIGNAL = 2.1; SWISSPROT HIT: P23523, EVALUE 2.50e-01
MESISMMGSPKSLSETFLPNGINGIKDARKVTVGVIGSGDFAKSLTIRLIRCGYHVVIGSRNPKFASEFFPHVVDV

SEQ ID NO: 28953 - protein, 104 aa, Homo sapiens
  MAP TO CHR7.1; EXPRESSED IN BRAIN, SIGNAL = 0.48; EXPRESSED IN HEART, SIGNAL = 0.85; EXPRESSED IN BONE MARROW, SIGNAL = 0.57; EXPRESSED IN LUNG, SIGNAL = 0.6; SWISSPROT HIT: Q02357, EVALUE 1.00e-08
FSGYWLPSYKLKSSWATGLHLSVLFGHVECLLVLLDHNATINCRPNGKTPLHVACEMANVDCVKILCDRGAKLNCYSLSGHTALHFCTTPSSILCAKQLVWRGK

SEQ ID NO: 28954 - protein, 59 aa, Homo sapiens
  MAP TO CHR7.1; EXPRESSED IN FETAL LIVER, SIGNAL = 1.9; EXPRESSED IN LUNG, SIGNAL = 3.6; EXPRESSED IN HELA, SIGNAL = 1.3; EXPRESSED IN BRAIN, SIGNAL = 2.2; EXPRESSED IN HEART, SIGNAL =   3; SWISSPROT HIT: P48845, EVALUE 1.60e+00
PLWPSNLLVLWIWHRAPGDPSPRGDHLGIPDNTEQLTPCPSCPGFWQSASMSQSAGSIQ

SEQ ID NO: 28955 - protein, 58 aa, Homo sapiens
  MAP TO AL359813.20; EXPRESSED IN PLACENTA, SIGNAL = 4.1; EXPRESSED IN FETAL LIVER, SIGNAL = 4.5; EXPRESSED IN LUNG, SIGNAL = 2.5; EXPRESSED IN HELA, SIGNAL = 4.7; EXPRESSED IN BRAIN, SIGNAL = 4.7; EXPRESSED IN HEART, SIGNAL = 2.3; EXPRESSED IN BONE MARROW, SIGNAL = 4.5; SWISSPROT HIT: P53798, EVALUE 4.70e+00
QRPRYLEIRAVMEQIPEIQKDSLDQFDCKLLNPSLQKVADKRRKDQFKRLIAGCIGVG

SEQ ID NO: 28956 - protein, 85 aa, Homo sapiens
  MAP TO CHR19.1; EXPRESSED IN BRAIN, SIGNAL = 1.9; EXPRESSED IN HEART, SIGNAL = 0.71; EXPRESSED IN ADULT LIVER, SIGNAL = 1.1; EXPRESSED IN BONE MARROW, SIGNAL = 1.2; EXPRESSED IN FETAL LIVER, SIGNAL = 0.52; SWISSPROT HIT: Q9PK91, EVALUE 7.10e+00
QNRKGQVPAEVVPDPMDMSLDKAEAALVAKELRTLLEEAVPLSCALPKVTLPNYDNVPGNLMLSALGLRLGDRVLLDGQKVRGWD

SEQ ID NO: 28957 - protein, 76 aa, Homo sapiens
  MAP TO CHR1.1; EXPRESSED IN LUNG, SIGNAL = 0.82; EXPRESSED IN FETAL LIVER, SIGNAL = 0.75; EXPRESSED IN BRAIN, SIGNAL = 0.95; SWISSPROT HIT: P56277, EVALUE 6.30e+00
LLPLCSSVDSELTSLCQSVLEDFNLCLFYLPSSPNLSLASEDEEEYESGYAFLPDLLIFQMVIICLMCVHSLERAG

SEQ ID NO: 28958 - protein, 115 aa, Homo sapiens
  MAP TO CHR11.1; EXPRESSED IN ADULT LIVER, SIGNAL = 0.66; EXPRESSED IN BONE MARROW, SIGNAL = 0.67; EXPRESSED IN FETAL LIVER, SIGNAL = 0.56; EXPRESSED IN BRAIN, SIGNAL = 0.6; EXPRESSED IN LUNG, SIGNAL = 0.64; EXPRESSED IN HEART, SIGNAL = 0.92; SWISSPROT HIT: P48733, EVALUE 1.50e-01
QAYLCHNGVLGAVVDPAIQAWLHGPLGVIGQAGIGRMYKTEAPLRLPIWAHGEHPRPCGGIVGRATVVDRGGGCEDLQQVVVGHVEDREAQYGYMQELEMAHASHTVQDLREGHG

SEQ ID NO: 28959 - protein, 47 aa, Homo sapiens
  MAP TO CHR9.1; EXPRESSED IN FETAL LIVER, SIGNAL = 1.3; EXPRESSED IN HELA, SIGNAL = 2.5; EXPRESSED IN LUNG, SIGNAL = 1.9; EXPRESSED IN BRAIN, SIGNAL = 1.6; EXPRESSED IN BONE MARROW, SIGNAL = 1.7; EXPRESSED IN HEART, SIGNAL = 1.9
LTRTPFPSLLLPEKVVGRGYLKPDGIYTPLEQRRPVWPFHPGAASLK

SEQ ID NO: 28960 - protein, 64 aa, Homo sapiens
  MAP TO CHR12.1; EXPRESSED IN BRAIN, SIGNAL = 0.94; EXPRESSED IN HEART, SIGNAL = 0.78; EXPRESSED IN ADULT LIVER, SIGNAL = 1.3; EXPRESSED IN PLACENTA, SIGNAL = 1.2; EXPRESSED IN FETAL LIVER, SIGNAL = 0.89
LPTCLTELPQGLRQTRRLRGWLLRRPRGPPLAPRPFPAIPGGLKAPQGHERRVTAAKTGGRPSW

SEQ ID NO: 28961 - protein, 42 aa, Homo sapiens
  MAP TO CHR11.1; EXPRESSED IN PLACENTA, SIGNAL = 1.9; EXPRESSED IN LUNG, SIGNAL = 1.2; EXPRESSED IN HELA, SIGNAL = 2.1; EXPRESSED IN BRAIN, SIGNAL = 1.9; EXPRESSED IN FETAL LIVER, SIGNAL = 1.3; EXPRESSED IN HEART, SIGNAL = 1.3; EXPRESSED IN BONE MARROW, SIGNAL = 1.8; EXPRESSED IN ADULT LIVER, SIGNAL = 2.2
TCFSSPKIATGLCTASLLPDTMSLWTSKTRAEQKFTNCKDIL

SEQ ID NO: 28962 - protein, 60 aa, Homo sapiens
  MAP TO CHR5.1; EXPRESSED IN ADULT LIVER, SIGNAL = 0.9; EXPRESSED IN BONE MARROW, SIGNAL = 0.66; EXPRESSED IN LUNG, SIGNAL = 0.61; EXPRESSED IN FETAL LIVER, SIGNAL = 0.5; EXPRESSED IN BRAIN, SIGNAL = 0.63; EXPRESSED IN HEART, SIGNAL = 0.85; SWISSPROT HIT: P24384, EVALUE 1.60e+00
SYDHEGRLTNVTRPTGVVTSLHREMEKSITIDIENSNRDDDVTVITNLSSVEASYTVVQG

SEQ ID NO: 28963 - protein, 122 aa, Homo sapiens
  MAP TO CHR17.1; EXPRESSED IN BRAIN, SIGNAL = 0.63; EXPRESSED IN HEART, SIGNAL = 0.8; EXPRESSED IN LUNG, SIGNAL = 1.4; SWISSPROT HIT: Q29031, EVALUE 6.30e+00
TDVNVRVSSLTLLGAIVSTHAPLPEVQLLLQQPCSSGLGNSNSATPHLSPPDWWKKAPAGPSLEETSVSSPKGSSEPCWLIRLCISIVVLPKEDSCSGSDAGSAAGSTYEPSPMRLEALQVG

SEQ ID NO: 28964 - protein, 55 aa, Homo sapiens
  MAP TO CHR19.1; EXPRESSED IN PLACENTA, SIGNAL = 2.5; EXPRESSED IN FETAL LIVER, SIGNAL = 2.1; EXPRESSED IN LUNG, SIGNAL = 2.1; EXPRESSED IN HELA, SIGNAL =   2; EXPRESSED IN BRAIN, SIGNAL = 2.5; EXPRESSED IN HEART, SIGNAL =   2; EXPRESSED IN ADULT LIVER, SIGNAL = 2.7; EXPRESSED IN BONE MARROW, SIGNAL = 2.5; SWISSPROT HIT: Q60596, EVALUE 4.70e+00
RSFWSPHLSCPLPRAAVAQTPTAFACLGLTSWSGQPPRSAGTGSKLFAASPTARY

SEQ ID NO: 28965 - protein, 65 aa, Homo sapiens
  MAP TO CHR19.1; EXPRESSED IN LUNG, SIGNAL =   1; EXPRESSED IN BRAIN, SIGNAL = 0.92; EXPRESSED IN HEART, SIGNAL = 0.89; EXPRESSED IN ADULT LIVER, SIGNAL = 1.4; EXPRESSED IN FETAL LIVER, SIGNAL = 1.1; SWISSPROT HIT: P14081, EVALUE 7.80e+00
TLVLAAALVLDDVLVVERAQNVNLLLPARAVLGAAVCLEGFHRHHLASAVVGRIVAVQADLAEVT

SEQ ID NO: 28966 - protein, 40 aa, Homo sapiens
  MAP TO CHR3.1; EXPRESSED IN PLACENTA, SIGNAL = 2.5; EXPRESSED IN FETAL LIVER, SIGNAL = 2.3; EXPRESSED IN LUNG, SIGNAL = 1.8; EXPRESSED IN HELA, SIGNAL = 2.1; EXPRESSED IN BRAIN, SIGNAL = 2.1; EXPRESSED IN HEART, SIGNAL = 2.4; EXPRESSED IN BONE MARROW, SIGNAL = 2.1
IKGHVQKMEIFGQAFRDLIKINIMPYQSRKLNAVHVEQSI

SEQ ID NO: 28967 - protein, 115 aa, Homo sapiens
  MAP TO CHR12.1; EXPRESSED IN HEART, SIGNAL = 0.89; EXPRESSED IN BONE MARROW, SIGNAL = 0.76; EXPRESSED IN ADULT LIVER, SIGNAL = 0.83; EXPRESSED IN FETAL LIVER, SIGNAL = 0.64; EXPRESSED IN LUNG, SIGNAL = 0.82; EXPRESSED IN BRAIN, SIGNAL = 0.79
VDHTKMSLRDASGGHKRSRDRRRSSDRSRDSSHERTESQLTPCIRNVTSPTRQHHVEQEKDCSSSRPSSLRPQKASPIGSISSAGNSSRNSSQSSSGGSCKTSGEMVFVYENAKE

SEQ ID NO: 28968 - protein, 99 aa, Homo sapiens
  MAP TO AC009789.18; EXPRESSED IN FETAL LIVER, SIGNAL =   2; EXPRESSED IN LUNG, SIGNAL = 1.1; EXPRESSED IN HELA, SIGNAL = 2.5; EXPRESSED IN BRAIN, SIGNAL = 2.2; EXPRESSED IN HEART, SIGNAL = 1.2; EXPRESSED IN BONE MARROW, SIGNAL = 2.2
PAAWVGPTRPGLGVYGNKNDPQCKMSCVFLCESMGLARGPKACKYGDSLGQTHLSLTHLASKTICSERVDAVLRVKSVFAGPVSVIRFWYLFVAFLEVK

SEQ ID NO: 28969 - protein, 66 aa, Homo sapiens
  MAP TO CHR7.1; EXPRESSED IN HEART, SIGNAL = 0.66; EXPRESSED IN BONE MARROW, SIGNAL = 0.57; EXPRESSED IN BRAIN, SIGNAL = 0.54; EXPRESSED IN LUNG, SIGNAL = 0.63; SWISSPROT HIT: P56744, EVALUE 2.10e+00
LSVFSITDNQPPVIQALQDKLQTFYGENFEYQFVAFDPEGSDIHFTLDSGPEGASVSSAGLFMWKT

SEQ ID NO: 28970 - protein, 68 aa, Homo sapiens
  MAP TO CHR13.1; EXPRESSED IN BRAIN, SIGNAL = 0.85; EXPRESSED IN ADULT LIVER, SIGNAL = 2.2; SWISSPROT HIT: P52012, EVALUE 2.00e+00
PHCTACSLALLPESWGFITSGSSGGLENGSMHRVSKLSSARKASPTVAGACGRAVWLVKPHSPSVLPS

SEQ ID NO: 28971 - protein, 73 aa, Homo sapiens
  MAP TO CHR22.1; EXPRESSED IN BONE MARROW, SIGNAL = 0.49; EXPRESSED IN FETAL LIVER, SIGNAL = 0.45; EXPRESSED IN BRAIN, SIGNAL = 0.43; SWISSPROT HIT: Q9Y6J0, EVALUE 9.00e-39
EKQDVHEFLLENLTNGGILELMMRYLKAMGHKFLVRWPPGLAEVVLSVYHSWRRHSTSLPNPLLRDCSNKHIK

SEQ ID NO: 28972 - protein, 58 aa, Homo sapiens
  MAP TO CHR22.1; EXPRESSED IN FETAL LIVER, SIGNAL = 0.67; EXPRESSED IN HELA, SIGNAL = 1.1; EXPRESSED IN BRAIN, SIGNAL = 0.95; EXPRESSED IN HEART, SIGNAL = 0.61; EXPRESSED IN BONE MARROW, SIGNAL = 0.86; EXPRESSED IN ADULT LIVER, SIGNAL = 0.92
RPVSSCCLSCSHSDRHCSSSSACRRRAPCSCFSACSSLPACFLRPSFCPSASSSWALR

SEQ ID NO: 28973 - protein, 49 aa, Homo sapiens
  MAP TO CHR2.1; EXPRESSED IN PLACENTA, SIGNAL = 1.1; EXPRESSED IN FETAL LIVER, SIGNAL = 1.1; EXPRESSED IN LUNG, SIGNAL = 1.3; EXPRESSED IN HELA, SIGNAL = 1.6; EXPRESSED IN BRAIN, SIGNAL = 1.1; EXPRESSED IN BONE MARROW, SIGNAL = 0.89; EXPRESSED IN HEART, SIGNAL = 1.4
TLINFVMTSALCWGVGLLRTINWTHLEIPLNKAIDLSKVGLFSRQPWMT

SEQ ID NO: 28974 - protein, 72 aa, Homo sapiens
  MAP TO CHR17.1; EXPRESSED IN FETAL LIVER, SIGNAL = 0.64; EXPRESSED IN HELA, SIGNAL = 0.85; EXPRESSED IN BRAIN, SIGNAL = 0.78; EXPRESSED IN HEART, SIGNAL = 0.81; EXPRESSED IN BONE MARROW, SIGNAL = 0.85; EXPRESSED IN ADULT LIVER, SIGNAL = 0.93; EXPRESSED IN LUNG, SIGNAL = 0.81; SWISSPROT HIT: Q13472, EVALUE 4.00e-37
RYISYPRTETNIFPRDLNLTVLVEQQTPDPRWGAFAQSILERGGPTPRNGNKSDQAHPPIHPTKYTNNLQVG

SEQ ID NO: 28975 - protein, 160 aa, Homo sapiens
  MAP TO CHR6.1; EXPRESSED IN ADULT LIVER, SIGNAL = 1.1; EXPRESSED IN BONE MARROW, SIGNAL = 1.1; EXPRESSED IN PLACENTA, SIGNAL = 1.4; EXPRESSED IN LUNG, SIGNAL =   1; EXPRESSED IN BRAIN, SIGNAL = 0.98; EXPRESSED IN HEART, SIGNAL = 1.1
LLGPSRRHQQRDGTVAPAGHCRSISLHERPAAVPHPQCRLPAPILPPTLPAYLPPVARSLLPRQRPLQPEPPARPAAAAAPRLARPEAEPGVWAPAHAPGAASPAVGPGSSQGLQAARGPPARPTRAQLRTRRPLDPLLTSRHRGGPGKRPRNQRGREHS

SEQ ID NO: 28976 - protein, 69 aa, Homo sapiens
  MAP TO CHR1.1; EXPRESSED IN BRAIN, SIGNAL = 1.9; EXPRESSED IN HEART, SIGNAL = 2.5; EXPRESSED IN BONE MARROW, SIGNAL = 1.5; EXPRESSED IN ADULT LIVER, SIGNAL = 2.9; EXPRESSED IN FETAL LIVER, SIGNAL = 1.6; EXPRESSED IN LUNG, SIGNAL = 3.1
ALTWCAGPARRRRCRHRGSSRKACPSWHRSRSSRRRRCCSGGGSPGQCRSCSSGPGPRHCRARRGPCTW

SEQ ID NO: 28977 - protein, 95 aa, Homo sapiens
  MAP TO CHRX.1; EXPRESSED IN HELA, SIGNAL = 1.3; EXPRESSED IN BRAIN, SIGNAL = 1.1; EXPRESSED IN HEART, SIGNAL = 0.87; EXPRESSED IN BONE MARROW, SIGNAL =   1; EXPRESSED IN LUNG, SIGNAL = 0.76; SWISSPROT HIT: P04683, EVALUE 2.10e+00
SELCFFSEMEFCETSHTLCSGYQTDMHSVSRHGYQLEMGSDVDTETEGAASPDHALRMWIRGMKSEHSSCLSSRANSALSLTDTDHERKSDGENG

SEQ ID NO: 28978 - protein, 45 aa, Homo sapiens
  MAP TO CHR7.1; EXPRESSED IN PLACENTA, SIGNAL = 1.2; EXPRESSED IN FETAL LIVER, SIGNAL = 0.69; EXPRESSED IN LUNG, SIGNAL = 0.8; EXPRESSED IN HELA, SIGNAL = 0.76; EXPRESSED IN BRAIN, SIGNAL = 1.1; EXPRESSED IN HEART, SIGNAL = 0.93; SWISSPROT HIT: Q9Z1T6, EVALUE 6.40e+00
TFALEQEEVHAMAEGSAEVGAVLNQVTGEALPVEVAHRVGTGRAK

SEQ ID NO: 28979 - protein, 86 aa, Homo sapiens
  MAP TO CHR7.1; EXPRESSED IN BRAIN, SIGNAL = 0.44; EXPRESSED IN HEART, SIGNAL = 0.59; EXPRESSED IN ADULT LIVER, SIGNAL = 0.47; EXPRESSED IN BONE MARROW, SIGNAL = 0.39; EXPRESSED IN FETAL LIVER, SIGNAL = 0.39
ESGIGVLRYGCFQIWMRDEGKLVVITEQMPLMRSLLDFQLAAKLCIGTGPLKSLDHYVTSHPPLVVIAAVIIPLKVSLRVMASHIF

SEQ ID NO: 28980 - protein, 45 aa, Homo sapiens
  MAP TO CHR19.1; EXPRESSED IN BRAIN, SIGNAL =  12; EXPRESSED IN BONE MARROW, SIGNAL =  19; EXPRESSED IN HEART, SIGNAL =  14; EXPRESSED IN ADULT LIVER, SIGNAL =  13; EXPRESSED IN PLACENTA, SIGNAL =  35; EXPRESSED IN FETAL LIVER, SIGNAL =  23; EXPRESSED IN LUNG, SIGNAL =  23; SWISSPROT HIT: P11249, EVALUE 9.00e-21
QVFEKSPLRVKNFGIWLRYDSRSGTHNMYREYRDLTTAGAVTQCC

SEQ ID NO: 28981 - protein, 49 aa, Homo sapiens
  MAP TO CHR17.1; EXPRESSED IN BRAIN, SIGNAL = 0.57; EXPRESSED IN BONE MARROW, SIGNAL = 0.65; EXPRESSED IN LUNG, SIGNAL = 0.78; SWISSPROT HIT: P11120, EVALUE 8.80e-02
KSFFSLVCFKVFDVDRDGVLSRVELRDMVVALLEVWKDNRTDDIPVSYD

SEQ ID NO: 28982 - protein, 84 aa, Homo sapiens
  MAP TO CHR7.1; EXPRESSED IN LUNG, SIGNAL = 0.91; EXPRESSED IN BRAIN, SIGNAL = 0.68; EXPRESSED IN HEART, SIGNAL = 5.2; EXPRESSED IN ADULT LIVER, SIGNAL = 0.93; EXPRESSED IN BONE MARROW, SIGNAL = 0.62; EXPRESSED IN FETAL LIVER, SIGNAL = 0.44; SWISSPROT HIT: P21333, EVALUE 1.00e-35
GACLGPRIQIGQETVITVDAKAAGEGKVTCTVSTPDGAELDVDVVENHDGTFDIYYTAPEPGKYVITIRFGGEHIPNSPFHVLV

SEQ ID NO: 28983 - protein, 64 aa, Homo sapiens
  MAP TO CHR11.1; EXPRESSED IN BRAIN, SIGNAL = 0.86; EXPRESSED IN BONE MARROW, SIGNAL = 0.87; EXPRESSED IN FETAL LIVER, SIGNAL = 0.86; EXPRESSED IN LUNG, SIGNAL = 0.67; SWISSPROT HIT: P47095, EVALUE 1.00e-11
KWLVLSYRYDDMLVVPIIENTPEEKDLKDRMAHAMNEYPDSCAVLVRRHGVYVWGETWEKAKTM

SEQ ID NO: 28984 - protein, 43 aa, Homo sapiens
  MAP TO CHR5.1; EXPRESSED IN HELA, SIGNAL = 6.9; EXPRESSED IN BRAIN, SIGNAL = 4.6; EXPRESSED IN HEART, SIGNAL = 2.4; EXPRESSED IN BONE MARROW, SIGNAL = 3.9; EXPRESSED IN PLACENTA, SIGNAL = 5.2; EXPRESSED IN FETAL LIVER, SIGNAL = 3.4; EXPRESSED IN LUNG, SIGNAL = 2.5; SWISSPROT HIT: P40135, EVALUE 1.30e+00
SHADSGAPMGLWQGRGGDHDGWYDPSGAPLPTETGENPLEGVS

SEQ ID NO: 28985 - protein, 33 aa, Homo sapiens
  MAP TO CHR13.1; EXPRESSED IN FETAL LIVER, SIGNAL =   2; EXPRESSED IN HELA, SIGNAL = 3.2; EXPRESSED IN BRAIN, SIGNAL = 2.5; EXPRESSED IN HEART, SIGNAL = 1.8; EXPRESSED IN ADULT LIVER, SIGNAL = 2.9; EXPRESSED IN BONE MARROW, SIGNAL = 3.8; EXPRESSED IN LUNG, SIGNAL = 2.5
ADLHNTSIIITGQTQNEKNIFNKALVRCSCTHS

SEQ ID NO: 28986 - protein, 107 aa, Homo sapiens
  MAP TO CHR5.1; EXPRESSED IN ADULT LIVER, SIGNAL = 0.76; EXPRESSED IN PLACENTA, SIGNAL = 1.3; EXPRESSED IN FETAL LIVER, SIGNAL = 1.1; EXPRESSED IN HELA, SIGNAL =   1; EXPRESSED IN BRAIN, SIGNAL = 1.2; EXPRESSED IN HEART, SIGNAL = 0.55; EXPRESSED IN BONE MARROW, SIGNAL = 1.2
STHWAPGQEARCCSRSPGGCARPGRGCPGCCAWWLHPAGGRAPAEGFGALGCPALRCSSSPGPRGLGPTRCAHFLPDGPPVSSAPASAARGSGPAEPACTHCSSYTC

SEQ ID NO: 28987 - protein, 70 aa, Homo sapiens
  MAP TO CHR17.1; EXPRESSED IN FETAL LIVER, SIGNAL = 0.46; EXPRESSED IN BRAIN, SIGNAL = 0.46; EXPRESSED IN HEART, SIGNAL = 0.67; EXPRESSED IN BONE MARROW, SIGNAL = 0.44; SWISSPROT HIT: P03598, EVALUE 2.60e+00
PSPVSSTCSSSSGLVSAICRSSAVQMSRSWHRARWPKPARGPMSPLRVVTVQRPSSMRLNSSPCWVTRCT

SEQ ID NO: 28988 - protein, 73 aa, Homo sapiens
  MAP TO CHR6.1; EXPRESSED IN BRAIN, SIGNAL =   4; EXPRESSED IN PLACENTA, SIGNAL =  31; EXPRESSED IN LUNG, SIGNAL =  14; SWISSPROT HIT: O88322, EVALUE 3.40e+00
PFGILGLTSLGFTRALIASARALMALALLACIFFRPFLLCFLAKRMFLRNLGSTPLRDSYLCDRGFLIPFLCH

SEQ ID NO: 28989 - protein, 60 aa, Homo sapiens
  MAP TO CHR12.1; EXPRESSED IN LUNG, SIGNAL = 1.6; EXPRESSED IN HELA, SIGNAL = 1.7; EXPRESSED IN BRAIN, SIGNAL = 1.8; EXPRESSED IN BONE MARROW, SIGNAL = 1.6; EXPRESSED IN HEART, SIGNAL = 1.4; EXPRESSED IN PLACENTA, SIGNAL =   2
HSHLVQAWPAVRGWTAARQLRAGCYGRPRQRGSDPPASACMSPSCPQGCGISSAGPAPES

SEQ ID NO: 28990 - protein, 80 aa, Homo sapiens
  MAP TO CHR6.1; EXPRESSED IN BONE MARROW, SIGNAL = 1.7; EXPRESSED IN ADULT LIVER, SIGNAL = 1.1; EXPRESSED IN PLACENTA, SIGNAL = 2.3; EXPRESSED IN FETAL LIVER, SIGNAL = 1.5; EXPRESSED IN BRAIN, SIGNAL = 2.3; EXPRESSED IN LUNG, SIGNAL = 1.4; EXPRESSED IN HEART, SIGNAL =   1; SWISSPROT HIT: Q08345, EVALUE 8.00e-42
LSYPMLLHVAAQIASGMRYLATLNFVHRDLATRNCLVGENFTIKIADFGMSRNLYAGDYYRVQGRAVLPIRWMAWECILM

SEQ ID NO: 28991 - protein, 117 aa, Homo sapiens
  MAP TO CHR5.1; EXPRESSED IN BONE MARROW, SIGNAL = 0.71; EXPRESSED IN LUNG, SIGNAL = 0.9; EXPRESSED IN HELA, SIGNAL = 0.81; EXPRESSED IN BRAIN, SIGNAL = 0.76; EXPRESSED IN HEART, SIGNAL = 0.86; SWISSPROT HIT: P21817, EVALUE 2.00e-49
PCTPVLGLPNSVEEMCPDIPVLERLMADIGGLAESGARYTEMPHVIEITLPMLCSYLPRWWERGPEAPPSALPAGAPPPCTAVTSDHLNSLLGNILRIIVNNLGIDEASWMKRLAGG

SEQ ID NO: 28992 - protein, 51 aa, Homo sapiens
  MAP TO CHR14.1; EXPRESSED IN PLACENTA, SIGNAL = 3.1; EXPRESSED IN FETAL LIVER, SIGNAL = 2.9; EXPRESSED IN LUNG, SIGNAL = 2.2; EXPRESSED IN HELA, SIGNAL = 2.7; EXPRESSED IN BRAIN, SIGNAL = 3.5; EXPRESSED IN BONE MARROW, SIGNAL = 3.4; EXPRESSED IN ADULT LIVER, SIGNAL = 1.8; EXPRESSED IN HEART, SIGNAL = 2.2; SWISSPROT HIT: P49695, EVALUE 6.70e-02
LSPPDDTCIPRSSAAVTAVAWAPDGSMAVSGNQAGELILWQEAKAVATAQV

SEQ ID NO: 28993 - protein, 137 aa, Homo sapiens
  MAP TO CHR12.1; EXPRESSED IN LUNG, SIGNAL = 2.2; EXPRESSED IN FETAL LIVER, SIGNAL = 2.5; EXPRESSED IN BRAIN, SIGNAL = 3.7; EXPRESSED IN HEART, SIGNAL = 2.4; EXPRESSED IN BONE MARROW, SIGNAL = 3.6; EXPRESSED IN ADULT LIVER, SIGNAL =   4; EXPRESSED IN PLACENTA, SIGNAL = 3.4; EXPRESSED IN HELA, SIGNAL =   3
PRSHGGCGTRQKTAGGSYVLHLSGLLHRPCDDHLWPQLLPSLHPAELGKGEGQEGEAEAEGLLPLPRVQRDVPAEEPAAQPAADQGGRDGAAASWSAEARPVPGAPRAPQAFLPEGPEPHLCGVQGVPGAPAAQGAA

SEQ ID NO: 28994 - protein, 46 aa, Homo sapiens
  MAP TO CHR12.1; EXPRESSED IN BRAIN, SIGNAL =   4; EXPRESSED IN HEART, SIGNAL = 2.2; EXPRESSED IN ADULT LIVER, SIGNAL = 4.2; EXPRESSED IN PLACENTA, SIGNAL = 4.4; EXPRESSED IN FETAL LIVER, SIGNAL = 2.5; EXPRESSED IN LUNG, SIGNAL = 2.8; SWISSPROT HIT: P17751, EVALUE 2.00e-18
ILSSEVVCAPPTAYIDFARQKLDPKIAVAAQNCYKVTNGAFTGEIR

SEQ ID NO: 28995 - protein, 106 aa, Homo sapiens
  MAP TO CHR22.1; EXPRESSED IN BONE MARROW, SIGNAL = 0.86; EXPRESSED IN HEART, SIGNAL = 0.89; EXPRESSED IN ADULT LIVER, SIGNAL = 0.87; EXPRESSED IN HELA, SIGNAL = 0.58; EXPRESSED IN BRAIN, SIGNAL = 1.2; EXPRESSED IN LUNG, SIGNAL =   1; SWISSPROT HIT: P30754, EVALUE 8.30e-01
TSGAGGSCRKSSRRWLWLSRLGPRGGNFLRESRRYLWAFRGLRSGKGRVGTKGPLSTSSGAPALTTPSGLPLPSGHVREKQSFSLPLALWELRRSMLYSRCGGKPG

SEQ ID NO: 28996 - protein, 146 aa, Homo sapiens
  MAP TO CHR6.1; EXPRESSED IN HELA, SIGNAL = 1.4; EXPRESSED IN LUNG, SIGNAL = 1.2; EXPRESSED IN BRAIN, SIGNAL = 1.4; EXPRESSED IN HEART, SIGNAL = 1.6; EXPRESSED IN FETAL LIVER, SIGNAL = 1.3; EXPRESSED IN PLACENTA, SIGNAL = 1.5; SWISSPROT HIT: P38193, EVALUE 5.90e-01
GHRCQLPAQAGVDDGGIVEGLADSHVSVKGHHCQEDALSGPQGQEDEELDRASQEADGLLWAPEVDQHLGDTTCGKAEVQEGEVREEKVHWRVEPGVQYRQQDDECVAHQGQEVGSEDNHKESPFQCWVFREAQKEEAHGGALVNH

SEQ ID NO: 28997 - protein, 101 aa, Homo sapiens
  MAP TO CHR2.1; EXPRESSED IN FETAL LIVER, SIGNAL = 0.84; EXPRESSED IN LUNG, SIGNAL = 0.65; EXPRESSED IN HELA, SIGNAL = 0.61; EXPRESSED IN BRAIN, SIGNAL = 0.85; EXPRESSED IN BONE MARROW, SIGNAL = 0.94; SWISSPROT HIT: Q14324, EVALUE 1.00e-14
EPPRNVRITDISKNSVSLSWQQPAFDGGSKITGYIVERRDLPDGRWTKASFTNVTETQFIISGLTQNSQYEFRVFARNAVGSISNPSEVVGPITCIDSYGK

SEQ ID NO: 28998 - protein, 81 aa, Homo sapiens
  MAP TO CHR19.1; EXPRESSED IN LUNG, SIGNAL = 1.4; EXPRESSED IN HELA, SIGNAL = 2.4; EXPRESSED IN BRAIN, SIGNAL = 2.1; EXPRESSED IN HEART, SIGNAL = 2.9; EXPRESSED IN ADULT LIVER, SIGNAL = 4.8; SWISSPROT HIT: O60664, EVALUE 3.00e-08
GGLDTTRSALTGTKEVVSSGVTGAMDMAKGAVQGGLDTSKAVLTGTKDTVSTGLTGAVNVAKGTVQAGVDTTKTVLTGTKD

SEQ ID NO: 28999 - protein, 47 aa, Homo sapiens
  MAP TO CHR17.1; EXPRESSED IN PLACENTA, SIGNAL = 4.9; EXPRESSED IN FETAL LIVER, SIGNAL = 4.2; EXPRESSED IN BRAIN, SIGNAL = 4.9; EXPRESSED IN LUNG, SIGNAL = 3.8; EXPRESSED IN HELA, SIGNAL = 4.6; EXPRESSED IN BONE MARROW, SIGNAL = 5.3; EXPRESSED IN HEART, SIGNAL = 3.1; SWISSPROT HIT: P43035, EVALUE 2.00e-22
KVMELESKLNEAKEEFTSGGPLGQKRDPKEWIPRPPEKYALSGHRSP

SEQ ID NO: 29000 - protein, 72 aa, Homo sapiens
  MAP TO CHR19.1; EXPRESSED IN ADULT LIVER, SIGNAL =   2; EXPRESSED IN LUNG, SIGNAL = 3.2; EXPRESSED IN FETAL LIVER, SIGNAL = 1.6; EXPRESSED IN BRAIN, SIGNAL = 2.2; EXPRESSED IN HEART, SIGNAL = 2.3; SWISSPROT HIT: P52757, EVALUE 6.60e-02
QLTEPVIPFHLYDAFISLAKTLHADPGDDPGTPSPSPEVIRSLKTLLVQLPDSNYNTLRHLVAHLFRCAWVP

SEQ ID NO: 29001 - protein, 33 aa, Homo sapiens
  MAP TO CHR1.1; EXPRESSED IN ADULT LIVER, SIGNAL = 3.7; EXPRESSED IN BONE MARROW, SIGNAL = 5.2; EXPRESSED IN FETAL LIVER, SIGNAL = 3.5; EXPRESSED IN HELA, SIGNAL = 3.4; EXPRESSED IN BRAIN, SIGNAL = 4.5; EXPRESSED IN HEART, SIGNAL =   3
FLKMHSFQNQRKSCLSSCCLYYGFKINPFRHST

SEQ ID NO: 29002 - protein, 83 aa, Homo sapiens
  MAP TO CHR6.1; EXPRESSED IN HELA, SIGNAL = 4.2; EXPRESSED IN BRAIN, SIGNAL = 4.5; EXPRESSED IN HEART, SIGNAL = 3.2; EXPRESSED IN ADULT LIVER, SIGNAL = 4.1; EXPRESSED IN LUNG, SIGNAL = 4.2; EXPRESSED IN FETAL LIVER, SIGNAL = 3.5; SWISSPROT HIT: Q99594, EVALUE 7.00e-35
PVGSGPEPRATSTIASNSWNASSSPGEAREDGPEGLDKGLDNDAEGVWSPDIEQSFQEALAIYPPCGRRKIILSDEGKMYGAC

SEQ ID NO: 29003 - protein, 55 aa, Homo sapiens
  MAP TO CHR1.1; EXPRESSED IN PLACENTA, SIGNAL = 2.9; EXPRESSED IN LUNG, SIGNAL = 0.92; EXPRESSED IN BRAIN, SIGNAL = 0.81; EXPRESSED IN BONE MARROW, SIGNAL = 0.87; SWISSPROT HIT: P25917, EVALUE 8.10e+00
SFLGPGLFQVQPTSPTPSPPAHSRHLSARGGPDWSLSPGKPFPVWAGGSHIGPGP

SEQ ID NO: 29004 - protein, 75 aa, Homo sapiens
  MAP TO CHR12.1; EXPRESSED IN HELA, SIGNAL = 1.1; EXPRESSED IN FETAL LIVER, SIGNAL = 1.3; EXPRESSED IN BRAIN, SIGNAL = 0.83; EXPRESSED IN LUNG, SIGNAL = 0.76; EXPRESSED IN BONE MARROW, SIGNAL = 0.97; EXPRESSED IN ADULT LIVER, SIGNAL = 0.86; SWISSPROT HIT: P09133, EVALUE 4.70e+00
ITCLVSFLVCQSALPAPASCSDSLRTGALPRRPHRSRRNQQLPAGKEHHVWHISVAQRTRNSMPRRECMVQDSLE

SEQ ID NO: 29005 - protein, 73 aa, Homo sapiens
  MAP TO CHR3.1; EXPRESSED IN LUNG, SIGNAL = 1.2; EXPRESSED IN HELA, SIGNAL = 1.5; EXPRESSED IN BRAIN, SIGNAL = 1.7; EXPRESSED IN HEART, SIGNAL = 1.2; EXPRESSED IN BONE MARROW, SIGNAL = 1.2; EXPRESSED IN ADULT LIVER, SIGNAL = 0.44; SWISSPROT HIT: P27545, EVALUE 8.80e+00
GVCASEYPLPGVFDTCFRLSLHGLPLLLFITFKSSCRLQSFLKLKISPRSRARVPEAGWALRFEGRRGPGRRR

SEQ ID NO: 29006 - protein, 61 aa, Homo sapiens
  MAP TO CHR17.1; EXPRESSED IN ADULT LIVER, SIGNAL = 1.3; EXPRESSED IN FETAL LIVER, SIGNAL = 0.7; EXPRESSED IN HELA, SIGNAL = 0.81; EXPRESSED IN BRAIN, SIGNAL = 0.8; EXPRESSED IN LUNG, SIGNAL = 0.88; EXPRESSED IN HEART, SIGNAL = 0.99; SWISSPROT HIT: P41234, EVALUE 9.00e-07
TGSVTIYNNKLSEMADLENLSKLTGVCPQSNVQFDFLTVRENLRLFAKIKGILPQEVDKEV

SEQ ID NO: 29007 - protein, 56 aa, Homo sapiens
  MAP TO CHR19.1; EXPRESSED IN LUNG, SIGNAL = 2.4; EXPRESSED IN BRAIN, SIGNAL = 2.8; EXPRESSED IN PLACENTA, SIGNAL = 3.7; EXPRESSED IN FETAL LIVER, SIGNAL = 2.1; EXPRESSED IN HELA, SIGNAL = 2.5; EXPRESSED IN HEART, SIGNAL = 3.1; EXPRESSED IN BONE MARROW, SIGNAL = 2.4; EXPRESSED IN ADULT LIVER, SIGNAL = 3.4; SWISSPROT HIT: P27692, EVALUE 1.00e-07
IPQDMLEFPAQELRKYFKMGDHVKVIAGRFEGDTGLIVRVEENFVILFSDLTMHEV

SEQ ID NO: 29008 - protein, 112 aa, Homo sapiens
  MAP TO CHR2.1; EXPRESSED IN BONE MARROW, SIGNAL = 1.3; EXPRESSED IN HEART, SIGNAL = 3.8; EXPRESSED IN ADULT LIVER, SIGNAL = 0.81; EXPRESSED IN FETAL LIVER, SIGNAL = 1.1; EXPRESSED IN LUNG, SIGNAL = 0.65; EXPRESSED IN HELA, SIGNAL = 0.94; EXPRESSED IN BRAIN, SIGNAL = 1.3; SWISSPROT HIT: P52179, EVALUE 1.00e-11
NLLNYVFLLGEPDPPRKLEVTEMTKNSATLAWLPPLRDGGAKIDGYITSYREEEQPADRWTEYSVVKDLSLVVTGLKEGKKYKFRVAARNAVGVSLPREAEGVYEAKEQLCK

SEQ ID NO: 29009 - protein, 93 aa, Homo sapiens
  MAP TO CHR15.1; EXPRESSED IN LUNG, SIGNAL = 1.1; EXPRESSED IN BRAIN, SIGNAL = 1.1; EXPRESSED IN BONE MARROW, SIGNAL = 1.2; EXPRESSED IN HEART, SIGNAL = 1.3; EXPRESSED IN ADULT LIVER, SIGNAL =   1; EXPRESSED IN PLACENTA, SIGNAL = 1.5; EXPRESSED IN FETAL LIVER, SIGNAL = 1.5; SWISSPROT HIT: Q08379, EVALUE 2.00e-09
LQVELKSQEAQSLQQQPDHYLGHLQQYVATYQQQVAAYQQLTCEKEALYRQWLQQTQLMNQLQQQEAWGKAVAEMACQKLQEAQGRELPRMGP

SEQ ID NO: 29010 - protein, 72 aa, Homo sapiens
  MAP TO CHR19.1; EXPRESSED IN LUNG, SIGNAL = 1.8; EXPRESSED IN HELA, SIGNAL =   4; EXPRESSED IN BRAIN, SIGNAL = 3.6; EXPRESSED IN HEART, SIGNAL = 2.3; EXPRESSED IN ADULT LIVER, SIGNAL = 4.1; EXPRESSED IN PLACENTA, SIGNAL = 4.6; SWISSPROT HIT: P36342, EVALUE 1.40e+00
VPSALPGHQDAGDVSGKGLAHLPAAHVGDAVQGQAHEGGVAAGQVILDGVVDEADQLRVRVHQHRNEQVTLW

SEQ ID NO: 29011 - protein, 52 aa, Homo sapiens
  MAP TO CHR1.1; EXPRESSED IN LUNG, SIGNAL = 0.78; EXPRESSED IN FETAL LIVER, SIGNAL = 0.54; EXPRESSED IN BRAIN, SIGNAL = 0.5; EXPRESSED IN HEART, SIGNAL = 0.44; EXPRESSED IN ADULT LIVER, SIGNAL = 0.96; SWISSPROT HIT: Q9UL59, EVALUE 7.00e-20
CEECGKGFTQAAHFHIHQRVHTGEKPYKCDVCGKGFSHNSPLICHRRVHTGE

SEQ ID NO: 29012 - protein, 88 aa, Homo sapiens
  MAP TO CHR18.1; EXPRESSED IN PLACENTA, SIGNAL = 2.8; EXPRESSED IN FETAL LIVER, SIGNAL = 2.5; EXPRESSED IN LUNG, SIGNAL = 3.1; EXPRESSED IN HELA, SIGNAL = 3.3; EXPRESSED IN BRAIN, SIGNAL = 3.3; EXPRESSED IN HEART, SIGNAL = 3.2; EXPRESSED IN ADULT LIVER, SIGNAL = 3.9; SWISSPROT HIT: Q9WUA1, EVALUE 1.00e-03
TGLLVLHWEANGSSSWGFNASVGSARCGSGGPGSCPVPQECVPQDGAAGAGLCRCPQGWAGPHCRMALCPENCNAHTGAGTCNQVQVG

SEQ ID NO: 29013 - protein, 65 aa, Homo sapiens
  MAP TO CHR18.1; EXPRESSED IN LUNG, SIGNAL = 1.1; EXPRESSED IN FETAL LIVER, SIGNAL =   1; EXPRESSED IN HELA, SIGNAL = 1.3; EXPRESSED IN BRAIN, SIGNAL = 1.4; EXPRESSED IN HEART, SIGNAL = 0.92; EXPRESSED IN ADULT LIVER, SIGNAL = 1.7; EXPRESSED IN BONE MARROW, SIGNAL = 1.6
FYSVISGSLSHSEPSHGLADRVINCREVLEAFNLLVLQVSSFPYTLQTQQSRISSSNEVHWIQLD

SEQ ID NO: 29014 - protein, 51 aa, Homo sapiens
  MAP TO CHR7.1; EXPRESSED IN HELA, SIGNAL = 1.3; EXPRESSED IN FETAL LIVER, SIGNAL = 1.2; EXPRESSED IN BRAIN, SIGNAL = 1.4; EXPRESSED IN HEART, SIGNAL =   1; EXPRESSED IN ADULT LIVER, SIGNAL = 1.7; EXPRESSED IN PLACENTA, SIGNAL = 1.2; EXPRESSED IN LUNG, SIGNAL = 0.98
FFFPQTAMDQLHMHFTQAIHNTVFQVVLGYVELCAGNTDTKFQKLQYKDLC

SEQ ID NO: 29015 - protein, 69 aa, Homo sapiens
  MAP TO CHR5.1; EXPRESSED IN HELA, SIGNAL = 0.71; EXPRESSED IN BRAIN, SIGNAL = 0.76; EXPRESSED IN HEART, SIGNAL = 0.76; EXPRESSED IN BONE MARROW, SIGNAL = 0.86; EXPRESSED IN FETAL LIVER, SIGNAL = 0.71; EXPRESSED IN LUNG, SIGNAL = 0.81
TCKPTFVAIIICFLFLLKLSLVLLSLRAYVGIFFFLCIHKSNVQIPSISDILHVAYLLHYRTKNRIQAL

SEQ ID NO: 29016 - protein, 42 aa, Homo sapiens
  MAP TO CHR7.1; EXPRESSED IN ADULT LIVER, SIGNAL =   2; EXPRESSED IN PLACENTA, SIGNAL = 1.8; EXPRESSED IN LUNG, SIGNAL = 2.4; EXPRESSED IN FETAL LIVER, SIGNAL = 2.1; EXPRESSED IN HELA, SIGNAL = 3.3; EXPRESSED IN BRAIN, SIGNAL = 1.8; EXPRESSED IN HEART, SIGNAL = 1.7
YLVHSIRDDGGQSDSICPLKAFSVDSTYFAFTVRSSSLRRGC

SEQ ID NO: 29017 - protein, 57 aa, Homo sapiens
  MAP TO CHR9.1; EXPRESSED IN HELA, SIGNAL = 5.6; EXPRESSED IN LUNG, SIGNAL = 3.7; EXPRESSED IN FETAL LIVER, SIGNAL = 6.4; EXPRESSED IN BRAIN, SIGNAL = 4.6; EXPRESSED IN HEART, SIGNAL =   4; EXPRESSED IN BONE MARROW, SIGNAL = 6.3; EXPRESSED IN ADULT LIVER, SIGNAL = 3.8; EXPRESSED IN PLACENTA, SIGNAL =  11; SWISSPROT HIT: O34268, EVALUE 2.80e+00
PEVQQVAEEAVGGVSISLLTHRHQKEAMAQEGHVGSRHVREVKGHKEHLYHSLVGVK

SEQ ID NO: 29018 - protein, 86 aa, Homo sapiens
  MAP TO CHR12.1; EXPRESSED IN PLACENTA, SIGNAL = 2.6; EXPRESSED IN LUNG, SIGNAL = 7.2; EXPRESSED IN BRAIN, SIGNAL = 0.51; EXPRESSED IN HEART, SIGNAL = 2.8; EXPRESSED IN BONE MARROW, SIGNAL = 0.65; EXPRESSED IN ADULT LIVER, SIGNAL =  99
LHSLHYPVNIVLYPCVEPIGPTLGPPGHQASCVEFGLVIGILYSKGPTTVPFTAIHALLSSSTDHVRSENIGLCICCGFLHFHFFA

SEQ ID NO: 29019 - protein, 67 aa, Homo sapiens
  MAP TO CHR1.1; EXPRESSED IN HELA, SIGNAL = 0.81; EXPRESSED IN BRAIN, SIGNAL = 0.51; EXPRESSED IN HEART, SIGNAL = 0.82; SWISSPROT HIT: Q9NX95, EVALUE 4.60e+00
PCPQSHLSFTSEGSSGTSRGATGKSMGHSSQRPVSSRARCWTRSGWRLKVKFTLKVSPSTKRLRRLW

SEQ ID NO: 29020 - protein, 60 aa, Homo sapiens
  MAP TO CHR17.1; EXPRESSED IN ADULT LIVER, SIGNAL = 1.7; EXPRESSED IN PLACENTA, SIGNAL = 3.4; EXPRESSED IN FETAL LIVER, SIGNAL =   2; EXPRESSED IN HELA, SIGNAL = 4.2; EXPRESSED IN BRAIN, SIGNAL = 2.4; EXPRESSED IN LUNG, SIGNAL = 1.4; EXPRESSED IN HEART, SIGNAL = 0.94; SWISSPROT HIT: P34703, EVALUE 1.30e-02
SYGNDQTYFEEIKQFYYRDEFSHQVQEWNRQRTMAIERALQQFLYVQMAKELKNKLLAEA

SEQ ID NO: 29021 - protein, 75 aa, Homo sapiens
  MAP TO CHR3.1; EXPRESSED IN FETAL LIVER, SIGNAL = 0.64; EXPRESSED IN LUNG, SIGNAL = 0.9; EXPRESSED IN BRAIN, SIGNAL = 0.68; EXPRESSED IN HEART, SIGNAL = 1.1; EXPRESSED IN BONE MARROW, SIGNAL = 0.6; SWISSPROT HIT: O83129, EVALUE 3.30e-01
LTKQVLQYGLVLVPEAVEGVPARTPIGQGVPPNPAPTGELVKVLTGAHPSVQGLQDFSSHSNAGLCKAGAVGWVC

SEQ ID NO: 29022 - protein, 74 aa, Homo sapiens
  MAP TO CHR19.1; EXPRESSED IN LUNG, SIGNAL = 0.6; EXPRESSED IN BRAIN, SIGNAL = 0.39; EXPRESSED IN HEART, SIGNAL = 0.57; SWISSPROT HIT: Q9Y2G7, EVALUE 2.00e-42
GLRLHHKLHTGEKPYECKECGKAFRVRQQLTLHQRIHTGEKPYDCKECGKTFSRGYHLTLHQRIHTGEKPYECK

SEQ ID NO: 29023 - protein, 76 aa, Homo sapiens
  MAP TO CHR12.1; EXPRESSED IN HELA, SIGNAL = 2.2; EXPRESSED IN BRAIN, SIGNAL = 1.1; EXPRESSED IN LUNG, SIGNAL = 1.7; EXPRESSED IN HEART, SIGNAL = 1.4; EXPRESSED IN BONE MARROW, SIGNAL = 1.1; EXPRESSED IN ADULT LIVER, SIGNAL = 2.3; EXPRESSED IN PLACENTA, SIGNAL = 2.5; SWISSPROT HIT: Q09775, EVALUE 6.00e-07
SPDYIHRIGRTGRAGKSGVAITFLTKEDSAVFYELKQAILESPVSSCPPELANHPDAQHKPGTILTKKRREETIFA

SEQ ID NO: 29024 - protein, 37 aa, Homo sapiens
  MAP TO AC027045.2; EXPRESSED IN ADULT LIVER, SIGNAL = 0.61; EXPRESSED IN FETAL LIVER, SIGNAL = 0.48; EXPRESSED IN BRAIN, SIGNAL = 0.5; EXPRESSED IN BONE MARROW, SIGNAL = 0.59; EXPRESSED IN HEART, SIGNAL = 1.2
LPLLRDIELLLHPTGHHGEKELREEGADVHGGLGDGG

SEQ ID NO: 29025 - protein, 67 aa, Homo sapiens
  MAP TO CHR11.1; EXPRESSED IN BONE MARROW, SIGNAL = 2.5; EXPRESSED IN PLACENTA, SIGNAL = 1.3; EXPRESSED IN LUNG, SIGNAL = 2.6; EXPRESSED IN FETAL LIVER, SIGNAL = 1.1; EXPRESSED IN BRAIN, SIGNAL = 1.5; EXPRESSED IN HEART, SIGNAL = 1.8; SWISSPROT HIT: P18490, EVALUE 3.50e+00
LSSIMSLAHTAAEYMLSDALLPDRRGPRLKGLRLELPLDRIVKFVAVGSPLLLMSLAFAQEFSSGKL

SEQ ID NO: 29026 - protein, 88 aa, Homo sapiens
  MAP TO CHR7.1; EXPRESSED IN HELA, SIGNAL =   2; EXPRESSED IN FETAL LIVER, SIGNAL = 2.2; EXPRESSED IN BRAIN, SIGNAL =   3; EXPRESSED IN HEART, SIGNAL = 4.2; EXPRESSED IN ADULT LIVER, SIGNAL = 2.5; EXPRESSED IN BONE MARROW, SIGNAL = 3.2; EXPRESSED IN LUNG, SIGNAL =   4; SWISSPROT HIT: P08581, EVALUE 9.00e-31
LFLSKFDKSIHCSIMKLMSPPLDFSGITDIGEVSQFLTEGIIMKDFSHPNVLSLLGICLRSEGSPLVVLPYMKHGDLRNFIRNETHVS

SEQ ID NO: 29027 - protein, 35 aa, Homo sapiens
  MAP TO CHR19.1; EXPRESSED IN LUNG, SIGNAL = 1.7; EXPRESSED IN FETAL LIVER, SIGNAL = 1.2; EXPRESSED IN HELA, SIGNAL = 1.7; EXPRESSED IN BRAIN, SIGNAL = 1.6; EXPRESSED IN HEART, SIGNAL = 1.3; EXPRESSED IN ADULT LIVER, SIGNAL = 2.2; EXPRESSED IN PLACENTA, SIGNAL = 1.7
SRERPCMSRLRPRGLGTGLGALAFLHQMAKPPMSL

SEQ ID NO: 29028 - protein, 61 aa, Homo sapiens
  MAP TO CHR16.1; EXPRESSED IN HELA, SIGNAL =   8; EXPRESSED IN BRAIN, SIGNAL =  10; EXPRESSED IN LUNG, SIGNAL =   5; EXPRESSED IN HEART, SIGNAL = 5.5; EXPRESSED IN BONE MARROW, SIGNAL =  12; EXPRESSED IN ADULT LIVER, SIGNAL = 5.2; EXPRESSED IN FETAL LIVER, SIGNAL = 9.3; SWISSPROT HIT: P51140, EVALUE 7.40e+00
RLGRGHLSWHKLLRGHGPWWDLARCKAWRGDHTRGRHVGRLARHVVHNAGRLSHRRHALWR

SEQ ID NO: 29029 - protein, 101 aa, Homo sapiens
  MAP TO CHR22.1; EXPRESSED IN ADULT LIVER, SIGNAL = 1.7; EXPRESSED IN PLACENTA, SIGNAL = 4.1; EXPRESSED IN HELA, SIGNAL = 4.5; EXPRESSED IN BRAIN, SIGNAL = 2.4; EXPRESSED IN HEART, SIGNAL = 1.3; SWISSPROT HIT: Q9ZFU6, EVALUE 8.80e-01
QFHYPQKHDPPLSSIPCLHYKKMKDNEEREQSSDLTPSGDVSPVKPLSRSAELEFPLDEPDSMGADPGPPDEKDPLGAEAAPGALGQVKAKVEVCKDESVG

SEQ ID NO: 29030 - protein, 76 aa, Homo sapiens
  MAP TO CHR12.1; EXPRESSED IN BONE MARROW, SIGNAL = 0.6; EXPRESSED IN FETAL LIVER, SIGNAL = 0.84; EXPRESSED IN LUNG, SIGNAL = 1.1; EXPRESSED IN HELA, SIGNAL = 0.97; EXPRESSED IN BRAIN, SIGNAL = 0.65; SWISSPROT HIT: O66679, EVALUE 3.70e-01
QLRGPQQVMRVKVQALPSDSCVDVWSQNISLDCVSLPIGSWKTQFPSKPSQHLECTQNPRFGSIRCSCLCRDGEGQ

SEQ ID NO: 29031 - protein, 47 aa, Homo sapiens
  MAP TO CHR1.1; EXPRESSED IN ADULT LIVER, SIGNAL = 1.4; EXPRESSED IN BONE MARROW, SIGNAL = 1.1; EXPRESSED IN PLACENTA, SIGNAL = 1.6; EXPRESSED IN LUNG, SIGNAL = 2.5; EXPRESSED IN HELA, SIGNAL = 0.8; EXPRESSED IN FETAL LIVER, SIGNAL = 0.91; EXPRESSED IN BRAIN, SIGNAL =   1; SWISSPROT HIT: P08548, EVALUE 2.00e-13
YEKPTTNIIFNGERLDAFPLRSGTRQGCPLLTLLFNIVLGVLARAIR

SEQ ID NO: 29032 - protein, 88 aa, Homo sapiens
  MAP TO CHR19.1; EXPRESSED IN ADULT LIVER, SIGNAL = 5.4; EXPRESSED IN PLACENTA, SIGNAL = 6.4; EXPRESSED IN FETAL LIVER, SIGNAL = 4.8; EXPRESSED IN HELA, SIGNAL = 6.3; EXPRESSED IN HEART, SIGNAL = 2.5; EXPRESSED IN BONE MARROW, SIGNAL = 4.2; EXPRESSED IN LUNG, SIGNAL =   2; EXPRESSED IN BRAIN, SIGNAL = 5.3; SWISSPROT HIT: Q01617, EVALUE 6.40e-01
HSGSDPFSSQPPEGLLHLFFPPGHGAPVLWHRQLHLHATHHPLLPAGRALGCCLLLHPHTHPESAHLQPEEPGHEESPVEALSPGAIL

SEQ ID NO: 29033 - protein, 63 aa, Homo sapiens
  MAP TO CHR19.1; EXPRESSED IN BONE MARROW, SIGNAL = 1.2; EXPRESSED IN ADULT LIVER, SIGNAL = 2.4; EXPRESSED IN HELA, SIGNAL = 1.8; EXPRESSED IN BRAIN, SIGNAL = 0.94; EXPRESSED IN LUNG, SIGNAL =   6; EXPRESSED IN HEART, SIGNAL = 1.9
WVPEACPGSGPGSRGEAGAQLLLGLGDAACEAAAIPSKLLPGALAGGLGRPCPDSQEMDSDLL

SEQ ID NO: 29034 - protein, 60 aa, Homo sapiens
  MAP TO CHR9.1; EXPRESSED IN BRAIN, SIGNAL = 1.4; EXPRESSED IN HEART, SIGNAL = 1.6; EXPRESSED IN BONE MARROW, SIGNAL = 0.99; EXPRESSED IN PLACENTA, SIGNAL = 1.9; EXPRESSED IN FETAL LIVER, SIGNAL = 1.8; EXPRESSED IN LUNG, SIGNAL = 2.1; SWISSPROT HIT: Q50341, EVALUE 1.20e+00
LQLLHGLPALGDDQAGVARRDHVLYSAILAPFGGVVELSWGPPMTPRHNVIQHHLRFLER

SEQ ID NO: 29035 - protein, 85 aa, Homo sapiens
  MAP TO CHR19.1; EXPRESSED IN FETAL LIVER, SIGNAL = 2.8; EXPRESSED IN BRAIN, SIGNAL = 3.5; EXPRESSED IN LUNG, SIGNAL = 1.8; EXPRESSED IN HEART, SIGNAL = 2.6; EXPRESSED IN BONE MARROW, SIGNAL = 3.1; EXPRESSED IN ADULT LIVER, SIGNAL = 5.1
ARPSCSLVAWAVPTETSSCSTWSLDIPCSSRIPGPGREEGRGGKGWVPGPHHRFYLNASTSYDEDFNHEPCQRKGHKAHWAVSAG

SEQ ID NO: 29036 - protein, 94 aa, Homo sapiens
  MAP TO CHR6.1; EXPRESSED IN ADULT LIVER, SIGNAL = 1.8; EXPRESSED IN PLACENTA, SIGNAL = 1.7; EXPRESSED IN FETAL LIVER, SIGNAL = 1.8; EXPRESSED IN LUNG, SIGNAL = 2.2; EXPRESSED IN HELA, SIGNAL = 2.1; EXPRESSED IN BRAIN, SIGNAL = 1.6; EXPRESSED IN HEART, SIGNAL = 1.8; SWISSPROT HIT: Q38814, EVALUE 3.50e+00
ESAPPLLEEIYPPQLFRQVLLIHRLAVHGVVLVAFAIAQILHQPSGRVPQVQGHGGQWPLVVPQAGFDVVVGAVHLNGLWGSGKVDHTLGQKHL

SEQ ID NO: 29037 - protein, 41 aa, Homo sapiens
  MAP TO CHR5.1; EXPRESSED IN BRAIN, SIGNAL = 0.48; EXPRESSED IN HEART, SIGNAL = 0.72; EXPRESSED IN ADULT LIVER, SIGNAL = 0.54; EXPRESSED IN BONE MARROW, SIGNAL = 0.51; EXPRESSED IN LUNG, SIGNAL = 0.62; EXPRESSED IN FETAL LIVER, SIGNAL = 0.54; SWISSPROT HIT: P52386, EVALUE 2.20e+00
PINLFMLRIFLDLSFISNVDFKGTLSSTFLSHLSIKYQNDI

SEQ ID NO: 29038 - protein, 67 aa, Homo sapiens
  MAP TO CHR7.1; EXPRESSED IN BONE MARROW, SIGNAL = 0.73; EXPRESSED IN BRAIN, SIGNAL = 0.57; SWISSPROT HIT: P21439, EVALUE 4.00e-32
FFRYAYYYSGLGAGVLVAAYIQVSFWTLAAGRQIRKIRQKFFHAILRQEIGWFDINDTTELNTRLTE

SEQ ID NO: 29039 - protein, 42 aa, Homo sapiens
  MAP TO CHR14.1; EXPRESSED IN BONE MARROW, SIGNAL = 1.3; EXPRESSED IN ADULT LIVER, SIGNAL =   1; EXPRESSED IN PLACENTA, SIGNAL = 1.6; EXPRESSED IN LUNG, SIGNAL = 1.1; EXPRESSED IN BRAIN, SIGNAL = 1.6; EXPRESSED IN HEART, SIGNAL = 1.1; EXPRESSED IN FETAL LIVER, SIGNAL = 0.96; EXPRESSED IN HELA, SIGNAL = 1.5; SWISSPROT HIT: P15321, EVALUE 2.90e+00
YILCEFKCMHTCSHTHKQSNFPGGQTIGSIVRQRRQHTFPPT

SEQ ID NO: 29040 - protein, 57 aa, Homo sapiens
  MAP TO CHR2.1; EXPRESSED IN HELA, SIGNAL = 1.6; EXPRESSED IN BRAIN, SIGNAL = 1.7; EXPRESSED IN HEART, SIGNAL = 1.8; EXPRESSED IN ADULT LIVER, SIGNAL =   1; EXPRESSED IN BONE MARROW, SIGNAL =   2; EXPRESSED IN PLACENTA, SIGNAL = 1.5; EXPRESSED IN LUNG, SIGNAL = 1.8; SWISSPROT HIT: O95754, EVALUE 1.00e-24
LFLPEADSCLTRFAVPHTYNYSVLLVDPASHTLYVGARDTIFALSLPFSGERPRRVR

SEQ ID NO: 29041 - protein, 110 aa, Homo sapiens
  MAP TO CHR5.1; EXPRESSED IN FETAL LIVER, SIGNAL = 2.9; EXPRESSED IN HELA, SIGNAL = 3.4; EXPRESSED IN BRAIN, SIGNAL =   3; EXPRESSED IN HEART, SIGNAL =   2; EXPRESSED IN ADULT LIVER, SIGNAL = 3.2; EXPRESSED IN BONE MARROW, SIGNAL = 3.1; EXPRESSED IN PLACENTA, SIGNAL = 2.5; EXPRESSED IN LUNG, SIGNAL = 3.5; SWISSPROT HIT: Q15545, EVALUE 1.00e-38
DEEDINIIDTEEDLERQLQDKLNESDEQHQENEGTNQLVMGIQKQIDNMKGKLQETQDRAKRQEDLIMKVENLALKNRFQAVLDELKQKEDREKEQLSSLQEELESLLEK

SEQ ID NO: 29042 - protein, 43 aa, Homo sapiens
  MAP TO CHR1.1; EXPRESSED IN BONE MARROW, SIGNAL = 6.5; EXPRESSED IN ADULT LIVER, SIGNAL = 4.3; EXPRESSED IN PLACENTA, SIGNAL =  86; EXPRESSED IN FETAL LIVER, SIGNAL = 4.2; EXPRESSED IN LUNG, SIGNAL =   3; EXPRESSED IN HELA, SIGNAL = 4.5; EXPRESSED IN HEART, SIGNAL = 2.9; EXPRESSED IN BRAIN, SIGNAL = 4.3; SWISSPROT HIT: P46439, EVALUE 1.00e-15
GLLQITFVDFLAYDVLDMKRIFEPKCLDAFLNLKDFISRFEVM

SEQ ID NO: 29043 - protein, 69 aa, Homo sapiens
  MAP TO CHR14.1; EXPRESSED IN ADULT LIVER, SIGNAL = 5.9; EXPRESSED IN BONE MARROW, SIGNAL = 7.7; EXPRESSED IN LUNG, SIGNAL = 5.8; EXPRESSED IN HELA, SIGNAL = 4.7; EXPRESSED IN FETAL LIVER, SIGNAL = 5.5; EXPRESSED IN BRAIN, SIGNAL = 6.6; EXPRESSED IN HEART, SIGNAL = 4.8; SWISSPROT HIT: P22758, EVALUE 4.00e-28
PGQVNSLDDNGVLIGNWSGDYSRGTNPSAWVGSVEILLSYLRTGYSVPYGQCWVFAGVTTTGSGGTGTG

SEQ ID NO: 29044 - protein, 37 aa, Homo sapiens
  MAP TO CHR14.1; EXPRESSED IN PLACENTA, SIGNAL = 1.7; EXPRESSED IN FETAL LIVER, SIGNAL = 2.1; EXPRESSED IN LUNG, SIGNAL = 6.3; EXPRESSED IN HELA, SIGNAL = 2.1; EXPRESSED IN BRAIN, SIGNAL = 1.9; EXPRESSED IN BONE MARROW, SIGNAL = 4.9; EXPRESSED IN HEART, SIGNAL = 3.2; SWISSPROT HIT: P23083, EVALUE 3.00e-13
STGVHSQVQLVQSGAEVKKPGASVKVSCKASGYTFTS

SEQ ID NO: 29045 - protein, 53 aa, Homo sapiens
  MAP TO CHR15.1; EXPRESSED IN BONE MARROW, SIGNAL = 0.49; EXPRESSED IN BRAIN, SIGNAL = 0.48
LNTVITVFLNLVFHGTVLKLFFFYVEPLLQFQLAEQASNCFWFPWKLDSCGCV

SEQ ID NO: 29046 - protein, 161 aa, Homo sapiens
  MAP TO CHR5.1; EXPRESSED IN HELA, SIGNAL = 4.4; EXPRESSED IN FETAL LIVER, SIGNAL = 2.7; EXPRESSED IN BRAIN, SIGNAL = 3.3; EXPRESSED IN LUNG, SIGNAL = 1.6; EXPRESSED IN HEART, SIGNAL = 2.9; EXPRESSED IN BONE MARROW, SIGNAL = 3.1; EXPRESSED IN ADULT LIVER, SIGNAL = 3.7; EXPRESSED IN PLACENTA, SIGNAL = 3.9
AGPERQRARDPVPRPPHRWFYRRGAGAPLRRARLPGDQGGGGGQRLGPERLAVLPPAQGQRAGTLLGGSAHGRGAHGASPAGQRRAQAESRGGRPGPRPAPALRHCHAHRGRGRQDLRHPGRPGQPRALRQTQRFGPHSVPGGGGGRGLLRLPGLRHRAAG

SEQ ID NO: 29047 - protein, 61 aa, Homo sapiens
  MAP TO CHR19.1; EXPRESSED IN PLACENTA, SIGNAL = 1.4; EXPRESSED IN FETAL LIVER, SIGNAL = 0.94; EXPRESSED IN HELA, SIGNAL = 0.97; EXPRESSED IN LUNG, SIGNAL = 1.1; EXPRESSED IN BRAIN, SIGNAL = 0.91; EXPRESSED IN HEART, SIGNAL = 1.1
HLPLVLKATAHPLEVGAPPVAAVPAALLPAVPLRLLQGPAASPGVVQEVPHWVGFKNPFLQ

SEQ ID NO: 29048 - protein, 54 aa, Homo sapiens
  MAP TO CHR22.1; EXPRESSED IN HEART, SIGNAL = 0.57; EXPRESSED IN BONE MARROW, SIGNAL = 0.83; EXPRESSED IN ADULT LIVER, SIGNAL = 0.92; EXPRESSED IN FETAL LIVER, SIGNAL = 0.58; EXPRESSED IN HELA, SIGNAL = 0.55; EXPRESSED IN BRAIN, SIGNAL = 0.84
LLHLLVLCLLGAQVLLHSIVQDGADTEGPVVPKQGLDGLLVLPGYKMPIEGHLH

SEQ ID NO: 29049 - protein, 96 aa, Homo sapiens
  MAP TO CHR19.1; EXPRESSED IN HELA, SIGNAL = 1.5; EXPRESSED IN BRAIN, SIGNAL = 1.3; EXPRESSED IN BONE MARROW, SIGNAL = 1.2; EXPRESSED IN HEART, SIGNAL = 1.3; EXPRESSED IN FETAL LIVER, SIGNAL = 1.5; EXPRESSED IN LUNG, SIGNAL = 1.8
PTFLTFKQFLTCVNVLMAIKQGKKTKGLSTFVTFKRFLTSMKFLMSSKLYVKSKGFPTLLTFKGFLSSMNTLMLNKICTTTKVFPTFLTFIRFMCI

SEQ ID NO: 29050 - protein, 67 aa, Homo sapiens
  MAP TO CHR19.1; EXPRESSED IN FETAL LIVER, SIGNAL = 1.1; EXPRESSED IN LUNG, SIGNAL = 1.7; EXPRESSED IN HELA, SIGNAL = 0.71; EXPRESSED IN BRAIN, SIGNAL = 0.77; EXPRESSED IN HEART, SIGNAL = 1.5; EXPRESSED IN BONE MARROW, SIGNAL =   1
FTVRAVGATRAGLGRQGRQPGSPGQPHTCTRPARRRGPPAGRHGGRRPLPPGCPPWPKPCWSVEAVG

SEQ ID NO: 29051 - protein, 67 aa, Homo sapiens
  MAP TO CHR16.1; EXPRESSED IN PLACENTA, SIGNAL = 5.3; EXPRESSED IN ADULT LIVER, SIGNAL = 3.7; EXPRESSED IN BONE MARROW, SIGNAL = 4.7; EXPRESSED IN LUNG, SIGNAL = 2.7; EXPRESSED IN FETAL LIVER, SIGNAL = 3.8; EXPRESSED IN HEART, SIGNAL = 2.9; EXPRESSED IN BRAIN, SIGNAL = 4.6; EXPRESSED IN HELA, SIGNAL = 5.8; SWISSPROT HIT: P39962, EVALUE 7.80e+00
LPWPQIQFPHKKISHHSFHMTKTSIKGNSIVCESFNKTTFVFLAKEAQDECFLTRLDYSVGSIHQDA

SEQ ID NO: 29052 - protein, 75 aa, Homo sapiens
  MAP TO CHR7.1; EXPRESSED IN LUNG, SIGNAL = 0.69; EXPRESSED IN HELA, SIGNAL = 0.85; EXPRESSED IN BRAIN, SIGNAL = 0.88; EXPRESSED IN HEART, SIGNAL = 0.87; EXPRESSED IN ADULT LIVER, SIGNAL = 0.48; EXPRESSED IN BONE MARROW, SIGNAL = 0.84; SWISSPROT HIT: O77638, EVALUE 2.50e+00
PLPAEVDDWGVTRCAPGGKWTLGPGNIGHQEDIGEWQGGHRGGDPEDHGGRPFTDISPVPGLSDLEISLRYMGQK

SEQ ID NO: 29053 - protein, 111 aa, Homo sapiens
  MAP TO CHR6.1; EXPRESSED IN LUNG, SIGNAL = 3.6; EXPRESSED IN HELA, SIGNAL = 1.5; EXPRESSED IN FETAL LIVER, SIGNAL = 1.3; EXPRESSED IN BRAIN, SIGNAL = 1.4; EXPRESSED IN HEART, SIGNAL =   3; EXPRESSED IN ADULT LIVER, SIGNAL = 1.3; EXPRESSED IN PLACENTA, SIGNAL = 4.1; SWISSPROT HIT: P22105, EVALUE 9.00e-30
SAAEEETPSPTEPSMEAPEPPEEPLLGELTVTGSSPDSLSLSWTVPQGRFDSFTVQYKDRDGRPQVVRVGGEESEVTVGGLEPGRKYKMHLYGLHEGRRVGPVSTVGVTGE

SEQ ID NO: 29054 - protein, 158 aa, Homo sapiens
  MAP TO CHR5.1; EXPRESSED IN ADULT LIVER, SIGNAL = 0.75; EXPRESSED IN FETAL LIVER, SIGNAL = 0.61; EXPRESSED IN HELA, SIGNAL = 0.51; EXPRESSED IN BRAIN, SIGNAL = 0.45; EXPRESSED IN HEART, SIGNAL = 0.57; SWISSPROT HIT: O95486, EVALUE 1.00e-59
EGPVQNALLSSQESVSQGYNFQLPGSYPHPIPAKTLNPVSGQSNYGGSQGSGQTLNRPPVASNPVTPSLHSGPAPRMPLPASQNPATTPMPSSSFLPEANLPPPLNWQYNYPSTASQTNHCPRASSQPTVSGNTSLTTNHQYVSSGYPSLQNSFIKSG

SEQ ID NO: 29055 - protein, 160 aa, Homo sapiens
  MAP TO CHRX.1; EXPRESSED IN HEART, SIGNAL = 4.7; EXPRESSED IN BONE MARROW, SIGNAL = 8.1; EXPRESSED IN ADULT LIVER, SIGNAL = 7.2; EXPRESSED IN PLACENTA, SIGNAL = 8.8; EXPRESSED IN FETAL LIVER, SIGNAL =   7; EXPRESSED IN HELA, SIGNAL = 9.2; EXPRESSED IN BRAIN, SIGNAL = 9.2; EXPRESSED IN LUNG, SIGNAL = 4.8; SWISSPROT HIT: P22304, EVALUE 2.00e-91
PVSGRQSMDLVELVSLFPTLAGLAGLQVPPRCPVPSFHVELCREGKNLLKHFRFRDLEEDPYLPGNPRELIAYSQYPRPSDIPQWNSDKPSLKDIKIMGYSIRTIDYRYTVWVGFNPDEFLANFSDIHAGELYFVDSDPLQDHNMYNDSQGGDLFQLLMP

SEQ ID NO: 29056 - protein, 109 aa, Homo sapiens
  MAP TO CHR17.1; EXPRESSED IN LUNG, SIGNAL = 0.88; EXPRESSED IN FETAL LIVER, SIGNAL = 4.2; EXPRESSED IN HELA, SIGNAL =   1; EXPRESSED IN BRAIN, SIGNAL = 0.97; EXPRESSED IN ADULT LIVER, SIGNAL = 1.2; EXPRESSED IN BONE MARROW, SIGNAL =  14; SWISSPROT HIT: P23176, EVALUE 1.00e-01
RSRPMTPASRTKPTASRSSAPARLAPGATSPSATRSTRSLPSWTPAWCTAARSPWPGTCATCPTSWGCWPSTSASKTTAGPCCPLTTCTMTPVSSPTAQRASPASWQVS

SEQ ID NO: 29057 - protein, 114 aa, Homo sapiens
  MAP TO CHR5.1; EXPRESSED IN FETAL LIVER, SIGNAL = 1.1; EXPRESSED IN BRAIN, SIGNAL = 1.6; EXPRESSED IN LUNG, SIGNAL = 0.75; EXPRESSED IN HEART, SIGNAL = 0.78; EXPRESSED IN BONE MARROW, SIGNAL = 1.3; EXPRESSED IN ADULT LIVER, SIGNAL = 1.1; SWISSPROT HIT: Q9Y5I1, EVALUE 6.00e-60
GSGQLHYSVSEEAKHGTFVGRIAQDLGLELAELVQRLFRVASKTHGDLLEVNLQNGILFVNSRIDREELCGQSAECSIHLEVIVDRPLQVFHVNVEVKDINDNPPVFSLREQKL

SEQ ID NO: 29058 - protein, 73 aa, Homo sapiens
  MAP TO CHR5.1; EXPRESSED IN ADULT LIVER, SIGNAL =   2; EXPRESSED IN BONE MARROW, SIGNAL = 1.8; EXPRESSED IN FETAL LIVER, SIGNAL = 1.7; EXPRESSED IN LUNG, SIGNAL = 2.5; EXPRESSED IN HELA, SIGNAL =   2; EXPRESSED IN BRAIN, SIGNAL = 3.3; SWISSPROT HIT: P16469, EVALUE 7.20e+00
FPQSMVWCQPLHLLPEPKINAQVLEDMITIPMVLMLAGFREGILLPSLFPTPWGPVFCFVFHCLTFPLHALTS

SEQ ID NO: 29059 - protein, 65 aa, Homo sapiens
  MAP TO CHR19.1; EXPRESSED IN FETAL LIVER, SIGNAL = 3.1; EXPRESSED IN LUNG, SIGNAL = 3.8; EXPRESSED IN BRAIN, SIGNAL = 3.5; EXPRESSED IN HEART, SIGNAL = 3.6; EXPRESSED IN BONE MARROW, SIGNAL = 3.7; EXPRESSED IN PLACENTA, SIGNAL = 2.9; SWISSPROT HIT: P27884, EVALUE 7.80e+00
FTESFPRPGLQEAGSTEAGGHQSPSAGAAGGLRRQDSPVPAGDAAPAPGAEGQAGGAGPGAAAEQ

SEQ ID NO: 29060 - protein, 48 aa, Homo sapiens
  MAP TO CHR5.1; EXPRESSED IN HELA, SIGNAL = 0.72; EXPRESSED IN BRAIN, SIGNAL = 0.51; EXPRESSED IN HEART, SIGNAL = 0.67; EXPRESSED IN BONE MARROW, SIGNAL = 0.53; SWISSPROT HIT: O13016, EVALUE 8.20e+00
LKYFSTNLISFHFSLWPQSSSPANLLNYLWHAACSFLLLIRLRIMDNK

SEQ ID NO: 29061 - protein, 74 aa, Homo sapiens
  MAP TO CHR17.1; EXPRESSED IN BRAIN, SIGNAL = 1.1; EXPRESSED IN BONE MARROW, SIGNAL = 0.83; EXPRESSED IN HEART, SIGNAL = 1.6; EXPRESSED IN PLACENTA, SIGNAL = 1.2; EXPRESSED IN FETAL LIVER, SIGNAL =   6; EXPRESSED IN LUNG, SIGNAL =   2; EXPRESSED IN HELA, SIGNAL = 1.6; SWISSPROT HIT: P02749, EVALUE 4.00e-35
FSLSASCKVPVKKATVVYQGERVKIQEKFKNGMLHGDKVSFFCKNKEKKCSYTEDAQCIDGTIEVPKCFKGKSA

SEQ ID NO: 29062 - protein, 120 aa, Homo sapiens
  MAP TO CHR5.1; EXPRESSED IN PLACENTA, SIGNAL = 7.3; EXPRESSED IN HELA, SIGNAL =  10; EXPRESSED IN HEART, SIGNAL = 4.7; EXPRESSED IN BONE MARROW, SIGNAL = 6.9; EXPRESSED IN ADULT LIVER, SIGNAL = 4.9; EXPRESSED IN LUNG, SIGNAL = 5.3; EXPRESSED IN FETAL LIVER, SIGNAL = 6.9; EXPRESSED IN BRAIN, SIGNAL = 7.3; SWISSPROT HIT: Q48919, EVALUE 1.00e-04
HFLVVVYDYEFTLCLQITLFTIPRRKKKCIRYLPGEGRCPSPVPSDDSALGCPGSPAPQDSPSYHLLPRFPTELLTSPAEPAPTSPGLSTALSLPTPGPPQAPRSTLQSTQVQQQESQRQ

SEQ ID NO: 29063 - protein, 61 aa, Homo sapiens
  MAP TO CHR19.1; EXPRESSED IN FETAL LIVER, SIGNAL = 0.87; EXPRESSED IN BRAIN, SIGNAL = 0.58
SDPRVAHLGQQEHVNEVQSLGLGLGLQEVIDTLASEGATPLLDDSICEVVHYVTGPAEASP

SEQ ID NO: 29064 - protein, 53 aa, Homo sapiens
  MAP TO CHR17.1; EXPRESSED IN FETAL LIVER, SIGNAL = 1.2; EXPRESSED IN LUNG, SIGNAL = 1.3; EXPRESSED IN HELA, SIGNAL = 1.7; EXPRESSED IN BRAIN, SIGNAL = 1.7; EXPRESSED IN HEART, SIGNAL = 1.3; EXPRESSED IN ADULT LIVER, SIGNAL = 1.8; EXPRESSED IN BONE MARROW, SIGNAL = 1.3
APRAKGRDLGFSHQLCHLLEAQEEDLQPQPGQQQQDDHGGEGEAEPGGEVHHV

SEQ ID NO: 29065 - protein, 82 aa, Homo sapiens
  MAP TO CHR9.1; EXPRESSED IN BRAIN, SIGNAL = 0.43; EXPRESSED IN HEART, SIGNAL = 0.6; EXPRESSED IN ADULT LIVER, SIGNAL = 0.83; SWISSPROT HIT: O83349, EVALUE 2.00e+00
LVPRAGWLWSSLRVGEPQIAATWNKDFQHMLPLAACHHSLLPANITLQLKEGKLPDQCFSYSPVSGLHGESRSSPCQELELR

SEQ ID NO: 29066 - protein, 80 aa, Homo sapiens
  MAP TO CHR11.1; EXPRESSED IN ADULT LIVER, SIGNAL = 0.65; EXPRESSED IN BRAIN, SIGNAL = 0.4; EXPRESSED IN HEART, SIGNAL = 0.48; EXPRESSED IN BONE MARROW, SIGNAL = 0.33; SWISSPROT HIT: O00330, EVALUE 5.00e-39
SISNLGMFGIDEFTAVINPPQACILAVGRFRPVLKLTEDEEGNAKLQQRQLITVTMSSDSRVVDDELATRFLKSFKANLE

SEQ ID NO: 29067 - protein, 137 aa, Homo sapiens
  MAP TO CHR5.1; EXPRESSED IN BRAIN, SIGNAL = 2.2; EXPRESSED IN HEART, SIGNAL = 1.1; EXPRESSED IN BONE MARROW, SIGNAL = 1.8; EXPRESSED IN ADULT LIVER, SIGNAL = 1.7; EXPRESSED IN PLACENTA, SIGNAL = 2.2; EXPRESSED IN LUNG, SIGNAL = 1.4; SWISSPROT HIT: Q9Y5E7, EVALUE 2.00e-36
PLSSNMSLSLFVLDQNDNPPEILYPALPTDGSTGMELAPRSAEPGYLVTKVVAVDKDSGQNAWLSYLLLKASEPGLFAVGLYTGEVRTARALLDRDALKQSLVVAVQDHGQPPLSATVTLTVAVADSIPEVLADLGS

SEQ ID NO: 29068 - protein, 68 aa, Homo sapiens
  MAP TO CHR3.1; EXPRESSED IN BONE MARROW, SIGNAL = 0.66; EXPRESSED IN FETAL LIVER, SIGNAL = 0.53; EXPRESSED IN BRAIN, SIGNAL = 0.65; EXPRESSED IN HEART, SIGNAL = 0.66; SWISSPROT HIT: P25562, EVALUE 6.60e-01
KHSGEWPKIFTVSRSDIIILHRSHCFERRSRVCVIAFSYFDMMLTITSLLAPLERRNIFRSCSLGTFF

SEQ ID NO: 29069 - protein, 53 aa, Homo sapiens
  MAP TO CHR7.1; EXPRESSED IN BONE MARROW, SIGNAL = 0.75; EXPRESSED IN HEART, SIGNAL = 1.2; EXPRESSED IN FETAL LIVER, SIGNAL = 0.8; EXPRESSED IN LUNG, SIGNAL = 1.2; EXPRESSED IN BRAIN, SIGNAL = 0.65; SWISSPROT HIT: P34562, EVALUE 6.20e+00
AQTSTRSPCMPFSWFNDSRKGSYSFRNLPAPTSSLQPSPETLISDKKGSKVEN

SEQ ID NO: 29070 - protein, 41 aa, Homo sapiens
  MAP TO CHR17.1; EXPRESSED IN FETAL LIVER, SIGNAL = 1.3; EXPRESSED IN LUNG, SIGNAL = 1.3; EXPRESSED IN BRAIN, SIGNAL = 1.7; EXPRESSED IN HEART, SIGNAL = 0.96; EXPRESSED IN ADULT LIVER, SIGNAL = 2.2; EXPRESSED IN BONE MARROW, SIGNAL = 1.7
FNVSGFTKENLHQSLKLHLKFTLTVQPDGILTLTVSILGFF

SEQ ID NO: 29071 - protein, 76 aa, Homo sapiens
  MAP TO CHR20.1; EXPRESSED IN HELA, SIGNAL = 6.1; EXPRESSED IN BRAIN, SIGNAL = 5.4; EXPRESSED IN FETAL LIVER, SIGNAL = 4.6; EXPRESSED IN HEART, SIGNAL = 3.3; EXPRESSED IN BONE MARROW, SIGNAL = 4.8; EXPRESSED IN ADULT LIVER, SIGNAL = 4.4; EXPRESSED IN LUNG, SIGNAL =   4; EXPRESSED IN PLACENTA, SIGNAL = 5.4; SWISSPROT HIT: Q01094, EVALUE 1.00e-36
PTGVKSPGEKSRYETSLNLTTKRFLELLSHSADGVVDLNWAAEVLKVQKRRIYDITNVLEGIQLIAKKSKNHIQWL

SEQ ID NO: 29072 - protein, 54 aa, Homo sapiens
  MAP TO CHR9.1; EXPRESSED IN BONE MARROW, SIGNAL = 0.81; EXPRESSED IN ADULT LIVER, SIGNAL = 0.78; EXPRESSED IN HELA, SIGNAL = 0.91; EXPRESSED IN FETAL LIVER, SIGNAL = 0.71; EXPRESSED IN BRAIN, SIGNAL = 0.96; SWISSPROT HIT: P27153, EVALUE 2.10e+00
YLPYRTRVVCSHRFQKQMACAKECMYELALGITSAPGIKEIRRRAKLKLGNRPM

SEQ ID NO: 29073 - protein, 62 aa, Homo sapiens
  MAP TO CHR7.1; EXPRESSED IN BONE MARROW, SIGNAL = 1.4; EXPRESSED IN PLACENTA, SIGNAL = 1.2; EXPRESSED IN FETAL LIVER, SIGNAL = 1.3; EXPRESSED IN HELA, SIGNAL =   2; EXPRESSED IN LUNG, SIGNAL = 0.63; EXPRESSED IN BRAIN, SIGNAL = 1.5; EXPRESSED IN HEART, SIGNAL = 0.85; SWISSPROT HIT: Q99996, EVALUE 2.00e-28
FKNDLRLQMEAQRICLSLVYSTHVDQVREYMENEKDKALCSLKEELIFAQEEKIKELQKIHQ

SEQ ID NO: 29074 - protein, 63 aa, Homo sapiens
  MAP TO CHR19.1; EXPRESSED IN LUNG, SIGNAL = 0.93; EXPRESSED IN HELA, SIGNAL = 0.69; EXPRESSED IN BRAIN, SIGNAL = 0.63; EXPRESSED IN HEART, SIGNAL = 0.84; EXPRESSED IN FETAL LIVER, SIGNAL = 1.2; SWISSPROT HIT: P78329, EVALUE 1.00e-26
SEFPPPSPRNCIGQTFAMAEMKVVLALTLLRFRVLPDHTEPRRKPELVLRAEGGLWLRVEPLS

SEQ ID NO: 29075 - protein, 69 aa, Homo sapiens
  MAP TO CHR6.1; EXPRESSED IN FETAL LIVER, SIGNAL = 4.6; EXPRESSED IN HELA, SIGNAL = 4.5; EXPRESSED IN BRAIN, SIGNAL = 5.8; EXPRESSED IN LUNG, SIGNAL = 4.4; EXPRESSED IN HEART, SIGNAL = 4.8; EXPRESSED IN BONE MARROW, SIGNAL = 5.7; EXPRESSED IN ADULT LIVER, SIGNAL =   7; EXPRESSED IN PLACENTA, SIGNAL = 6.4
LSPGRDTHWAGPCRWPRSGKAWTHMGSRDPGTGCLGIQGGSGRNRRGRCRHRGLHCGKGKRRLCLGRET

SEQ ID NO: 29076 - protein, 46 aa, Homo sapiens
  MAP TO CHR12.1; EXPRESSED IN BONE MARROW, SIGNAL = 4.5; EXPRESSED IN FETAL LIVER, SIGNAL = 3.9; EXPRESSED IN LUNG, SIGNAL = 3.4; EXPRESSED IN HELA, SIGNAL = 6.8; EXPRESSED IN BRAIN, SIGNAL = 4.9; EXPRESSED IN HEART, SIGNAL = 2.7; EXPRESSED IN ADULT LIVER, SIGNAL = 4.9; SWISSPROT HIT: P75616, EVALUE 3.70e+00
PQRPGHCHGDEPPVHHPASLPGWYYGLGDDHHGDSGAGLRCVTPSL

SEQ ID NO: 29077 - protein, 98 aa, Homo sapiens
  MAP TO CHR9.1; EXPRESSED IN BRAIN, SIGNAL = 4.7; EXPRESSED IN HEART, SIGNAL = 2.5; EXPRESSED IN ADULT LIVER, SIGNAL = 4.5; EXPRESSED IN BONE MARROW, SIGNAL = 3.6; EXPRESSED IN FETAL LIVER, SIGNAL = 3.7; EXPRESSED IN LUNG, SIGNAL = 2.7; SWISSPROT HIT: O15287, EVALUE 3.00e-34
DGGSCLSRHCFFFPLQFSPPPSPPGPCMPEVFLEAAVALIQAGRAQDALTLCEELLSRTSSLLPKMSRLWEDARKGTKELPYCPLWVSATHLLQGQAW

SEQ ID NO: 29078 - protein, 74 aa, Homo sapiens
  MAP TO CHR17.1; EXPRESSED IN HEART, SIGNAL = 4.1; EXPRESSED IN ADULT LIVER, SIGNAL =   5; EXPRESSED IN FETAL LIVER, SIGNAL = 3.3; EXPRESSED IN LUNG, SIGNAL = 3.4; EXPRESSED IN PLACENTA, SIGNAL =   6; EXPRESSED IN HELA, SIGNAL = 3.9; EXPRESSED IN BRAIN, SIGNAL =   4
GSWKHEKSRRALKWREEQRKECYAKDDSEKDSDTGDDQPDILEPPEVAAARESIAALVDEQKQLRKQKVSRVWG

SEQ ID NO: 29079 - protein, 71 aa, Homo sapiens
  MAP TO CHR7.1; EXPRESSED IN BRAIN, SIGNAL = 3.3; EXPRESSED IN HEART, SIGNAL = 2.6; EXPRESSED IN ADULT LIVER, SIGNAL = 2.6; EXPRESSED IN BONE MARROW, SIGNAL = 3.9; EXPRESSED IN PLACENTA, SIGNAL = 2.6; EXPRESSED IN FETAL LIVER, SIGNAL = 2.5; EXPRESSED IN LUNG, SIGNAL = 1.7; SWISSPROT HIT: P36924, EVALUE 1.50e+00
LLTDALKIPLRISVGEIEPSNYGSDDLECENTICALNIRKQTSWDDFSKAVSQALTNHFQAISSDGWWSLE

SEQ ID NO: 29080 - protein, 75 aa, Homo sapiens
  MAP TO CHR7.1; EXPRESSED IN PLACENTA, SIGNAL =  43; EXPRESSED IN FETAL LIVER, SIGNAL =  12; EXPRESSED IN LUNG, SIGNAL =  21; EXPRESSED IN BRAIN, SIGNAL = 4.6; EXPRESSED IN HEART, SIGNAL =  15; SWISSPROT HIT: P08526, EVALUE 4.00e-26
PYSHALVAGIDRCPHKVTAAMGKKKISKRSKIKSFVKVYNHNQLMPTRYSVDIPLDKTVINKDVFRDPTLKHKAR

SEQ ID NO: 29081 - protein, 142 aa, Homo sapiens
  MAP TO CHR17.1; EXPRESSED IN FETAL LIVER, SIGNAL = 0.84; EXPRESSED IN HELA, SIGNAL = 0.97; EXPRESSED IN BRAIN, SIGNAL = 0.99; EXPRESSED IN BONE MARROW, SIGNAL = 1.1; EXPRESSED IN HEART, SIGNAL = 0.67; SWISSPROT HIT: P30953, EVALUE 4.00e-77
HTLLMARLCFCADNVIPHFFCDMSALLKLAFSDTRVNEWVIFIMGGLILVIPFLLILGSYARIVSSILKVPSSKGICKAFSTCGSHLSVVSLFYGTVIGLYLCSSANSSTLKDTVMAMMYTVVTPMLNPFIYSLRNRDMKGA

SEQ ID NO: 29082 - protein, 78 aa, Homo sapiens
  MAP TO CHR1.1; EXPRESSED IN HELA, SIGNAL = 2.3; EXPRESSED IN BRAIN, SIGNAL = 1.7; EXPRESSED IN HEART, SIGNAL = 1.2; EXPRESSED IN BONE MARROW, SIGNAL = 1.5; EXPRESSED IN ADULT LIVER, SIGNAL = 1.5; EXPRESSED IN FETAL LIVER, SIGNAL = 1.8; EXPRESSED IN LUNG, SIGNAL = 1.4; SWISSPROT HIT: P41162, EVALUE 5.00e-41
GLAFPDWAYKAESSPGSRQIQLWHFILELLQKEEFRHVIAWQQGEYGEFVIKDPDEVARLWGRRKCKPQMNYDKLSRA

SEQ ID NO: 29083 - protein, 49 aa, Homo sapiens
  MAP TO CHR2.1; EXPRESSED IN FETAL LIVER, SIGNAL = 0.62; EXPRESSED IN LUNG, SIGNAL = 0.9; EXPRESSED IN BRAIN, SIGNAL = 0.49; EXPRESSED IN HEART, SIGNAL = 0.84; EXPRESSED IN BONE MARROW, SIGNAL = 0.55; SWISSPROT HIT: P20662, EVALUE 4.80e+00
ESPSPVLSCFHIFPCRLRTRKRHFQQGCQLQKKLMPTRKMSFEQLKRCV

SEQ ID NO: 29084 - protein, 62 aa, Homo sapiens
  MAP TO CHR19.1; EXPRESSED IN HEART, SIGNAL = 1.9; EXPRESSED IN BONE MARROW, SIGNAL = 2.5; EXPRESSED IN ADULT LIVER, SIGNAL = 4.5; EXPRESSED IN FETAL LIVER, SIGNAL = 2.1; EXPRESSED IN LUNG, SIGNAL = 1.7; EXPRESSED IN BRAIN, SIGNAL = 2.8
SLFESSLLRRGFLLQRGAVEAAEEVYHACSAGPGHGEARRRGADPGGGPVSGGDIPGDRRSA

SEQ ID NO: 29085 - protein, 73 aa, Homo sapiens
  MAP TO CHR17.1; EXPRESSED IN LUNG, SIGNAL = 0.72; EXPRESSED IN HELA, SIGNAL = 2.8; EXPRESSED IN BRAIN, SIGNAL = 1.4; EXPRESSED IN HEART, SIGNAL = 0.68; EXPRESSED IN ADULT LIVER, SIGNAL = 1.3; EXPRESSED IN BONE MARROW, SIGNAL = 1.4; EXPRESSED IN FETAL LIVER, SIGNAL = 1.3; SWISSPROT HIT: P35240, EVALUE 6.90e-01
LQEKYKTELCTKQALLAELEEQKIVQAKLKQTLTFFDELHNVGRDHGTSDFRESLVSLVQNSRKLQNIRDNVE

SEQ ID NO: 29086 - protein, 74 aa, Homo sapiens
  MAP TO CHR4.1; EXPRESSED IN FETAL LIVER, SIGNAL = 0.76; EXPRESSED IN BRAIN, SIGNAL = 0.68; EXPRESSED IN HEART, SIGNAL = 0.5; EXPRESSED IN ADULT LIVER, SIGNAL =   1; EXPRESSED IN BONE MARROW, SIGNAL = 0.73; SWISSPROT HIT: P41823, EVALUE 2.00e-04
TYVKLTLRKSTDQEMSKCKISIRRGRPNPVYKETFVFKVTLFQLSHVTLMLSVYNKSSMRRKMIGWIYLGLNSS

SEQ ID NO: 29087 - protein, 67 aa, Homo sapiens
  MAP TO CHR6.1; EXPRESSED IN PLACENTA, SIGNAL = 2.8; EXPRESSED IN FETAL LIVER, SIGNAL = 3.7; EXPRESSED IN LUNG, SIGNAL = 2.6; EXPRESSED IN HELA, SIGNAL = 3.1; EXPRESSED IN BRAIN, SIGNAL = 4.8; EXPRESSED IN HEART, SIGNAL = 2.7; EXPRESSED IN ADULT LIVER, SIGNAL = 4.6; EXPRESSED IN BONE MARROW, SIGNAL =   4; SWISSPROT HIT: P04289, EVALUE 9.20e-01
PNCASSSRKRSVSLNCAINSSLGSSSAPGATHRHPQNPLGACPGDPLSPPTGLAVMGVECICFISEG

SEQ ID NO: 29088 - protein, 48 aa, Homo sapiens
  MAP TO CHR19.1; EXPRESSED IN BRAIN, SIGNAL = 1.2; EXPRESSED IN HEART, SIGNAL = 1.2; EXPRESSED IN FETAL LIVER, SIGNAL = 0.85; EXPRESSED IN LUNG, SIGNAL = 1.2
PPAQASSTCARSSSPRWTRPCTRRRTQTPPRSMRGSARRSSGSRPRQV

SEQ ID NO: 29089 - protein, 144 aa, Homo sapiens
  MAP TO CHR9.1; EXPRESSED IN BONE MARROW, SIGNAL = 3.8; EXPRESSED IN FETAL LIVER, SIGNAL = 3.1; EXPRESSED IN LUNG, SIGNAL = 1.6; EXPRESSED IN HELA, SIGNAL = 3.6; EXPRESSED IN BRAIN, SIGNAL = 3.5; EXPRESSED IN ADULT LIVER, SIGNAL = 2.6; EXPRESSED IN HEART, SIGNAL = 1.7; SWISSPROT HIT: Q9NQN1, EVALUE 1.00e-65
PFCGDNVINHFTCEILAVLKLACADICINVISMVVTNMIFLALPVLFIFVSYVFIIATILRIPSAEGRKKAFSTCSAHLTVVIVFYGMILFMYGKPKSKDPMGADKQDLADKLISIFYGVVTPILNPIIYSPRNKDLKAAMRNL

SEQ ID NO: 29090 - protein, 49 aa, Homo sapiens
  MAP TO CHR19.1; EXPRESSED IN PLACENTA, SIGNAL = 5.3; EXPRESSED IN LUNG, SIGNAL = 3.4; EXPRESSED IN HELA, SIGNAL = 4.4; EXPRESSED IN BRAIN, SIGNAL = 4.6; EXPRESSED IN HEART, SIGNAL = 3.5; EXPRESSED IN ADULT LIVER, SIGNAL = 4.3; EXPRESSED IN BONE MARROW, SIGNAL = 6.5; SWISSPROT HIT: P27178, EVALUE 6.30e+00
LQPAVCIFGVPVCVYLPCMCLRLYLSGTSVLVFVFPSAPSPRMWGKLLF

SEQ ID NO: 29091 - protein, 61 aa, Homo sapiens
  MAP TO CHR14.1; EXPRESSED IN BRAIN, SIGNAL = 4.4; EXPRESSED IN ADULT LIVER, SIGNAL = 6.3; EXPRESSED IN BONE MARROW, SIGNAL = 3.5; EXPRESSED IN PLACENTA, SIGNAL = 5.8; EXPRESSED IN LUNG, SIGNAL = 2.7; EXPRESSED IN HELA, SIGNAL =   5; SWISSPROT HIT: P04437, EVALUE 1.00e-13
GVSGQQKEKSDQQQVKQSPQSLIVQKGGISIINCAYENTAFDYFPWYQQFPGKGPALLIAI

SEQ ID NO: 29092 - protein, 90 aa, Homo sapiens
  MAP TO CHR17.1; EXPRESSED IN HELA, SIGNAL = 7.3; EXPRESSED IN BRAIN, SIGNAL = 6.1; EXPRESSED IN LUNG, SIGNAL = 3.3; EXPRESSED IN HEART, SIGNAL = 3.2; EXPRESSED IN BONE MARROW, SIGNAL = 6.3; EXPRESSED IN ADULT LIVER, SIGNAL = 4.9; EXPRESSED IN PLACENTA, SIGNAL = 7.3; EXPRESSED IN FETAL LIVER, SIGNAL = 6.5; SWISSPROT HIT: P26508, EVALUE 1.90e+00
NSRQLALGLCLLGERVLPLCDAPHLPRHEGQIAQGLHSDIDVHHLPQTLPLPDIKGHHRGGVVLDPQDVPRFTVHSHHQPITIGHKVGHL

SEQ ID NO: 29093 - protein, 56 aa, Homo sapiens
  MAP TO CHR19.1; EXPRESSED IN ADULT LIVER, SIGNAL = 5.8; EXPRESSED IN BONE MARROW, SIGNAL = 4.6; EXPRESSED IN PLACENTA, SIGNAL = 6.8; EXPRESSED IN FETAL LIVER, SIGNAL = 3.8; EXPRESSED IN LUNG, SIGNAL = 2.4; EXPRESSED IN BRAIN, SIGNAL = 5.3; EXPRESSED IN HEART, SIGNAL = 2.3
APGSHHLPLGTCLAPASGCRLRDGAGAAGRAGAKVSGAEPQLQGEVVLGEGVLRQC

SEQ ID NO: 29094 - protein, 76 aa, Homo sapiens
  MAP TO CHR7.1; EXPRESSED IN ADULT LIVER, SIGNAL = 2.8; EXPRESSED IN PLACENTA, SIGNAL = 4.5; EXPRESSED IN FETAL LIVER, SIGNAL = 3.4; EXPRESSED IN HELA, SIGNAL = 4.4; EXPRESSED IN BRAIN, SIGNAL = 3.9; EXPRESSED IN HEART, SIGNAL = 1.9; EXPRESSED IN BONE MARROW, SIGNAL = 4.4; SWISSPROT HIT: Q14168, EVALUE 1.00e-24
VTSRKPREDEKDGQAYKFVSRSEMEADIKAGKYLEHGEYEGNLYGTKIDSILEVVQTGRTCILDVNPQVSCLDSKA

SEQ ID NO: 29095 - protein, 81 aa, Homo sapiens
  MAP TO CHR19.1; EXPRESSED IN FETAL LIVER, SIGNAL = 2.2; EXPRESSED IN LUNG, SIGNAL = 1.2; EXPRESSED IN HELA, SIGNAL = 1.4; EXPRESSED IN BRAIN, SIGNAL =   3; EXPRESSED IN HEART, SIGNAL = 2.1; EXPRESSED IN ADULT LIVER, SIGNAL = 1.5; EXPRESSED IN BONE MARROW, SIGNAL = 1.2
RLTFVHYLNVDLLDDAGVVLVVFEEEQAVDVALVVARVVVGDIGDEDRQILQVFGAPAAIPHHAALEALILLQLQHLILIA

SEQ ID NO: 29096 - protein, 48 aa, Homo sapiens
  MAP TO CHR20.1; EXPRESSED IN BRAIN, SIGNAL = 0.64; EXPRESSED IN HEART, SIGNAL = 1.7; EXPRESSED IN BONE MARROW, SIGNAL = 0.52; EXPRESSED IN ADULT LIVER, SIGNAL = 2.3; EXPRESSED IN LUNG, SIGNAL = 1.4; EXPRESSED IN HELA, SIGNAL = 0.79; SWISSPROT HIT: Q26998, EVALUE 3.00e-08
SLPSPQITGVSILRAGETMEPALRAVCKDVRIGTILIQTNQLTGEPEV

SEQ ID NO: 29097 - protein, 67 aa, Homo sapiens
  MAP TO CHR17.1; EXPRESSED IN HELA, SIGNAL = 1.7; EXPRESSED IN BRAIN, SIGNAL = 1.3; EXPRESSED IN HEART, SIGNAL = 1.3; EXPRESSED IN ADULT LIVER, SIGNAL =   2; EXPRESSED IN BONE MARROW, SIGNAL = 1.3; EXPRESSED IN FETAL LIVER, SIGNAL =   1; EXPRESSED IN LUNG, SIGNAL = 1.1
APTLCTQSLQSWSCMHLSSAPGDSTNTKLRAPMTLWMSLSSNLPASSFSTSMKTLKPCSCRCTFRRL

SEQ ID NO: 29098 - protein, 48 aa, Homo sapiens
  MAP TO CHR22.1; EXPRESSED IN FETAL LIVER, SIGNAL = 0.59; EXPRESSED IN HELA, SIGNAL = 0.42; EXPRESSED IN BRAIN, SIGNAL = 0.77; EXPRESSED IN BONE MARROW, SIGNAL = 0.77; EXPRESSED IN HEART, SIGNAL = 0.54; EXPRESSED IN ADULT LIVER, SIGNAL = 0.67
PAGHCAALPVWQGHVSREGRLHYVCLPEAAAHVPHGDAGDDQPHPVHR

SEQ ID NO: 29099 - protein, 58 aa, Homo sapiens
  MAP TO CHR7.1; EXPRESSED IN BRAIN, SIGNAL = 0.95; EXPRESSED IN HEART, SIGNAL =   1; EXPRESSED IN BONE MARROW, SIGNAL = 0.8; EXPRESSED IN HELA, SIGNAL = 0.82; SWISSPROT HIT: Q9ZDC2, EVALUE 8.00e+00
VHKSQLAFCMNAHHFNKSIPKSMIRHSYNTTKKTALLGHIINSTGIYTRQYPISFSGI

SEQ ID NO: 29100 - protein, 110 aa, Homo sapiens
  MAP TO CHR15.1; EXPRESSED IN LUNG, SIGNAL = 0.7; EXPRESSED IN BRAIN, SIGNAL = 0.46; EXPRESSED IN HEART, SIGNAL = 0.64; EXPRESSED IN BONE MARROW, SIGNAL = 0.5; EXPRESSED IN ADULT LIVER, SIGNAL = 0.72; SWISSPROT HIT: P38282, EVALUE 8.00e+00
TSSLRMESHSRAGKSRKSAKFRSISRSLMLCNAKTSDDGSSPDEKYPDPFEISLAQGKEGIFHSSVQLADTSEAGPSSVPDLALASEAAQLQAAGNDRGKTCRRIFFMKV

SEQ ID NO: 29101 - protein, 70 aa, Homo sapiens
  MAP TO CHR15.1; EXPRESSED IN PLACENTA, SIGNAL = 7.6; EXPRESSED IN FETAL LIVER, SIGNAL =  10; EXPRESSED IN LUNG, SIGNAL = 6.9; EXPRESSED IN HELA, SIGNAL = 5.8; EXPRESSED IN BRAIN, SIGNAL =  10; EXPRESSED IN HEART, SIGNAL = 8.1; EXPRESSED IN ADULT LIVER, SIGNAL =  12; SWISSPROT HIT: P30957, EVALUE 9.00e-12
QVTEEPLEEETEDVANLWNSFNDEEEEEAMVFFVLQESTGYMAPTLRALAIIHTIISLVCVVGYYCLKVS

SEQ ID NO: 29102 - protein, 91 aa, Homo sapiens
  MAP TO CHR14.1; EXPRESSED IN HEART, SIGNAL = 2.1; EXPRESSED IN ADULT LIVER, SIGNAL = 4.7; EXPRESSED IN PLACENTA, SIGNAL = 5.8; EXPRESSED IN LUNG, SIGNAL = 2.6; EXPRESSED IN HELA, SIGNAL = 5.7; EXPRESSED IN FETAL LIVER, SIGNAL = 4.1; EXPRESSED IN BRAIN, SIGNAL = 4.5; SWISSPROT HIT: P49606, EVALUE 6.80e+00
TKARSYSYPHCTGISQQDPESDSQGQGNGLFYSSGPQSWYPKANNQDFIPFTKKRVGVDRAFPLKPMVHRKSCSTGEAGTDGDHNVYPRPP

SEQ ID NO: 29103 - protein, 86 aa, Homo sapiens
  MAP TO CHR11.1; EXPRESSED IN HELA, SIGNAL = 0.96; EXPRESSED IN LUNG, SIGNAL = 1.9; EXPRESSED IN BRAIN, SIGNAL = 1.4; EXPRESSED IN HEART, SIGNAL = 1.8; EXPRESSED IN BONE MARROW, SIGNAL = 1.7; EXPRESSED IN ADULT LIVER, SIGNAL = 1.9; EXPRESSED IN FETAL LIVER, SIGNAL = 1.2; SWISSPROT HIT: O00327, EVALUE 3.00e-45
CFLADRKSFCTIHSTGYLKSWPPTKMGLDEDNEPDNEGCNLSCLVAIGRLHSHVVPQPVNGEIRVKSMEYVSRHAIDGKFVFVDQR

SEQ ID NO: 29104 - protein, 67 aa, Homo sapiens
  MAP TO CHR19.1; EXPRESSED IN BONE MARROW, SIGNAL = 0.84; EXPRESSED IN LUNG, SIGNAL = 0.72; EXPRESSED IN HELA, SIGNAL = 0.78; EXPRESSED IN BRAIN, SIGNAL = 0.96; EXPRESSED IN HEART, SIGNAL = 0.9; SWISSPROT HIT: P20484, EVALUE 2.00e+00
LVSFLFHRKAEAVYPDTVALTFDPIHQWLSCVYKDHSIYIWDVKDINRVGKVWSELFHSSYVWNVEV

SEQ ID NO: 29105 - protein, 142 aa, Homo sapiens
  MAP TO CHR1.1; EXPRESSED IN BRAIN, SIGNAL = 0.7; EXPRESSED IN HEART, SIGNAL = 0.83; EXPRESSED IN BONE MARROW, SIGNAL = 0.87; SWISSPROT HIT: O43869, EVALUE 1.00e-37
YVFQLPFCRSRLINHFFCEVPALLSLVCQDTSQYEYTVLLSGLIILLLPFLAILASYARVLIVVFQMSSGKGQAKAVSTCSSHLIVASLFYATTLFTYTRPHSLRSPSRDKAVAVFYTIVTPLLNPFIYSLRNKEVTGAVRR

SEQ ID NO: 29106 - protein, 46 aa, Homo sapiens
  MAP TO CHR17.1; EXPRESSED IN PLACENTA, SIGNAL = 1.5; EXPRESSED IN FETAL LIVER, SIGNAL = 1.2; EXPRESSED IN HELA, SIGNAL =   3; EXPRESSED IN BRAIN, SIGNAL = 1.5; EXPRESSED IN LUNG, SIGNAL = 2.8; EXPRESSED IN HEART, SIGNAL = 1.1; EXPRESSED IN ADULT LIVER, SIGNAL =   1; EXPRESSED IN BONE MARROW, SIGNAL = 1.4; SWISSPROT HIT: P30838, EVALUE 4.00e-21
GNSGMGSYHGKKSFETFSHRRSCLVRPLMNDEGLKVRYPPSPAKVR

SEQ ID NO: 29107 - protein, 53 aa, Homo sapiens
  MAP TO CHR11.1; EXPRESSED IN ADULT LIVER, SIGNAL = 1.3; EXPRESSED IN BONE MARROW, SIGNAL = 1.6; EXPRESSED IN PLACENTA, SIGNAL = 1.3; EXPRESSED IN LUNG, SIGNAL = 2.1; EXPRESSED IN FETAL LIVER, SIGNAL = 1.3; EXPRESSED IN HELA, SIGNAL = 1.1; EXPRESSED IN BRAIN, SIGNAL = 1.6; SWISSPROT HIT: O00327, EVALUE 2.00e-24
FSVLQTREKITTNCYKFKIKDGSFITLRSRWFSFMNPWTKEVEYIVSTNTVVL

SEQ ID NO: 29108 - protein, 53 aa, Homo sapiens
  MAP TO CHR19.1; EXPRESSED IN FETAL LIVER, SIGNAL = 0.54; EXPRESSED IN LUNG, SIGNAL = 0.92; EXPRESSED IN HELA, SIGNAL = 0.85; EXPRESSED IN BRAIN, SIGNAL = 0.79; EXPRESSED IN BONE MARROW, SIGNAL = 0.58; EXPRESSED IN HEART, SIGNAL = 0.96; EXPRESSED IN ADULT LIVER, SIGNAL = 0.72; SWISSPROT HIT: P51697, EVALUE 2.10e+00
ATALKMNMNLRELYLADNKLNGLQDSAQLGNLLKFNCSLQILDLRNNHVLDSG

SEQ ID NO: 29109 - protein, 52 aa, Homo sapiens
  MAP TO CHR7.1; EXPRESSED IN HELA, SIGNAL = 0.72; EXPRESSED IN BRAIN, SIGNAL = 0.97; EXPRESSED IN HEART, SIGNAL =   1; EXPRESSED IN ADULT LIVER, SIGNAL = 0.59; EXPRESSED IN BONE MARROW, SIGNAL = 0.85; EXPRESSED IN FETAL LIVER, SIGNAL = 0.82; EXPRESSED IN LUNG, SIGNAL = 0.64
FIYSSIECKELQGSYVDNTCILNPIYAVFHEQLSRQMKEFNFCSNENIIDTF

SEQ ID NO: 29110 - protein, 75 aa, Homo sapiens
  MAP TO CHR11.1; EXPRESSED IN FETAL LIVER, SIGNAL = 1.4; EXPRESSED IN LUNG, SIGNAL = 2.6; EXPRESSED IN HELA, SIGNAL = 0.88; EXPRESSED IN BRAIN, SIGNAL = 1.2; EXPRESSED IN HEART, SIGNAL = 2.7; EXPRESSED IN BONE MARROW, SIGNAL = 1.2; SWISSPROT HIT: P39766, EVALUE 7.10e+00
FYDYFILRGIDLKVNTALLCRLWVLHVCFQSSSVRKLGVGWQDGLIPMMVTPVIQRIGIGNCIVDLVNFINIQGR

SEQ ID NO: 29111 - protein, 73 aa, Homo sapiens
  MAP TO CHR19.1; EXPRESSED IN BRAIN, SIGNAL = 1.3; EXPRESSED IN PLACENTA, SIGNAL = 1.3; EXPRESSED IN HELA, SIGNAL = 1.6; EXPRESSED IN HEART, SIGNAL = 1.4; EXPRESSED IN BONE MARROW, SIGNAL = 1.3; EXPRESSED IN ADULT LIVER, SIGNAL = 0.84; EXPRESSED IN LUNG, SIGNAL = 2.1; EXPRESSED IN FETAL LIVER, SIGNAL = 1.5; SWISSPROT HIT: P17098, EVALUE 2.00e-03
EFILVRNLMNVRNVGRPLVVAQILLDIREFILVKNPMNVMNVERPLVSDHILLNIREFTLVKNLMNVRSVGKL

SEQ ID NO: 29112 - protein, 48 aa, Homo sapiens
  MAP TO CHR7.1; EXPRESSED IN PLACENTA, SIGNAL = 1.4; EXPRESSED IN FETAL LIVER, SIGNAL = 1.8; EXPRESSED IN LUNG, SIGNAL = 2.9; EXPRESSED IN HELA, SIGNAL = 1.4; EXPRESSED IN BRAIN, SIGNAL = 1.6; EXPRESSED IN HEART, SIGNAL = 2.7; EXPRESSED IN BONE MARROW, SIGNAL = 1.6
CHGFLQMFYNQLKANVPFELFNLFLKSLSHYFLEQMLLQDPAQSNREW

SEQ ID NO: 29113 - protein, 56 aa, Homo sapiens
  MAP TO CHR5.1; EXPRESSED IN HEART, SIGNAL = 2.4; EXPRESSED IN BONE MARROW, SIGNAL = 3.9; EXPRESSED IN ADULT LIVER, SIGNAL = 3.5; EXPRESSED IN PLACENTA, SIGNAL = 4.3; EXPRESSED IN HELA, SIGNAL = 5.2; EXPRESSED IN FETAL LIVER, SIGNAL = 3.4; EXPRESSED IN BRAIN, SIGNAL = 4.6; SWISSPROT HIT: Q63003, EVALUE 9.50e-01
PGSRLSPFYPLPNQKELTTTVQQGEGGGRWGVCLRGREHPGEGHRSGAGFTSTAVG

SEQ ID NO: 29114 - protein, 56 aa, Homo sapiens
  MAP TO CHR1.1; EXPRESSED IN FETAL LIVER, SIGNAL =  60; EXPRESSED IN LUNG, SIGNAL =  62; EXPRESSED IN BRAIN, SIGNAL =  24; EXPRESSED IN HEART, SIGNAL =  37; EXPRESSED IN BONE MARROW, SIGNAL =  30
PSSSCMPAKMSLCWSGRMPSLSWILAFTFSMVSLGSTSRVMVLPVRVFTKICILTC

SEQ ID NO: 29115 - protein, 73 aa, Homo sapiens
  MAP TO CHR17.1; EXPRESSED IN PLACENTA, SIGNAL = 3.7; EXPRESSED IN FETAL LIVER, SIGNAL = 3.7; EXPRESSED IN HELA, SIGNAL = 3.7; EXPRESSED IN BRAIN, SIGNAL = 4.5; EXPRESSED IN LUNG, SIGNAL = 4.2; EXPRESSED IN HEART, SIGNAL = 4.6; EXPRESSED IN ADULT LIVER, SIGNAL = 2.9; SWISSPROT HIT: P26270, EVALUE 7.40e+00
ETLNTPTGCQLLWGGPGPRLWVIWQCPRRLVKRWELRHCLRLQVKGLSLRQVKRHDLGCGQVRGCIRLLLGLR

SEQ ID NO: 29116 - protein, 136 aa, Homo sapiens
  MAP TO CHR10.1; EXPRESSED IN BRAIN, SIGNAL = 2.4; EXPRESSED IN BONE MARROW, SIGNAL = 2.1; EXPRESSED IN PLACENTA, SIGNAL =   3; EXPRESSED IN LUNG, SIGNAL = 1.1; EXPRESSED IN HELA, SIGNAL = 3.1; EXPRESSED IN HEART, SIGNAL = 1.7; EXPRESSED IN ADULT LIVER, SIGNAL = 2.5; EXPRESSED IN FETAL LIVER, SIGNAL = 2.6; SWISSPROT HIT: O57383, EVALUE 3.00e-11
QAWFPALPAVPSVGPGFLTDDLVSQEENGQQQKYLGVCRLPGPGRRHRRLDIIVVPYSEFACALLYFTGSAHFNRSMRALAKTKGMSLSEHALSTAVVRNTHGCKVGPGRVLPTPTEKDVFRLLGLPYREPAERDW

SEQ ID NO: 29117 - protein, 40 aa, Homo sapiens
  MAP TO CHR19.1; EXPRESSED IN ADULT LIVER, SIGNAL = 4.3; EXPRESSED IN BONE MARROW, SIGNAL = 4.4; EXPRESSED IN PLACENTA, SIGNAL = 3.9; EXPRESSED IN HELA, SIGNAL = 4.3; EXPRESSED IN FETAL LIVER, SIGNAL = 4.1; EXPRESSED IN LUNG, SIGNAL = 2.5; EXPRESSED IN BRAIN, SIGNAL = 4.7; EXPRESSED IN HEART, SIGNAL = 3.1
THPVVSQHIEDVAQKHEGAGCEPVQVLSIGHLQSFPQKSP

SEQ ID NO: 29118 - protein, 51 aa, Homo sapiens
  MAP TO CHR4.1; EXPRESSED IN FETAL LIVER, SIGNAL = 1.1; EXPRESSED IN LUNG, SIGNAL = 1.6; EXPRESSED IN HELA, SIGNAL = 1.5; EXPRESSED IN BRAIN, SIGNAL = 1.3; EXPRESSED IN BONE MARROW, SIGNAL = 1.1; EXPRESSED IN ADULT LIVER, SIGNAL = 0.94; EXPRESSED IN PLACENTA, SIGNAL = 1.3; SWISSPROT HIT: P39028, EVALUE 4.00e-17
LGTALKANSFKGASNAKGIMLEKVEVEAKQPNSAFRKCFRVQLIKNSKKIT

SEQ ID NO: 29119 - protein, 50 aa, Homo sapiens
  MAP TO CHR9.1; EXPRESSED IN FETAL LIVER, SIGNAL = 1.7; EXPRESSED IN LUNG, SIGNAL = 2.3; EXPRESSED IN HELA, SIGNAL = 1.4; EXPRESSED IN BRAIN, SIGNAL = 1.3; EXPRESSED IN HEART, SIGNAL = 2.1; EXPRESSED IN BONE MARROW, SIGNAL = 1.1; EXPRESSED IN ADULT LIVER, SIGNAL = 1.6
GRRFHHSLTDHPRWIRERSHESYAKNYSVVFPHDEPLAGRNMRRDPLHEV

SEQ ID NO: 29120 - protein, 84 aa, Homo sapiens
  MAP TO CHR2.1; EXPRESSED IN FETAL LIVER, SIGNAL = 3.2; EXPRESSED IN LUNG, SIGNAL = 2.9; EXPRESSED IN BRAIN, SIGNAL = 2.1; EXPRESSED IN HEART, SIGNAL = 1.9; EXPRESSED IN BONE MARROW, SIGNAL = 2.6; EXPRESSED IN ADULT LIVER, SIGNAL = 2.8; SWISSPROT HIT: Q9D8N0, EVALUE 1.60e+00
HTPFSPPIRWTSSTTKRLMFCTFLRCFHRRESMSHFSGVLMIMFPLPSSFRSVLVSPVRSTTFLLSLSWNFSYQSMYTWRAEEG

SEQ ID NO: 29121 - protein, 69 aa, Homo sapiens
  MAP TO CHR11.1; EXPRESSED IN LUNG, SIGNAL = 3.2; EXPRESSED IN HELA, SIGNAL = 2.6; EXPRESSED IN BRAIN, SIGNAL = 2.3; EXPRESSED IN HEART, SIGNAL = 2.8; EXPRESSED IN BONE MARROW, SIGNAL = 2.3; EXPRESSED IN ADULT LIVER, SIGNAL = 1.8; EXPRESSED IN FETAL LIVER, SIGNAL = 2.3; EXPRESSED IN PLACENTA, SIGNAL = 2.7
PVSSPPSAVPGRRMPAAQPAPARSCTRTPPACTTLTGTTAARWSPPASATSSRTPVSMSAHPTWGPGSS

SEQ ID NO: 29122 - protein, 67 aa, Homo sapiens
  MAP TO CHR16.1; EXPRESSED IN BONE MARROW, SIGNAL = 0.68; EXPRESSED IN FETAL LIVER, SIGNAL = 0.9; EXPRESSED IN LUNG, SIGNAL = 1.2; EXPRESSED IN BRAIN, SIGNAL = 0.65; EXPRESSED IN HEART, SIGNAL = 1.1; SWISSPROT HIT: P26337, EVALUE 3.00e+00
SEKPCHMDRLDRILLSGIYNVRKGKTQLHKWAERLVVLCGTCLIVSSVKDCQTGKMHILPLVGGKVR

SEQ ID NO: 29123 - protein, 40 aa, Homo sapiens
  MAP TO CHR7.1; EXPRESSED IN LUNG, SIGNAL = 2.1; EXPRESSED IN BRAIN, SIGNAL = 1.8; EXPRESSED IN HEART, SIGNAL = 1.3; EXPRESSED IN ADULT LIVER, SIGNAL = 2.4; EXPRESSED IN PLACENTA, SIGNAL = 1.4; EXPRESSED IN FETAL LIVER, SIGNAL = 3.2
SLLRGAACCKCLYSFLLLVLSLSLFCWELLGVRHTALYPF

SEQ ID NO: 29124 - protein, 67 aa, Homo sapiens
  MAP TO CHR5.1; EXPRESSED IN FETAL LIVER, SIGNAL = 2.5; EXPRESSED IN LUNG, SIGNAL = 1.7; EXPRESSED IN HELA, SIGNAL = 3.3; EXPRESSED IN BRAIN, SIGNAL = 2.6; EXPRESSED IN ADULT LIVER, SIGNAL = 1.8; EXPRESSED IN BONE MARROW, SIGNAL = 2.4; EXPRESSED IN HEART, SIGNAL = 1.4
LSLQLACPVLRCLSNLLTEAAVETVGGQMQLRDERVVAALFILLQFFFQKQPSLLPEGLWLLNNLTG

SEQ ID NO: 29125 - protein, 62 aa, Homo sapiens
  MAP TO CHR1.1; EXPRESSED IN BRAIN, SIGNAL = 1.2; EXPRESSED IN ADULT LIVER, SIGNAL = 1.3; SWISSPROT HIT: P24667, EVALUE 6.00e-29
FAKFDYIPCMDDSNLRDLNRKSNQVKTCKAKIELLGSYDPQKQLIIEDPYYGNDSDFEMVYQ

SEQ ID NO: 29126 - protein, 44 aa, Homo sapiens
  MAP TO CHR7.1; EXPRESSED IN BRAIN, SIGNAL = 0.77; EXPRESSED IN BONE MARROW, SIGNAL = 0.87; EXPRESSED IN ADULT LIVER, SIGNAL = 0.99; EXPRESSED IN LUNG, SIGNAL = 1.1; EXPRESSED IN HELA, SIGNAL = 0.85; SWISSPROT HIT: Q13608, EVALUE 8.30e+00
EASPRSIRRAQGAVGRNGDALGVAVLDQFLLREVWVTLNLQQQT

SEQ ID NO: 29127 - protein, 40 aa, Homo sapiens
  MAP TO CHR19.1; EXPRESSED IN LUNG, SIGNAL = 1.1; EXPRESSED IN HELA, SIGNAL = 1.3; EXPRESSED IN BRAIN, SIGNAL = 1.4; EXPRESSED IN HEART, SIGNAL = 1.2; EXPRESSED IN ADULT LIVER, SIGNAL = 1.2; EXPRESSED IN BONE MARROW, SIGNAL = 1.6; EXPRESSED IN PLACENTA, SIGNAL = 1.5; SWISSPROT HIT: Q15928, EVALUE 1.00e-12
FQGSLTFRDVAVEFSQEEWKCLDPVQKALYRDVMLENYRN

SEQ ID NO: 29128 - protein, 52 aa, Homo sapiens
  MAP TO CHR7.1; EXPRESSED IN ADULT LIVER, SIGNAL = 1.7; EXPRESSED IN BONE MARROW, SIGNAL = 1.7; EXPRESSED IN PLACENTA, SIGNAL = 1.6; EXPRESSED IN LUNG, SIGNAL = 1.3; EXPRESSED IN HELA, SIGNAL = 1.7; EXPRESSED IN BRAIN, SIGNAL = 1.7; EXPRESSED IN HEART, SIGNAL = 1.3; SWISSPROT HIT: Q02643, EVALUE 1.60e+00
PGGSLPCVITLSHGSSSGWAIWPPFPALPARSPLGLELFPEHQPTIQGQRDP

SEQ ID NO: 29129 - protein, 73 aa, Homo sapiens
  MAP TO CHR11.1; EXPRESSED IN FETAL LIVER, SIGNAL = 1.2; EXPRESSED IN LUNG, SIGNAL = 2.2; EXPRESSED IN BRAIN, SIGNAL = 0.9; EXPRESSED IN BONE MARROW, SIGNAL = 0.92; EXPRESSED IN HEART, SIGNAL =   2; SWISSPROT HIT: Q99816, EVALUE 4.00e-31
KNNKNRVTEVSISFSGNTYNIPICLWLLDTYPYNPPICFVKPTSSMTIKTGKHVDANGKIYLPYLHEWKHVSI

SEQ ID NO: 29130 - protein, 91 aa, Homo sapiens
  MAP TO CHR11.1; EXPRESSED IN FETAL LIVER, SIGNAL = 0.72; EXPRESSED IN LUNG, SIGNAL = 0.93; EXPRESSED IN HELA, SIGNAL =   1; EXPRESSED IN BRAIN, SIGNAL = 0.78; EXPRESSED IN HEART, SIGNAL = 0.84; EXPRESSED IN BONE MARROW, SIGNAL = 0.83; SWISSPROT HIT: Q15620, EVALUE 1.00e-34
TIFISYGFILSSILHISSKEGRSKAFSTCSSHIIAVSLFFGSGAFMYLNPSSAGSMDKRKLSSVFYTNVVPMLNPLIYSLRNKDVKFALRK

SEQ ID NO: 29131 - protein, 46 aa, Homo sapiens
  MAP TO CHR17.1; EXPRESSED IN FETAL LIVER, SIGNAL = 4.8; EXPRESSED IN LUNG, SIGNAL = 2.2; EXPRESSED IN PLACENTA, SIGNAL = 4.6; EXPRESSED IN BRAIN, SIGNAL = 4.6; EXPRESSED IN HEART, SIGNAL = 2.7; EXPRESSED IN ADULT LIVER, SIGNAL = 6.7; EXPRESSED IN BONE MARROW, SIGNAL = 4.6
IHSPFSPWEELFVSPAGLWGIVFLGGASAGGFLIAVRQTECPGPAT

SEQ ID NO: 29132 - protein, 85 aa, Homo sapiens
  MAP TO AC068936.2; EXPRESSED IN FETAL LIVER, SIGNAL = 0.69; EXPRESSED IN BRAIN, SIGNAL = 0.77; EXPRESSED IN HEART, SIGNAL = 0.66; EXPRESSED IN BONE MARROW, SIGNAL = 0.89
TPTRPTCWPHRRAALWGPARTPESPESRAAAAGAAAPAPWQAARWERSGSSGPHSSQPPPCFLSGLFLRKPGRRGGLPRGTSLRG

SEQ ID NO: 29133 - protein, 65 aa, Homo sapiens
  MAP TO CHR22.1; EXPRESSED IN ADULT LIVER, SIGNAL = 2.3; EXPRESSED IN PLACENTA, SIGNAL = 2.5; EXPRESSED IN FETAL LIVER, SIGNAL = 2.2; EXPRESSED IN LUNG, SIGNAL = 2.4; EXPRESSED IN HELA, SIGNAL = 2.6; EXPRESSED IN BRAIN, SIGNAL = 2.5; EXPRESSED IN HEART, SIGNAL = 1.9; EXPRESSED IN BONE MARROW, SIGNAL = 2.1
AIQSRDRIQLQYSQSLIEKDQYRKQVRGLEAERDELLTTLTSLEGTKALLEVQLQRAQGGTCLKV

SEQ ID NO: 29134 - protein, 50 aa, Homo sapiens
  MAP TO CHR17.1; EXPRESSED IN BONE MARROW, SIGNAL = 1.8; EXPRESSED IN PLACENTA, SIGNAL = 1.3; EXPRESSED IN FETAL LIVER, SIGNAL = 1.6; EXPRESSED IN LUNG, SIGNAL = 1.9; EXPRESSED IN HELA, SIGNAL = 1.9; EXPRESSED IN BRAIN, SIGNAL =   2; EXPRESSED IN ADULT LIVER, SIGNAL = 1.2; EXPRESSED IN HEART, SIGNAL = 1.6
HSPRGTAAVSVPHAATRPPETPASAGGPSPGSDAPGGSAGPAGQTELEEG

SEQ ID NO: 29135 - protein, 135 aa, Homo sapiens
  MAP TO AC002345.1; EXPRESSED IN ADULT LIVER, SIGNAL = 1.5; EXPRESSED IN PLACENTA, SIGNAL = 1.2; EXPRESSED IN LUNG, SIGNAL = 0.93; EXPRESSED IN HELA, SIGNAL = 0.54; EXPRESSED IN BRAIN, SIGNAL = 0.82; EXPRESSED IN HEART, SIGNAL = 0.94
PGPVPGRGCAAGVQAAGAAHPPLDHPALQPLQGRVGLAHPAAGHLHGCLHALLSRLPAQRPGRITAWGPAAIPAVPSLWWISSWTSCSSWTSSSTSAPPMSTPMMRWSATPAASPSTTSRAGSSLTWWPPSLSTS

SEQ ID NO: 29136 - protein, 40 aa, Homo sapiens
  MAP TO CHR6.1; EXPRESSED IN HELA, SIGNAL = 3.1; EXPRESSED IN BRAIN, SIGNAL = 4.7; EXPRESSED IN ADULT LIVER, SIGNAL = 5.9; EXPRESSED IN BONE MARROW, SIGNAL = 4.1; EXPRESSED IN HEART, SIGNAL = 3.5; EXPRESSED IN PLACENTA, SIGNAL = 3.8; EXPRESSED IN FETAL LIVER, SIGNAL = 4.2; EXPRESSED IN LUNG, SIGNAL = 2.6
ATTIRVNSSNQKGLHRASKHCFVFPANHLNNTIVSHINLD

SEQ ID NO: 29137 - protein, 81 aa, Homo sapiens
  MAP TO AC002345.1; EXPRESSED IN BRAIN, SIGNAL = 0.58; EXPRESSED IN BONE MARROW, SIGNAL = 0.59; EXPRESSED IN HEART, SIGNAL = 0.54; EXPRESSED IN FETAL LIVER, SIGNAL = 0.54; SWISSPROT HIT: Q12809, EVALUE 7.00e-30
PTPGRKFLIANAQMENCAIIYCNDGFCELFGYSRVEVMQQPCTCDFLTGPNTPSSAVSRLAQALLGAEECKVDILYYRKDG

SEQ ID NO: 29138 - protein, 40 aa, Homo sapiens
  MAP TO CHR19.1; EXPRESSED IN ADULT LIVER, SIGNAL = 0.82; EXPRESSED IN LUNG, SIGNAL = 1.1; EXPRESSED IN FETAL LIVER, SIGNAL = 0.66; EXPRESSED IN HELA, SIGNAL = 0.78; EXPRESSED IN BRAIN, SIGNAL = 0.69; EXPRESSED IN HEART, SIGNAL = 0.99
SVPDQAVNVMLGPTLAGGDLEDIGGAEQQFLGVSVCHHLP

SEQ ID NO: 29139 - protein, 55 aa, Homo sapiens
  MAP TO CHR12.1; EXPRESSED IN HEART, SIGNAL = 0.95; EXPRESSED IN ADULT LIVER, SIGNAL = 0.38; EXPRESSED IN BRAIN, SIGNAL = 0.65
VTCLVLQQVILLHELPVGLQGLRGTGQVEGIRVSVQQVLEGLQGGLAGLEGKKHS

SEQ ID NO: 29140 - protein, 86 aa, Homo sapiens
  MAP TO CHR7.1; EXPRESSED IN BRAIN, SIGNAL =   3; EXPRESSED IN ADULT LIVER, SIGNAL = 2.9; EXPRESSED IN BONE MARROW, SIGNAL = 3.2; EXPRESSED IN FETAL LIVER, SIGNAL = 2.5; EXPRESSED IN PLACENTA, SIGNAL = 2.6; EXPRESSED IN LUNG, SIGNAL =   2; SWISSPROT HIT: P36003, EVALUE 3.20e+00
SAHDGIVIKIEVQTNDEGSESLETPEPLMGQVEEHGFQDSELGDPCGEQPDLDMQEPENTLEESTEGSSEFSELKQMLVQQRNCTG

SEQ ID NO: 29141 - protein, 78 aa, Homo sapiens
  MAP TO CHR7.1; EXPRESSED IN FETAL LIVER, SIGNAL = 0.35; EXPRESSED IN BRAIN, SIGNAL = 0.37; EXPRESSED IN HEART, SIGNAL = 0.51; EXPRESSED IN BONE MARROW, SIGNAL = 0.37; EXPRESSED IN ADULT LIVER, SIGNAL = 0.57; SWISSPROT HIT: P30988, EVALUE 7.00e-37
QVNFFFLLNIVRVLVTKMRETHEAESHMYLKAVKATMILVPLLGIQFVVFPWRPSNKMLGKIYDYVMHSLIHFQVRKP

SEQ ID NO: 29142 - protein, 69 aa, Homo sapiens
  MAP TO CHR11.1; EXPRESSED IN BRAIN, SIGNAL = 5.7; EXPRESSED IN HEART, SIGNAL = 4.2; EXPRESSED IN BONE MARROW, SIGNAL = 5.6; EXPRESSED IN PLACENTA, SIGNAL = 6.2; EXPRESSED IN FETAL LIVER, SIGNAL = 5.3; EXPRESSED IN LUNG, SIGNAL = 3.3; EXPRESSED IN HELA, SIGNAL =  11; SWISSPROT HIT: Q17307, EVALUE 4.70e+00
SHLNCTEQHRTEEEGQKGRPKDPKGEPGCTIQQQDVQQVQQEEDMVGLHEPHPLHCGPQLPELICQLFL

SEQ ID NO: 29143 - protein, 37 aa, Homo sapiens
  MAP TO CHR7.1; EXPRESSED IN LUNG, SIGNAL = 1.4; EXPRESSED IN PLACENTA, SIGNAL = 1.6; EXPRESSED IN HELA, SIGNAL = 2.3; EXPRESSED IN BRAIN, SIGNAL = 2.8; EXPRESSED IN HEART, SIGNAL =   2; EXPRESSED IN BONE MARROW, SIGNAL = 2.4; EXPRESSED IN ADULT LIVER, SIGNAL = 3.8
CSLLQKGSLLLAKLKCKHNVAVFPLIQLYALIGVSGR

SEQ ID NO: 29144 - protein, 107 aa, Homo sapiens
  MAP TO CHR15.1; EXPRESSED IN HELA, SIGNAL = 0.96; EXPRESSED IN BRAIN, SIGNAL = 0.9; EXPRESSED IN HEART, SIGNAL = 0.99; EXPRESSED IN ADULT LIVER, SIGNAL = 1.2; EXPRESSED IN LUNG, SIGNAL = 1.1; EXPRESSED IN BONE MARROW, SIGNAL = 0.94; EXPRESSED IN FETAL LIVER, SIGNAL =   1; EXPRESSED IN PLACENTA, SIGNAL = 1.2; SWISSPROT HIT: P42534, EVALUE 1.00e-03
KDAPSGLPGSEAGPSGLPEVEDAPSGPRESEAYPSGPPAGEPGTIGPPRGSEAGSSEPPGRAAGPVGPPRQAEVPAKRPMKPASQLEVDPKGLAEPGRKRAGPASEP

SEQ ID NO: 29145 - protein, 99 aa, Homo sapiens
  MAP TO CHR12.1; EXPRESSED IN BONE MARROW, SIGNAL = 0.6; EXPRESSED IN FETAL LIVER, SIGNAL = 0.51; EXPRESSED IN HELA, SIGNAL = 0.98; EXPRESSED IN BRAIN, SIGNAL = 0.61; EXPRESSED IN LUNG, SIGNAL = 0.84; EXPRESSED IN HEART, SIGNAL = 0.77; SWISSPROT HIT: P38835, EVALUE 2.10e+00
FIFIFSDYLLPASKCSLQLPLHPISFLNLDLVSLSETRFSTKRFPSDIAEEKYVSIVCEALLCLDYHTDRWITHIPPLPSNKLPAERAQRLHRFSAALK

SEQ ID NO: 29146 - protein, 74 aa, Homo sapiens
  MAP TO CHR1.1; EXPRESSED IN FETAL LIVER, SIGNAL = 0.77; EXPRESSED IN LUNG, SIGNAL = 0.57; EXPRESSED IN HELA, SIGNAL = 0.76; EXPRESSED IN BRAIN, SIGNAL = 0.71; EXPRESSED IN BONE MARROW, SIGNAL = 0.79
PSGVDHKPKECLGLLECMYANLQLQTQLAQQQMAVLEHLQASVTQLAPGRGSNNSSLPALSPNPLLNHLPQFSK

SEQ ID NO: 29147 - protein, 83 aa, Homo sapiens
  MAP TO CHR13.1; EXPRESSED IN BRAIN, SIGNAL = 0.56; EXPRESSED IN BONE MARROW, SIGNAL = 0.73; EXPRESSED IN ADULT LIVER, SIGNAL = 0.56; EXPRESSED IN FETAL LIVER, SIGNAL = 0.49; SWISSPROT HIT: P46023, EVALUE 4.00e-07
FDFSYFKNFRYCSYAPHVRICMPLTDGISSFEDLLANNILRIFVWVIAFITCFGNLFVIGMRSFIKAENTTHAMSIKILCCKY

SEQ ID NO: 29148 - protein, 63 aa, Homo sapiens
  MAP TO CHR19.1; EXPRESSED IN ADULT LIVER, SIGNAL =  10; EXPRESSED IN BONE MARROW, SIGNAL = 1.8; EXPRESSED IN FETAL LIVER, SIGNAL =   2; EXPRESSED IN LUNG, SIGNAL = 0.67; EXPRESSED IN HELA, SIGNAL =   1; EXPRESSED IN BRAIN, SIGNAL =   1; EXPRESSED IN HEART, SIGNAL = 0.84; SWISSPROT HIT: P08678, EVALUE 3.50e+00
ALRGSTRSQSPSSARTISSNFLRGSAWSGRTRKRSRVSARTTFISAMANVWPMQFPGEGVGTL

SEQ ID NO: 29149 - protein, 66 aa, Homo sapiens
  MAP TO CHR17.1; EXPRESSED IN HEART, SIGNAL = 5.2; EXPRESSED IN ADULT LIVER, SIGNAL = 3.6; EXPRESSED IN BONE MARROW, SIGNAL = 2.5; EXPRESSED IN FETAL LIVER, SIGNAL = 3.4; EXPRESSED IN LUNG, SIGNAL = 5.6; EXPRESSED IN HELA, SIGNAL = 2.4; EXPRESSED IN BRAIN, SIGNAL = 2.5; SWISSPROT HIT: P35749, EVALUE 3.50e+00
PVSFPVRGVMAVGARHSFDKKGVIVVEVEDREKKAVNLERALEMAIEAGAEDVKETEDEEERNVFK

SEQ ID NO: 29150 - protein, 68 aa, Homo sapiens
  MAP TO CHR17.1; EXPRESSED IN BONE MARROW, SIGNAL = 0.72; EXPRESSED IN HEART, SIGNAL = 0.92; EXPRESSED IN FETAL LIVER, SIGNAL = 0.65; EXPRESSED IN BRAIN, SIGNAL = 0.71; EXPRESSED IN LUNG, SIGNAL = 0.68; SWISSPROT HIT: O77638, EVALUE 3.50e+00
PASPCFISTVHEVSNVCVGGHSQFGQVLHVRAQDGVLPDPQRTPTLGVQEVSYPLTVDLHIAHLSGRS

SEQ ID NO: 29151 - protein, 45 aa, Homo sapiens
  MAP TO CHR19.1; EXPRESSED IN FETAL LIVER, SIGNAL = 4.7; EXPRESSED IN HELA, SIGNAL = 4.3; EXPRESSED IN BRAIN, SIGNAL =   6; EXPRESSED IN HEART, SIGNAL = 5.2; EXPRESSED IN ADULT LIVER, SIGNAL =   6; EXPRESSED IN BONE MARROW, SIGNAL = 4.9; EXPRESSED IN LUNG, SIGNAL = 3.6; EXPRESSED IN PLACENTA, SIGNAL =   5
LTLLAELWDSLKEKRAPLLLPSSSHFPLNHLMVGLSGSSFPFTLA

SEQ ID NO: 29152 - protein, 59 aa, Homo sapiens
  MAP TO CHR3.1; EXPRESSED IN PLACENTA, SIGNAL = 4.8; EXPRESSED IN FETAL LIVER, SIGNAL = 7.7; EXPRESSED IN HELA, SIGNAL = 4.9; EXPRESSED IN BRAIN, SIGNAL = 5.6; EXPRESSED IN ADULT LIVER, SIGNAL =  16; EXPRESSED IN BONE MARROW, SIGNAL = 5.6; EXPRESSED IN HEART, SIGNAL = 5.5; SWISSPROT HIT: P10275, EVALUE 6.90e+00
TEPRLWPQGRFQPAGWAADSRWATSGRLWSPCGSLGTRGNCGPGWVGLGIWRPGQRAFH

SEQ ID NO: 29153 - protein, 82 aa, Homo sapiens
  MAP TO CHR17.1; EXPRESSED IN ADULT LIVER, SIGNAL = 0.91; EXPRESSED IN LUNG, SIGNAL = 0.87; EXPRESSED IN FETAL LIVER, SIGNAL = 0.76; EXPRESSED IN BRAIN, SIGNAL = 0.78; EXPRESSED IN HEART, SIGNAL = 0.81; SWISSPROT HIT: P36417, EVALUE 4.10e+00
VIAVPHLIAIPCVIAVPRVIAVPRGVGVVERRGPAHTLLPQVSHEELQSYQRKDAQAEDSEDHHIRQLFHRLDQGPHDRLQP

SEQ ID NO: 29154 - protein, 57 aa, Homo sapiens
  MAP TO CHR22.1; EXPRESSED IN HELA, SIGNAL = 7.4; EXPRESSED IN PLACENTA, SIGNAL = 7.8; EXPRESSED IN FETAL LIVER, SIGNAL =   6; EXPRESSED IN HEART, SIGNAL = 6.7; EXPRESSED IN BRAIN, SIGNAL = 7.6; EXPRESSED IN ADULT LIVER, SIGNAL =   8; EXPRESSED IN BONE MARROW, SIGNAL = 7.7; EXPRESSED IN LUNG, SIGNAL = 5.6; SWISSPROT HIT: P55539, EVALUE 1.60e+00
CCDKPFHVHKGAPSTSPKGEPNEAQGFLTSHSIIKAGDNHIKFLQHTSEDASSQSSA

SEQ ID NO: 29155 - protein, 31 aa, Homo sapiens
  MAP TO CHR2.1; EXPRESSED IN ADULT LIVER, SIGNAL = 0.41; EXPRESSED IN FETAL LIVER, SIGNAL = 0.52; EXPRESSED IN LUNG, SIGNAL = 0.69; EXPRESSED IN HELA, SIGNAL = 0.71; EXPRESSED IN BRAIN, SIGNAL = 0.67; EXPRESSED IN BONE MARROW, SIGNAL = 0.68; EXPRESSED IN HEART, SIGNAL = 0.85
ALIAQAGTQTALRRVWFLFLSFQLIKSIKSF

SEQ ID NO: 29156 - protein, 75 aa, Homo sapiens
  MAP TO CHR1.1; EXPRESSED IN FETAL LIVER, SIGNAL = 0.36; EXPRESSED IN LUNG, SIGNAL = 1.2; EXPRESSED IN BRAIN, SIGNAL = 0.4; EXPRESSED IN BONE MARROW, SIGNAL = 0.37; SWISSPROT HIT: Q13751, EVALUE 3.00e-25
CLPDPDTDAATIQEVSEAVLALWLPTDSATVLQKMNEIQAIAARLPNVDLVLSQTKQDIARARRLQAEAEEARYG

SEQ ID NO: 29157 - protein, 48 aa, Homo sapiens
  MAP TO CHR19.1; EXPRESSED IN FETAL LIVER, SIGNAL = 1.9; EXPRESSED IN LUNG, SIGNAL = 2.9; EXPRESSED IN HELA, SIGNAL = 1.2; EXPRESSED IN BRAIN, SIGNAL = 1.3; EXPRESSED IN HEART, SIGNAL = 2.8; EXPRESSED IN BONE MARROW, SIGNAL = 1.2
CLFQSPNPRLTFCVKTYERLFYMVAPSPEAMRIWMDVIVTAADENHAP

SEQ ID NO: 29158 - protein, 103 aa, Homo sapiens
  MAP TO CHR5.1; EXPRESSED IN PLACENTA, SIGNAL = 1.7; EXPRESSED IN FETAL LIVER, SIGNAL = 0.87; EXPRESSED IN LUNG, SIGNAL = 1.1; EXPRESSED IN HELA, SIGNAL = 1.2; EXPRESSED IN BRAIN, SIGNAL = 0.92; EXPRESSED IN HEART, SIGNAL = 1.1; EXPRESSED IN BONE MARROW, SIGNAL = 0.99; SWISSPROT HIT: Q36836, EVALUE 6.40e+00
HVFPLQVLHEEIELPGSNVKLRYLSSRTAGYKSLLKITMTQSTVPLNLIRVHLMVAVEGHLFQKSFQASPNLAYTFIWDKTDAYGQRVYGLSDAVGMFWFQPL

SEQ ID NO: 29159 - protein, 53 aa, Homo sapiens
  MAP TO CHR13.1; EXPRESSED IN ADULT LIVER, SIGNAL = 0.83; EXPRESSED IN BONE MARROW, SIGNAL = 0.81; EXPRESSED IN FETAL LIVER, SIGNAL = 0.7; EXPRESSED IN HELA, SIGNAL = 0.68; EXPRESSED IN BRAIN, SIGNAL = 0.84; EXPRESSED IN HEART, SIGNAL = 0.48
YEMQKTKEEDFLKLFDRWKEEEKEKLVDEMEKVKEMFMKEFKELTSKNSALEY

SEQ ID NO: 29160 - protein, 68 aa, Homo sapiens
  MAP TO CHR2.1; EXPRESSED IN LUNG, SIGNAL = 0.96; EXPRESSED IN BRAIN, SIGNAL = 0.76; EXPRESSED IN HEART, SIGNAL = 0.66; EXPRESSED IN ADULT LIVER, SIGNAL = 0.96; EXPRESSED IN BONE MARROW, SIGNAL = 0.99; SWISSPROT HIT: Q9NVP1, EVALUE 7.00e-33
LGTGVLILSPTRELAMQTFGVLKELMTHHVHTYGLIMGGSNRSAEAQKLGNGINIIVATPGRLLDHMQ

SEQ ID NO: 29161 - protein, 34 aa, Homo sapiens
  MAP TO CHR17.1; EXPRESSED IN HEART, SIGNAL = 1.1; EXPRESSED IN BONE MARROW, SIGNAL = 0.54; EXPRESSED IN FETAL LIVER, SIGNAL = 0.74; EXPRESSED IN LUNG, SIGNAL = 1.1; EXPRESSED IN BRAIN, SIGNAL = 0.55
FIFKPALDFQEPKVQITAGLIQPFHKQFSTMQFV

SEQ ID NO: 29162 - protein, 78 aa, Homo sapiens
  MAP TO CHR7.1; EXPRESSED IN FETAL LIVER, SIGNAL = 0.94; EXPRESSED IN BRAIN, SIGNAL =   1; EXPRESSED IN HEART, SIGNAL = 0.44; EXPRESSED IN ADULT LIVER, SIGNAL = 0.64; EXPRESSED IN BONE MARROW, SIGNAL = 0.99; SWISSPROT HIT: P08243, EVALUE 4.00e-39
FEFEYQTKVDGEIILHLYDKGGIEQTICMLDGVFAFVLLDTANKKVFLGRDTYGVRPLFKAMTEDGFLAVCSEAKGNN

SEQ ID NO: 29163 - protein, 62 aa, Homo sapiens
  MAP TO CHR8.1; EXPRESSED IN PLACENTA, SIGNAL = 1.4; EXPRESSED IN HELA, SIGNAL = 1.3; EXPRESSED IN FETAL LIVER, SIGNAL = 1.3; EXPRESSED IN BRAIN, SIGNAL = 1.1; EXPRESSED IN HEART, SIGNAL = 1.1; EXPRESSED IN ADULT LIVER, SIGNAL = 1.4; SWISSPROT HIT: Q14596, EVALUE 2.00e-28
LVSTQPIISEDQTAALMAHLFEMGFCDRQLNLRLLKKHNYNILQVVTELLQLNNNDWYSQRY

SEQ ID NO: 29164 - protein, 36 aa, Homo sapiens
  MAP TO CHR10.1; EXPRESSED IN FETAL LIVER, SIGNAL = 3.1; EXPRESSED IN HELA, SIGNAL = 3.1; EXPRESSED IN LUNG, SIGNAL = 2.4; EXPRESSED IN PLACENTA, SIGNAL = 3.1; EXPRESSED IN HEART, SIGNAL = 4.1; EXPRESSED IN BRAIN, SIGNAL = 3.4; EXPRESSED IN BONE MARROW, SIGNAL =   3; EXPRESSED IN ADULT LIVER, SIGNAL = 4.4
LTREPSRLKVCAFWHRSMTSFSRSLRLRYLWLRMRS

SEQ ID NO: 29165 - protein, 36 aa, Homo sapiens
  MAP TO CHR4.1; EXPRESSED IN FETAL LIVER, SIGNAL = 0.92; EXPRESSED IN LUNG, SIGNAL = 0.98; EXPRESSED IN BRAIN, SIGNAL = 1.2; EXPRESSED IN BONE MARROW, SIGNAL = 1.1; EXPRESSED IN HEART, SIGNAL = 1.1; EXPRESSED IN ADULT LIVER, SIGNAL = 0.85
SPFPYWAQFLVGEPRLLGLLIGSTLFKIIYATILSA

SEQ ID NO: 29166 - protein, 32 aa, Homo sapiens
  MAP TO CHR7.1; EXPRESSED IN BONE MARROW, SIGNAL = 1.4; EXPRESSED IN HEART, SIGNAL = 1.3; EXPRESSED IN FETAL LIVER, SIGNAL = 1.2; EXPRESSED IN LUNG, SIGNAL = 1.1; EXPRESSED IN HELA, SIGNAL = 1.1; EXPRESSED IN BRAIN, SIGNAL = 1.4
CLVLSKTLYVRRRNLRKVVSREPLRLIDSLSI

SEQ ID NO: 29167 - protein, 88 aa, Homo sapiens
  MAP TO CHR2.1; EXPRESSED IN ADULT LIVER, SIGNAL = 1.7; EXPRESSED IN HELA, SIGNAL = 2.7; EXPRESSED IN BRAIN, SIGNAL =   2; EXPRESSED IN BONE MARROW, SIGNAL = 2.6; SWISSPROT HIT: P35999, EVALUE 8.60e+00
FQVPEAPKEVVPEKKVPVPPPKKPEVPPTKGRHPLVAVFDIVCLSLLCLIMKILISLKSQRCQRQLSQKRRCLKLFLPNRKVLPLKVM

SEQ ID NO: 29168 - protein, 80 aa, Homo sapiens
  MAP TO CHR19.1; EXPRESSED IN FETAL LIVER, SIGNAL = 0.63; EXPRESSED IN LUNG, SIGNAL = 0.92; EXPRESSED IN HELA, SIGNAL = 1.4; EXPRESSED IN BRAIN, SIGNAL = 0.91; EXPRESSED IN HEART, SIGNAL = 0.65; EXPRESSED IN ADULT LIVER, SIGNAL = 1.1; EXPRESSED IN BONE MARROW, SIGNAL = 0.95; EXPRESSED IN PLACENTA, SIGNAL = 1.2; SWISSPROT HIT: P38676, EVALUE 2.10e+00
ALHGSGHVALLPTSSPVPVHPPTSLLPLVPGGHAAVPDSRLARGAGSLHSLNTPGASGLWQCGGHTGPKGCPSPHPCLPL

SEQ ID NO: 29169 - protein, 33 aa, Homo sapiens
  MAP TO CHR7.1; EXPRESSED IN FETAL LIVER, SIGNAL = 0.9; EXPRESSED IN HELA, SIGNAL = 0.95; EXPRESSED IN BRAIN, SIGNAL = 0.89; EXPRESSED IN HEART, SIGNAL = 0.65
SEGYLLVSTSFPAFFLPKVIESHFDKYIVIKVY

SEQ ID NO: 29170 - protein, 63 aa, Homo sapiens
  MAP TO CHR19.1; EXPRESSED IN ADULT LIVER, SIGNAL = 2.1; EXPRESSED IN BONE MARROW, SIGNAL = 2.5; EXPRESSED IN PLACENTA, SIGNAL = 2.4; EXPRESSED IN LUNG, SIGNAL = 1.4; EXPRESSED IN HELA, SIGNAL = 1.8; EXPRESSED IN BRAIN, SIGNAL = 2.1; EXPRESSED IN HEART, SIGNAL = 1.9; SWISSPROT HIT: Q07017, EVALUE 3.50e+00
QLQFLFKASHLFSDCQTTVTGMSCAIFPRQEGLAESSRCLESRSCAAQVLGWRQDPLSLLLVT

SEQ ID NO: 29171 - protein, 73 aa, Homo sapiens
  MAP TO AL139374.13; EXPRESSED IN HELA, SIGNAL = 3.7; EXPRESSED IN BRAIN, SIGNAL =   4; EXPRESSED IN HEART, SIGNAL = 2.1; EXPRESSED IN ADULT LIVER, SIGNAL = 5.7; EXPRESSED IN BONE MARROW, SIGNAL =   4; EXPRESSED IN PLACENTA, SIGNAL = 3.6; EXPRESSED IN FETAL LIVER, SIGNAL = 3.1; SWISSPROT HIT: P12861, EVALUE 3.40e+00
LSISPLALPFSLKHCLAENSCPTVVNFLPSVSSFSDLAKFLGCRHLQTIKILKTVQTSSVYEQNIESVIMLAP

SEQ ID NO: 29172 - protein, 47 aa, Homo sapiens
  MAP TO CHR2.1; EXPRESSED IN HELA, SIGNAL = 3.4; EXPRESSED IN FETAL LIVER, SIGNAL = 1.9; EXPRESSED IN LUNG, SIGNAL = 2.7; EXPRESSED IN BRAIN, SIGNAL = 1.9; EXPRESSED IN HEART, SIGNAL = 2.6; EXPRESSED IN BONE MARROW, SIGNAL = 1.6; EXPRESSED IN PLACENTA, SIGNAL = 2.3; SWISSPROT HIT: Q06278, EVALUE 1.00e-18
KIQVVSRELRMPMSNVHLRGTSTETVPNANISGGSVVADLNGLAVKV

SEQ ID NO: 29173 - protein, 55 aa, Homo sapiens
  MAP TO CHR1.1; EXPRESSED IN ADULT LIVER, SIGNAL = 0.39; EXPRESSED IN BRAIN, SIGNAL = 0.51; EXPRESSED IN HEART, SIGNAL = 0.46
KQRSSISPTLKFNEKVLQHQRRNCKPARTQMAGNPRLVQDSKASAMDHTLIILTE

SEQ ID NO: 29174 - protein, 48 aa, Homo sapiens
  MAP TO CHR5.1; EXPRESSED IN FETAL LIVER, SIGNAL = 0.67; EXPRESSED IN BRAIN, SIGNAL = 0.56; EXPRESSED IN BONE MARROW, SIGNAL = 0.55
VHSLAPQRGEERISFNFLLRPPPDEGEISPNIVISQKILSGIIKREIQ

SEQ ID NO: 29175 - protein, 73 aa, Homo sapiens
  MAP TO CHR11.1; EXPRESSED IN FETAL LIVER, SIGNAL = 0.51; EXPRESSED IN BRAIN, SIGNAL = 0.57; EXPRESSED IN BONE MARROW, SIGNAL = 0.47
SCRASSSDCTMRFSLLRTKTRSCSLSSSRRTFFMLSQPTPWPSSTLCTTSFRNCWFSLQGPHTASVVISSFAE

SEQ ID NO: 29176 - protein, 63 aa, Homo sapiens
  MAP TO CHR11.1; EXPRESSED IN BONE MARROW, SIGNAL = 0.54; EXPRESSED IN ADULT LIVER, SIGNAL = 0.87; EXPRESSED IN PLACENTA, SIGNAL = 1.2; EXPRESSED IN BRAIN, SIGNAL = 1.1; EXPRESSED IN LUNG, SIGNAL =   1; SWISSPROT HIT: O08715, EVALUE 5.50e+00
RRSWFWPSFSHLALAGPGSGPPPSPMALRRSLGPTAVACSLALSSWLWAACRGRGRLSAGPPW

SEQ ID NO: 29177 - protein, 82 aa, Homo sapiens
  MAP TO CHR17.1; EXPRESSED IN LUNG, SIGNAL = 7.7; EXPRESSED IN FETAL LIVER, SIGNAL = 2.7; EXPRESSED IN BRAIN, SIGNAL = 3.5; EXPRESSED IN HEART, SIGNAL = 4.9; EXPRESSED IN ADULT LIVER, SIGNAL = 2.7; EXPRESSED IN BONE MARROW, SIGNAL = 3.7; SWISSPROT HIT: P49031, EVALUE 2.50e-01
WHQTCSDGSYQWLNGENEGVIPSSDYQHHSQRLWLNIGLIQHGEHVLLNWFSSNPFRKILKHKINFPKDSNDFLTVHIEFTL

SEQ ID NO: 29178 - protein, 67 aa, Homo sapiens
  MAP TO CHR15.1; EXPRESSED IN ADULT LIVER, SIGNAL = 1.9; EXPRESSED IN BRAIN, SIGNAL = 2.1; EXPRESSED IN HEART, SIGNAL = 2.6
VSPSSQPSCPVSHTGWKMGLAVTKTSVNPGTIGSPPQSRQPRTASSTPATCCTSSTPRWRRPRRTSL

SEQ ID NO: 29179 - protein, 58 aa, Homo sapiens
  MAP TO CHR17.1; EXPRESSED IN BRAIN, SIGNAL = 0.59; EXPRESSED IN BONE MARROW, SIGNAL = 0.61; EXPRESSED IN HEART, SIGNAL = 0.55; EXPRESSED IN FETAL LIVER, SIGNAL = 0.46
CVSQATWVAGSCGVVTWPSWRASDLPVVSFTSDIWSSSQLASFLRGHFHFPSPRSGSK

SEQ ID NO: 29180 - protein, 147 aa, Homo sapiens
  MAP TO CHR19.1; EXPRESSED IN PLACENTA, SIGNAL = 1.5; EXPRESSED IN LUNG, SIGNAL = 0.93; EXPRESSED IN BRAIN, SIGNAL = 1.6; EXPRESSED IN HEART, SIGNAL = 1.4; EXPRESSED IN BONE MARROW, SIGNAL = 1.6; SWISSPROT HIT: P16374, EVALUE 6.00e-60
YECKECGKYFSRSANLIQHQSIHTGEKPFECKECGKAFRLHIQFTRHQKFHTGEKPFECNECGKAFSLLTLLNRHKNIHTGEKLFECKECGKSFNRSSNLVQHQSIHSGVKPYECKECGKGFNRGAHLIQHQKIHSNEKPFVCKECG

SEQ ID NO: 29181 - protein, 49 aa, Homo sapiens
  MAP TO CHR17.1; EXPRESSED IN FETAL LIVER, SIGNAL = 1.2; EXPRESSED IN HELA, SIGNAL =   2; EXPRESSED IN BRAIN, SIGNAL = 1.1; EXPRESSED IN HEART, SIGNAL =   1; EXPRESSED IN BONE MARROW, SIGNAL = 1.3; EXPRESSED IN ADULT LIVER, SIGNAL = 1.3
TWYWDRAGSSPPPLGPRRRTTKKELSSPSHRKSSPPRPKTTFLVSNCGG

SEQ ID NO: 29182 - protein, 77 aa, Homo sapiens
  MAP TO CHR1.1; EXPRESSED IN HELA, SIGNAL = 4.9; EXPRESSED IN BRAIN, SIGNAL = 3.1; EXPRESSED IN HEART, SIGNAL = 3.6; EXPRESSED IN ADULT LIVER, SIGNAL = 1.4; EXPRESSED IN BONE MARROW, SIGNAL = 2.7; EXPRESSED IN FETAL LIVER, SIGNAL = 3.8; EXPRESSED IN LUNG, SIGNAL = 4.2; SWISSPROT HIT: P23249, EVALUE 3.00e-34
CFPGLMEVKETGDPGGQLVLAGDPRQLGPVLRSPLTQKHGLGYSLLERLLTYNSLYKKGPDGYDPQFITKLLRNYRY

SEQ ID NO: 29183 - protein, 100 aa, Homo sapiens
  MAP TO CHR19.1; EXPRESSED IN PLACENTA, SIGNAL = 2.6; EXPRESSED IN HELA, SIGNAL =   2; EXPRESSED IN LUNG, SIGNAL = 2.2; EXPRESSED IN BRAIN, SIGNAL = 2.8; EXPRESSED IN ADULT LIVER, SIGNAL =   3; EXPRESSED IN BONE MARROW, SIGNAL = 2.7; SWISSPROT HIT: Q99372, EVALUE 3.20e-01
QRHRVAVGAHSDEAHVGDAAAAPVLVLGLHAEGGQGVVLAAQLHHRVRTGAHHVVATAVEGGVMGVALGAADSGGLRHTPGLPAYHLAALPGCALHAFAG

SEQ ID NO: 29184 - protein, 23 aa, Homo sapiens
  MAP TO CHRX.1; EXPRESSED IN ADULT LIVER, SIGNAL =   5; EXPRESSED IN BONE MARROW, SIGNAL = 4.9; EXPRESSED IN PLACENTA, SIGNAL = 4.7; EXPRESSED IN FETAL LIVER, SIGNAL = 4.6; EXPRESSED IN LUNG, SIGNAL =   2; EXPRESSED IN HELA, SIGNAL = 4.5; EXPRESSED IN BRAIN, SIGNAL = 4.6; EXPRESSED IN HEART, SIGNAL = 2.2
EAADIQFTSVVTLTVVTFEFCFS

SEQ ID NO: 29185 - protein, 40 aa, Homo sapiens
  MAP TO CHR14.1; EXPRESSED IN PLACENTA, SIGNAL = 3.6; EXPRESSED IN LUNG, SIGNAL =  18; EXPRESSED IN HELA, SIGNAL = 0.76; EXPRESSED IN BRAIN, SIGNAL = 0.78; EXPRESSED IN HEART, SIGNAL = 1.2; SWISSPROT HIT: Q00664, EVALUE 2.90e+00
SLKVNPEAAQESLRDPPGWTKPPPDSTSCTSHWTPANKKK

SEQ ID NO: 29186 - protein, 47 aa, Homo sapiens
  MAP TO CHR19.1; EXPRESSED IN BRAIN, SIGNAL = 1.1; EXPRESSED IN BONE MARROW, SIGNAL = 1.1; EXPRESSED IN HEART, SIGNAL = 0.77; EXPRESSED IN ADULT LIVER, SIGNAL = 0.99; EXPRESSED IN FETAL LIVER, SIGNAL = 0.95; EXPRESSED IN LUNG, SIGNAL =   1; SWISSPROT HIT: Q04725, EVALUE 7.00e-21
IKAELTSSAPACYALAVSPDAKVCFSCCSDGNIVVWDLQNQTMVRWV

SEQ ID NO: 29187 - protein, 96 aa, Homo sapiens
  MAP TO CHR19.1; EXPRESSED IN FETAL LIVER, SIGNAL = 0.67; EXPRESSED IN HELA, SIGNAL = 0.49; EXPRESSED IN BRAIN, SIGNAL = 0.73; EXPRESSED IN BONE MARROW, SIGNAL = 0.77; EXPRESSED IN HEART, SIGNAL = 0.59; SWISSPROT HIT: O14581, EVALUE 2.00e-21
MAYDRYVAICHPLRYTVIMNPRLCGLLILLSLLTSVVNALLLSLMVLRLSFCTDLEIPLFFCELAQVIQLTCSDTLINNILIYFAACIFGGVPLSG

SEQ ID NO: 29188 - protein, 75 aa, Homo sapiens
  MAP TO CHR3.1; EXPRESSED IN HELA, SIGNAL = 1.7; EXPRESSED IN BRAIN, SIGNAL =   1; EXPRESSED IN BONE MARROW, SIGNAL = 1.1; EXPRESSED IN FETAL LIVER, SIGNAL = 1.6; EXPRESSED IN LUNG, SIGNAL = 1.3; SWISSPROT HIT: P08590, EVALUE 3.00e-29
PGTWDHFSAELNTKMMDFETFLPMLQHISKNKDTGTYEDFVEGLRVFDKEGNGTVMGAELRHVLATLGEGSLLPY

SEQ ID NO: 29189 - protein, 73 aa, Homo sapiens
  MAP TO CHR19.1; EXPRESSED IN FETAL LIVER, SIGNAL = 1.6; EXPRESSED IN LUNG, SIGNAL = 1.4; EXPRESSED IN PLACENTA, SIGNAL = 2.9; EXPRESSED IN HELA, SIGNAL = 2.1; EXPRESSED IN BRAIN, SIGNAL = 1.3; EXPRESSED IN ADULT LIVER, SIGNAL =   3; EXPRESSED IN BONE MARROW, SIGNAL = 1.3; SWISSPROT HIT: P18616, EVALUE 4.80e-02
QASPSPSPVGYSPMTPGAPSPGGYNPHTPGSGIEQNSSDWVTTDIQVKVRDTYLDTQVVGQTGVIRSVTVRGA

SEQ ID NO: 29190 - protein, 126 aa, Homo sapiens
  MAP TO CHR7.1; EXPRESSED IN FETAL LIVER, SIGNAL = 1.2; EXPRESSED IN BRAIN, SIGNAL = 1.2; EXPRESSED IN LUNG, SIGNAL = 1.1; EXPRESSED IN HEART, SIGNAL = 0.75; EXPRESSED IN BONE MARROW, SIGNAL = 1.4
LAPLSWHCSQAIRTSRELLPWSSNRWMLLETGKTCQVLFRASTTFSESNSSLLSPFKPTSSASSPVSKLPCGCFCCWKRRMVTLVLVLLALGTFRKSQTSARSTTDRSLPSLEISKCSVFLAVPED

SEQ ID NO: 29191 - protein, 55 aa, Homo sapiens
  MAP TO CHR5.1; EXPRESSED IN HEART, SIGNAL = 0.79; EXPRESSED IN BONE MARROW, SIGNAL = 1.6; EXPRESSED IN FETAL LIVER, SIGNAL = 1.6; EXPRESSED IN BRAIN, SIGNAL = 1.5; EXPRESSED IN LUNG, SIGNAL = 1.7; SWISSPROT HIT: P38968, EVALUE 9.50e-01
CLLNPRLSSELSSHRWDAADDIHRSLMVDHVTEVSQWMVGVKRLIAEKRSLFSEE

SEQ ID NO: 29192 - protein, 97 aa, Homo sapiens
  MAP TO CHR15.1; EXPRESSED IN HELA, SIGNAL = 0.58; EXPRESSED IN BRAIN, SIGNAL = 0.77; EXPRESSED IN ADULT LIVER, SIGNAL = 0.76; SWISSPROT HIT: Q15620, EVALUE 5.00e-37
IIVPTVTIFISYGFILSSILHISSKEGRSKAFSTCSSHIIAVSLFFGSGAFMYLNPSSAGSMDKRKLSSVFYTNVVPMLNPLIYSLRNKDVKFALRK

SEQ ID NO: 29193 - protein, 88 aa, Homo sapiens
  MAP TO CHR5.1; EXPRESSED IN FETAL LIVER, SIGNAL =  10; EXPRESSED IN HELA, SIGNAL = 5.8; EXPRESSED IN LUNG, SIGNAL = 7.1; EXPRESSED IN BRAIN, SIGNAL = 9.6; EXPRESSED IN HEART, SIGNAL = 9.5; EXPRESSED IN ADULT LIVER, SIGNAL =  11; EXPRESSED IN BONE MARROW, SIGNAL =  12; SWISSPROT HIT: P53448, EVALUE 1.30e+00
GESSVCRQPDWDRGLGLTQLRACYSVLSRHPVDRRGFSVGTTMATGPHSCSLPPSKRRTSGTARTSSGTTMSCLMRKSRGSRRSQNLK

SEQ ID NO: 29194 - protein, 128 aa, Homo sapiens
  MAP TO CHR19.1; EXPRESSED IN HEART, SIGNAL = 1.3; EXPRESSED IN ADULT LIVER, SIGNAL = 1.6; EXPRESSED IN PLACENTA, SIGNAL = 1.6; EXPRESSED IN FETAL LIVER, SIGNAL = 1.5; EXPRESSED IN LUNG, SIGNAL = 1.2; EXPRESSED IN HELA, SIGNAL = 2.7; EXPRESSED IN BRAIN, SIGNAL = 1.6
ASPYPGASPAPPRPAWPSPLPRGHRALLCLRAKVPEPAEQADDLQATVAALCVLRGGGPWAGSWLSPKTPGAMGGDLVLGLGALRRRKRLLEQEKSLAGWALVLAGTGIGLMVLHAEMLWFGGCSVSG

SEQ ID NO: 29195 - protein, 33 aa, Homo sapiens
  MAP TO CHR7.1; EXPRESSED IN FETAL LIVER, SIGNAL = 0.6; EXPRESSED IN LUNG, SIGNAL = 0.93; EXPRESSED IN BRAIN, SIGNAL = 0.49; EXPRESSED IN HEART, SIGNAL = 0.91; EXPRESSED IN BONE MARROW, SIGNAL = 0.55
SCTFMTILGTLTEFRFFPTPVIVLPPLAKQNRK

SEQ ID NO: 29196 - protein, 36 aa, Homo sapiens
  MAP TO CHR17.1; EXPRESSED IN FETAL LIVER, SIGNAL = 0.69; EXPRESSED IN LUNG, SIGNAL = 0.7; EXPRESSED IN BRAIN, SIGNAL = 0.61; EXPRESSED IN HEART, SIGNAL = 0.68; EXPRESSED IN BONE MARROW, SIGNAL = 0.88; SWISSPROT HIT: P28801, EVALUE 3.80e+00
CQACPRRASAGLSWSEEEAAMPSQDQGNLAPECLRK

SEQ ID NO: 29197 - protein, 61 aa, Homo sapiens
  MAP TO CHR7.1; EXPRESSED IN BRAIN, SIGNAL = 0.31; EXPRESSED IN BONE MARROW, SIGNAL = 0.39; SWISSPROT HIT: Q9NRM2, EVALUE 7.00e-25
VSVVVFRYYFPTYENDTLLCTLSDSESDLTAQEQNENVPIISEDTSKLYALKQSSILNQLL

SEQ ID NO: 29198 - protein, 66 aa, Homo sapiens
  MAP TO CHR11.1; EXPRESSED IN LUNG, SIGNAL = 0.93; EXPRESSED IN HELA, SIGNAL = 1.1; EXPRESSED IN BRAIN, SIGNAL = 0.95; EXPRESSED IN HEART, SIGNAL = 0.91; EXPRESSED IN BONE MARROW, SIGNAL = 0.92; SWISSPROT HIT: Q9GZM6, EVALUE 1.00e-17
PELQLPLFLLFLGIYVVTVVGNLSMITLIGFSSHLHTPMYHFLSSLSFIDLCQSSVITPKMLVNFV

SEQ ID NO: 29199 - protein, 79 aa, Homo sapiens
  MAP TO CHRX.1; EXPRESSED IN PLACENTA, SIGNAL =   2; EXPRESSED IN BRAIN, SIGNAL =   2; EXPRESSED IN LUNG, SIGNAL = 2.3; EXPRESSED IN HEART, SIGNAL = 1.4; EXPRESSED IN ADULT LIVER, SIGNAL = 1.3; SWISSPROT HIT: P11413, EVALUE 7.00e-42
GVPFILRCGKALNERKAEVRLQFHDVAGDIFHQQCKRNELVIRVQPNEAVYTKMMTKKPGMFFNPEESELDLTYGNRYK

SEQ ID NO: 29200 - protein, 80 aa, Homo sapiens
  MAP TO CHR8.1; EXPRESSED IN HEART, SIGNAL = 0.46; EXPRESSED IN BONE MARROW, SIGNAL = 0.63; EXPRESSED IN FETAL LIVER, SIGNAL = 0.63; EXPRESSED IN BRAIN, SIGNAL = 0.55; SWISSPROT HIT: P57644, EVALUE 9.90e-01
STERTCSLNNCTVAKRFGKGKDATVTFVHFKKPVDPFVQENCLCNALNSEINPFISNISNSYGNVQNGNISIPETYSGQT

SEQ ID NO: 29201 - protein, 64 aa, Homo sapiens
  MAP TO CHR5.1; EXPRESSED IN FETAL LIVER, SIGNAL = 0.68; EXPRESSED IN HELA, SIGNAL = 0.6; EXPRESSED IN BRAIN, SIGNAL = 0.85; EXPRESSED IN HEART, SIGNAL = 0.61; EXPRESSED IN BONE MARROW, SIGNAL = 0.79; SWISSPROT HIT: Q50360, EVALUE 3.50e+00
PGARIQFQEAPPSELIRLTKVPLTPVPIKMQSLLEPSVKIETKDVPSLCCPQMQVLDSRGVWFS

SEQ ID NO: 29202 - protein, 75 aa, Homo sapiens
  MAP TO CHR7.1; EXPRESSED IN PLACENTA, SIGNAL =  41; EXPRESSED IN FETAL LIVER, SIGNAL =  61; EXPRESSED IN HELA, SIGNAL =  33; EXPRESSED IN LUNG, SIGNAL =  61; EXPRESSED IN BRAIN, SIGNAL =  51; EXPRESSED IN HEART, SIGNAL =  53; EXPRESSED IN BONE MARROW, SIGNAL =  66; SWISSPROT HIT: P48656, EVALUE 5.00e+00
VLKSKNQLPFPPLSAESVHCRVLCRIWRPLCSDYFTSYKSHTLVLHKQNTLSFQEVRSLTTVLGFQSCLTEACLL

SEQ ID NO: 29203 - protein, 69 aa, Homo sapiens
  MAP TO CHR7.1; EXPRESSED IN FETAL LIVER, SIGNAL = 0.82; EXPRESSED IN HELA, SIGNAL = 1.1; EXPRESSED IN BRAIN, SIGNAL = 0.88; EXPRESSED IN ADULT LIVER, SIGNAL = 0.72; EXPRESSED IN BONE MARROW, SIGNAL = 0.95; SWISSPROT HIT: P30343, EVALUE 1.20e+00
LLIDGKVILALFTYVKKPEKQKIIDWSAAQHEELQLHAIATLSSVAPLLIEEYMSCQGNARVLAFLEWC

SEQ ID NO: 29204 - protein, 35 aa, Homo sapiens
  MAP TO CHR14.1; EXPRESSED IN BONE MARROW, SIGNAL = 0.72; EXPRESSED IN HELA, SIGNAL = 0.58; EXPRESSED IN BRAIN, SIGNAL = 0.55; EXPRESSED IN HEART, SIGNAL =   1; EXPRESSED IN ADULT LIVER, SIGNAL = 0.51
KLHLRVELVLSWRLGTEGLCSTFTRLTPAWKEKSK

SEQ ID NO: 29205 - protein, 68 aa, Homo sapiens
  MAP TO CHR5.1; EXPRESSED IN BRAIN, SIGNAL = 1.7; EXPRESSED IN HEART, SIGNAL = 1.3; EXPRESSED IN ADULT LIVER, SIGNAL = 1.9; EXPRESSED IN BONE MARROW, SIGNAL = 0.99; EXPRESSED IN LUNG, SIGNAL = 0.93; EXPRESSED IN FETAL LIVER, SIGNAL = 0.86; EXPRESSED IN PLACENTA, SIGNAL = 1.2; EXPRESSED IN HELA, SIGNAL = 1.1; SWISSPROT HIT: O28173, EVALUE 9.20e+00
RPSRLLPLILIDLIPKAHGIHNGQLELHVALLEVIGLGPQAHACLMVTGFLSLEGRVEECVHQCGFAN

SEQ ID NO: 29206 - protein, 60 aa, Homo sapiens
  MAP TO CHR16.1; EXPRESSED IN BRAIN, SIGNAL = 0.9; EXPRESSED IN LUNG, SIGNAL = 1.6; EXPRESSED IN HEART, SIGNAL = 0.63; EXPRESSED IN ADULT LIVER, SIGNAL = 1.5; EXPRESSED IN BONE MARROW, SIGNAL = 3.4; SWISSPROT HIT: P07768, EVALUE 2.10e+00
TKERAEVILQGTASSNASAPDAMWEDYEFKCKPGDPSRRPCLISPYHYRLDWLMWFAAFQ

SEQ ID NO: 29207 - protein, 47 aa, Homo sapiens
  MAP TO CHR6.1; EXPRESSED IN HELA, SIGNAL = 0.95; EXPRESSED IN BRAIN, SIGNAL = 0.99; EXPRESSED IN HEART, SIGNAL = 0.8; EXPRESSED IN BONE MARROW, SIGNAL = 0.97; EXPRESSED IN ADULT LIVER, SIGNAL = 0.89; EXPRESSED IN FETAL LIVER, SIGNAL = 0.84
ILIIHKHKIPIILVHSSGFFILLPQILPSMDQTGHKPGRNLITHISA

SEQ ID NO: 29208 - protein, 52 aa, Homo sapiens
  MAP TO CHR5.1; EXPRESSED IN HEART, SIGNAL = 0.91; EXPRESSED IN PLACENTA, SIGNAL = 1.8; EXPRESSED IN LUNG, SIGNAL = 1.1; EXPRESSED IN FETAL LIVER, SIGNAL = 1.3; EXPRESSED IN BRAIN, SIGNAL = 1.6; EXPRESSED IN HELA, SIGNAL = 2.1; EXPRESSED IN BONE MARROW, SIGNAL = 1.9; EXPRESSED IN ADULT LIVER, SIGNAL = 1.1; SWISSPROT HIT: Q9UFF9, EVALUE 1.00e-24
EDMYSQDSIDLLANSGLQFQKHEEEGIDTLHFAELLMTSGVVLCDNVKWLSF

SEQ ID NO: 29209 - protein, 32 aa, Homo sapiens
  MAP TO CHR11.1; EXPRESSED IN ADULT LIVER, SIGNAL = 0.8; EXPRESSED IN PLACENTA, SIGNAL = 1.8; EXPRESSED IN LUNG, SIGNAL = 0.98; EXPRESSED IN HELA, SIGNAL =   1; EXPRESSED IN BRAIN, SIGNAL = 0.87; EXPRESSED IN HEART, SIGNAL = 1.2; EXPRESSED IN BONE MARROW, SIGNAL = 0.91
LASGFLCLLASEHRVFGIKSSLKCYLLCLVLL

SEQ ID NO: 29210 - protein, 85 aa, Homo sapiens
  MAP TO CHR5.1; EXPRESSED IN HELA, SIGNAL = 1.2; EXPRESSED IN BRAIN, SIGNAL = 0.97; EXPRESSED IN HEART, SIGNAL = 0.52; EXPRESSED IN BONE MARROW, SIGNAL = 0.91; SWISSPROT HIT: Q9Y5H6, EVALUE 4.00e-35
KSLDREDAPAHHLFLTATDGGKPELTGTVQLLVTVLDVNDNAPTFEQSEYEVRIFENADNGTTVIKLNASDPDEGANGAISYSFN

SEQ ID NO: 29211 - protein, 96 aa, Homo sapiens
  MAP TO CHR2.1; EXPRESSED IN ADULT LIVER, SIGNAL = 1.3; EXPRESSED IN BONE MARROW, SIGNAL = 1.9; EXPRESSED IN PLACENTA, SIGNAL = 1.9; EXPRESSED IN FETAL LIVER, SIGNAL = 1.6; EXPRESSED IN HELA, SIGNAL = 2.2; EXPRESSED IN BRAIN, SIGNAL = 1.9; EXPRESSED IN LUNG, SIGNAL = 0.8; SWISSPROT HIT: Q15746, EVALUE 4.00e-08
SAPPRFVKKLSDISTVVGKEVQLQTTIEGAEPISVVWFKDKGEIVRESDNIWISYSENIATLQFSRVEPANAGKYTCQIKNDAGMQECFATLSVLG

SEQ ID NO: 29212 - protein, 86 aa, Homo sapiens
  MAP TO CHR16.1; EXPRESSED IN BONE MARROW, SIGNAL = 0.85; EXPRESSED IN HELA, SIGNAL = 1.2; EXPRESSED IN BRAIN, SIGNAL = 0.8; EXPRESSED IN HEART, SIGNAL = 0.46; EXPRESSED IN ADULT LIVER, SIGNAL = 0.69; SWISSPROT HIT: Q92889, EVALUE 2.00e-44
SSPESCPEEIKHEEFDVNLSSDAAFGILKEPLTIIHPLLGCSDPYALTRVLHEVEPRYVVLYDAELTFVRQLEIYRASRPGKPLRQ

SEQ ID NO: 29213 - protein, 78 aa, Homo sapiens
  MAP TO CHR5.1; EXPRESSED IN FETAL LIVER, SIGNAL = 0.58; EXPRESSED IN BRAIN, SIGNAL = 0.41; EXPRESSED IN HEART, SIGNAL = 0.64; EXPRESSED IN ADULT LIVER, SIGNAL = 3.9; EXPRESSED IN BONE MARROW, SIGNAL = 0.51; SWISSPROT HIT: P10912, EVALUE 3.00e-40
PSLNQEDIYITTESLTTAAGRPGTGEHVPGSEMPVPDYTSIHIVQSPQGLILNATALPLPDKEFLSSCGYVSTDQLNK

SEQ ID NO: 29214 - protein, 74 aa, Homo sapiens
  MAP TO CHR1.1; EXPRESSED IN PLACENTA, SIGNAL = 6.6; EXPRESSED IN LUNG, SIGNAL = 1.4; EXPRESSED IN HELA, SIGNAL = 2.5; EXPRESSED IN BRAIN, SIGNAL = 1.8; EXPRESSED IN HEART, SIGNAL = 1.7; EXPRESSED IN ADULT LIVER, SIGNAL = 4.3; EXPRESSED IN BONE MARROW, SIGNAL = 2.1; SWISSPROT HIT: P40618, EVALUE 4.00e-24
TVRMAKGDPKKPKGKMSAYAFFVQTSREEHKKKNPEVPVNFVEFSKKCSERWKTCPGNRNLNLMKWQRQIKCAM

SEQ ID NO: 29215 - protein, 54 aa, Homo sapiens
  MAP TO CHR9.1; EXPRESSED IN ADULT LIVER, SIGNAL = 3.4; EXPRESSED IN BONE MARROW, SIGNAL = 6.8; EXPRESSED IN FETAL LIVER, SIGNAL = 5.3; EXPRESSED IN HELA, SIGNAL = 3.5; EXPRESSED IN BRAIN, SIGNAL = 6.2; EXPRESSED IN LUNG, SIGNAL = 4.9; SWISSPROT HIT: P52735, EVALUE 1.00e-25
VFTPRVIGTAVARYNFAARDMRELSLREGDVVRIYSRIGGDQGWWKGETNGRVS

SEQ ID NO: 29216 - protein, 59 aa, Homo sapiens
  MAP TO CHRX.1; EXPRESSED IN LUNG, SIGNAL = 0.9; EXPRESSED IN HELA, SIGNAL = 0.74; EXPRESSED IN BRAIN, SIGNAL = 0.55; EXPRESSED IN HEART, SIGNAL = 0.91; EXPRESSED IN BONE MARROW, SIGNAL = 0.6; SWISSPROT HIT: O95239, EVALUE 4.00e-26
QLVSSKIQVSKLESSLKQSKTSCADMQKMLFEERNHFAEIETELQAELVRMEQQHQEKV

SEQ ID NO: 29217 - protein, 80 aa, Homo sapiens
  MAP TO AC068936.2; EXPRESSED IN LUNG, SIGNAL = 1.8; EXPRESSED IN BRAIN, SIGNAL = 3.6; EXPRESSED IN HEART, SIGNAL = 2.6; EXPRESSED IN BONE MARROW, SIGNAL = 3.8; EXPRESSED IN ADULT LIVER, SIGNAL =   3; EXPRESSED IN PLACENTA, SIGNAL = 4.1; EXPRESSED IN FETAL LIVER, SIGNAL = 2.9; SWISSPROT HIT: O43281, EVALUE 3.30e-01
SFLREAHLSRAGSSPAATQWPLSAVEPGVDPVHTRSHLFPVSTQWVGVDPERPYPDWGPEDGEHPPFPFPPLNHCWAHPS

SEQ ID NO: 29218 - protein, 86 aa, Homo sapiens
  MAP TO CHR19.1; EXPRESSED IN PLACENTA, SIGNAL = 3.4; EXPRESSED IN LUNG, SIGNAL = 1.9; EXPRESSED IN HELA, SIGNAL = 4.2; EXPRESSED IN BRAIN, SIGNAL = 2.7; EXPRESSED IN HEART, SIGNAL = 2.3; EXPRESSED IN ADULT LIVER, SIGNAL = 6.1; EXPRESSED IN BONE MARROW, SIGNAL = 2.8; SWISSPROT HIT: P23683, EVALUE 2.60e+00
GRSHERERASTPLCAPSLGPRPPLGGALPAVRRGKQRERCGGGRAEAPHSGPLGSPGTFEPKEAGLSCEGTPSLSLPGLQRTAGDS

SEQ ID NO: 29219 - protein, 72 aa, Homo sapiens
  MAP TO CHR7.1; EXPRESSED IN BONE MARROW, SIGNAL = 0.54; EXPRESSED IN FETAL LIVER, SIGNAL = 0.57; EXPRESSED IN LUNG, SIGNAL =   1; EXPRESSED IN HELA, SIGNAL = 0.71; EXPRESSED IN BRAIN, SIGNAL = 0.54; SWISSPROT HIT: P07942, EVALUE 8.00e-35
LVLMPYCKSLDIFTVGGSGDGVVTNSAWETFQRYRCLENSRSVVKTPMTDVCRNIIFSISALLHQTGLGRYC

SEQ ID NO: 29220 - protein, 46 aa, Homo sapiens
  MAP TO CHR9.1; EXPRESSED IN HEART, SIGNAL = 1.2; EXPRESSED IN BONE MARROW, SIGNAL = 1.3; EXPRESSED IN LUNG, SIGNAL =   1; EXPRESSED IN PLACENTA, SIGNAL = 1.2; EXPRESSED IN BRAIN, SIGNAL = 1.2
WDRNRWWFGRVIKTLDICFNELPTQQIKHCNSESQSSPSVIAVLFT

SEQ ID NO: 29221 - protein, 44 aa, Homo sapiens
  MAP TO CHR7.1; EXPRESSED IN FETAL LIVER, SIGNAL = 1.3; EXPRESSED IN HELA, SIGNAL = 2.6; EXPRESSED IN BRAIN, SIGNAL = 1.2; EXPRESSED IN LUNG, SIGNAL = 0.78; EXPRESSED IN HEART, SIGNAL = 0.62; EXPRESSED IN BONE MARROW, SIGNAL = 1.3; EXPRESSED IN ADULT LIVER, SIGNAL = 0.84; EXPRESSED IN PLACENTA, SIGNAL = 1.7; SWISSPROT HIT: P14658, EVALUE 8.30e+00
LTAQQLPVLPPRLPCVLADCFQYSCTSKCAHCTFPSGLHTLCWQ

SEQ ID NO: 29222 - protein, 50 aa, Homo sapiens
  MAP TO CHR5.1; EXPRESSED IN BRAIN, SIGNAL = 0.94; EXPRESSED IN HEART, SIGNAL = 0.83; EXPRESSED IN BONE MARROW, SIGNAL = 1.2; EXPRESSED IN ADULT LIVER, SIGNAL = 0.91; EXPRESSED IN FETAL LIVER, SIGNAL = 1.1
LTCCFSNSFCVTSSCFLRRAPAPSGLPNAVGGDDGGVWMLSASSRAWNQE

SEQ ID NO: 29223 - protein, 91 aa, Homo sapiens
  MAP TO AC015651.17; EXPRESSED IN BONE MARROW, SIGNAL = 0.65; EXPRESSED IN FETAL LIVER, SIGNAL = 0.9; EXPRESSED IN BRAIN, SIGNAL = 0.65
HLGICIFKISFLVFILPFQLHSGLIFIIFSDYDPLRRFSNRVFHDILKFSEVIIIILYYVLLILKIIKLGFRDTPKHQKDNTESVEGFHCT

SEQ ID NO: 29224 - protein, 69 aa, Homo sapiens
  MAP TO CHR15.1; EXPRESSED IN BRAIN, SIGNAL = 2.3; EXPRESSED IN ADULT LIVER, SIGNAL = 2.2; EXPRESSED IN BONE MARROW, SIGNAL = 1.9; EXPRESSED IN LUNG, SIGNAL = 1.7; SWISSPROT HIT: P23842, EVALUE 5.90e+00
DNNKEADGPATKGNVNVYMLDANKVIIKLRTSIWALLSNCMLFFTRNFREGWAFTYLISVMELILPSVS

SEQ ID NO: 29225 - protein, 88 aa, Homo sapiens
  MAP TO CHR17.1; EXPRESSED IN LUNG, SIGNAL = 1.1; EXPRESSED IN HELA, SIGNAL = 1.5; EXPRESSED IN BRAIN, SIGNAL = 1.4; EXPRESSED IN HEART, SIGNAL = 0.91; EXPRESSED IN BONE MARROW, SIGNAL = 1.4; EXPRESSED IN ADULT LIVER, SIGNAL = 1.3; EXPRESSED IN PLACENTA, SIGNAL = 1.9; EXPRESSED IN FETAL LIVER, SIGNAL = 1.6; SWISSPROT HIT: P04626, EVALUE 6.00e-45
PQSGGGDLTLGLEPSEEEAPRSPLAPSEGAGSDVFDGDLGMGAAKGLQSLPTHDPSPLQRYSEDPTVPLPSETDGYVAPLTCSPQPGM

SEQ ID NO: 29226 - protein, 79 aa, Homo sapiens
  MAP TO AC068936.2; EXPRESSED IN LUNG, SIGNAL = 2.1; EXPRESSED IN BRAIN, SIGNAL = 0.74; EXPRESSED IN HEART, SIGNAL =   1; EXPRESSED IN ADULT LIVER, SIGNAL = 1.1; EXPRESSED IN PLACENTA, SIGNAL =   2; EXPRESSED IN FETAL LIVER, SIGNAL = 1.1; SWISSPROT HIT: P92484, EVALUE 9.80e+00
SSTLTPLVNKQRRWFCVCRLNPGWEQAALVGFIPQVLVQVSISYLLQGLNIIYWNEVAIQIHELNAHLWDKEAGSHQST

SEQ ID NO: 29227 - protein, 83 aa, Homo sapiens
  MAP TO CHR17.1; EXPRESSED IN PLACENTA, SIGNAL = 2.2; EXPRESSED IN FETAL LIVER, SIGNAL = 1.7; EXPRESSED IN LUNG, SIGNAL = 1.9; EXPRESSED IN BRAIN, SIGNAL = 2.1; EXPRESSED IN HEART, SIGNAL = 1.8; EXPRESSED IN BONE MARROW, SIGNAL = 1.9; SWISSPROT HIT: P34703, EVALUE 1.00e-16
FSAYIKRVIAHPSFHNINFKQAEKMMETMDQGDVIIRPSSKGENHLTVTWKVSDGIYQHVDVREEGKENAFSLGATLWINSEV

SEQ ID NO: 29228 - protein, 97 aa, Homo sapiens
  MAP TO CHR7.1; EXPRESSED IN BRAIN, SIGNAL = 0.87; EXPRESSED IN HEART, SIGNAL = 1.5; EXPRESSED IN BONE MARROW, SIGNAL =   1; EXPRESSED IN PLACENTA, SIGNAL = 1.7; EXPRESSED IN FETAL LIVER, SIGNAL =   1; EXPRESSED IN LUNG, SIGNAL = 1.5; SWISSPROT HIT: P09544, EVALUE 1.00e-50
CPCLFRQAVKRFLKQECKCHGVSGSCTLRTCWLAMADFRKTGDYLWRKYNGAIQVVMNQDGTGFTVANERFKKPTKNDLVYFENSPDYCIRDREAGK

SEQ ID NO: 29229 - protein, 67 aa, Homo sapiens
  MAP TO CHR5.1; EXPRESSED IN LUNG, SIGNAL = 0.83; EXPRESSED IN FETAL LIVER, SIGNAL = 0.64; EXPRESSED IN BRAIN, SIGNAL = 0.76; EXPRESSED IN HEART, SIGNAL = 0.61; EXPRESSED IN BONE MARROW, SIGNAL = 0.84; SWISSPROT HIT: Q16775, EVALUE 5.40e+00
SHQSGPYRLVVLGRDDLHSIWIPDDEVAVRTHRYSSLAGIQVEDLGSVCACHSHELVFVHFPCGLLK

SEQ ID NO: 29230 - protein, 52 aa, Homo sapiens
  MAP TO CHR19.1; EXPRESSED IN PLACENTA, SIGNAL =   3; EXPRESSED IN FETAL LIVER, SIGNAL = 3.1; EXPRESSED IN LUNG, SIGNAL = 2.7; EXPRESSED IN BRAIN, SIGNAL = 2.9; EXPRESSED IN HELA, SIGNAL = 3.8; EXPRESSED IN HEART, SIGNAL = 4.1; EXPRESSED IN BONE MARROW, SIGNAL = 3.4; EXPRESSED IN ADULT LIVER, SIGNAL = 5.6; SWISSPROT HIT: Q00839, EVALUE 1.00e-15
FTDNCDLHFKVARDRSSGYPLTIEGFAYLWSGARASYGVRRGRVCFEMKVSR

SEQ ID NO: 29231 - protein, 22 aa, Homo sapiens
  MAP TO CHR12.1; EXPRESSED IN HEART, SIGNAL = 2.1; EXPRESSED IN BONE MARROW, SIGNAL =   2; EXPRESSED IN ADULT LIVER, SIGNAL = 0.9; EXPRESSED IN PLACENTA, SIGNAL = 2.6; EXPRESSED IN FETAL LIVER, SIGNAL = 1.7; EXPRESSED IN LUNG, SIGNAL = 2.3; EXPRESSED IN BRAIN, SIGNAL = 2.1
KFCPLGRFPFTALLHGCPRKGL

SEQ ID NO: 29232 - protein, 105 aa, Homo sapiens
  MAP TO CHR14.1; EXPRESSED IN BRAIN, SIGNAL = 0.49; EXPRESSED IN BONE MARROW, SIGNAL = 0.46; EXPRESSED IN FETAL LIVER, SIGNAL = 0.38; SWISSPROT HIT: P06322, EVALUE 1.00e-22
SVTQMEGPVTLSEEAFLTINCTYTATGYPSLFWYVQYPGEGLQLLLKATKADDKGSNKGFEATYRKETTSFHLEKGSVQVSDSAVYFCALSDTVTGTAGGAEHKL

SEQ ID NO: 29233 - protein, 45 aa, Homo sapiens
  MAP TO CHR7.1; EXPRESSED IN HEART, SIGNAL = 1.6; EXPRESSED IN BONE MARROW, SIGNAL = 1.4; EXPRESSED IN PLACENTA, SIGNAL = 2.3; EXPRESSED IN FETAL LIVER, SIGNAL = 1.5; EXPRESSED IN LUNG, SIGNAL = 1.6; EXPRESSED IN BRAIN, SIGNAL = 1.3; SWISSPROT HIT: Q9TT94, EVALUE 8.30e+00
CSSVDFAFQCTAWPLVLSEKHCKLWGKGSPLNLSDLGQHSCLPRS

SEQ ID NO: 29234 - protein, 65 aa, Homo sapiens
  MAP TO CHR6.1; EXPRESSED IN BRAIN, SIGNAL = 1.2; EXPRESSED IN HEART, SIGNAL = 0.84; EXPRESSED IN ADULT LIVER, SIGNAL = 0.91; EXPRESSED IN BONE MARROW, SIGNAL = 1.1; EXPRESSED IN FETAL LIVER, SIGNAL = 0.89; EXPRESSED IN LUNG, SIGNAL = 0.93; SWISSPROT HIT: Q01476, EVALUE 3.30e+00
PNSLPPKPWPSGTHDSVSSPGSKCPFMSASPLATKSSSSKDDRASGPIAPDPSGLRGWGQHLCRG

SEQ ID NO: 29235 - protein, 89 aa, Homo sapiens
  MAP TO CHR19.1; EXPRESSED IN ADULT LIVER, SIGNAL = 1.4; EXPRESSED IN BONE MARROW, SIGNAL = 1.3; EXPRESSED IN FETAL LIVER, SIGNAL = 1.1; EXPRESSED IN HELA, SIGNAL = 4.1; EXPRESSED IN BRAIN, SIGNAL = 1.3; EXPRESSED IN LUNG, SIGNAL = 1.7
RHPLSVLGINYQQFLRHYLENYPIAPGRIQELEERRRRFVEACRAREAAFDAEYQRNPHRVDLDILTFTIALTASEVINPLIEELGCDK

SEQ ID NO: 29236 - protein, 32 aa, Homo sapiens
  MAP TO CHRX.1; EXPRESSED IN BONE MARROW, SIGNAL = 0.51; EXPRESSED IN FETAL LIVER, SIGNAL = 0.49; EXPRESSED IN HELA, SIGNAL = 0.4; EXPRESSED IN BRAIN, SIGNAL = 0.48; EXPRESSED IN LUNG, SIGNAL = 0.67; EXPRESSED IN HEART, SIGNAL = 0.69
RQQRIHEYIYIYLIHNIAFWMGWNIVERDEAV

SEQ ID NO: 29237 - protein, 52 aa, Homo sapiens
  MAP TO CHR2.1; EXPRESSED IN BONE MARROW, SIGNAL = 0.81; EXPRESSED IN LUNG, SIGNAL =   1; EXPRESSED IN HELA, SIGNAL = 0.91; EXPRESSED IN BRAIN, SIGNAL = 0.69; EXPRESSED IN HEART, SIGNAL = 0.96
TQTKEPRGCEWKGRLGSFHGNASMPAVAATCCLACALCQVPGGHCCLSLAQG

SEQ ID NO: 29238 - protein, 29 aa, Homo sapiens
  MAP TO CHR9.1; EXPRESSED IN PLACENTA, SIGNAL = 3.6; EXPRESSED IN LUNG, SIGNAL = 1.4; EXPRESSED IN HELA, SIGNAL = 3.2; EXPRESSED IN BRAIN, SIGNAL = 3.5; EXPRESSED IN BONE MARROW, SIGNAL = 4.2; EXPRESSED IN ADULT LIVER, SIGNAL = 1.6
LPDTAYGSEILMSRGKPGSLPDQQSFHSS

SEQ ID NO: 29239 - protein, 38 aa, Homo sapiens
  MAP TO CHR1.1; EXPRESSED IN ADULT LIVER, SIGNAL = 3.9; EXPRESSED IN BONE MARROW, SIGNAL = 3.4; EXPRESSED IN PLACENTA, SIGNAL = 4.9; EXPRESSED IN FETAL LIVER, SIGNAL = 3.5; EXPRESSED IN LUNG, SIGNAL = 3.1; EXPRESSED IN HELA, SIGNAL = 5.3; EXPRESSED IN BRAIN, SIGNAL = 3.9; EXPRESSED IN HEART, SIGNAL = 3.1; SWISSPROT HIT: P98198, EVALUE 8.00e-16
ARTTTLNEELGQVEYIFSDKTGTLTQNIMVFNKCSING

SEQ ID NO: 29240 - protein, 139 aa, Homo sapiens
  MAP TO CHR5.1; EXPRESSED IN LUNG, SIGNAL = 1.7; EXPRESSED IN BRAIN, SIGNAL = 1.4; EXPRESSED IN HEART, SIGNAL = 1.5; EXPRESSED IN BONE MARROW, SIGNAL = 1.2; SWISSPROT HIT: Q9UN74, EVALUE 4.00e-75
VVTARDGGSPSLWATASVSVEVADVNDNAPAFAQPEYTVFVKENNPPGCHIFTVSAWDADAQENALVSYSLVERRVGERALSSYVSVHAESGKVYALQPLDHEELELLQFQVTARDAGVPPLGSNVTLQVFVLDENDNA

SEQ ID NO: 29241 - protein, 85 aa, Homo sapiens
  MAP TO CHR7.1; EXPRESSED IN ADULT LIVER, SIGNAL = 0.51; EXPRESSED IN HELA, SIGNAL = 0.85; EXPRESSED IN BRAIN, SIGNAL = 0.9; EXPRESSED IN LUNG, SIGNAL = 0.93; EXPRESSED IN BONE MARROW, SIGNAL = 0.82; EXPRESSED IN HEART, SIGNAL =   1; SWISSPROT HIT: P28750, EVALUE 2.00e-01
QICVTKMSTRNCQGMDSVIKPLDTIPEDKKVRVQRTQSTFDPFEKPANQVKRVHSENNACINFKTSSTGKESPKVRRHSSPSSVS

SEQ ID NO: 29242 - protein, 40 aa, Homo sapiens
  MAP TO CHR17.1; EXPRESSED IN HELA, SIGNAL = 0.64; EXPRESSED IN BRAIN, SIGNAL = 0.78; EXPRESSED IN BONE MARROW, SIGNAL = 0.87; EXPRESSED IN HEART, SIGNAL = 0.49; EXPRESSED IN ADULT LIVER, SIGNAL = 0.67
FTDLWGHGDLGLRHMHYSLFLSPLISLVGKGSINHRPSSL

SEQ ID NO: 29243 - protein, 67 aa, Homo sapiens
  MAP TO CHR6.1; EXPRESSED IN HEART, SIGNAL = 2.3; EXPRESSED IN BONE MARROW, SIGNAL = 2.1; EXPRESSED IN PLACENTA, SIGNAL = 2.1; EXPRESSED IN FETAL LIVER, SIGNAL = 2.5; EXPRESSED IN HELA, SIGNAL = 2.6; EXPRESSED IN BRAIN, SIGNAL = 2.1; SWISSPROT HIT: O55137, EVALUE 2.00e+00
LTVDTDSVVGLGLLSIPVHCLAPENPLILDPDSRKEEGAVGKDTSHTVPGASSLGRQDLPSFCPACV

SEQ ID NO: 29244 - protein, 87 aa, Homo sapiens
  MAP TO CHR12.1; EXPRESSED IN FETAL LIVER, SIGNAL = 3.6; EXPRESSED IN HELA, SIGNAL = 5.1; EXPRESSED IN LUNG, SIGNAL = 2.6; EXPRESSED IN BRAIN, SIGNAL = 4.2; EXPRESSED IN HEART, SIGNAL = 2.9; EXPRESSED IN BONE MARROW, SIGNAL = 3.5; EXPRESSED IN ADULT LIVER, SIGNAL = 2.9; SWISSPROT HIT: O14343, EVALUE 2.80e+00
HEPAGALMEPQPCPGSLAESFLEEELRLNAELSQLQFSEPVGIIYNPVEYAWEPHRNYVTRYCQGPKEVLFLGMNPGPFGMAQTGVK

SEQ ID NO: 29245 - protein, 97 aa, Homo sapiens
  MAP TO CHR7.1; EXPRESSED IN PLACENTA, SIGNAL = 6.8; EXPRESSED IN FETAL LIVER, SIGNAL = 6.5; EXPRESSED IN HEART, SIGNAL = 4.3; EXPRESSED IN BONE MARROW, SIGNAL = 7.6; EXPRESSED IN ADULT LIVER, SIGNAL =   3; EXPRESSED IN LUNG, SIGNAL = 2.8; EXPRESSED IN BRAIN, SIGNAL =   7; EXPRESSED IN HELA, SIGNAL = 6.4; SWISSPROT HIT: P21333, EVALUE 9.00e-25
LMVSLALHAEVAVGQEQAFSVNTRGAGGQGQLDVRMTSPSRRPIPCKLEPGGGAEAQAVRYMPPEEGPYKVDITYDGHPVPGSPFAVEGVLPPDPSK

SEQ ID NO: 29246 - protein, 69 aa, Homo sapiens
  MAP TO CHR7.1; EXPRESSED IN BRAIN, SIGNAL = 0.79; EXPRESSED IN LUNG, SIGNAL = 1.1; EXPRESSED IN HEART, SIGNAL = 0.97; EXPRESSED IN ADULT LIVER, SIGNAL = 1.6; EXPRESSED IN BONE MARROW, SIGNAL = 0.59; SWISSPROT HIT: Q15165, EVALUE 6.00e-37
SVNDITAVGPAHFYATNDHYFSDPFLKYLETYLNLHWANVVYYSPNEVKVVAEGFDSANGINISPDDKY

SEQ ID NO: 29247 - protein, 52 aa, Homo sapiens
  MAP TO CHR17.1; EXPRESSED IN PLACENTA, SIGNAL = 1.6; EXPRESSED IN FETAL LIVER, SIGNAL = 1.7; EXPRESSED IN LUNG, SIGNAL = 2.5; EXPRESSED IN BRAIN, SIGNAL = 1.1; EXPRESSED IN BONE MARROW, SIGNAL = 1.3; EXPRESSED IN HEART, SIGNAL = 1.2; SWISSPROT HIT: P52631, EVALUE 1.00e-21
LGSRYIMGFISKERERAILSTKPPGTFLLRFSESSKEGGVTFTWVEKDISGK

SEQ ID NO: 29248 - protein, 60 aa, Homo sapiens
  MAP TO CHR2.1; EXPRESSED IN ADULT LIVER, SIGNAL = 1.5; EXPRESSED IN PLACENTA, SIGNAL =   2; EXPRESSED IN FETAL LIVER, SIGNAL = 1.5; EXPRESSED IN LUNG, SIGNAL = 1.5; EXPRESSED IN BRAIN, SIGNAL =   2; EXPRESSED IN BONE MARROW, SIGNAL = 1.5; EXPRESSED IN HEART, SIGNAL = 1.3; SWISSPROT HIT: P54882, EVALUE 2.10e+00
LKCNFLLTSYKGPLLEDGALSQAVSAGASSPEFTKLCAWLVSELRVLCKLEENVQATNSK

SEQ ID NO: 29249 - protein, 48 aa, Homo sapiens
  MAP TO CHR14.1; EXPRESSED IN FETAL LIVER, SIGNAL = 0.55; EXPRESSED IN LUNG, SIGNAL =   1; EXPRESSED IN BRAIN, SIGNAL = 0.98; EXPRESSED IN HEART, SIGNAL = 1.2
NPAQCPLCSGLQALGQTFGANPAFASSLRYLDLSKNPGLLATDEANVS

SEQ ID NO: 29250 - protein, 160 aa, Homo sapiens
  MAP TO CHR20.1; EXPRESSED IN HELA, SIGNAL =   2; EXPRESSED IN FETAL LIVER, SIGNAL = 2.1; EXPRESSED IN BRAIN, SIGNAL = 2.6; EXPRESSED IN LUNG, SIGNAL = 1.4; EXPRESSED IN HEART, SIGNAL = 1.5; EXPRESSED IN PLACENTA, SIGNAL = 2.8; SWISSPROT HIT: Q9NUA8, EVALUE 4.60e-02
VIVTMASKRKSTTPCMIPVKTVVLQDASMEAQPAETLPEGPQQDLPPEASAASSEAAQNPSSTDGSTLANGHRSTLDGYLYSCKYCDFRSHDMTQFVGHMNSEHTDFNKDPTFVCSGCSFLAKTPEGLSLHNATCHSGEASFVWNVAKPDNHVVVEQSIP

SEQ ID NO: 29251 - protein, 106 aa, Homo sapiens
  MAP TO CHR7.1; EXPRESSED IN HELA, SIGNAL =   1; EXPRESSED IN BRAIN, SIGNAL = 0.76; EXPRESSED IN HEART, SIGNAL =   1; EXPRESSED IN LUNG, SIGNAL =   1; SWISSPROT HIT: P03999, EVALUE 6.00e-58
NISSVGPWDGPQYHIAPVWAFYLQAAFMGTVFLIGFPLNAMVLVATLRYKKLRQPLNYILVNVSFGGFLLCIFSVFPVFVASCNGYFVFGRHVCALEGFLGTVAGT

SEQ ID NO: 29252 - protein, 22 aa, Homo sapiens
  MAP TO CHR7.1; EXPRESSED IN BRAIN, SIGNAL = 0.5; EXPRESSED IN HEART, SIGNAL = 0.66; EXPRESSED IN FETAL LIVER, SIGNAL = 0.4
ECSLRLPCASKGQGIDISISAT

SEQ ID NO: 29253 - protein, 48 aa, Homo sapiens
  MAP TO CHR7.1; EXPRESSED IN HEART, SIGNAL = 0.82; EXPRESSED IN BONE MARROW, SIGNAL = 0.65; EXPRESSED IN BRAIN, SIGNAL = 0.64; SWISSPROT HIT: Q01965, EVALUE 3.70e+00
KAICNFKCSFKDTVSRGNSCFQISTHFLFPERNKRVNRPQMLPPRVSY

SEQ ID NO: 29254 - protein, 68 aa, Homo sapiens
  MAP TO CHR19.1; EXPRESSED IN FETAL LIVER, SIGNAL = 1.1; EXPRESSED IN LUNG, SIGNAL = 2.1; EXPRESSED IN HELA, SIGNAL =   1; EXPRESSED IN BRAIN, SIGNAL = 0.97; EXPRESSED IN HEART, SIGNAL = 2.1; EXPRESSED IN BONE MARROW, SIGNAL = 0.88; SWISSPROT HIT: P90747, EVALUE 2.00e-26
VCHVIKQGRCTLVTTLQMFKILALNALILAYSQSVLYLEGVKFSDFQATLQGLLLAGCFLFISRSKVG

SEQ ID NO: 29255 - protein, 84 aa, Homo sapiens
  MAP TO CHR10.1; EXPRESSED IN HELA, SIGNAL = 1.3; EXPRESSED IN BRAIN, SIGNAL = 1.5; EXPRESSED IN LUNG, SIGNAL = 1.9; EXPRESSED IN HEART, SIGNAL = 2.4; EXPRESSED IN ADULT LIVER, SIGNAL = 0.78; EXPRESSED IN BONE MARROW, SIGNAL = 1.5; SWISSPROT HIT: P05423, EVALUE 2.00e-03
KEELQDEEEAKIKAPSRAARKTPGPPEGHIRGRAAQGAEPHQGGGIAVPPVARHPPWPPTYPGHQAHQGRGTGQGQRGGTHQAG

SEQ ID NO: 29256 - protein, 43 aa, Homo sapiens
  MAP TO CHRX.1; EXPRESSED IN FETAL LIVER, SIGNAL =   1; EXPRESSED IN PLACENTA, SIGNAL = 1.5; EXPRESSED IN LUNG, SIGNAL = 0.67; EXPRESSED IN BRAIN, SIGNAL = 1.2; EXPRESSED IN BONE MARROW, SIGNAL = 1.2; EXPRESSED IN HEART, SIGNAL = 0.76; EXPRESSED IN ADULT LIVER, SIGNAL = 1.4; SWISSPROT HIT: P12689, EVALUE 4.90e+00
SILKGEMVLHALSLISLTLRVCLFLSQMKSSLQLRFPSLLKTW

SEQ ID NO: 29257 - protein, 51 aa, Homo sapiens
  MAP TO CHR17.1; EXPRESSED IN FETAL LIVER, SIGNAL = 1.8; EXPRESSED IN BRAIN, SIGNAL = 1.5; EXPRESSED IN BONE MARROW, SIGNAL = 1.1; EXPRESSED IN ADULT LIVER, SIGNAL = 0.63; EXPRESSED IN PLACENTA, SIGNAL = 3.3; SWISSPROT HIT: O42354, EVALUE 6.30e+00
GKLIICNVTGIAHRRPQGESYDQAIRNDETGLWQCPFCQQDNFPELSEVCA

SEQ ID NO: 29258 - protein, 36 aa, Homo sapiens
  MAP TO CHR13.1; EXPRESSED IN ADULT LIVER, SIGNAL = 5.5; EXPRESSED IN PLACENTA, SIGNAL = 4.9; EXPRESSED IN FETAL LIVER, SIGNAL = 3.8; EXPRESSED IN BRAIN, SIGNAL = 3.4; EXPRESSED IN LUNG, SIGNAL = 2.5; EXPRESSED IN HEART, SIGNAL = 1.7; EXPRESSED IN BONE MARROW, SIGNAL = 4.1
LTSKMCLWLFVQILNSTKRMVVSGSLVYSLQSDYPE

SEQ ID NO: 29259 - protein, 63 aa, Homo sapiens
  MAP TO CHR19.1; EXPRESSED IN FETAL LIVER, SIGNAL = 2.3; EXPRESSED IN LUNG, SIGNAL = 3.4; EXPRESSED IN BRAIN, SIGNAL =   3; EXPRESSED IN BONE MARROW, SIGNAL = 3.3; EXPRESSED IN PLACENTA, SIGNAL = 3.5; EXPRESSED IN HELA, SIGNAL = 3.2; EXPRESSED IN HEART, SIGNAL =   3; EXPRESSED IN ADULT LIVER, SIGNAL = 2.1; SWISSPROT HIT: P57197, EVALUE 1.60e+00
LAPIPRSTNVLRGAQGHWRTGKRGSWHPHLFLTPSPVPRKWVQGAKGTHVGNSCRPPMRGSTG

SEQ ID NO: 29260 - protein, 50 aa, Homo sapiens
  MAP TO CHR9.1; EXPRESSED IN HEART, SIGNAL = 0.76; EXPRESSED IN ADULT LIVER, SIGNAL = 1.6; EXPRESSED IN BONE MARROW, SIGNAL = 1.1; EXPRESSED IN FETAL LIVER, SIGNAL = 1.2; EXPRESSED IN LUNG, SIGNAL = 0.59; EXPRESSED IN HELA, SIGNAL = 1.3; EXPRESSED IN BRAIN, SIGNAL = 1.2
KRLKAISSSTLTPRMQSGANLSAWGPQDLTGCQHLLYIPIGPVSELTRHV

SEQ ID NO: 29261 - protein, 76 aa, Homo sapiens
  MAP TO CHR6.1; EXPRESSED IN HEART, SIGNAL = 0.89; EXPRESSED IN BONE MARROW, SIGNAL = 1.3; EXPRESSED IN PLACENTA, SIGNAL = 1.3; EXPRESSED IN FETAL LIVER, SIGNAL = 0.92; EXPRESSED IN BRAIN, SIGNAL = 1.1; EXPRESSED IN LUNG, SIGNAL = 1.5; SWISSPROT HIT: P70596, EVALUE 4.80e+00
MLTCPRSTPCTSRHGSPSGTLGTGHTRGGCSPGTRRPGAAGTPAPAGSAHSTSLCAPSPCSSLLSTGDAAGVFSVS

SEQ ID NO: 29262 - protein, 51 aa, Homo sapiens
  MAP TO CHR8.1; EXPRESSED IN PLACENTA, SIGNAL = 6.4; EXPRESSED IN FETAL LIVER, SIGNAL = 5.3; EXPRESSED IN BONE MARROW, SIGNAL = 6.4; EXPRESSED IN LUNG, SIGNAL = 4.4; EXPRESSED IN BRAIN, SIGNAL =   6; EXPRESSED IN HELA, SIGNAL =   6; EXPRESSED IN HEART, SIGNAL = 3.4; EXPRESSED IN ADULT LIVER, SIGNAL = 3.8; SWISSPROT HIT: Q43950, EVALUE 2.80e+00
TFSSWIFSSILLEATSWALKRAMVLVSSGSRMFPLSSRTTRSNPSILERKE

SEQ ID NO: 29263 - protein, 68 aa, Homo sapiens
  MAP TO CHR11.1; EXPRESSED IN PLACENTA, SIGNAL = 1.5; EXPRESSED IN FETAL LIVER, SIGNAL = 1.7; EXPRESSED IN LUNG, SIGNAL = 1.4; EXPRESSED IN BRAIN, SIGNAL = 1.3; EXPRESSED IN HEART, SIGNAL = 1.1; EXPRESSED IN ADULT LIVER, SIGNAL =   1; EXPRESSED IN BONE MARROW, SIGNAL = 1.2; SWISSPROT HIT: P08195, EVALUE 7.00e-15
CRLLIAGTNSSDLQQILSLLESNKDLLLTSSYLSDSGSTGEHTKSLVTQYLNATGNRWCSWSVSTMLV

SEQ ID NO: 29264 - protein, 52 aa, Homo sapiens
  MAP TO CHR20.1; EXPRESSED IN HELA, SIGNAL = 2.1; EXPRESSED IN BRAIN, SIGNAL = 1.5; EXPRESSED IN HEART, SIGNAL = 1.7; EXPRESSED IN BONE MARROW, SIGNAL = 1.6; EXPRESSED IN FETAL LIVER, SIGNAL =   2; EXPRESSED IN PLACENTA, SIGNAL = 1.7; EXPRESSED IN LUNG, SIGNAL =   2; SWISSPROT HIT: Q15269, EVALUE 9.00e-23
AVEVVTSSLPELYVEKVLEFLASSFEVSRHLEFYLLWTHKLLMLHGQKLKSR

SEQ ID NO: 29265 - protein, 39 aa, Homo sapiens
  MAP TO CHR22.1; EXPRESSED IN HEART, SIGNAL = 1.4; EXPRESSED IN BONE MARROW, SIGNAL = 1.3; EXPRESSED IN PLACENTA, SIGNAL = 1.5; EXPRESSED IN FETAL LIVER, SIGNAL = 1.4; EXPRESSED IN LUNG, SIGNAL = 1.4; EXPRESSED IN HELA, SIGNAL = 1.8; EXPRESSED IN BRAIN, SIGNAL = 1.4
PRPGNFTAFQMTTVLSTLHEASQASWGDHATSITSERRQ

SEQ ID NO: 29266 - protein, 82 aa, Homo sapiens
  MAP TO CHRX.1; EXPRESSED IN BONE MARROW, SIGNAL = 0.42; EXPRESSED IN FETAL LIVER, SIGNAL = 0.39; EXPRESSED IN BRAIN, SIGNAL = 0.4; EXPRESSED IN LUNG, SIGNAL = 0.6; SWISSPROT HIT: P31473, EVALUE 9.20e-01
DSLSDDFTSLSKDGLIQKPGSNAFVGGAKNCSLSVDDQKDPVASTLGAMPNTLQITPAMAQGINADIKHQLMKEVRKFGRSK

SEQ ID NO: 29267 - protein, 99 aa, Homo sapiens
  MAP TO CHR6.1; EXPRESSED IN BONE MARROW, SIGNAL =   1; EXPRESSED IN HEART, SIGNAL = 0.6; EXPRESSED IN ADULT LIVER, SIGNAL = 0.81; EXPRESSED IN PLACENTA, SIGNAL = 1.3; EXPRESSED IN LUNG, SIGNAL = 0.7; EXPRESSED IN BRAIN, SIGNAL = 0.91
RDSLLMPLSLSKRCKGSFPSCSGDFSKSSSSSTFLGFRNLLGGLLSLMGFRVGGSGGDSCSDKEGAGPVGSRVGGGGSLESSIRKKENLLEHFRKSLLL

SEQ ID NO: 29268 - protein, 67 aa, Homo sapiens
  MAP TO CHR18.1; EXPRESSED IN BRAIN, SIGNAL = 0.5; EXPRESSED IN BONE MARROW, SIGNAL = 0.46; EXPRESSED IN FETAL LIVER, SIGNAL = 0.63; SWISSPROT HIT: O15084, EVALUE 5.00e-07
DKDGDRAVHHAAFGDEGAVIEVLHRGSADLNARNKRRQTPLHIAVNKGHLQVVKTLLDFGCHPSLQV

SEQ ID NO: 29269 - protein, 63 aa, Homo sapiens
  MAP TO CHR17.1; EXPRESSED IN ADULT LIVER, SIGNAL = 1e+02; EXPRESSED IN BONE MARROW, SIGNAL = 0.53; EXPRESSED IN HELA, SIGNAL = 0.47; EXPRESSED IN BRAIN, SIGNAL = 0.55; EXPRESSED IN HEART, SIGNAL = 0.96; SWISSPROT HIT: P04004, EVALUE 2.00e-26
CSSGKQYWEYQFQHQPSQEECEGSSLSAVFEHFAMMQRDSWEDIFELLFWGRTSGMERGQVLL

SEQ ID NO: 29270 - protein, 91 aa, Homo sapiens
  MAP TO CHR17.1; EXPRESSED IN BRAIN, SIGNAL = 0.8; EXPRESSED IN ADULT LIVER, SIGNAL = 0.75; EXPRESSED IN HEART, SIGNAL = 0.85; EXPRESSED IN BONE MARROW, SIGNAL = 0.97; SWISSPROT HIT: P38398, EVALUE 2.00e-49
DLNTTEKRAAERHPEKYQGSSVSNLHVEPCGTNTHASSLQHENSSLLLTKDRMNVEKAEFCNKSKQPGLARSQHNRWAGSKETCNDRRTPS

SEQ ID NO: 29271 - protein, 41 aa, Homo sapiens
  MAP TO CHR7.1; EXPRESSED IN LUNG, SIGNAL = 0.68; EXPRESSED IN BRAIN, SIGNAL = 1.1; EXPRESSED IN HEART, SIGNAL = 0.65; EXPRESSED IN ADULT LIVER, SIGNAL = 0.7; EXPRESSED IN BONE MARROW, SIGNAL = 1.1
YLCISLYDCSFSHVILTCSQNSPPRILQTTHFFDYWQEFGF

SEQ ID NO: 29272 - protein, 116 aa, Homo sapiens
  MAP TO CHR19.1; EXPRESSED IN ADULT LIVER, SIGNAL = 5.8; EXPRESSED IN FETAL LIVER, SIGNAL = 4.2; EXPRESSED IN BRAIN, SIGNAL = 3.2; EXPRESSED IN PLACENTA, SIGNAL = 5.8; EXPRESSED IN LUNG, SIGNAL = 2.4; EXPRESSED IN HELA, SIGNAL =  10; EXPRESSED IN HEART, SIGNAL = 2.3; EXPRESSED IN BONE MARROW, SIGNAL =   4
APSWRPQKNRSRAASGGAALASPGPGTGSGAPAGSGGKERSENLSLRRSVSELSLQGRRRRQQERRQQALSMAPGAADAQIGTADPGDFDQLTQCLIQAPSNRPYFLLLQGYQDAQ

SEQ ID NO: 29273 - protein, 93 aa, Homo sapiens
  MAP TO CHR12.1; EXPRESSED IN ADULT LIVER, SIGNAL = 0.92; EXPRESSED IN FETAL LIVER, SIGNAL = 1.1; EXPRESSED IN BRAIN, SIGNAL = 1.3; EXPRESSED IN LUNG, SIGNAL = 1.1; EXPRESSED IN HEART, SIGNAL =   1; SWISSPROT HIT: P36896, EVALUE 2.00e-39
CQICNVRFLPILWFTGLPLFVQRTVARTIVLQEIIGKGRFGEVWRGRWRGGDVAVKIFSSREERSWFREAEIYQTVMLRHENILGFIAADNKG

SEQ ID NO: 29274 - protein, 67 aa, Homo sapiens
  MAP TO CHR8.1; EXPRESSED IN FETAL LIVER, SIGNAL = 5.7; EXPRESSED IN HELA, SIGNAL = 5.5; EXPRESSED IN BRAIN, SIGNAL = 6.8; EXPRESSED IN LUNG, SIGNAL = 5.6; EXPRESSED IN HEART, SIGNAL = 4.4; EXPRESSED IN BONE MARROW, SIGNAL = 7.2; EXPRESSED IN PLACENTA, SIGNAL = 5.3; SWISSPROT HIT: P58099, EVALUE 4.10e-01
RGAPAHLKGFVLSLFLVPDLSIGDASAQLDELNSLGLVGFRGNKGQVAALNRPRQGDSSYYNGQRRQ

SEQ ID NO: 29275 - protein, 80 aa, Homo sapiens
  MAP TO AC023121.3; EXPRESSED IN ADULT LIVER, SIGNAL = 1.1; EXPRESSED IN BONE MARROW, SIGNAL = 1.1; EXPRESSED IN HEART, SIGNAL = 0.72; EXPRESSED IN FETAL LIVER, SIGNAL = 0.93; EXPRESSED IN BRAIN, SIGNAL = 1.2; SWISSPROT HIT: Q93050, EVALUE 9.00e-38
LFSYFKKPLNIYFGFIPEIIFMTSLFGYLVILIFYKWTAYDAHTSENAPSLLIHFINMFLFSYPESGYSMLYSGQVRQPR

SEQ ID NO: 29276 - protein, 40 aa, Homo sapiens
  MAP TO CHR5.1; EXPRESSED IN BONE MARROW, SIGNAL = 0.88; EXPRESSED IN ADULT LIVER, SIGNAL =   1; EXPRESSED IN FETAL LIVER, SIGNAL = 0.94; EXPRESSED IN LUNG, SIGNAL = 0.91; EXPRESSED IN BRAIN, SIGNAL = 0.78; EXPRESSED IN HEART, SIGNAL = 1.2
RGDFPAEPTLLVSVCFIWLFASADNLDPLTLRPNTPLPML

SEQ ID NO: 29277 - protein, 62 aa, Homo sapiens [sequence omitted]

SEQ ID NO: 29278 - protein, 37 aa, Homo sapiens
  MAP TO CHR14.1; EXPRESSED IN ADULT LIVER, SIGNAL = 1.3; EXPRESSED IN PLACENTA, SIGNAL = 2.8; EXPRESSED IN FETAL LIVER, SIGNAL = 1.2; EXPRESSED IN LUNG, SIGNAL = 1.6; EXPRESSED IN BRAIN, SIGNAL = 0.75; EXPRESSED IN HEART, SIGNAL = 1.5
HSSRCSKYHAQMSRAVAGVGAVRCCRRGVVHDVWTLD

SEQ ID NO: 29279 - protein, 68 aa, Homo sapiens
  MAP TO CHR20.1; EXPRESSED IN ADULT LIVER, SIGNAL = 0.74; EXPRESSED IN PLACENTA, SIGNAL = 1.6; EXPRESSED IN FETAL LIVER, SIGNAL = 0.98; EXPRESSED IN LUNG, SIGNAL = 1.3; EXPRESSED IN BRAIN, SIGNAL = 1.3; EXPRESSED IN BONE MARROW, SIGNAL = 0.86; EXPRESSED IN HEART, SIGNAL = 1.1; SWISSPROT HIT: P10686, EVALUE 3.00e-35
RRNGKVQHCRIHSRQDAGTPKFFLTDNLVFDSLYDLITHYQQVPLRCNEFEMRLSEPVPQTNAHESKE

SEQ ID NO: 29280 - protein, 86 aa, Homo sapiens
  MAP TO CHR17.1; EXPRESSED IN HELA, SIGNAL = 1.1; EXPRESSED IN BRAIN, SIGNAL = 1.2; EXPRESSED IN HEART, SIGNAL = 0.63; EXPRESSED IN ADULT LIVER, SIGNAL = 0.94; EXPRESSED IN BONE MARROW, SIGNAL = 1.3; SWISSPROT HIT: Q99062, EVALUE 8.60e+00
VFNRSLVSIRRCLSLAGSCGTSWACCRPGLGPPGHPAGSAWTPDPPCPQLRPPCLSPCASRPPPSLQDTTLAEVHCPASVGTMETG

SEQ ID NO: 29281 - protein, 31 aa, Homo sapiens
  MAP TO CHR5.1; EXPRESSED IN LUNG, SIGNAL = 0.73; EXPRESSED IN BRAIN, SIGNAL = 0.74; EXPRESSED IN HEART, SIGNAL = 0.9
LSSLLLCINYFLQLYWQKRLSKPSSLMILKV

SEQ ID NO: 29282 - protein, 40 aa, Homo sapiens
  MAP TO CHR20.1; EXPRESSED IN FETAL LIVER, SIGNAL = 0.29; EXPRESSED IN BRAIN, SIGNAL = 0.39; EXPRESSED IN BONE MARROW, SIGNAL = 0.39; SWISSPROT HIT: O00764, EVALUE 7.00e-15
VMDMLHSMGPDTVVITSSDLPSPQGSNYLIVLGSQRRSKC

SEQ ID NO: 29283 - protein, 46 aa, Homo sapiens
  MAP TO CHR6.1; EXPRESSED IN FETAL LIVER, SIGNAL = 0.97; EXPRESSED IN BRAIN, SIGNAL = 0.85; EXPRESSED IN HEART, SIGNAL = 0.74; EXPRESSED IN ADULT LIVER, SIGNAL = 1.5; SWISSPROT HIT: P31209, EVALUE 8.30e+00
THRILAADIPFSSAVYFGDLDPRQTREFLFREFLPSRSQSLTMTTP

SEQ ID NO: 29284 - protein, 54 aa, Homo sapiens
  MAP TO CHR19.1; EXPRESSED IN LUNG, SIGNAL = 0.79; EXPRESSED IN HELA, SIGNAL = 1.9; EXPRESSED IN BRAIN, SIGNAL = 1.8; EXPRESSED IN PLACENTA, SIGNAL = 1.9; EXPRESSED IN FETAL LIVER, SIGNAL = 1.5; EXPRESSED IN HEART, SIGNAL = 0.72; EXPRESSED IN BONE MARROW, SIGNAL = 1.5; EXPRESSED IN ADULT LIVER, SIGNAL = 0.99; SWISSPROT HIT: P42859, EVALUE 9.60e-01
SRTWFQPTLLPAAWVSWPPQFPVLGEQAPEPSDVHGPATAVTHDPHREELVRAL

SEQ ID NO: 29285 - protein, 44 aa, Homo sapiens
  MAP TO CHR1.1; EXPRESSED IN BONE MARROW, SIGNAL = 0.86; EXPRESSED IN HEART, SIGNAL = 0.62; EXPRESSED IN ADULT LIVER, SIGNAL = 0.93; EXPRESSED IN PLACENTA, SIGNAL = 1.3; EXPRESSED IN FETAL LIVER, SIGNAL = 1.1; EXPRESSED IN HELA, SIGNAL =   1; EXPRESSED IN BRAIN, SIGNAL =   1
PDQRVASFCTLTDMQHGQDLEGAQELPLCVDPGSGKEFMDTTGY

SEQ ID NO: 29286 - protein, 80 aa, Homo sapiens
  MAP TO CHR14.1; EXPRESSED IN BONE MARROW, SIGNAL =  36; EXPRESSED IN ADULT LIVER, SIGNAL = 1.2; EXPRESSED IN PLACENTA, SIGNAL =  29; EXPRESSED IN HELA, SIGNAL =  22; EXPRESSED IN FETAL LIVER, SIGNAL =  34; EXPRESSED IN LUNG, SIGNAL =  41; EXPRESSED IN BRAIN, SIGNAL =  27; EXPRESSED IN HEART, SIGNAL =  35; SWISSPROT HIT: Q92813, EVALUE 9.00e-37
EAEKMGILSVDLLITLQILPVFFSNCLFLALYDSVILLKHVVLLLSRSKSTRGEWRRMLTSEGLRCVWKSFLLDAYKQVS

SEQ ID NO: 29287 - protein, 62 aa, Homo sapiens
  MAP TO AC007873.4; EXPRESSED IN FETAL LIVER, SIGNAL = 0.82; EXPRESSED IN LUNG, SIGNAL = 1.2; EXPRESSED IN HELA, SIGNAL = 0.65; EXPRESSED IN BRAIN, SIGNAL = 0.59; EXPRESSED IN HEART, SIGNAL = 0.88; EXPRESSED IN BONE MARROW, SIGNAL = 0.65; SWISSPROT HIT: Q9HHA2, EVALUE 1.60e+00
NRPHLGPLTCEGVPDVHSPVTAHHVLRGLKLAHEEDALAVLGVDEAWGRLAGPVAVVVTAAR

SEQ ID NO: 29288 - protein, 98 aa, Homo sapiens
  MAP TO CHR6.1; EXPRESSED IN BRAIN, SIGNAL = 5.1; EXPRESSED IN HEART, SIGNAL = 2.6; EXPRESSED IN ADULT LIVER, SIGNAL = 5.5; EXPRESSED IN BONE MARROW, SIGNAL = 5.1; EXPRESSED IN PLACENTA, SIGNAL = 4.9; EXPRESSED IN FETAL LIVER, SIGNAL =   6; EXPRESSED IN LUNG, SIGNAL = 2.4; SWISSPROT HIT: P78956, EVALUE 1.10e+00
AGYPTCKEKIKRRPGGRSEVIYNYVQRPFIQMSWEKEEGKSRHVDFQCVRSKSLTNLVAAGDDVLEDQEILMHHPPQVDELDRLNAPLSQMASNDFQD

SEQ ID NO: 29289 - protein, 62 aa, Homo sapiens
  MAP TO CHRX.1; EXPRESSED IN FETAL LIVER, SIGNAL = 0.69; EXPRESSED IN HELA, SIGNAL = 0.86; EXPRESSED IN BRAIN, SIGNAL = 0.86; EXPRESSED IN LUNG, SIGNAL = 0.71; EXPRESSED IN HEART, SIGNAL = 0.72; EXPRESSED IN BONE MARROW, SIGNAL = 0.9; EXPRESSED IN ADULT LIVER, SIGNAL = 0.79; SWISSPROT HIT: Q13315, EVALUE 6.10e+00
RLGLKNILESVQKLYLELDAIAEMLMQFKMRNAYCLRSASPFVVIHFVEDSLIHEDIASHLD

SEQ ID NO: 29290 - protein, 72 aa, Homo sapiens
  MAP TO CHR17.1; EXPRESSED IN BRAIN, SIGNAL = 0.79; EXPRESSED IN BONE MARROW, SIGNAL = 0.73; EXPRESSED IN HEART, SIGNAL = 0.91; EXPRESSED IN ADULT LIVER, SIGNAL = 1.1; EXPRESSED IN FETAL LIVER, SIGNAL = 0.7; EXPRESSED IN LUNG, SIGNAL = 0.7; SWISSPROT HIT: O15296, EVALUE 9.40e+00
RLLFGIAQPQLPPKCLLSGPTSEGLMTWELDRLLWARSVENLATATTTLTSLAQLLGKISNIVIKDDVASEV

SEQ ID NO: 29291 - protein, 59 aa, Homo sapiens
  MAP TO CHRX.1; EXPRESSED IN FETAL LIVER, SIGNAL = 0.87; EXPRESSED IN LUNG, SIGNAL = 1.2; EXPRESSED IN HELA, SIGNAL = 0.85; EXPRESSED IN BRAIN, SIGNAL = 1.1; EXPRESSED IN HEART, SIGNAL = 1.2; EXPRESSED IN ADULT LIVER, SIGNAL = 1.1; SWISSPROT HIT: Q13474, EVALUE 9.00e-28
VSVQVRAAVTSPAPPQDGAGVPCLSLKLLNGSVGASGPLEPPAMNLCWNEIKKKSHNLR

SEQ ID NO: 29292 - protein, 57 aa, Homo sapiens
  MAP TO CHR2.1; EXPRESSED IN FETAL LIVER, SIGNAL = 0.84; EXPRESSED IN BRAIN, SIGNAL = 0.67; EXPRESSED IN ADULT LIVER, SIGNAL = 0.69; EXPRESSED IN BONE MARROW, SIGNAL = 0.79; SWISSPROT HIT: P27487, EVALUE 4.00e-17
YFSEEMLATKYALWWSPNGKFLAYAEFNDTDIPVIAYSYYGDEQYPRTINIPYPKVC

SEQ ID NO: 29293 - protein, 83 aa, Homo sapiens
  MAP TO CHR17.1; EXPRESSED IN HEART, SIGNAL = 1.2; EXPRESSED IN BONE MARROW, SIGNAL = 1.5; EXPRESSED IN PLACENTA, SIGNAL = 1.4; EXPRESSED IN FETAL LIVER, SIGNAL = 1.2; EXPRESSED IN HELA, SIGNAL = 1.3; EXPRESSED IN LUNG, SIGNAL = 1.1; EXPRESSED IN BRAIN, SIGNAL = 1.5; SWISSPROT HIT: O83614, EVALUE 3.10e+00
RHRVGLALAAKDLGDAEITDLDDHAVFVKQDVLGLEVSVQDEVGVHMMQCKQDLHEEVQDGLLLQQGITALLDELSQSAACGP

SEQ ID NO: 29294 - protein, 74 aa, Homo sapiens
  MAP TO CHR16.1; EXPRESSED IN BRAIN, SIGNAL = 1.3; EXPRESSED IN HEART, SIGNAL =   1; EXPRESSED IN ADULT LIVER, SIGNAL = 1.8; EXPRESSED IN BONE MARROW, SIGNAL = 1.5; EXPRESSED IN FETAL LIVER, SIGNAL = 1.4; EXPRESSED IN HELA, SIGNAL = 1.5; EXPRESSED IN LUNG, SIGNAL =   1; SWISSPROT HIT: Q9KZV6, EVALUE 3.60e+00
GRQVSSECQGEMLDYRRMLMEDFSLSPEIILSCRGEIEHHCSGLHRKGRTLHCLMKVVRGEKGNLGMNCQQAVR

SEQ ID NO: 29295 - protein, 76 aa, Homo sapiens
  MAP TO CHR3.1; EXPRESSED IN BRAIN, SIGNAL = 0.92; EXPRESSED IN LUNG, SIGNAL = 0.73; EXPRESSED IN HEART, SIGNAL = 0.85; EXPRESSED IN ADULT LIVER, SIGNAL = 1.3; EXPRESSED IN BONE MARROW, SIGNAL = 0.87; SWISSPROT HIT: P05688, EVALUE 1.10e+00
RSTTPHTAALGSWGSRQGSRSAAGSHGSWRECPARGSGQGCGGRSPAPRESSLVCGPSTTPAGQDRHGGIWCLVWS

SEQ ID NO: 29296 - protein, 130 aa, Homo sapiens
  MAP TO CHR1.1; EXPRESSED IN BONE MARROW, SIGNAL = 0.83; EXPRESSED IN LUNG, SIGNAL =   1; EXPRESSED IN BRAIN, SIGNAL = 0.97; SWISSPROT HIT: P41046, EVALUE 1.30e+00
IGDKSCSSHSSSNTLSSNTSSNSDDKHFGSGDLMDPELLGLTYIKGASTDSGIDTAPCMPATILGPVHLAGSRSLIHSRAEQWADAADVSGPDDEPAKLYSVHGYASTISAGSAAEGSMGDLSEISSHSR

SEQ ID NO: 29297 - protein, 97 aa, Homo sapiens
  MAP TO CHR2.1; EXPRESSED IN LUNG, SIGNAL = 0.72; EXPRESSED IN BRAIN, SIGNAL = 0.8; EXPRESSED IN HEART, SIGNAL = 2.8; EXPRESSED IN BONE MARROW, SIGNAL = 0.79; SWISSPROT HIT: P82602, EVALUE 4.80e+00
YLRRSLPPQQCPATHIHSLNDICASVTSLTINNSHCGFLRDIFNGNSFVLLQNHISLCPSYFRFRFSGYGGRKFNLGPSFYSETSKELHIEEDFWGL

SEQ ID NO: 29298 - protein, 60 aa, Homo sapiens
  MAP TO AC060233.1; EXPRESSED IN PLACENTA, SIGNAL = 1.5; EXPRESSED IN FETAL LIVER, SIGNAL =   1; EXPRESSED IN LUNG, SIGNAL = 1.9; EXPRESSED IN HELA, SIGNAL = 1.1; EXPRESSED IN BRAIN, SIGNAL = 1.2; EXPRESSED IN HEART, SIGNAL = 1.7; EXPRESSED IN BONE MARROW, SIGNAL = 1.2; SWISSPROT HIT: P06491, EVALUE 1.40e-01
GEDCPPDVVGNPTRPLHPPSPTSRSISPKYLPIFIYILCLRCPAPVRSHLHALVPSCQLP

SEQ ID NO: 29299 - protein, 138 aa, Homo sapiens
  MAP TO CHR12.1; EXPRESSED IN BONE MARROW, SIGNAL = 0.48; EXPRESSED IN HEART, SIGNAL = 0.58; EXPRESSED IN ADULT LIVER, SIGNAL = 0.53; EXPRESSED IN FETAL LIVER, SIGNAL = 0.66; EXPRESSED IN BRAIN, SIGNAL = 0.45; SWISSPROT HIT: Q25337, EVALUE 6.00e-08
GLFVPASPPLDPEKVKELQRFITLSKRLLVMTGAGISTESGIPDYRSEKVGLYARTDRRPIQHGDFVRSAPIRQRYWARNFVGWPQFSSHQPNPAHWALSTWEKLGKLYWLVTQNVDALHTKAGSRRLTELHGCMDRC

SEQ ID NO: 29300 - protein, 60 aa, Homo sapiens
  MAP TO CHR3.1; EXPRESSED IN FETAL LIVER, SIGNAL = 0.68; EXPRESSED IN BRAIN, SIGNAL = 0.65; EXPRESSED IN LUNG, SIGNAL = 0.65; EXPRESSED IN BONE MARROW, SIGNAL = 0.67; EXPRESSED IN HEART, SIGNAL = 0.67; EXPRESSED IN ADULT LIVER, SIGNAL = 0.87; SWISSPROT HIT: Q9WUR2, EVALUE 1.00e-09
RNFVNTFIQFQKSIIVVVNGPAIRLSASILPLCNVVCTNEKAWFPPLFTIFGQNPDGCST

SEQ ID NO: 29301 - protein, 63 aa, Homo sapiens
  MAP TO CHR19.1; EXPRESSED IN HEART, SIGNAL =   2; EXPRESSED IN BONE MARROW, SIGNAL = 1.3; EXPRESSED IN ADULT LIVER, SIGNAL = 2.1; EXPRESSED IN LUNG, SIGNAL = 0.99; EXPRESSED IN HELA, SIGNAL = 1.6; EXPRESSED IN BRAIN, SIGNAL = 1.2
VPVARPDCPLRPARPSCTSGLPAAPSSAVASSLLRLLAALYSQAGGTSPDPGLRLRRIRFPAL

SEQ ID NO: 29302 - protein, 76 aa, Homo sapiens
  MAP TO CHR7.1; EXPRESSED IN ADULT LIVER, SIGNAL = 0.44; EXPRESSED IN PLACENTA, SIGNAL = 4.3; EXPRESSED IN FETAL LIVER, SIGNAL = 4.4; EXPRESSED IN LUNG, SIGNAL = 5.3; EXPRESSED IN HELA, SIGNAL = 3.3; EXPRESSED IN BRAIN, SIGNAL =   4; EXPRESSED IN HEART, SIGNAL = 4.9; EXPRESSED IN BONE MARROW, SIGNAL = 4.5; SWISSPROT HIT: Q99835, EVALUE 1.00e-37
HSSNETLSCVIIFVIVYYALMAGVVWFVVLTYAWHTSFKALGTTYQPLSGKTSYFHLLTWSLPFVLTVAILAVAQV

SEQ ID NO: 29303 - protein, 111 aa, Homo sapiens
  MAP TO CHR5.1; EXPRESSED IN BRAIN, SIGNAL = 0.65; EXPRESSED IN HEART, SIGNAL = 0.49; EXPRESSED IN ADULT LIVER, SIGNAL = 0.41; EXPRESSED IN BONE MARROW, SIGNAL = 0.47; SWISSPROT HIT: Q9UN75, EVALUE 1.00e-58
LLLAAWEVGSGQLHYSVYEEAKHGTFVGRIAQDLGLELAELVPRLFRVASKRHGDLLEVNLQNGILFVNSRIDREKLCGRSAECSIHLEVIVDRPLQVFHVDVEVKDINDN

SEQ ID NO: 29304 - protein, 86 aa, Homo sapiens
  MAP TO CHR17.1; EXPRESSED IN BRAIN, SIGNAL = 3.1; EXPRESSED IN PLACENTA, SIGNAL = 3.6; EXPRESSED IN BONE MARROW, SIGNAL = 2.7; EXPRESSED IN HEART, SIGNAL = 2.2; EXPRESSED IN ADULT LIVER, SIGNAL = 3.1; EXPRESSED IN FETAL LIVER, SIGNAL = 2.6; SWISSPROT HIT: Q64008, EVALUE 2.00e-21
GRQWLADALKENDPSSVLLFLVGSKKDLSVSVPVGGLPSLVRECPPLTLAFPQTPAQYALMEKDALQVAQEMKAEYWAVSSLTGEL

SEQ ID NO: 29305 - protein, 109 aa, Homo sapiens
  MAP TO CHR13.1; EXPRESSED IN LUNG, SIGNAL = 0.75; EXPRESSED IN HELA, SIGNAL = 0.54; EXPRESSED IN BRAIN, SIGNAL = 0.91; EXPRESSED IN HEART, SIGNAL = 0.62; EXPRESSED IN ADULT LIVER, SIGNAL = 1.3; EXPRESSED IN BONE MARROW, SIGNAL = 0.99; SWISSPROT HIT: Q02401, EVALUE 4.00e-12
DYPESMKNNLSSILPDFTESEKKFIKGTADFFALCFGPTLSFQLLDPHMKFRQLESPNLRQLLSWIDLEFNHPQIFIVENGWFVSGTTKRDDAKYMYYLKKFIMETLKG

SEQ ID NO: 29306 - protein, 54 aa, Homo sapiens
  MAP TO CHR7.1; EXPRESSED IN BRAIN, SIGNAL = 0.7; EXPRESSED IN HEART, SIGNAL = 0.45
VLESIQRIAFGFLHLTRSPRHGMHSSARQKALWMPEKQQLVRATDAKRGHGFLF

SEQ ID NO: 29307 - protein, 47 aa, Homo sapiens
  MAP TO CHR22.1; EXPRESSED IN BONE MARROW, SIGNAL = 0.92; EXPRESSED IN FETAL LIVER, SIGNAL = 0.82; EXPRESSED IN LUNG, SIGNAL = 0.84; EXPRESSED IN HELA, SIGNAL = 1.1; EXPRESSED IN BRAIN, SIGNAL = 1.1; EXPRESSED IN HEART, SIGNAL = 0.9; EXPRESSED IN ADULT LIVER, SIGNAL = 0.75; SWISSPROT HIT: Q9M291, EVALUE 8.30e+00
GLTGSDMTWPEGQGRLSDTALVGRSLSTPQETGAAASGHTHGLRSGT

SEQ ID NO: 29308 - protein, 83 aa, Homo sapiens
  MAP TO CHR9.1; EXPRESSED IN BRAIN, SIGNAL = 0.51; EXPRESSED IN HEART, SIGNAL = 0.64; EXPRESSED IN BONE MARROW, SIGNAL = 0.53
APLLSRCWLGTKRQGPKQRDLYAAPLPAPAPRPCFLFIPCCRVSMGRNSAPLPHCGDTNVHSPQGLLRRSAGEGERQGLLTKS

SEQ ID NO: 29309 - protein, 77 aa, Homo sapiens
  MAP TO CHR8.1; EXPRESSED IN ADULT LIVER, SIGNAL = 9.4; EXPRESSED IN PLACENTA, SIGNAL =  18; EXPRESSED IN LUNG, SIGNAL = 4.7; EXPRESSED IN BRAIN, SIGNAL = 1.5; EXPRESSED IN HEART, SIGNAL = 2.8; SWISSPROT HIT: P11174, EVALUE 2.00e-14
EQLMQLYSARQRRRLNRGLRRKQHSLLKRLRKAKKEAPPMEKPEVVKTHLRDMIILPEMVGSMVGVYNGKTFNQVEI

SEQ ID NO: 29310 - protein, 84 aa, Homo sapiens
  MAP TO CHR13.1; EXPRESSED IN PLACENTA, SIGNAL = 2.8; EXPRESSED IN LUNG, SIGNAL = 2.1; EXPRESSED IN HEART, SIGNAL = 2.3; EXPRESSED IN FETAL LIVER, SIGNAL = 4.2; EXPRESSED IN BRAIN, SIGNAL = 3.7; EXPRESSED IN HELA, SIGNAL = 2.2; EXPRESSED IN BONE MARROW, SIGNAL = 4.4; EXPRESSED IN ADULT LIVER, SIGNAL = 4.1
YLFESKICIVRAGARDPSFELLLGFFLEALDEMVQVSVESCPTLLQLCPQFFQGWHVDLSLHIRVTRLGHQLVWNLDQRMHERA

SEQ ID NO: 29311 - protein, 88 aa, Homo sapiens
  MAP TO CHR17.1; EXPRESSED IN BRAIN, SIGNAL = 0.52; EXPRESSED IN HEART, SIGNAL = 0.75; EXPRESSED IN FETAL LIVER, SIGNAL = 0.71; EXPRESSED IN HELA, SIGNAL = 0.74; SWISSPROT HIT: Q9UKJ3, EVALUE 6.00e-48
GPKHPTGPFFPVLSKDESTALQWPSELLIFTKAEPSISYSCNPLYFDFKLSRNKDARTKGTEKPKDIGSSSKDHLQGLDPGEPNKSKE

SEQ ID NO: 29312 - protein, 70 aa, Homo sapiens
  MAP TO CHR17.1; EXPRESSED IN BRAIN, SIGNAL = 0.46; EXPRESSED IN BONE MARROW, SIGNAL = 0.54; EXPRESSED IN HEART, SIGNAL = 0.54; EXPRESSED IN FETAL LIVER, SIGNAL = 0.59; SWISSPROT HIT: P54254, EVALUE 4.30e-01
RALTIPWRSPGPFCGSAGLPPSAPAQSGHSLCSYTSFQPVHPCWVPLPCSIPVPSSALSQLSEDSLQHCH

SEQ ID NO: 29313 - protein, 61 aa, Homo sapiens
  MAP TO CHR17.1; EXPRESSED IN FETAL LIVER, SIGNAL = 0.78; EXPRESSED IN LUNG, SIGNAL = 0.95; EXPRESSED IN HELA, SIGNAL = 0.94; EXPRESSED IN BRAIN, SIGNAL = 0.91; EXPRESSED IN BONE MARROW, SIGNAL = 1.1; EXPRESSED IN HEART, SIGNAL = 0.96; SWISSPROT HIT: P29315, EVALUE 4.00e-05
LPLRFRWVPVTDAYWQILFSVLKVTRNLKELDLSGNSLSHSAVKSLCKTLRRPRCLLETLR

SEQ ID NO: 29314 - protein, 65 aa, Homo sapiens
  MAP TO CHR17.1; EXPRESSED IN FETAL LIVER, SIGNAL = 0.73; EXPRESSED IN LUNG, SIGNAL = 0.84; EXPRESSED IN BRAIN, SIGNAL = 0.72; EXPRESSED IN BONE MARROW, SIGNAL = 0.53; EXPRESSED IN HEART, SIGNAL = 0.85; SWISSPROT HIT: Q39565, EVALUE 2.00e-04
VLDREGQMDNPCSSWLADAYWDNITELDKLTNFHGLMNSFEQYPRDWHLWYTNAAPEKAMLPGTR

SEQ ID NO: 29315 - protein, 75 aa, Homo sapiens
  MAP TO CHR7.1; EXPRESSED IN HELA, SIGNAL = 1.9; EXPRESSED IN BRAIN, SIGNAL = 2.2; EXPRESSED IN HEART, SIGNAL = 2.2; EXPRESSED IN BONE MARROW, SIGNAL = 2.4; EXPRESSED IN PLACENTA, SIGNAL = 1.4; EXPRESSED IN FETAL LIVER, SIGNAL =   2; EXPRESSED IN LUNG, SIGNAL = 2.2; SWISSPROT HIT: P00533, EVALUE 3.00e-32
FSSLQCSGQFSLAVVSLNITSLGLRSLKEISDGDVIISGNKNLCYANTINWKKLFGTSGQKTKIISNRGENSCSK

SEQ ID NO: 29316 - protein, 88 aa, Homo sapiens
  MAP TO CHR19.1; EXPRESSED IN HEART, SIGNAL = 1.8; EXPRESSED IN ADULT LIVER, SIGNAL = 1.7; EXPRESSED IN BONE MARROW, SIGNAL = 1.3; EXPRESSED IN PLACENTA, SIGNAL = 2.4; EXPRESSED IN FETAL LIVER, SIGNAL = 2.4; EXPRESSED IN BRAIN, SIGNAL = 1.6; EXPRESSED IN LUNG, SIGNAL = 1.2; SWISSPROT HIT: Q9UNY5, EVALUE 8.00e-22
TDSEFFHQRFRNLIYVEFVGPRKTLIKLRNLCLDWLQPETRTKEEIIELLVLEQYLTIIPEKLKPWVRAKKPENCEKLVTLLENYKEM

SEQ ID NO: 29317 - protein, 41 aa, Homo sapiens
  MAP TO CHR5.1; EXPRESSED IN PLACENTA, SIGNAL = 2.3; EXPRESSED IN LUNG, SIGNAL = 2.1; EXPRESSED IN BRAIN, SIGNAL =   2; EXPRESSED IN HELA, SIGNAL = 1.9; EXPRESSED IN BONE MARROW, SIGNAL = 2.1; EXPRESSED IN HEART, SIGNAL = 1.8; EXPRESSED IN ADULT LIVER, SIGNAL = 0.66; SWISSPROT HIT: P55196, EVALUE 5.30e-02
PECLDKGSFSHLPFLRDGRLSLGDELLVINGHLLVGLSHEE

SEQ ID NO: 29318 - protein, 111 aa, Homo sapiens
  MAP TO CHR6.1; EXPRESSED IN BRAIN, SIGNAL = 1.2; EXPRESSED IN HEART, SIGNAL = 1.1; EXPRESSED IN PLACENTA, SIGNAL = 2.5; EXPRESSED IN FETAL LIVER, SIGNAL = 1.3; SWISSPROT HIT: Q16626, EVALUE 1.00e-40
PGFIRSLSYRLPVLAAPARMATVVLGGDTMGPERIFPNQTEELGHQGPSEGTGDWSSEEPEEEQEETGSGPAGYSYQPLNQDPEQEEVELAPVGDGDVVADIQDRIQVGWR

SEQ ID NO: 29319 - protein, 41 aa, Homo sapiens
  MAP TO CHR7.1; EXPRESSED IN PLACENTA, SIGNAL = 2.4; EXPRESSED IN FETAL LIVER, SIGNAL = 2.4; EXPRESSED IN HELA, SIGNAL = 1.9; EXPRESSED IN BRAIN, SIGNAL = 2.5; EXPRESSED IN LUNG, SIGNAL = 1.9; EXPRESSED IN HEART, SIGNAL =   2
RLQRDRHVGEAAPVWEGFRRHDGQGGRLEVVQPVRVHRVSA

SEQ ID NO: 29320 - protein, 72 aa, Homo sapiens
  MAP TO CHR2.1; EXPRESSED IN HEART, SIGNAL = 0.98; EXPRESSED IN ADULT LIVER, SIGNAL = 0.99; EXPRESSED IN BONE MARROW, SIGNAL = 0.6; EXPRESSED IN HELA, SIGNAL = 3.4; EXPRESSED IN FETAL LIVER, SIGNAL = 1.1; EXPRESSED IN BRAIN, SIGNAL = 0.56; EXPRESSED IN LUNG, SIGNAL = 0.81; SWISSPROT HIT: P14650, EVALUE 6.00e-14
SRLWYENPGVFSPAQLTQIKQTSLARILCDNADNITRVQSDVFRVAEFPHGYGSCDEIPRVDLRVWQDCCEG

SEQ ID NO: 29321 - protein, 98 aa, Homo sapiens
  MAP TO CHR9.1; EXPRESSED IN FETAL LIVER, SIGNAL =   1; EXPRESSED IN BRAIN, SIGNAL = 1.1; EXPRESSED IN LUNG, SIGNAL = 1.4; EXPRESSED IN HELA, SIGNAL = 0.6; EXPRESSED IN BONE MARROW, SIGNAL = 1.2; EXPRESSED IN HEART, SIGNAL = 1.7; EXPRESSED IN ADULT LIVER, SIGNAL = 1.3; SWISSPROT HIT: P18834, EVALUE 3.00e+00
GFSCMQSSSGSCCDWRRSLAPSPAGGGCADGPEAFLPELRGSGPPLGGWFRDRNSARLRTLLRSRARARLWEAGMVTSLTPRRPMPARLQGPSPRRQE

SEQ ID NO: 29322 - protein, 75 aa, Homo sapiens
  MAP TO CHR7.1; EXPRESSED IN LUNG, SIGNAL = 0.58; EXPRESSED IN BRAIN, SIGNAL = 0.54; EXPRESSED IN BONE MARROW, SIGNAL = 0.6; SWISSPROT HIT: Q9UPE1, EVALUE 1.00e-05
SACSVLIKLSCVSVLLAMFPNADHIALIIELLGKVPRKYAMLGKYSKEFFTRKGNGIYATLIFSIVFSQKEKLCI

SEQ ID NO: 29323 - protein, 135 aa, Homo sapiens
  MAP TO CHR17.1; EXPRESSED IN HEART, SIGNAL = 0.73; EXPRESSED IN ADULT LIVER, SIGNAL = 0.41; EXPRESSED IN BONE MARROW, SIGNAL = 0.53; EXPRESSED IN LUNG, SIGNAL = 0.87; EXPRESSED IN BRAIN, SIGNAL = 0.59; SWISSPROT HIT: Q14849, EVALUE 7.00e-12
GYLAAQVAVARGPLLFSGALSEGQFYSPPESFAGEGWCVGELLSGRGLVRNGVGWVCSFYSFYQAPWGKPATLSHTLLSPTSLHSHTRTPLPPHTLSPPLAIVICACFLQGLTMNQMKKLLGRKVSLLRYLPAYP

SEQ ID NO: 29324 - protein, 72 aa, Homo sapiens
  MAP TO CHR19.1; EXPRESSED IN FETAL LIVER, SIGNAL = 1.4; EXPRESSED IN LUNG, SIGNAL = 1.1; EXPRESSED IN HELA, SIGNAL =   2; EXPRESSED IN BRAIN, SIGNAL = 2.1; EXPRESSED IN HEART, SIGNAL = 1.3; EXPRESSED IN BONE MARROW, SIGNAL =   2; SWISSPROT HIT: O95279, EVALUE 1.80e+00
REHHRLGHLHLAQGGPGALRLRGSGPVRLGPGWGRDGSGLPLLCRAGSRHPQVWRGLRLRHRDLRGPGWVSV

SEQ ID NO: 29325 - protein, 98 aa, Homo sapiens
  MAP TO CHR12.1; EXPRESSED IN BRAIN, SIGNAL = 1.8; EXPRESSED IN HEART, SIGNAL = 1.1; EXPRESSED IN LUNG, SIGNAL = 2.4; EXPRESSED IN PLACENTA, SIGNAL = 4.5; EXPRESSED IN FETAL LIVER, SIGNAL = 1.7; SWISSPROT HIT: Q63532, EVALUE 1.30e-01
WWRCGGVGERTTSALPSSLPIISSFLCFPSEGAGSCRSPEPCHPCCPTLWPIPSPFITQAPVPLVVMVGKACSQPEATPSPGPHRRRRTGLRRKKKKL

SEQ ID NO: 29326 - protein, 85 aa, Homo sapiens
  MAP TO CHR19.1; EXPRESSED IN BRAIN, SIGNAL = 0.95; EXPRESSED IN HEART, SIGNAL = 0.44; EXPRESSED IN BONE MARROW, SIGNAL = 1.1; EXPRESSED IN ADULT LIVER, SIGNAL = 0.94; SWISSPROT HIT: P00539, EVALUE 3.40e+00
GRQAKLGLASRERGRRPRKRGRLRQKDGRGTGMSAKKARSRGGDRAPSSESSRSRATARISWRAAVLRRPRMSRRAATCFCLWGE

SEQ ID NO: 29327 - protein, 38 aa, Homo sapiens
  MAP TO CHR11.1; EXPRESSED IN HELA, SIGNAL = 1.1; EXPRESSED IN BRAIN, SIGNAL = 0.97; EXPRESSED IN HEART, SIGNAL = 0.86; EXPRESSED IN BONE MARROW, SIGNAL = 0.89; EXPRESSED IN ADULT LIVER, SIGNAL = 0.85; EXPRESSED IN PLACENTA, SIGNAL = 1.3; EXPRESSED IN LUNG, SIGNAL = 0.82
KHNPEELFLNIQLHRNITVVTFVFFNIFNYTILHYSFQ

SEQ ID NO: 29328 - protein, 109 aa, Homo sapiens
  MAP TO CHR2.1; EXPRESSED IN LUNG, SIGNAL = 1.1; EXPRESSED IN FETAL LIVER, SIGNAL = 1.3; EXPRESSED IN HELA, SIGNAL = 1.9; EXPRESSED IN BRAIN, SIGNAL = 2.3; EXPRESSED IN HEART, SIGNAL = 1.1; EXPRESSED IN ADULT LIVER, SIGNAL = 1.9; SWISSPROT HIT: P11799, EVALUE 7.00e-11
SLFISFFLVAPPVFTQKPSPVGALKGSDVILQCEISGTPPFEVVWVKDRKQVRNSKKFKITSKHFDTSLHILNLEASDVGEYHCKATNEVGSDTCSCSVKFKGLYTWTQ

SEQ ID NO: 29329 - protein, 51 aa, Homo sapiens
  MAP TO CHR19.1; EXPRESSED IN FETAL LIVER, SIGNAL = 1.6; EXPRESSED IN LUNG, SIGNAL = 3.1; EXPRESSED IN HELA, SIGNAL = 0.74; EXPRESSED IN BRAIN, SIGNAL = 1.1; EXPRESSED IN HEART, SIGNAL = 1.7; SWISSPROT HIT: P48358, EVALUE 2.80e+00
FAIIKGLTLERNPINVNSVGKPSFLPTLFSTMKGFILERNPMSVSNVVKPL

SEQ ID NO: 29330 - protein, 129 aa, Homo sapiens
  MAP TO CHR5.1; EXPRESSED IN LUNG, SIGNAL = 0.67; EXPRESSED IN BRAIN, SIGNAL = 1.4; EXPRESSED IN HELA, SIGNAL = 2.3; EXPRESSED IN BONE MARROW, SIGNAL = 1.3; EXPRESSED IN HEART, SIGNAL = 0.54
HGQRVRGGGRRERQCAGILAVRVHGVREGEQPAGLPHLHGVCAGRGRAGERPGVLLAGGTAGGGARAVELRVGTRGERQGVRAAAAGPRGARAAAVPGECARCGRAASGQQRDAAGVRAGRERQRAGTA

SEQ ID NO: 29331 - protein, 71 aa, Homo sapiens
  MAP TO CHR7.1; EXPRESSED IN FETAL LIVER, SIGNAL = 0.33; EXPRESSED IN BRAIN, SIGNAL = 0.68
PAGRVSWEECSQLSASIQRFQIQFLWFLNQFLGYKWKGGKSNNDASKNKSSCKSGKPPKLHSLEGSFSEGT

SEQ ID NO: 29332 - protein, 109 aa, Homo sapiens
  MAP TO CHR7.1; EXPRESSED IN PLACENTA, SIGNAL = 4.2; EXPRESSED IN LUNG, SIGNAL = 3.8; EXPRESSED IN BRAIN, SIGNAL =   5; EXPRESSED IN HEART, SIGNAL = 3.8; EXPRESSED IN ADULT LIVER, SIGNAL = 2.9; EXPRESSED IN BONE MARROW, SIGNAL = 4.6; EXPRESSED IN FETAL LIVER, SIGNAL = 3.6; SWISSPROT HIT: Q99996, EVALUE 1.00e-48
PPLPSEDLLKELQKQLEEKHSRIVELLNETEKYKLDSLQTRQQMEKDRQVHRKTLQTEQEANTEGQKKMHELQSKVEDLQRQLEEKRQQVYKLDLEGQRLQGIMQEFQK

SEQ ID NO: 29333 - protein, 62 aa, Homo sapiens
  MAP TO CHR17.1; EXPRESSED IN FETAL LIVER, SIGNAL = 0.71; EXPRESSED IN HELA, SIGNAL = 0.61; EXPRESSED IN BRAIN, SIGNAL = 0.68; EXPRESSED IN BONE MARROW, SIGNAL = 0.71
SPPGSRGAELSGCPELGGRRGQGRGRWGDPARGEALTSPSFLVPAAAAATAQRGEEGAGDSE

SEQ ID NO: 29334 - protein, 57 aa, Homo sapiens
  MAP TO CHR2.1; EXPRESSED IN ADULT LIVER, SIGNAL = 0.79; EXPRESSED IN BONE MARROW, SIGNAL = 0.47; EXPRESSED IN HELA, SIGNAL = 0.53; EXPRESSED IN BRAIN, SIGNAL = 0.46; EXPRESSED IN HEART, SIGNAL = 0.76; SWISSPROT HIT: Q9ZLL8, EVALUE 6.10e+00
LTCAWKGTFLTVWAPGLAHTTTAELLGEVNRQRVHTLSSRTDKSVTGPFLFRDHRGI

SEQ ID NO: 29335 - protein, 44 aa, Homo sapiens
  MAP TO CHR2.1; EXPRESSED IN ADULT LIVER, SIGNAL = 0.83; EXPRESSED IN HELA, SIGNAL = 0.89; EXPRESSED IN BRAIN, SIGNAL = 0.84; EXPRESSED IN BONE MARROW, SIGNAL = 0.96; EXPRESSED IN HEART, SIGNAL = 0.63; SWISSPROT HIT: Q01820, EVALUE 9.00e-07
KKLKSTSKYIYQTLFLNGENSDIKICALGEEWSLHKIYLCQVSI

SEQ ID NO: 29336 - protein, 59 aa, Homo sapiens
  MAP TO CHR19.1; EXPRESSED IN HELA, SIGNAL = 1.8; EXPRESSED IN BRAIN, SIGNAL = 2.8; EXPRESSED IN HEART, SIGNAL = 3.5; EXPRESSED IN BONE MARROW, SIGNAL = 2.9; EXPRESSED IN LUNG, SIGNAL = 5.1; EXPRESSED IN FETAL LIVER, SIGNAL = 1.7; SWISSPROT HIT: Q60604, EVALUE 3.60e+00
LNQPLGGSSYGYRGRDCRANLYLLPTGEIVYFVASVAVLYSVEEQRQRHYLGHNDDIKW

SEQ ID NO: 29337 - protein, 76 aa, Homo sapiens
  MAP TO CHR19.1; EXPRESSED IN LUNG, SIGNAL = 0.7; EXPRESSED IN HELA, SIGNAL = 0.55; EXPRESSED IN BRAIN, SIGNAL = 0.7; EXPRESSED IN BONE MARROW, SIGNAL = 0.66; EXPRESSED IN HEART, SIGNAL = 0.7; SWISSPROT HIT: P05445, EVALUE 1.40e+00
LSHTLLGTQPELKCWGCSREPVHSFDKYLPSTSWVPGSVLGPGGSAGSKICKDASPGGRADCESDKQGSVQSLRWR

SEQ ID NO: 29338 - protein, 62 aa, Homo sapiens
  MAP TO CHR19.1; EXPRESSED IN HEART, SIGNAL = 0.63; EXPRESSED IN BONE MARROW, SIGNAL = 1.3; EXPRESSED IN ADULT LIVER, SIGNAL = 1.3; EXPRESSED IN LUNG, SIGNAL = 0.65; EXPRESSED IN BRAIN, SIGNAL = 1.2
LPVALDLSHVSHAPDAEAEVLSVQGAGDGASNAGLTHARGAIEAEDLALGGAAELANGNELL

SEQ ID NO: 29339 - protein, 145 aa, Homo sapiens
  MAP TO CHR8.1; EXPRESSED IN BRAIN, SIGNAL = 3.9; EXPRESSED IN HEART, SIGNAL = 6.4; EXPRESSED IN ADULT LIVER, SIGNAL = 3.9; EXPRESSED IN BONE MARROW, SIGNAL = 4.2; EXPRESSED IN PLACENTA, SIGNAL = 4.1; EXPRESSED IN LUNG, SIGNAL = 5.3; SWISSPROT HIT: Q00927, EVALUE 1.00e+00
RSCVALARKVASCLESKMSQPQKLCGSCREGGWLSGAEDGAAPESLRLSRPSQKRLALCIPHGHPCSLPSAESRSQEGSRRRLCHKPLRPGRPPCSHQEGGRLSGAEDGAAQKLCDSLARPRNSWHSVFHTVTRAACPPRSPGAK

SEQ ID NO: 29340 - protein, 63 aa, Homo sapiens
  MAP TO CHR17.1; EXPRESSED IN BONE MARROW, SIGNAL = 0.55; EXPRESSED IN HEART, SIGNAL = 0.78; EXPRESSED IN FETAL LIVER, SIGNAL = 0.57; EXPRESSED IN LUNG, SIGNAL = 0.67; EXPRESSED IN BRAIN, SIGNAL = 0.51; EXPRESSED IN HELA, SIGNAL = 0.63; SWISSPROT HIT: Q64542, EVALUE 3.50e+00
LFNPDVDANRELPLTQPPSAHSSITSGSCPGTPEMRRRQEEAMRRLASQVQYDSHVGDMVVPF

SEQ ID NO: 29341 - protein, 70 aa, Homo sapiens
  MAP TO CHR7.1; EXPRESSED IN PLACENTA, SIGNAL = 3.7; EXPRESSED IN FETAL LIVER, SIGNAL = 3.9; EXPRESSED IN LUNG, SIGNAL = 4.7; EXPRESSED IN HELA, SIGNAL = 4.5; EXPRESSED IN BRAIN, SIGNAL = 4.3; EXPRESSED IN HEART, SIGNAL = 5.4; EXPRESSED IN ADULT LIVER, SIGNAL = 2.6; EXPRESSED IN BONE MARROW, SIGNAL = 4.6; SWISSPROT HIT: P21333, EVALUE 1.00e-20
AGAGTGDVAVVIVDPQGRRDTVEVALEDKGDSTFRCTYRPAMEGPHTVHVAFAGAPITRSPFPVHVSEGK

SEQ ID NO: 29342 - protein, 27 aa, Homo sapiens
  MAP TO CHR17.1; EXPRESSED IN FETAL LIVER, SIGNAL = 0.58; EXPRESSED IN HELA, SIGNAL = 0.41; EXPRESSED IN BRAIN, SIGNAL = 0.6; EXPRESSED IN LUNG, SIGNAL = 0.65; EXPRESSED IN HEART, SIGNAL = 0.78
VSPFLLLPPRTLNSLQHTMWLPEVVIK

SEQ ID NO: 29343 - protein, 88 aa, Homo sapiens
  MAP TO CHR19.1; EXPRESSED IN HEART, SIGNAL = 0.82; EXPRESSED IN ADULT LIVER, SIGNAL = 0.89; EXPRESSED IN LUNG, SIGNAL = 0.93; EXPRESSED IN BRAIN, SIGNAL = 0.96
QLQGLHPALLPPAYPAAQRPDPAAPSERLPQVPAGLPAGPTLPADGHGQIPSHTRAAGTPLRHRACARVPPEAAGPGRGGALLHPGQW

SEQ ID NO: 29344 - protein, 53 aa, Homo sapiens
  MAP TO CHR10.1; EXPRESSED IN FETAL LIVER, SIGNAL = 1.1; EXPRESSED IN BRAIN, SIGNAL = 0.85; EXPRESSED IN HEART, SIGNAL = 0.99; EXPRESSED IN BONE MARROW, SIGNAL = 0.9; SWISSPROT HIT: P31758, EVALUE 6.20e+00
GQVRPVDSIAGHLRVQSDHVPQVGDEAGVLAPVQRHLPDLVPVGEEEVGDGAW

SEQ ID NO: 29345 - protein, 84 aa, Homo sapiens
  MAP TO CHR6.1; EXPRESSED IN PLACENTA, SIGNAL = 1.8; EXPRESSED IN FETAL LIVER, SIGNAL = 1.5; EXPRESSED IN LUNG, SIGNAL = 1.5; EXPRESSED IN HELA, SIGNAL = 1.2; EXPRESSED IN BRAIN, SIGNAL = 1.1; EXPRESSED IN BONE MARROW, SIGNAL = 1.2; EXPRESSED IN HEART, SIGNAL = 1.5; SWISSPROT HIT: P34926, EVALUE 6.00e-01
PDICFPRPPLGLWTEEFLGTPEYILRRAKVQCRSHKGYGWSARLCGRYRPLDTSLWPPGPIESSTQKNPADKPSRWSKGRGSME

SEQ ID NO: 29346 - protein, 108 aa, Homo sapiens
  MAP TO CHR19.1; EXPRESSED IN ADULT LIVER, SIGNAL = 0.46; EXPRESSED IN HELA, SIGNAL = 0.82; EXPRESSED IN LUNG, SIGNAL = 0.99; EXPRESSED IN BRAIN, SIGNAL = 0.64; EXPRESSED IN HEART, SIGNAL = 1.2; SWISSPROT HIT: P45487, EVALUE 3.00e+00
SPSALHAVAVEVAEQQADLQVHGATSSCVQAIAVGPTVDGVPMQQLRPTTHESPCQLFSPTAQGPPRGAGQLVGARATGHMAKSIACKLAAAKAVLGPHLEMEPGPAC

SEQ ID NO: 29347 - protein, 81 aa, Homo sapiens
  MAP TO CHR19.1; EXPRESSED IN HEART, SIGNAL =   2; EXPRESSED IN BONE MARROW, SIGNAL = 1.5; EXPRESSED IN ADULT LIVER, SIGNAL = 2.2; EXPRESSED IN PLACENTA, SIGNAL = 3.7; EXPRESSED IN FETAL LIVER, SIGNAL = 2.8; EXPRESSED IN BRAIN, SIGNAL = 1.7; EXPRESSED IN LUNG, SIGNAL = 2.9
CEPVGLEPAVEQSSAASELAEASSEELAEAPTEAPSPEARDSKEDGRKFDFDACNEVPPAPKESSTSEGADQKMRFVFSQF

SEQ ID NO: 29348 - protein, 64 aa, Homo sapiens
  MAP TO CHR12.1; EXPRESSED IN FETAL LIVER, SIGNAL =   1; EXPRESSED IN LUNG, SIGNAL =   1; EXPRESSED IN BRAIN, SIGNAL = 0.99; EXPRESSED IN HEART, SIGNAL =   1; EXPRESSED IN ADULT LIVER, SIGNAL = 1.7
PYLGFQLLLPGRFQLFTLLFLATSQLSHLLKISNKLLPVFQGFLLCPSVLLNLLLYLLLSPCQN

SEQ ID NO: 29349 - protein, 51 aa, Homo sapiens
  MAP TO AC007873.4; EXPRESSED IN HEART, SIGNAL = 0.7; EXPRESSED IN ADULT LIVER, SIGNAL =  16; EXPRESSED IN FETAL LIVER, SIGNAL =  11; EXPRESSED IN HELA, SIGNAL = 0.77; EXPRESSED IN BRAIN, SIGNAL = 0.86; EXPRESSED IN LUNG, SIGNAL = 1.2; EXPRESSED IN BONE MARROW, SIGNAL = 0.83
LGLGFLTLPTKRGRPVVSSKMKKRKGRFTLKEDRDMRDMAMLVAAAASTPT

SEQ ID NO: 29350 - protein, 115 aa, Homo sapiens
  MAP TO CHR10.1; EXPRESSED IN FETAL LIVER, SIGNAL = 3.3; EXPRESSED IN LUNG, SIGNAL = 3.1; EXPRESSED IN HELA, SIGNAL = 3.7; EXPRESSED IN BRAIN, SIGNAL = 3.4; EXPRESSED IN HEART, SIGNAL = 3.3; EXPRESSED IN ADULT LIVER, SIGNAL = 2.6; EXPRESSED IN BONE MARROW, SIGNAL = 3.4; SWISSPROT HIT: O35926, EVALUE 1.70e+00
RVCTPPAAAGQATSNVAKHPTELCNQLPEKGGVGRGGTRGGPWVPEGAGCLACLPAGLTAVAPEGGGRAGPLSVPCRVAPNTPWLPLSTDGKGRQPQGARGGLGVILGSRAGRLP

SEQ ID NO: 29351 - protein, 57 aa, Homo sapiens
  MAP TO CHR15.1; EXPRESSED IN ADULT LIVER, SIGNAL = 0.79; EXPRESSED IN LUNG, SIGNAL = 0.76; EXPRESSED IN HELA, SIGNAL = 0.97; EXPRESSED IN BRAIN, SIGNAL = 1.4; EXPRESSED IN HEART, SIGNAL = 0.85; SWISSPROT HIT: Q9JJZ8, EVALUE 2.30e-02
QIFHMTYDLASAVVRIVNLIGMMLLLCHWDGCLQFLVPMLQDFPDDCWVSINNMVVS

SEQ ID NO: 29352 - protein, 63 aa, Homo sapiens
  MAP TO CHR1.1; EXPRESSED IN FETAL LIVER, SIGNAL = 2.1; EXPRESSED IN HELA, SIGNAL = 4.1; EXPRESSED IN BRAIN, SIGNAL = 2.5; EXPRESSED IN ADULT LIVER, SIGNAL = 3.4; EXPRESSED IN BONE MARROW, SIGNAL = 1.8; EXPRESSED IN LUNG, SIGNAL = 1.8; SWISSPROT HIT: Q13751, EVALUE 4.00e-31
GMLIERSSDFGKTWRVYQYLAADCTSTFPRVRQGRPQSWQDVRCQSLPQRPNARLNGGKVGRG

SEQ ID NO: 29353 - protein, 46 aa, Homo sapiens
  MAP TO CHR4.1; EXPRESSED IN LUNG, SIGNAL = 2.8; EXPRESSED IN BRAIN, SIGNAL = 0.41; EXPRESSED IN HEART, SIGNAL = 1.4; EXPRESSED IN ADULT LIVER, SIGNAL =  81; EXPRESSED IN BONE MARROW, SIGNAL = 0.37; SWISSPROT HIT: P00326, EVALUE 6.00e-20
STFSQYTVVDENAVAKIDAASPLEKVCLIGCGFSTGYGSAVKVAKV

SEQ ID NO: 29354 - protein, 134 aa, Homo sapiens
  MAP TO CHR5.1; EXPRESSED IN FETAL LIVER, SIGNAL = 1.6; EXPRESSED IN LUNG, SIGNAL = 2.1; EXPRESSED IN HELA, SIGNAL = 2.2; EXPRESSED IN BRAIN, SIGNAL = 2.1; EXPRESSED IN HEART, SIGNAL = 1.4; EXPRESSED IN ADULT LIVER, SIGNAL = 3.1; SWISSPROT HIT: Q9Y5E8, EVALUE 1.40e+00
DLTLYLIVALATVSLLSLVTFTFLSAKCLQGNADGDGGGGQCCRRQDSPSPDFYKQSSPNLQVSSDGTLKYMEVTLRPTDSQSHCYRTCFSPASDGSDFTFLRPLSVQQPTALALEPDAIRSRSNTLRERSQVR

SEQ ID NO: 29355 - protein, 54 aa, Homo sapiens
  MAP TO CHR7.1; EXPRESSED IN HELA, SIGNAL = 0.52; EXPRESSED IN BRAIN, SIGNAL = 0.65; EXPRESSED IN HEART, SIGNAL = 0.55; EXPRESSED IN BONE MARROW, SIGNAL = 0.67; SWISSPROT HIT: Q99996, EVALUE 1.00e-13
LEHAKVTQTELMRESFRQKQEATESLKCQEELRERLHEESRAREQLAVELSKAE

SEQ ID NO: 29356 - protein, 85 aa, Homo sapiens
  MAP TO CHR4.1; EXPRESSED IN BONE MARROW, SIGNAL = 0.48; EXPRESSED IN HELA, SIGNAL = 0.38; EXPRESSED IN BRAIN, SIGNAL = 0.58; EXPRESSED IN HEART, SIGNAL = 0.62; SWISSPROT HIT: P23574, EVALUE 2.00e-45
GLHPGSTLIPMNNISVPQEDDYGYQCLEGKDCASFFCCFEDCRTGSWREGRIHIRIAKIDSYSRIFFPTAFALFNLVYWVGYLYL

SEQ ID NO: 29357 - protein, 53 aa, Homo sapiens
  MAP TO CHRX.1; EXPRESSED IN PLACENTA, SIGNAL = 3.4; EXPRESSED IN FETAL LIVER, SIGNAL = 3.5; EXPRESSED IN LUNG, SIGNAL = 5.2; EXPRESSED IN HELA, SIGNAL = 4.7; EXPRESSED IN BRAIN, SIGNAL = 6.1; EXPRESSED IN BONE MARROW, SIGNAL = 3.5; EXPRESSED IN ADULT LIVER, SIGNAL = 2.7; EXPRESSED IN HEART, SIGNAL = 3.8
QSLLSFSKDVVLFALHVLKVKGRASHAFVDVFDVVAGCLKVCGGIVGAGTEHL

SEQ ID NO: 29358 - protein, 66 aa, Homo sapiens
  MAP TO CHR6.1; EXPRESSED IN BONE MARROW, SIGNAL = 0.45; EXPRESSED IN FETAL LIVER, SIGNAL = 0.42; EXPRESSED IN LUNG, SIGNAL = 0.6; EXPRESSED IN HELA, SIGNAL = 0.49; EXPRESSED IN BRAIN, SIGNAL = 0.47; EXPRESSED IN HEART, SIGNAL = 0.56; SWISSPROT HIT: Q08113, EVALUE 2.10e+00
ALSMPKWPVNFYHPIAFSQSHTCIPAKACWASFTFLDSKANWRGSRHFSLANTKIRTTCELSKAGS

SEQ ID NO: 29359 - protein, 91 aa, Homo sapiens
  MAP TO CHR15.1; EXPRESSED IN FETAL LIVER, SIGNAL = 1.1; EXPRESSED IN LUNG, SIGNAL = 2.2; EXPRESSED IN HELA, SIGNAL = 0.6; EXPRESSED IN BRAIN, SIGNAL = 0.77; EXPRESSED IN BONE MARROW, SIGNAL = 0.8; EXPRESSED IN HEART, SIGNAL = 1.9; SWISSPROT HIT: Q9UPM8, EVALUE 5.00e-46
VLGEYSYLLDKETPEEVIAKLYKLLMNDSVSSETKAWLIAAVTKLTSQAHSSNTVERLIHEFTISLDTCMRQHAFELKHLHENVELMKSLL

SEQ ID NO: 29360 - protein, 94 aa, Homo sapiens
  MAP TO CHR22.1; EXPRESSED IN HELA, SIGNAL = 1.3; EXPRESSED IN BRAIN, SIGNAL = 0.91; EXPRESSED IN LUNG, SIGNAL = 0.82; EXPRESSED IN HEART, SIGNAL = 0.8; EXPRESSED IN ADULT LIVER, SIGNAL = 1.1; SWISSPROT HIT: Q28640, EVALUE 2.90e-02
QRPEPSHVASPTAPCEQDGQQVHRPGPAGQLHTIPSTLHPPQDPGQWAADPHKHTGAWLCHTHPSHTGPGLHHGQPAAAPCPAQSFGLLLEPGL

SEQ ID NO: 29361 - protein, 33 aa, Homo sapiens
  MAP TO CHR3.1; EXPRESSED IN LUNG, SIGNAL = 1.2; EXPRESSED IN HELA, SIGNAL =   1; EXPRESSED IN BRAIN, SIGNAL = 1.1; EXPRESSED IN HEART, SIGNAL = 0.75
PSLLCDLGERQCPIWAIRSTQCLRIAGKKVLQR

SEQ ID NO: 29362 - protein, 91 aa, Homo sapiens
  MAP TO CHR7.1; EXPRESSED IN FETAL LIVER, SIGNAL = 0.91; EXPRESSED IN BRAIN, SIGNAL = 1.2; EXPRESSED IN HELA, SIGNAL =   1; EXPRESSED IN BONE MARROW, SIGNAL = 1.1; SWISSPROT HIT: P73638, EVALUE 6.80e+00
GKPRYAETWDFHVSASTFLQFEMSMGCSKPFSNSHSVQLQYSLNNGKDWHLVTEECVPPTIGCLHYTESSIYTSERFQNWKRITVYLPLST

SEQ ID NO: 29363 - protein, 81 aa, Homo sapiens
  MAP TO CHR1.1; EXPRESSED IN BONE MARROW, SIGNAL = 2.3; EXPRESSED IN FETAL LIVER, SIGNAL = 2.3; EXPRESSED IN LUNG, SIGNAL = 1.8; EXPRESSED IN BRAIN, SIGNAL = 5.2; EXPRESSED IN HEART, SIGNAL = 1.8; SWISSPROT HIT: P50993, EVALUE 1.00e-38
ATGDRTVMGRIATLASGLEVGRTPIAMEIEHFIQLITGVAVFLGVSFFVLSLILGYSWLEAVIFLIGIIVANVPEGLLATV

SEQ ID NO: 29364 - protein, 55 aa, Homo sapiens
  MAP TO AC073133.5; EXPRESSED IN BRAIN, SIGNAL = 0.62; SWISSPROT HIT: O15537, EVALUE 8.10e+00
LLVFLCLIAGDDSKKPSPVCAWLSSFADKAGWGLGLDLRHAQGLGIKGAGSPSGF

SEQ ID NO: 29365 - protein, 56 aa, Homo sapiens
  MAP TO CHR1.1; EXPRESSED IN BRAIN, SIGNAL = 1.3; EXPRESSED IN HEART, SIGNAL = 1.3; EXPRESSED IN ADULT LIVER, SIGNAL = 0.9; EXPRESSED IN BONE MARROW, SIGNAL = 1.1; EXPRESSED IN FETAL LIVER, SIGNAL =   1; EXPRESSED IN LUNG, SIGNAL = 1.3; SWISSPROT HIT: O87386, EVALUE 8.00e+00
VRASVNHLPPVFQAYSFAMGCWPKNGLLDMNKGLSLQHIGRPHSGIGQSLRIFPRQ

SEQ ID NO: 29366 - protein, 39 aa, Homo sapiens
  MAP TO CHR5.1; EXPRESSED IN HEART, SIGNAL = 2.6; EXPRESSED IN BONE MARROW, SIGNAL = 3.5; EXPRESSED IN ADULT LIVER, SIGNAL = 2.9; EXPRESSED IN PLACENTA, SIGNAL =   3; EXPRESSED IN FETAL LIVER, SIGNAL = 2.8; EXPRESSED IN HELA, SIGNAL = 3.9; EXPRESSED IN BRAIN, SIGNAL = 3.6; EXPRESSED IN LUNG, SIGNAL = 2.3
SSMTKTSSCLCRLRLGAGSLFHLFSLFCSYPVTSLPNPE

SEQ ID NO: 29367 - protein, 78 aa, Homo sapiens
  MAP TO CHR17.1; EXPRESSED IN HEART, SIGNAL = 0.63; EXPRESSED IN FETAL LIVER, SIGNAL = 0.45; EXPRESSED IN BRAIN, SIGNAL = 0.51; SWISSPROT HIT: Q09530, EVALUE 7.00e-22
QVGYTVRFDDVTSEDTRIKFLTDGMLLREAISDSLLRKYSCVILDEAHERTIHTDVLFGVVKAAQKRRKELGKLPLKV

SEQ ID NO: 29368 - protein, 33 aa, Homo sapiens
  MAP TO CHR17.1; EXPRESSED IN BRAIN, SIGNAL = 0.48; EXPRESSED IN ADULT LIVER, SIGNAL = 6.5; EXPRESSED IN LUNG, SIGNAL = 0.62; SWISSPROT HIT: P02749, EVALUE 1.00e-13
ARVCPFAGILENGAVRYTTFEYPNTISFSCNTG

SEQ ID NO: 29369 - protein, 107 aa, Homo sapiens
  MAP TO CHR2.1; EXPRESSED IN PLACENTA, SIGNAL = 3.6; EXPRESSED IN LUNG, SIGNAL = 1.6; EXPRESSED IN FETAL LIVER, SIGNAL = 2.4; EXPRESSED IN HELA, SIGNAL = 3.5; EXPRESSED IN BRAIN, SIGNAL = 3.3; EXPRESSED IN HEART, SIGNAL = 2.4; EXPRESSED IN ADULT LIVER, SIGNAL = 1.8; EXPRESSED IN BONE MARROW, SIGNAL = 3.3; SWISSPROT HIT: Q15746, EVALUE 9.00e-10
PHENTFSIPEPKKPPVFDQHLTPVTVSEGEYVQLSCHVQGSEPIRIQWLKAGREIKPSDRCSFSFASGTAVLELRDVAKADSGDYVCKASNVAGSDTTKSKVTIKGT

SEQ ID NO: 29370 - protein, 45 aa, Homo sapiens
  MAP TO CHR7.1; EXPRESSED IN FETAL LIVER, SIGNAL = 0.42; EXPRESSED IN BRAIN, SIGNAL = 0.56; EXPRESSED IN BONE MARROW, SIGNAL = 0.55; SWISSPROT HIT: Q62388, EVALUE 6.40e+00
QMLDVVLATHRKAGLLTFLKFLKMIFRPLACFGADENFPLLIHRH

SEQ ID NO: 29371 - protein, 41 aa, Homo sapiens
  MAP TO CHR19.1; EXPRESSED IN PLACENTA, SIGNAL = 1.6; EXPRESSED IN LUNG, SIGNAL = 2.8; EXPRESSED IN HELA, SIGNAL = 1.3; EXPRESSED IN BRAIN, SIGNAL = 1.5; EXPRESSED IN HEART, SIGNAL = 2.4; EXPRESSED IN BONE MARROW, SIGNAL =   2
SWQWLSKLKTHFCRLSKVMRLMCSNMSRRALPSEARSCHLA

SEQ ID NO: 29372 - protein, 60 aa, Homo sapiens
  MAP TO CHR7.1; EXPRESSED IN ADULT LIVER, SIGNAL = 0.5; EXPRESSED IN HELA, SIGNAL = 0.68; EXPRESSED IN FETAL LIVER, SIGNAL = 0.64; EXPRESSED IN BRAIN, SIGNAL = 0.7; EXPRESSED IN BONE MARROW, SIGNAL = 0.69; SWISSPROT HIT: Q14563, EVALUE 5.00e-25
YLAEMLESNNVITFNGLANSSSYHTFLLDEERSRLYVGAKDHIFSFDLVNIKDFQKVSVF

SEQ ID NO: 29373 - protein, 48 aa, Homo sapiens
  MAP TO CHR5.1; EXPRESSED IN FETAL LIVER, SIGNAL = 1.8; EXPRESSED IN HELA, SIGNAL = 2.3; EXPRESSED IN BRAIN, SIGNAL =   2; EXPRESSED IN BONE MARROW, SIGNAL = 1.7; EXPRESSED IN HEART, SIGNAL = 1.4; SWISSPROT HIT: Q9UKU0, EVALUE 3.00e-20
PQIFSQANTPLKRWLLEFAAKRKQAEVRSGIIRNDSIWDELFFNKIQV

SEQ ID NO: 29374 - protein, 83 aa, Homo sapiens
  MAP TO CHR7.1; EXPRESSED IN HELA, SIGNAL = 1.2; EXPRESSED IN BRAIN, SIGNAL = 1.1; EXPRESSED IN HEART, SIGNAL = 5.3; EXPRESSED IN ADULT LIVER, SIGNAL =   1; EXPRESSED IN PLACENTA, SIGNAL = 1.2; EXPRESSED IN LUNG, SIGNAL =   1; SWISSPROT HIT: Q14152, EVALUE 4.00e+00
GNWFQMVSAQERLTRTFTRSSHTYTRTERTEISKTRGGETKREVRVEESTQVGGDPFPAVFGDFLGRERLGSFGSITRQQEGE

SEQ ID NO: 29375 - protein, 90 aa, Homo sapiens
  MAP TO CHR22.1; EXPRESSED IN HEART, SIGNAL = 0.94; EXPRESSED IN BONE MARROW, SIGNAL = 1.1; EXPRESSED IN ADULT LIVER, SIGNAL = 1.4; EXPRESSED IN PLACENTA, SIGNAL = 1.6; EXPRESSED IN FETAL LIVER, SIGNAL = 1.4; EXPRESSED IN HELA, SIGNAL = 1.6; EXPRESSED IN LUNG, SIGNAL = 3.1; EXPRESSED IN BRAIN, SIGNAL = 1.2; SWISSPROT HIT: P34501, EVALUE 2.00e-14
YGSGQQCCYTADGTQLLTADSSGGSTPDRGHDWGAPPFRTPPRVPSMSHWLYDVLSFYYCCLWAPDCPRYMQRRPSNDCRNYRPPRLGGC

SEQ ID NO: 29376 - protein, 45 aa, Homo sapiens
  MAP TO CHR22.1; EXPRESSED IN ADULT LIVER, SIGNAL = 1.3; EXPRESSED IN FETAL LIVER, SIGNAL = 0.63; EXPRESSED IN BRAIN, SIGNAL = 0.79; EXPRESSED IN LUNG, SIGNAL = 1.4; EXPRESSED IN HEART, SIGNAL = 1.4; SWISSPROT HIT: Q02192, EVALUE 2.90e+00
QWRFTFSHFVVDPDQEYEVTVHHLPKPIPDGDPNHQSKNFLVPGK

SEQ ID NO: 29377 - protein, 17 aa, Homo sapiens
  MAP TO CHR5.1; EXPRESSED IN HEART, SIGNAL = 1.7; EXPRESSED IN ADULT LIVER, SIGNAL = 2.4; EXPRESSED IN FETAL LIVER, SIGNAL = 2.7; EXPRESSED IN HELA, SIGNAL =   2; EXPRESSED IN BRAIN, SIGNAL = 2.7; EXPRESSED IN BONE MARROW, SIGNAL = 2.8; EXPRESSED IN PLACENTA, SIGNAL = 2.3; EXPRESSED IN LUNG, SIGNAL = 1.7
FGHQPKVQMNKRNLEQP

SEQ ID NO: 29378 - protein, 44 aa, Homo sapiens
  MAP TO CHR10.1; EXPRESSED IN ADULT LIVER, SIGNAL = 0.52; EXPRESSED IN FETAL LIVER, SIGNAL = 0.76; EXPRESSED IN HELA, SIGNAL = 0.97; EXPRESSED IN LUNG, SIGNAL = 1.1; EXPRESSED IN BRAIN, SIGNAL = 0.74; EXPRESSED IN BONE MARROW, SIGNAL = 0.73
SHGRLPRHRGGEPGAAQPAGRQPRGGAAATAAGAPRAGGGAAAG

SEQ ID NO: 29379 - protein, 61 aa, Homo sapiens
  MAP TO CHR14.1; EXPRESSED IN LUNG, SIGNAL = 1.8; EXPRESSED IN HEART, SIGNAL = 1.8; EXPRESSED IN PLACENTA, SIGNAL = 3.8; EXPRESSED IN FETAL LIVER, SIGNAL = 3.2; EXPRESSED IN BRAIN, SIGNAL = 3.8; EXPRESSED IN HELA, SIGNAL = 3.6; EXPRESSED IN BONE MARROW, SIGNAL =   4; EXPRESSED IN ADULT LIVER, SIGNAL = 2.2; SWISSPROT HIT: P51955, EVALUE 2.00e-09
DDSLVVWKEVDLTRLSEKERRDALNEIVILALLQHDNIIAYYNHFMDNTTLLIELEYCNGK

SEQ ID NO: 29380 - protein, 56 aa, Homo sapiens
  MAP TO CHR12.1; EXPRESSED IN BRAIN, SIGNAL = 1.2; EXPRESSED IN HELA, SIGNAL =   1; EXPRESSED IN LUNG, SIGNAL = 0.99; EXPRESSED IN ADULT LIVER, SIGNAL = 0.87; EXPRESSED IN BONE MARROW, SIGNAL = 1.8; EXPRESSED IN FETAL LIVER, SIGNAL = 0.89
QVSEYCVATYCGFLAPSLKSSKVRTNVTVKLRVQDTYLDCGTLQYREDPRFTGYRV

SEQ ID NO: 29381 - protein, 91 aa, Homo sapiens
  MAP TO CHR5.1; EXPRESSED IN FETAL LIVER, SIGNAL =   5; EXPRESSED IN LUNG, SIGNAL = 8.9; EXPRESSED IN HELA, SIGNAL = 3.6; EXPRESSED IN BRAIN, SIGNAL = 3.7; EXPRESSED IN HEART, SIGNAL = 8.6; EXPRESSED IN BONE MARROW, SIGNAL =   4; EXPRESSED IN PLACENTA, SIGNAL = 3.8
LSRFDLIANGGASLTLHFERAPFMSQERTVWLPWNSFYAMDTLVMKTEENSIPSCDLSGFVRPDPIIISSPLSTFFSAAPGQNPIVPETQV

SEQ ID NO: 29382 - protein, 48 aa, Homo sapiens
  MAP TO CHR17.1; EXPRESSED IN BRAIN, SIGNAL = 0.75; EXPRESSED IN BONE MARROW, SIGNAL = 0.83; EXPRESSED IN FETAL LIVER, SIGNAL = 0.67; SWISSPROT HIT: P11466, EVALUE 8.20e+00
PENLSMSLKGKLYTSCWSFCCNKVAPGICCLTSEERDSVAQYLSMYML

SEQ ID NO: 29383 - protein, 67 aa, Homo sapiens
  MAP TO CHR6.1; EXPRESSED IN ADULT LIVER, SIGNAL = 0.9; EXPRESSED IN BONE MARROW, SIGNAL = 0.63; EXPRESSED IN BRAIN, SIGNAL = 0.57; EXPRESSED IN HEART, SIGNAL = 0.64; SWISSPROT HIT: P27784, EVALUE 2.70e+00
FSCKDDKCYQQYPTRVYFHPFSSRHDKPEVFVARNGKQLVHQPDDRSAQKFHSFAMCEKLRIENRQA

SEQ ID NO: 29384 - protein, 49 aa, Homo sapiens
  MAP TO CHR19.1; EXPRESSED IN FETAL LIVER, SIGNAL = 0.85; EXPRESSED IN LUNG, SIGNAL = 0.65; EXPRESSED IN BRAIN, SIGNAL = 1.1; EXPRESSED IN HEART, SIGNAL = 0.9; EXPRESSED IN BONE MARROW, SIGNAL =   1
PCPEKSWKTGFVDIYVSFFLSSTLTPTSLSKIPCNSEGNSPFLMEFRNC

SEQ ID NO: 29385 - protein, 82 aa, Homo sapiens
  MAP TO CHR17.1; EXPRESSED IN HELA, SIGNAL =  14; EXPRESSED IN BRAIN, SIGNAL =  20; EXPRESSED IN HEART, SIGNAL =  15; EXPRESSED IN BONE MARROW, SIGNAL =  21; EXPRESSED IN PLACENTA, SIGNAL =  15; EXPRESSED IN FETAL LIVER, SIGNAL =  19; EXPRESSED IN LUNG, SIGNAL =  12; SWISSPROT HIT: P78329, EVALUE 8.50e+00
CYDSLGCQHWRLISSPRMAASLLTRNTSAYCLAWTPLRPLASTPMLMWPLRSLRHKPSLILCFPCNLRLHPPGLEARPGKRR

SEQ ID NO: 29386 - protein, 71 aa, Homo sapiens
  MAP TO CHR2.1; EXPRESSED IN LUNG, SIGNAL = 1.5; EXPRESSED IN BRAIN, SIGNAL = 2.8; EXPRESSED IN HEART, SIGNAL = 1.8; EXPRESSED IN BONE MARROW, SIGNAL = 3.1; EXPRESSED IN ADULT LIVER, SIGNAL = 2.2; EXPRESSED IN PLACENTA, SIGNAL =   2; EXPRESSED IN FETAL LIVER, SIGNAL = 2.3
KTHPHTLAHPVGLESPDNRGSGRSQLYCHKTRDCHKQCCLHIHQYLQKRHGTSDTKQTQADKHQILMDKQR

SEQ ID NO: 29387 - protein, 80 aa, Homo sapiens
  MAP TO CHR17.1; EXPRESSED IN FETAL LIVER, SIGNAL = 1.2; EXPRESSED IN HELA, SIGNAL = 1.5; EXPRESSED IN BRAIN, SIGNAL = 1.3; EXPRESSED IN LUNG, SIGNAL = 1.4; EXPRESSED IN HEART, SIGNAL = 1.1; EXPRESSED IN BONE MARROW, SIGNAL = 1.4; SWISSPROT HIT: P33076, EVALUE 1.10e+00
APIRQILSRPERLLFILDGVDEPGWVLQEPSSELCLHWSQPQPADALLGSLLGKTILPEASFLITARTTALQNLIPSLEQ

SEQ ID NO: 29388 - protein, 61 aa, Homo sapiens
  MAP TO CHR22.1; EXPRESSED IN PLACENTA, SIGNAL = 5.8; EXPRESSED IN FETAL LIVER, SIGNAL = 4.3; EXPRESSED IN HELA, SIGNAL = 5.1; EXPRESSED IN BRAIN, SIGNAL = 5.7; EXPRESSED IN HEART, SIGNAL = 5.3; EXPRESSED IN ADULT LIVER, SIGNAL = 4.6; EXPRESSED IN BONE MARROW, SIGNAL = 6.4; SWISSPROT HIT: P20023, EVALUE 9.40e-01
VLIQGGGGSRDILPKAEPNLMAIWRIRSKSPFSSASRYSFCAWSFSTSGKKSLWMTVWRPC

SEQ ID NO: 29389 - protein, 71 aa, Homo sapiens
  MAP TO CHR19.1; EXPRESSED IN PLACENTA, SIGNAL =  22; EXPRESSED IN FETAL LIVER, SIGNAL =  13; EXPRESSED IN LUNG, SIGNAL =  12; EXPRESSED IN HEART, SIGNAL =  12; EXPRESSED IN BONE MARROW, SIGNAL =  16; EXPRESSED IN ADULT LIVER, SIGNAL =   5; EXPRESSED IN BRAIN, SIGNAL =  15; EXPRESSED IN HELA, SIGNAL =  19; SWISSPROT HIT: P10968, EVALUE 7.30e-01
TYLCLLPAANVTVSLPVRGCVQDEFCTRDGVTGPGFTLSGSCCQGSRCNSDLRNKTYFSPRIPPLVRLPPP

SEQ ID NO: 29390 - protein, 39 aa, Homo sapiens
  MAP TO CHR7.1; EXPRESSED IN BONE MARROW, SIGNAL = 2.2; EXPRESSED IN HELA, SIGNAL = 3.4; EXPRESSED IN FETAL LIVER, SIGNAL =   2; EXPRESSED IN BRAIN, SIGNAL = 2.5; EXPRESSED IN LUNG, SIGNAL =   1; EXPRESSED IN HEART, SIGNAL = 1.1
KQTPISISFASQHIMLVTDVSELFQCPCLNRKCTLNDTH

SEQ ID NO: 29391 - protein, 53 aa, Homo sapiens
  MAP TO CHR7.1; EXPRESSED IN FETAL LIVER, SIGNAL = 0.61; EXPRESSED IN BRAIN, SIGNAL = 0.5; EXPRESSED IN BONE MARROW, SIGNAL = 0.53
PSSRPEKCITHKVTPALHARGISDKMNGFKYNSLLTKFPACNLPGICSLGLTL

SEQ ID NO: 29392 - protein, 99 aa, Homo sapiens
  MAP TO CHR7.1; EXPRESSED IN HELA, SIGNAL = 0.54; EXPRESSED IN BRAIN, SIGNAL = 0.7; EXPRESSED IN BONE MARROW, SIGNAL = 0.63; EXPRESSED IN FETAL LIVER, SIGNAL = 0.62; SWISSPROT HIT: P97792, EVALUE 2.10e+00
LKVTVPSHTVHGVRGQALYLPVHYGFHTPASDIQIIWLFERPHTMPKYLLGSVNKSVVPDLEYQHKFTMMPPNASLLINPLQFPDEGNYIVKVNIQGNG

SEQ ID NO: 29393 - protein, 41 aa, Homo sapiens
  MAP TO CHR8.1; EXPRESSED IN PLACENTA, SIGNAL = 2.1; EXPRESSED IN LUNG, SIGNAL = 2.4; EXPRESSED IN HELA, SIGNAL =   2; EXPRESSED IN BRAIN, SIGNAL = 2.3; EXPRESSED IN HEART, SIGNAL = 2.1; EXPRESSED IN ADULT LIVER, SIGNAL = 2.8
WNLYSSRDHFFQIHIILNTLIKCVIKNIFHFTSFIHLMDLC

SEQ ID NO: 29394 - protein, 72 aa, Homo sapiens
  MAP TO CHR22.1; EXPRESSED IN BRAIN, SIGNAL = 0.62; EXPRESSED IN HEART, SIGNAL = 0.64; EXPRESSED IN BONE MARROW, SIGNAL = 0.68; EXPRESSED IN ADULT LIVER, SIGNAL = 0.61; EXPRESSED IN PLACENTA, SIGNAL = 1.9; EXPRESSED IN FETAL LIVER, SIGNAL = 0.68
PRQMPVRPPLTRSPPSEASSFSSKRALCGASVGASCSPATQHWPLATGRDCPALWTLPSRMPRATFGSSKVS

SEQ ID NO: 29395 - protein, 58 aa, Homo sapiens
  MAP TO CHR19.1; EXPRESSED IN BRAIN, SIGNAL = 3.1; EXPRESSED IN HEART, SIGNAL = 4.4; EXPRESSED IN ADULT LIVER, SIGNAL = 6.3; EXPRESSED IN PLACENTA, SIGNAL = 3.5; EXPRESSED IN FETAL LIVER, SIGNAL = 2.6; EXPRESSED IN LUNG, SIGNAL =   5; EXPRESSED IN HELA, SIGNAL =   3
QVATRLQSSPNPAALLTLRMEFTRILCSHEHYVTLNLPCCPLSPPASPSPSVSSTTSQ

SEQ ID NO: 29396 - protein, 53 aa, Homo sapiens
  MAP TO CHR19.1; EXPRESSED IN FETAL LIVER, SIGNAL = 1.5; EXPRESSED IN LUNG, SIGNAL = 3.2; EXPRESSED IN BRAIN, SIGNAL = 1.2; EXPRESSED IN HEART, SIGNAL = 2.6; EXPRESSED IN BONE MARROW, SIGNAL = 1.4; EXPRESSED IN ADULT LIVER, SIGNAL = 1.3; EXPRESSED IN PLACENTA, SIGNAL = 1.6; SWISSPROT HIT: Q09766, EVALUE 6.20e+00
ITWRMVKFSRTLFIMYRSGSCRNLCKKFTRYSHMGERSRRYTNLPSSSWARSV

SEQ ID NO: 29397 - protein, 49 aa, Homo sapiens
  MAP TO CHR5.1; EXPRESSED IN HELA, SIGNAL =   4; EXPRESSED IN BRAIN, SIGNAL = 4.1; EXPRESSED IN LUNG, SIGNAL = 3.1; EXPRESSED IN HEART, SIGNAL = 3.2; EXPRESSED IN ADULT LIVER, SIGNAL =   3; EXPRESSED IN PLACENTA, SIGNAL = 4.1; EXPRESSED IN FETAL LIVER, SIGNAL = 3.5
PRVWPAARLLTAISPNHRPSPPLYPLSPSCGYRQHFPAPTAAPGAPYPR

SEQ ID NO: 29398 - protein, 75 aa, Homo sapiens
  MAP TO CHR5.1; EXPRESSED IN PLACENTA, SIGNAL = 1.6; EXPRESSED IN FETAL LIVER, SIGNAL = 1.1; EXPRESSED IN LUNG, SIGNAL = 1.2; EXPRESSED IN BRAIN, SIGNAL = 1.5; EXPRESSED IN ADULT LIVER, SIGNAL =   3; SWISSPROT HIT: P12753, EVALUE 4.00e-03
SEHQKLEENIDNIKRNHNLALGRQKGYEEEIIHFKKELREPQFRDAEEKYREMMIVMRTTELVNKDLDIYYKTLD

SEQ ID NO: 29399 - protein, 86 aa, Homo sapiens
  MAP TO CHR22.1; EXPRESSED IN HELA, SIGNAL = 7.2; EXPRESSED IN HEART, SIGNAL = 5.6; EXPRESSED IN ADULT LIVER, SIGNAL =  10; EXPRESSED IN BONE MARROW, SIGNAL = 9.1; EXPRESSED IN PLACENTA, SIGNAL = 8.3; EXPRESSED IN LUNG, SIGNAL = 7.3; EXPRESSED IN BRAIN, SIGNAL = 8.6; SWISSPROT HIT: P12018, EVALUE 2.00e-47
LGTTIRLTCTLRNDHDIGVYSVYWYQQRPGHPPRFLLRYFSQSDKSQGPQVPPRFSGSKDVARNRGYLSISELQPEDEAMYYCAMG

SEQ ID NO: 29400 - protein, 114 aa, Homo sapiens
  MAP TO CHR19.1; EXPRESSED IN HELA, SIGNAL = 3.8; EXPRESSED IN BRAIN, SIGNAL = 2.6; EXPRESSED IN BONE MARROW, SIGNAL = 2.2; EXPRESSED IN HEART, SIGNAL = 4.3; EXPRESSED IN PLACENTA, SIGNAL =   4; EXPRESSED IN FETAL LIVER, SIGNAL = 3.6; EXPRESSED IN LUNG, SIGNAL = 5.9; SWISSPROT HIT: Q10438, EVALUE 5.50e-01
KDPDPPYSVETPYGYRLDLDFLKYVDDIEKGHTLRRVAVQRRPRLSSLPRGPGSWWTSTESLCSNASGDSRHSAYSYCGRGFYPQYGALETRGGFNPRVERTLLDARRRLEDQA

SEQ ID NO: 29401 - protein, 58 aa, Homo sapiens
  MAP TO CHR22.1; EXPRESSED IN BRAIN, SIGNAL = 1.6; EXPRESSED IN HELA, SIGNAL =   2; EXPRESSED IN BONE MARROW, SIGNAL = 1.5; EXPRESSED IN HEART, SIGNAL = 1.1; EXPRESSED IN ADULT LIVER, SIGNAL = 1.5; EXPRESSED IN FETAL LIVER, SIGNAL = 1.2; SWISSPROT HIT: Q64471, EVALUE 6.00e-17
PVFLGESVPPEMLAATLAELDGCLQLLEDKFLRDQAFLTGPRISVAGLVAITELRHES

SEQ ID NO: 29402 - protein, 43 aa, Homo sapiens
  MAP TO CHR4.1; EXPRESSED IN FETAL LIVER, SIGNAL = 0.67; EXPRESSED IN HELA, SIGNAL =   1; EXPRESSED IN BRAIN, SIGNAL = 0.53; EXPRESSED IN LUNG, SIGNAL = 0.67; EXPRESSED IN BONE MARROW, SIGNAL = 0.69; SWISSPROT HIT: Q12986, EVALUE 2.00e-03
EVEKHCRCGKHTKRMPCHKPYLCETKCVKMRDCQKHQCRRKVC

SEQ ID NO: 29403 - protein, 36 aa, Homo sapiens
  MAP TO CHR5.1; EXPRESSED IN FETAL LIVER, SIGNAL = 1.5; EXPRESSED IN LUNG, SIGNAL = 1.2; EXPRESSED IN HELA, SIGNAL = 0.81; EXPRESSED IN BRAIN, SIGNAL = 1.5; EXPRESSED IN HEART, SIGNAL =   2; EXPRESSED IN ADULT LIVER, SIGNAL = 1.5; EXPRESSED IN BONE MARROW, SIGNAL = 1.8
NFQEHNFHGGPGIAICCPERKHIMTHFLTSLDCFPN

SEQ ID NO: 29404 - protein, 29 aa, Homo sapiens
  MAP TO CHR8.1; EXPRESSED IN FETAL LIVER, SIGNAL = 0.4; EXPRESSED IN BRAIN, SIGNAL = 0.53; EXPRESSED IN LUNG, SIGNAL = 0.76; EXPRESSED IN BONE MARROW, SIGNAL = 0.54; EXPRESSED IN HEART, SIGNAL = 0.76
NCNICWNCLLSSVTTDSPSFFISIFLLFL

SEQ ID NO: 29405 - protein, 73 aa, Homo sapiens
  MAP TO CHR7.1; EXPRESSED IN PLACENTA, SIGNAL = 1.3; EXPRESSED IN FETAL LIVER, SIGNAL = 1.3; EXPRESSED IN LUNG, SIGNAL = 1.5; EXPRESSED IN BRAIN, SIGNAL = 1.4; EXPRESSED IN BONE MARROW, SIGNAL = 1.1; SWISSPROT HIT: Q9XT28, EVALUE 7.20e+00
YFHYKHNISLDTPCKSCSLCGQCVYGSVRDGADLPRKDFCFFRYSSIGLGLLILGIPEPYRVPRNGSQCREKA

SEQ ID NO: 29406 - protein, 134 aa, Homo sapiens
  MAP TO CHR2.1; EXPRESSED IN BONE MARROW, SIGNAL = 0.38; EXPRESSED IN FETAL LIVER, SIGNAL = 0.34; EXPRESSED IN BRAIN, SIGNAL = 0.34; SWISSPROT HIT: O86511, EVALUE 8.20e-01
FSFKLSHYLDIVEVNIAHQISLRSEAFFHAMTSQHELQDYLRKTSQAVKMLRDKIAQIDKVMCEGSLHILRLALTRNNCVKVYNKLKLMATVHQTQPTVQVLLSTSEFVGALDLIATTQEVLQQELQGIHSFRY

SEQ ID NO: 29407 - protein, 149 aa, Homo sapiens
  MAP TO CHRX.1; EXPRESSED IN BRAIN, SIGNAL =   1; EXPRESSED IN HEART, SIGNAL = 0.92; EXPRESSED IN ADULT LIVER, SIGNAL = 1.3; EXPRESSED IN BONE MARROW, SIGNAL = 1.2; EXPRESSED IN LUNG, SIGNAL = 0.71; EXPRESSED IN HELA, SIGNAL =   1; SWISSPROT HIT: P08161, EVALUE 1.40e+00
VRLEWPTDLAVNPMDNSLYVLDNNIVLQISENRRVRIIAGRPIHCQVPGIDHFLVSKVAIHSTLESARAISVSHSGLLFIAETDERKVNRIQQVTTNGEIYIIAGAPTDCDCKIDPNCDCFSGMTFLAIHQLPLSVLKRKTCPSKVKRK

SEQ ID NO: 29408 - protein, 61 aa, Homo sapiens
  MAP TO CHR2.1; EXPRESSED IN LUNG, SIGNAL = 2.1; EXPRESSED IN FETAL LIVER, SIGNAL = 1.3; EXPRESSED IN HELA, SIGNAL = 1.5; EXPRESSED IN BRAIN, SIGNAL = 1.5; EXPRESSED IN HEART, SIGNAL = 1.7; EXPRESSED IN BONE MARROW, SIGNAL = 1.5; EXPRESSED IN ADULT LIVER, SIGNAL = 2.9; SWISSPROT HIT: P47989, EVALUE 5.00e-28
QAVGEPPLFLAASIFFAIKDAIRAARAQHTGNNVKELFRLDSPATPEKIRNACVDKFTTLV

SEQ ID NO: 29409 - protein, 82 aa, Homo sapiens
  MAP TO CHR22.1; EXPRESSED IN HELA, SIGNAL =   2; EXPRESSED IN BRAIN, SIGNAL =   2; EXPRESSED IN HEART, SIGNAL = 1.9; EXPRESSED IN BONE MARROW, SIGNAL = 1.8; EXPRESSED IN ADULT LIVER, SIGNAL = 2.9; EXPRESSED IN FETAL LIVER, SIGNAL = 1.9; EXPRESSED IN PLACENTA, SIGNAL = 2.4; SWISSPROT HIT: P04672, EVALUE 3.50e+00
QCTTSTSAAGSLALITAQTGLARASRRCIFLTTERVGLSISTTLHLPTRHTSTRTSASPTTLRRPTRPPSTRTVCSMTLQVP

SEQ ID NO: 29410 - protein, 78 aa, Homo sapiens
  MAP TO CHRX.1; EXPRESSED IN BRAIN, SIGNAL = 1.6; EXPRESSED IN ADULT LIVER, SIGNAL = 1.2; EXPRESSED IN BONE MARROW, SIGNAL = 0.7; EXPRESSED IN HEART, SIGNAL = 1.4; EXPRESSED IN FETAL LIVER, SIGNAL = 0.51; SWISSPROT HIT: Q24278, EVALUE 1.00e-06
EIVNFNCRKLVTSMPLFANADPNFVTAMLTKLKFEVFQPGDYLIREGTIGKMYFIQHGVVSVLAKGNKEMKLFDGSYF

SEQ ID NO: 29411 - protein, 86 aa, Homo sapiens
  MAP TO CHR7.1; EXPRESSED IN LUNG, SIGNAL = 0.59; EXPRESSED IN BRAIN, SIGNAL = 0.86; EXPRESSED IN BONE MARROW, SIGNAL = 0.89; EXPRESSED IN FETAL LIVER, SIGNAL = 0.73; SWISSPROT HIT: Q01886, EVALUE 7.30e+00
NICSQAIVFQQRNLIPSLYSHFIYKCFAAKWVNCRAPRHSLQHSRLAFSKAHNVIIKLLTGTLVMAFAEDVKALAELHLSVEDSSV

SEQ ID NO: 29412 - protein, 51 aa, Homo sapiens
  MAP TO CHR19.1; EXPRESSED IN HELA, SIGNAL =   1; EXPRESSED IN BRAIN, SIGNAL = 1.2; EXPRESSED IN LUNG, SIGNAL = 1.5; EXPRESSED IN HEART, SIGNAL = 1.9; EXPRESSED IN ADULT LIVER, SIGNAL = 1.2; EXPRESSED IN BONE MARROW, SIGNAL = 1.2; EXPRESSED IN FETAL LIVER, SIGNAL =   1; SWISSPROT HIT: P08699, EVALUE 1.30e+00
AYPHSRPSGGLGGQAEPSLPPGLDAAAHLHRGPRQQHPDTCTCGQFSGCGP

SEQ ID NO: 29413 - protein, 64 aa, Homo sapiens
  MAP TO CHR7.1; EXPRESSED IN BONE MARROW, SIGNAL = 0.47; EXPRESSED IN HEART, SIGNAL = 0.82; EXPRESSED IN FETAL LIVER, SIGNAL = 0.54; EXPRESSED IN LUNG, SIGNAL = 0.94; EXPRESSED IN BRAIN, SIGNAL = 0.5; SWISSPROT HIT: P29340, EVALUE 7.90e+00
EAHINALKTVITFFCFFISYFAAFMTNMTFSLPYRSHQFFMLKDIMAAYPSGHSVIIILSNSKF

SEQ ID NO: 29414 - protein, 46 aa, Homo sapiens
  MAP TO CHR5.1; EXPRESSED IN ADULT LIVER, SIGNAL = 0.88; EXPRESSED IN FETAL LIVER, SIGNAL = 0.88; EXPRESSED IN BRAIN, SIGNAL =   1; EXPRESSED IN HEART, SIGNAL = 0.95; SWISSPROT HIT: P11689, EVALUE 8.30e+00
FTYILPTPSYMLVSSTKVMISVSVRCACFFVLFSCSICMSASFTFC

SEQ ID NO: 29415 - protein, 91 aa, Homo sapiens
  MAP TO CHRX.1; EXPRESSED IN BRAIN, SIGNAL = 1.3; EXPRESSED IN HEART, SIGNAL = 1.7; EXPRESSED IN ADULT LIVER, SIGNAL = 1.8; EXPRESSED IN PLACENTA, SIGNAL = 6.6; EXPRESSED IN LUNG, SIGNAL = 4.4; EXPRESSED IN FETAL LIVER, SIGNAL = 1.2; SWISSPROT HIT: P21333, EVALUE 8.00e-48
EISIQDMTAQVTSPSGKTHEAEIVEGENHTYCIRFVPAEMGTHTVSVKYKGQHVPGSPFQFTVGPLGEGGAHKVRAGGPGLERAEAGVPGR

SEQ ID NO: 29416 - protein, 25 aa, Homo sapiens
  MAP TO CHR6.1; EXPRESSED IN HELA, SIGNAL = 0.79; EXPRESSED IN BRAIN, SIGNAL = 0.63; EXPRESSED IN HEART, SIGNAL = 0.66; EXPRESSED IN BONE MARROW, SIGNAL = 0.75
PSLVHFLHEINEERKRLRFQRTCDS

SEQ ID NO: 29417 - protein, 64 aa, Homo sapiens
  MAP TO AC074271.8; EXPRESSED IN ADULT LIVER, SIGNAL =   7; EXPRESSED IN PLACENTA, SIGNAL = 4.7; EXPRESSED IN FETAL LIVER, SIGNAL = 4.9; EXPRESSED IN LUNG, SIGNAL =   5; EXPRESSED IN HELA, SIGNAL =   4; EXPRESSED IN BRAIN, SIGNAL = 5.9; EXPRESSED IN HEART, SIGNAL = 5.5; EXPRESSED IN BONE MARROW, SIGNAL =   6
QHCLFDVVVNSREFQRTLLISVRRQLQQASLAGCMGEYQLLFMLNNNTLSRARQKFIITGLMLW

SEQ ID NO: 29418 - protein, 33 aa, Homo sapiens
  MAP TO CHR19.1; EXPRESSED IN HELA, SIGNAL =  10; EXPRESSED IN LUNG, SIGNAL =  10; EXPRESSED IN BRAIN, SIGNAL =   9; EXPRESSED IN HEART, SIGNAL =  10; EXPRESSED IN BONE MARROW, SIGNAL = 9.4; EXPRESSED IN ADULT LIVER, SIGNAL = 7.6
HQHWRPHPHPRCGCPRWPVPLLPGPQPLQDWSE

SEQ ID NO: 29419 - protein, 84 aa, Homo sapiens
  MAP TO CHR19.1; EXPRESSED IN HELA, SIGNAL = 0.49; EXPRESSED IN BRAIN, SIGNAL = 0.53; EXPRESSED IN BONE MARROW, SIGNAL = 0.49; EXPRESSED IN HEART, SIGNAL = 0.49; SWISSPROT HIT: P08489, EVALUE 2.50e-01
LWPGLPCQIHPSPLKRSMSLIPTSPQVPGEWPSPEELGARAAFTTPDHAPLSPQSSVASSGSEQTEEQGSSRNTFQEDGSGMKG

SEQ ID NO: 29420 - protein, 69 aa, Homo sapiens
  MAP TO CHR7.1; EXPRESSED IN LUNG, SIGNAL =   3; EXPRESSED IN HELA, SIGNAL = 1.3; EXPRESSED IN FETAL LIVER, SIGNAL = 1.8; EXPRESSED IN BRAIN, SIGNAL = 2.2; EXPRESSED IN HEART, SIGNAL = 2.6; EXPRESSED IN ADULT LIVER, SIGNAL =   2; SWISSPROT HIT: P57999, EVALUE 8.80e+00
YQQLINSDAPDTQRNNRRLHIGGFAVSGISCVSLRSCSGGFQVWYHIVKLLIMGSKGSTYRETLGPTSF

SEQ ID NO: 29421 - protein, 90 aa, Homo sapiens
  MAP TO CHR19.1; EXPRESSED IN PLACENTA, SIGNAL = 1.8; EXPRESSED IN HELA, SIGNAL = 1.5; EXPRESSED IN LUNG, SIGNAL = 0.97; EXPRESSED IN BRAIN, SIGNAL = 0.51; EXPRESSED IN HEART, SIGNAL = 1.2; EXPRESSED IN ADULT LIVER, SIGNAL =   4; SWISSPROT HIT: O15235, EVALUE 3.00e-49
LGPTEGRPQLKGVVLCTFTRKPKKPNSANRKCCRVRLSTGREAVCFIPGEGHTLQEHQIVLVEGGRTQDLPGVKLTVVRGKYDCGHVQKK

SEQ ID NO: 29422 - protein, 66 aa, Homo sapiens
  MAP TO CHRX.1; EXPRESSED IN ADULT LIVER, SIGNAL = 0.42; EXPRESSED IN LUNG, SIGNAL =   1; EXPRESSED IN BRAIN, SIGNAL = 0.42; SWISSPROT HIT: P43973, EVALUE 1.20e+00
GSLHALGSLPGHVDELDHVEACVGHMQVMVEAGALTPLCDDGKSRPGHEAHKQQDVDMSRLPAGRE

SEQ ID NO: 29423 - protein, 131 aa, Homo sapiens
  MAP TO CHR12.1; EXPRESSED IN HELA, SIGNAL = 0.93; EXPRESSED IN BRAIN, SIGNAL = 1.1; EXPRESSED IN HEART, SIGNAL =   1; EXPRESSED IN BONE MARROW, SIGNAL = 1.1; EXPRESSED IN PLACENTA, SIGNAL = 1.1; EXPRESSED IN FETAL LIVER, SIGNAL = 0.93; EXPRESSED IN LUNG, SIGNAL = 1.1
GADLTAVDPVRGKTALEWAVLTDSFDTVWRIRQLLRRPQVEQLSQHYKPEWPALSGLVAQAQAQAQVAPSLLERLQATLSLPFAPSPQEGGVLDHLVTATTSLASPFVTTACHTLCPDHPPSLGTRSKSVP

SEQ ID NO: 29424 - protein, 138 aa, Homo sapiens
  MAP TO CHR1.1; EXPRESSED IN ADULT LIVER, SIGNAL = 1.1; EXPRESSED IN FETAL LIVER, SIGNAL = 1.1; EXPRESSED IN HELA, SIGNAL =   2; EXPRESSED IN BRAIN, SIGNAL = 1.6; EXPRESSED IN BONE MARROW, SIGNAL = 1.4; EXPRESSED IN HEART, SIGNAL = 0.65; SWISSPROT HIT: Q16531, EVALUE 2.70e+00
MDTVRTCLFCFAAMVEGLQVTVPDKKKVAMLFQPTVLRCHFSTSSHQPAVVQWKFKSYCQDRMGESLGMSSTRAQSLSKRNLEWDPYLDCLDSRRTVRVVASKQGSTVTLGDFYRGREITIVHGNNAPILNLGNGREV

SEQ ID NO: 29425 - protein, 69 aa, Homo sapiens
  MAP TO CHR12.1; EXPRESSED IN LUNG, SIGNAL = 1.1; EXPRESSED IN HELA, SIGNAL = 0.65; EXPRESSED IN BRAIN, SIGNAL = 0.65; EXPRESSED IN HEART, SIGNAL = 1.1; EXPRESSED IN BONE MARROW, SIGNAL = 0.64; SWISSPROT HIT: O88599, EVALUE 4.80e-01
SLVHVPGPSPTAEPLSQPARPVASGQFFLTVKSVFSSSWSFPGMLLSWEPTEAAWVWGRKGLWIKAKES

SEQ ID NO: 29426 - protein, 45 aa, Homo sapiens
  MAP TO CHR12.1; EXPRESSED IN ADULT LIVER, SIGNAL = 1.7; EXPRESSED IN HEART, SIGNAL = 1.7; EXPRESSED IN BONE MARROW, SIGNAL = 2.4; EXPRESSED IN LUNG, SIGNAL = 1.7; EXPRESSED IN FETAL LIVER, SIGNAL = 1.5; EXPRESSED IN BRAIN, SIGNAL = 1.7; EXPRESSED IN HELA, SIGNAL = 2.3
AGDKTFEEYLDEYYRLDYEDIIDDLPCRFKYRTVVPCDFGLSTEE

SEQ ID NO: 29427 - protein, 62 aa, Homo sapiens
  MAP TO CHR16.1; EXPRESSED IN ADULT LIVER, SIGNAL = 1.2; EXPRESSED IN BONE MARROW, SIGNAL = 1.2; EXPRESSED IN PLACENTA, SIGNAL = 1.3; EXPRESSED IN FETAL LIVER, SIGNAL = 1.4; EXPRESSED IN LUNG, SIGNAL = 1.3; EXPRESSED IN BRAIN, SIGNAL = 1.2; EXPRESSED IN HEART, SIGNAL = 1.6; SWISSPROT HIT: Q15046, EVALUE 8.00e-32
NYKSEEEFIHINNKLRRGDIIGVQGNPGKTKKGELSIIPYEITLLSPCLHMLPHLHFGLKDK

SEQ ID NO: 29428 - protein, 69 aa, Homo sapiens
  MAP TO CHR17.1; EXPRESSED IN ADULT LIVER, SIGNAL =   1; EXPRESSED IN PLACENTA, SIGNAL = 1.4; EXPRESSED IN FETAL LIVER, SIGNAL = 1.4; EXPRESSED IN LUNG, SIGNAL = 0.74; EXPRESSED IN HELA, SIGNAL = 1.6; EXPRESSED IN BRAIN, SIGNAL = 1.2; EXPRESSED IN BONE MARROW, SIGNAL = 1.4; SWISSPROT HIT: Q9NYC9, EVALUE 5.00e-21
LRCYMTLTTALHLHRGGSPKGPAGTGKTETVKDLGKALGIYVIVVNCSEGLDYKSMGRMYSGLAQVSIL

SEQ ID NO: 29429 - protein, 53 aa, Homo sapiens
  MAP TO CHR14.1; EXPRESSED IN BRAIN, SIGNAL = 0.87; EXPRESSED IN LUNG, SIGNAL = 2.2; EXPRESSED IN HEART, SIGNAL =   2; EXPRESSED IN BONE MARROW, SIGNAL = 0.94; SWISSPROT HIT: Q00975, EVALUE 2.10e+00
REGSHAEAPGLRDGHTIGHQSPHSQARGLRERPGCAPGPRGADRRHCPGAQVR

SEQ ID NO: 29430 - protein, 67 aa, Homo sapiens
  MAP TO CHR5.1; EXPRESSED IN FETAL LIVER, SIGNAL = 0.87; EXPRESSED IN BRAIN, SIGNAL = 1.1; EXPRESSED IN HEART, SIGNAL = 1.1; EXPRESSED IN ADULT LIVER, SIGNAL = 1.3; EXPRESSED IN BONE MARROW, SIGNAL =   1; SWISSPROT HIT: P57074, EVALUE 2.40e+00
MGLTKVNEVGRQDAAQAGCCGADSHTHVSHHCGIQLGCVHVDHGKGSRDSKLAHHHQDCSQIIQVWR

SEQ ID NO: 29431 - protein, 95 aa, Homo sapiens
  MAP TO CHR19.1; EXPRESSED IN HELA, SIGNAL = 1.6; EXPRESSED IN BRAIN, SIGNAL = 1.4; EXPRESSED IN BONE MARROW, SIGNAL = 1.4; EXPRESSED IN FETAL LIVER, SIGNAL = 1.7; EXPRESSED IN LUNG, SIGNAL = 0.73
SPAVYHWVEMRTKMRIMGFRGTVIKPLNEEAAAELGAELLGEATIFIVGGGCLVLEYWRHQAQQRHKEEEQRAAWNALRDEVGHLALALEALQAQ

SEQ ID NO: 29432 - protein, 57 aa, Homo sapiens
  MAP TO CHR2.1; EXPRESSED IN HELA, SIGNAL = 0.81; EXPRESSED IN BRAIN, SIGNAL = 0.76; EXPRESSED IN BONE MARROW, SIGNAL =   1; EXPRESSED IN FETAL LIVER, SIGNAL = 0.61; SWISSPROT HIT: Q63340, EVALUE 2.80e+00
LPNHFSCNSQFSYTHGILLQHVIFNLSTSIDVLGMICIRYIMNFTLTLGNPSGKRYL

SEQ ID NO: 29433 - protein, 86 aa, Homo sapiens
  MAP TO CHR3.1; EXPRESSED IN HELA, SIGNAL = 0.96; EXPRESSED IN FETAL LIVER, SIGNAL = 0.84; EXPRESSED IN BRAIN, SIGNAL = 0.98; EXPRESSED IN ADULT LIVER, SIGNAL = 0.82; EXPRESSED IN BONE MARROW, SIGNAL = 1.1; SWISSPROT HIT: P51178, EVALUE 4.00e-39
AVSIEDIQEVRMGHRTEGLEKFARDVPEDRCFSIVFKDQRNTLDLIAPSPADAQHWVLGLHKIIHHSGSMDQRQKLQQYPFGGSGS

SEQ ID NO: 29434 - protein, 54 aa, Homo sapiens
  MAP TO CHR16.1; EXPRESSED IN BONE MARROW, SIGNAL = 0.52; EXPRESSED IN BRAIN, SIGNAL = 0.46
RRMDAGLFITLLLAAFSTMVVLLTELLDPAARLQHHHLGDCDDHSDEIRVLKAL

SEQ ID NO: 29435 - protein, 68 aa, Homo sapiens
  MAP TO CHRX.1; EXPRESSED IN HELA, SIGNAL = 1.1; EXPRESSED IN BRAIN, SIGNAL = 0.96; EXPRESSED IN HEART, SIGNAL = 1.3; EXPRESSED IN BONE MARROW, SIGNAL = 0.97; EXPRESSED IN ADULT LIVER, SIGNAL = 0.86; EXPRESSED IN FETAL LIVER, SIGNAL = 0.86; EXPRESSED IN LUNG, SIGNAL = 1.6; SWISSPROT HIT: P51805, EVALUE 8.00e-24
QGCPEILPSGDLLIPVGVMQPLTLRAKNLPQPQSGQKNYECVVRVQGRQQRVPAVRFNSSSVQCQNAS

SEQ ID NO: 29436 - protein, 81 aa, Homo sapiens
  MAP TO CHR20.1; EXPRESSED IN HEART, SIGNAL = 1.2; EXPRESSED IN BONE MARROW, SIGNAL = 1.2; EXPRESSED IN ADULT LIVER, SIGNAL = 1.2; EXPRESSED IN PLACENTA, SIGNAL = 1.4; EXPRESSED IN FETAL LIVER, SIGNAL = 1.1; EXPRESSED IN LUNG, SIGNAL = 1.6; EXPRESSED IN BRAIN, SIGNAL = 1.5; EXPRESSED IN HELA, SIGNAL = 1.3; SWISSPROT HIT: P10686, EVALUE 5.00e-39
LFGPEIGTERACYRDMSSFPETKAEKYVNKAKGKKFLQYNRLQLSRIYPKGQRLDSSNYDPLPMWICGSQLVALNFQTPGE

SEQ ID NO: 29437 - protein, 56 aa, Homo sapiens
  MAP TO CHR5.1; EXPRESSED IN FETAL LIVER, SIGNAL = 0.5; EXPRESSED IN LUNG, SIGNAL = 0.67; EXPRESSED IN BRAIN, SIGNAL = 0.64; EXPRESSED IN HEART, SIGNAL = 0.88; EXPRESSED IN BONE MARROW, SIGNAL = 0.64; SWISSPROT HIT: P57078, EVALUE 1.90e-01
SRSLAEACSDGDVNAVRKLLDEGRSVNEHTEEGESLLCLACSAGYYELAQVSRNNL

SEQ ID NO: 29438 - protein, 58 aa, Homo sapiens
  MAP TO CHR20.1; EXPRESSED IN FETAL LIVER, SIGNAL = 1.1; EXPRESSED IN LUNG, SIGNAL = 1.4; EXPRESSED IN BRAIN, SIGNAL = 0.94; EXPRESSED IN HEART, SIGNAL = 1.4; EXPRESSED IN ADULT LIVER, SIGNAL = 0.41; EXPRESSED IN BONE MARROW, SIGNAL = 0.91; SWISSPROT HIT: P53321, EVALUE 5.50e-01
TLMRIFLLSWLGEGSPSAEISTGLVRSVSPSTFLKYWAMFLCWAMLQWSSMDRMTGYL

SEQ ID NO: 29439 - protein, 113 aa, Homo sapiens
  MAP TO CHR5.1; EXPRESSED IN FETAL LIVER, SIGNAL = 1.1; EXPRESSED IN LUNG, SIGNAL = 1.4; EXPRESSED IN HELA, SIGNAL = 0.91; EXPRESSED IN BRAIN, SIGNAL = 1.3; EXPRESSED IN HEART, SIGNAL = 1.8; EXPRESSED IN BONE MARROW, SIGNAL = 1.5; EXPRESSED IN ADULT LIVER, SIGNAL = 2.2; SWISSPROT HIT: P29011, EVALUE 4.30e-01
KPVVLLEPLAQWAGPKLPTGPSPVVGTTILRNFGLPVFPWVRRGESWQGWLLGCSSNPLVKGEAENWIPYPQQLLAGQHTKQLSPRGRNVPRHSLGLVTRDAILSLVAKKSLF

SEQ ID NO: 29440 - protein, 90 aa, Homo sapiens
  MAP TO CHR11.1; EXPRESSED IN BONE MARROW, SIGNAL = 1.3; EXPRESSED IN HEART, SIGNAL =   1; EXPRESSED IN ADULT LIVER, SIGNAL = 1.2; EXPRESSED IN FETAL LIVER, SIGNAL = 1.3; EXPRESSED IN LUNG, SIGNAL = 1.1; EXPRESSED IN BRAIN, SIGNAL = 1.4; SWISSPROT HIT: P28659, EVALUE 2.00e-07
EFDPFVMVFSQGCSSPMVVKFADTQKDKEQKRMAQQLQQQMQQISAICVGKPCWSKYSWTPVFSSESLWFAFCRLCKLPAVPSSAVPSQQ

SEQ ID NO: 29441 - protein, 45 aa, Homo sapiens
  MAP TO CHR20.1; EXPRESSED IN LUNG, SIGNAL =   1; EXPRESSED IN BRAIN, SIGNAL = 1.1; EXPRESSED IN HEART, SIGNAL = 1.3; EXPRESSED IN BONE MARROW, SIGNAL = 1.1
ILIIDYATIRKMGHTSIYITPHTNIISPNQPVYTKQQISLMRTPH

SEQ ID NO: 29442 - protein, 49 aa, Homo sapiens
  MAP TO CHR17.1; EXPRESSED IN BRAIN, SIGNAL = 0.76; EXPRESSED IN BONE MARROW, SIGNAL = 0.82; SWISSPROT HIT: P80219, EVALUE 3.30e-01
ISALGLFKQPLPSCGGFMVIQPWPQASWMCYRSARIWLGAHRLLRRDKA

SEQ ID NO: 29443 - protein, 53 aa, Homo sapiens
  MAP TO CHR5.1; EXPRESSED IN BRAIN, SIGNAL = 2.2; EXPRESSED IN HEART, SIGNAL = 3.6; EXPRESSED IN ADULT LIVER, SIGNAL = 3.5; EXPRESSED IN BONE MARROW, SIGNAL = 2.6; EXPRESSED IN PLACENTA, SIGNAL =   2; EXPRESSED IN FETAL LIVER, SIGNAL = 2.1; EXPRESSED IN LUNG, SIGNAL = 2.5; SWISSPROT HIT: P15171, EVALUE 4.80e+00
VGGQQGQRCHRSGQCPEKPHLTFILLPGCRGSVNIPTESTSRETKFYYQDPKG

SEQ ID NO: 29444 - protein, 62 aa, Homo sapiens
  MAP TO CHR19.1; EXPRESSED IN HEART, SIGNAL = 3.1; EXPRESSED IN PLACENTA, SIGNAL = 7.6; EXPRESSED IN FETAL LIVER, SIGNAL = 4.6; EXPRESSED IN LUNG, SIGNAL = 8.1; EXPRESSED IN BRAIN, SIGNAL = 2.2; SWISSPROT HIT: P11249, EVALUE 1.00e-31
FQLREYKVVGRCLPTPKCHTPPLYRMRIFAPNHVVAKSRFWYFVSQLKKMKKSSGEIVYCGQ

SEQ ID NO: 29445 - protein, 89 aa, Homo sapiens
  MAP TO CHR7.1; EXPRESSED IN ADULT LIVER, SIGNAL = 3.7; EXPRESSED IN PLACENTA, SIGNAL = 5.3; EXPRESSED IN FETAL LIVER, SIGNAL = 4.2; EXPRESSED IN LUNG, SIGNAL = 1.9; EXPRESSED IN HELA, SIGNAL = 8.5; EXPRESSED IN BRAIN, SIGNAL = 4.7; SWISSPROT HIT: Q10022, EVALUE 6.80e-02
EAYLVYTDRLYSRSDFNNYVAAVYKVLGTFLFGAAVSQSLTDLAKYMIGRLRPNFLAVCDPDWSRVNCSVYVQLEKVCRGNPADVTEAR

SEQ ID NO: 29446 - protein, 89 aa, Homo sapiens
  MAP TO AP000850.3; EXPRESSED IN BRAIN, SIGNAL = 0.82; EXPRESSED IN ADULT LIVER, SIGNAL = 0.66; EXPRESSED IN BONE MARROW, SIGNAL = 0.9; EXPRESSED IN FETAL LIVER, SIGNAL = 0.67; SWISSPROT HIT: P11487, EVALUE 7.00e-47
QEHYSAECEFVERIHELGYNTYASRLYRTVSSTPGARRQPSAERLWYVSVNGKGRPRRGFKTRRTQKSSLFLPRVLDHRDHEMVRQLQS

SEQ ID NO: 29447 - protein, 125 aa, Homo sapiens
  MAP TO CHR22.1; EXPRESSED IN PLACENTA, SIGNAL = 7.4; EXPRESSED IN FETAL LIVER, SIGNAL = 6.2; EXPRESSED IN LUNG, SIGNAL = 2.6; EXPRESSED IN HELA, SIGNAL = 6.2; EXPRESSED IN BRAIN, SIGNAL =   6; EXPRESSED IN HEART, SIGNAL = 3.3; EXPRESSED IN BONE MARROW, SIGNAL = 5.2; SWISSPROT HIT: Q9P2J3, EVALUE 7.00e-11
LALQVACYSCTSGQWSSVCPLPAGHGEPGIAVLDNRIYVLGGRSHNRGSRTGYVHIYDVEKDCWEEGPQLDNSISGLAACVLTLPRSLLLEPPRGTPDRSQADPDFASEVMSVSDWEEFDNSSED

SEQ ID NO: 29448 - protein, 50 aa, Homo sapiens
  MAP TO CHR17.1; EXPRESSED IN BRAIN, SIGNAL = 0.58; EXPRESSED IN ADULT LIVER, SIGNAL = 1.3; EXPRESSED IN BONE MARROW, SIGNAL = 0.53; EXPRESSED IN HEART, SIGNAL =   1; EXPRESSED IN FETAL LIVER, SIGNAL = 0.63; EXPRESSED IN LUNG, SIGNAL = 1.2; SWISSPROT HIT: O25242, EVALUE 4.80e+00
PRIGLTMFSKFLTVQTLIRDCQVIRETKEDQIAELKKICEQSTESLNNDW

SEQ ID NO: 29449 - protein, 87 aa, Homo sapiens
  MAP TO CHR11.1; EXPRESSED IN BONE MARROW, SIGNAL = 0.85; EXPRESSED IN HEART, SIGNAL = 0.58; EXPRESSED IN ADULT LIVER, SIGNAL = 0.63; EXPRESSED IN FETAL LIVER, SIGNAL = 0.87; EXPRESSED IN HELA, SIGNAL = 1.2; EXPRESSED IN LUNG, SIGNAL = 0.97; EXPRESSED IN BRAIN, SIGNAL =   1; SWISSPROT HIT: O02626, EVALUE 1.00e-19
PRVAMVRFFNSANVLQGFQMHTRTLRLFPRPVVAFQAGSFLASRPRQTPFAEKLARTQAVEYFGEWILNPTNYAFQRIHNSESTCPL

SEQ ID NO: 29450 - protein, 62 aa, Homo sapiens
  MAP TO CHR1.1; EXPRESSED IN FETAL LIVER, SIGNAL = 0.44; EXPRESSED IN BRAIN, SIGNAL = 0.49; EXPRESSED IN BONE MARROW, SIGNAL = 0.55; SWISSPROT HIT: Q9ZJL8, EVALUE 2.10e+00
QPKPQNAVTIAVSSRALFRMDEEQQIYTEQGVEEYVRYQLEHENEPFSPGPAFPFVKVREQF

SEQ ID NO: 29451 - protein, 120 aa, Homo sapiens
  MAP TO CHR5.1; EXPRESSED IN FETAL LIVER, SIGNAL = 1.5; EXPRESSED IN LUNG, SIGNAL = 0.88; EXPRESSED IN HELA, SIGNAL = 1.8; EXPRESSED IN BRAIN, SIGNAL = 1.6; EXPRESSED IN HEART, SIGNAL = 1.2; EXPRESSED IN BONE MARROW, SIGNAL = 1.5; SWISSPROT HIT: O60383, EVALUE 8.00e-70
ASFNLSEYFRQFLLPQNECELHDFRLSFSQLKWDNWIVAPHRYNPRYCKGDCPRAVGHRYGSPVHTMVQNIIYEKLDSSVPRPSCVPAKYSPLSVLTIEPDGSIAYKEYEDMIATKCTCR

SEQ ID NO: 29452 - protein, 23 aa, Homo sapiens
  MAP TO CHR11.1; EXPRESSED IN FETAL LIVER, SIGNAL = 0.36; EXPRESSED IN BRAIN, SIGNAL = 0.31; EXPRESSED IN BONE MARROW, SIGNAL = 0.34
ESEGSVINRNQGLFSLNTNTNYF

SEQ ID NO: 29453 - protein, 93 aa, Homo sapiens
  MAP TO CHR11.1; EXPRESSED IN HELA, SIGNAL = 0.51; EXPRESSED IN BRAIN, SIGNAL = 0.75; EXPRESSED IN BONE MARROW, SIGNAL = 0.76; EXPRESSED IN ADULT LIVER, SIGNAL = 0.67; EXPRESSED IN FETAL LIVER, SIGNAL = 0.56; SWISSPROT HIT: P12109, EVALUE 2.60e+00
CVLMSPCSLCKCRCDPISLEAGRVCTRVSVSDVWLSVAQLWNLLILTSEAASTCLLHPKLPLGRQTGRQTALLPACQALSPLTPTQGSQVCTW

SEQ ID NO: 29454 - protein, 54 aa, Homo sapiens
  MAP TO AP001267.3; EXPRESSED IN HELA, SIGNAL = 3.9; EXPRESSED IN BRAIN, SIGNAL = 2.6; EXPRESSED IN BONE MARROW, SIGNAL = 4.4; EXPRESSED IN PLACENTA, SIGNAL = 3.6; EXPRESSED IN FETAL LIVER, SIGNAL = 2.9; EXPRESSED IN LUNG, SIGNAL = 1.2; SWISSPROT HIT: Q14139, EVALUE 2.00e-22
RDEENFCATVPKDGRSYSPTLFAQTVRVLKKINKPGNMIMAFSNLAERIKVRKR

SEQ ID NO: 29455 - protein, 82 aa, Homo sapiens
  MAP TO CHR11.1; EXPRESSED IN HELA, SIGNAL = 0.48; EXPRESSED IN BRAIN, SIGNAL = 0.49; EXPRESSED IN BONE MARROW, SIGNAL = 0.52; EXPRESSED IN HEART, SIGNAL = 0.59; SWISSPROT HIT: Q62074, EVALUE 8.30e+00
QGLTPGIGECGFCGLPTIPAASVIKGEALVTCPRNHLRVLDKVLHHHSGLDFKDPPAVAVRKEDGPTHGVCGQVVFVCWTVT

SEQ ID NO: 29456 - protein, 34 aa, Homo sapiens
  MAP TO CHR11.1; EXPRESSED IN BONE MARROW, SIGNAL = 1.1; EXPRESSED IN PLACENTA, SIGNAL =   2; EXPRESSED IN HELA, SIGNAL = 1.7; EXPRESSED IN FETAL LIVER, SIGNAL = 1.5; EXPRESSED IN LUNG, SIGNAL = 2.7; EXPRESSED IN BRAIN, SIGNAL = 1.2; EXPRESSED IN HEART, SIGNAL = 2.6; SWISSPROT HIT: P17408, EVALUE 2.00e-04
FFRCFSAIRYSSVENSLFSSVPHFLIGLFGSLES

SEQ ID NO: 29457 - protein, 73 aa, Homo sapiens
  MAP TO CHR17.1; EXPRESSED IN FETAL LIVER, SIGNAL = 0.37; EXPRESSED IN BRAIN, SIGNAL = 0.43; EXPRESSED IN BONE MARROW, SIGNAL = 0.43
PGLAEIRASAREPGAEPAPQAGPVSVPGCRWMELGAGQPLALSCLVTPGSCLAALGLFSFSFKTPPSHASVGQ

SEQ ID NO: 29458 - protein, 52 aa, Homo sapiens
  MAP TO CHR5.1; EXPRESSED IN BONE MARROW, SIGNAL = 0.45; EXPRESSED IN FETAL LIVER, SIGNAL = 0.36; EXPRESSED IN BRAIN, SIGNAL = 0.51; EXPRESSED IN LUNG, SIGNAL = 0.66; SWISSPROT HIT: P38776, EVALUE 6.20e+00
LYGNFFVYMYKLGMALMLQLRICLATTLSSVLSNRFLNVTFLLLTGHSTLNN

SEQ ID NO: 29459 - protein, 26 aa, Homo sapiens
  MAP TO CHR5.1; EXPRESSED IN FETAL LIVER, SIGNAL = 0.42; EXPRESSED IN BRAIN, SIGNAL = 0.5; EXPRESSED IN LUNG, SIGNAL = 0.61; EXPRESSED IN BONE MARROW, SIGNAL = 0.57
VVKHSYYCAKWNERKCPGKTSALNVN

SEQ ID NO: 29460 - protein, 52 aa, Homo sapiens
  MAP TO CHR5.1; EXPRESSED IN LUNG, SIGNAL = 0.61; EXPRESSED IN BRAIN, SIGNAL = 0.46; EXPRESSED IN BONE MARROW, SIGNAL = 0.55; EXPRESSED IN HEART, SIGNAL = 0.65; SWISSPROT HIT: P25591, EVALUE 1.60e+00
RLINTRLQWNSCRITVDPDPRTTKEFNMINALDSKERQNDLPPITKKGCQIA

SEQ ID NO: 29461 - protein, 68 aa, Homo sapiens
  MAP TO CHR18.1; EXPRESSED IN HEART, SIGNAL = 0.69; EXPRESSED IN HELA, SIGNAL = 0.58; EXPRESSED IN BRAIN, SIGNAL = 0.63; SWISSPROT HIT: P39364, EVALUE 5.90e+00
HSGIGFDVALWTRANFWGVVFLGACQSNSSLMNTNYRTDLLHEIGAEAISIQAALQDEIFLLGTDSRK

SEQ ID NO: 29462 - protein, 67 aa, Homo sapiens
  MAP TO CHR12.1; EXPRESSED IN BRAIN, SIGNAL = 0.63; EXPRESSED IN LUNG, SIGNAL =   1; EXPRESSED IN BONE MARROW, SIGNAL = 0.69; EXPRESSED IN HEART, SIGNAL = 0.75; SWISSPROT HIT: Q03253, EVALUE 7.00e-01
GVAYILKLLDQYREFDSLHWFQSVREKYLKEIRAVAKQQNVQSASQDEKLLQTMNLTQKRLDVYLQV

SEQ ID NO: 29463 - protein, 56 aa, Homo sapiens
  MAP TO CHR5.1; EXPRESSED IN BONE MARROW, SIGNAL = 0.66; EXPRESSED IN BRAIN, SIGNAL = 0.73; SWISSPROT HIT: Q16566, EVALUE 1.00e-23
SLLFQVRKLIVLDPKKRLTTFQALQHPWVTGKAANFVHMDTAQKKLQEFNARRKLK

SEQ ID NO: 29464 - protein, 85 aa, Homo sapiens
  MAP TO CHR7.1; EXPRESSED IN ADULT LIVER, SIGNAL = 0.46; EXPRESSED IN BONE MARROW, SIGNAL = 0.7; EXPRESSED IN FETAL LIVER, SIGNAL = 0.52; EXPRESSED IN BRAIN, SIGNAL = 0.61; EXPRESSED IN LUNG, SIGNAL = 0.93; EXPRESSED IN HEART, SIGNAL = 0.77; SWISSPROT HIT: O00411, EVALUE 5.30e+00
LEAAEKASRAFKESQRQTDSKNYETENWSPQKSQRRYDMYNTACFLGEIEVGLYTIQILQLTPFFHKENELSKKHMVQFLSGKWT

SEQ ID NO: 29465 - protein, 56 aa, Homo sapiens
  MAP TO CHR12.1; EXPRESSED IN ADULT LIVER, SIGNAL =   5; EXPRESSED IN BONE MARROW, SIGNAL = 6.1; EXPRESSED IN PLACENTA, SIGNAL = 5.7; EXPRESSED IN HELA, SIGNAL = 6.4; EXPRESSED IN BRAIN, SIGNAL = 5.6; EXPRESSED IN LUNG, SIGNAL = 3.1; EXPRESSED IN HEART, SIGNAL = 2.9
AEQRAQKRHCSALAGPGPTACACAADASVRREGWSDVRLPAPRTPQGDTSGLGPDS

SEQ ID NO: 29466 - protein, 59 aa, Homo sapiens
  MAP TO CHR20.1; EXPRESSED IN PLACENTA, SIGNAL = 1.5; EXPRESSED IN LUNG, SIGNAL = 1.4; EXPRESSED IN BRAIN, SIGNAL = 1.1; EXPRESSED IN BONE MARROW, SIGNAL = 1.4; EXPRESSED IN HEART, SIGNAL = 1.1; SWISSPROT HIT: P48038, EVALUE 1.20e+00
SLCISASDILPGVHQPPAVHVFLRAGNPGPVPHHQVRRHLSATFEAAFSGTSTGSWMRT

SEQ ID NO: 29467 - protein, 98 aa, Homo sapiens
  MAP TO CHR9.1; EXPRESSED IN PLACENTA, SIGNAL = 1.9; EXPRESSED IN LUNG, SIGNAL = 1.2; EXPRESSED IN FETAL LIVER, SIGNAL = 1.1; EXPRESSED IN BRAIN, SIGNAL =   1; SWISSPROT HIT: O43541, EVALUE 5.20e+00
PPSLTARRDGLEAACPRQDVWHKEQPRSPLNALDGHQEALQWDGLIHRCVGHHVGAELNLPTCCLQDQHLEEVCGHCHVVLADDLVLYVGFPISLCPV

SEQ ID NO: 29468 - protein, 111 aa, Homo sapiens
  MAP TO CHR5.1; EXPRESSED IN LUNG, SIGNAL = 0.69; EXPRESSED IN FETAL LIVER, SIGNAL = 0.67; EXPRESSED IN HELA, SIGNAL = 0.55; EXPRESSED IN BRAIN, SIGNAL = 0.66; SWISSPROT HIT: Q9Y5H8, EVALUE 2.00e-57
LLAASEVGSGQLHYSVSEEAKHGTFVGRIAQDLGLELAELVPRLFRVASKRHGDLLEVNLQNGILFVNSRIDREELCGRSAECSIHLEVIVDRPLQVFHVEVEVKDINDNA

SEQ ID NO: 29469 - protein, 52 aa, Homo sapiens
  MAP TO CHR2.1; EXPRESSED IN LUNG, SIGNAL =   1; EXPRESSED IN BRAIN, SIGNAL = 0.9; EXPRESSED IN HEART, SIGNAL = 0.94; EXPRESSED IN BONE MARROW, SIGNAL = 0.75
LTVHVGLVQDLRLDDLLDHVLQGDQAQDLVEGVTLTLVVYLLHDGQVGLPCG

SEQ ID NO: 29470 - protein, 36 aa, Homo sapiens
  MAP TO CHR14.1; EXPRESSED IN BONE MARROW, SIGNAL = 3.9; EXPRESSED IN ADULT LIVER, SIGNAL = 1.8; EXPRESSED IN PLACENTA, SIGNAL = 4.4; EXPRESSED IN FETAL LIVER, SIGNAL =   3; EXPRESSED IN LUNG, SIGNAL =   3; EXPRESSED IN BRAIN, SIGNAL = 2.4; EXPRESSED IN HEART, SIGNAL = 1.8
EVSSVTLNLPLCFSLSFERIKIRWTRPLPEFCLYHC

SEQ ID NO: 29471 - protein, 66 aa, Homo sapiens
  MAP TO CHR17.1; EXPRESSED IN BRAIN, SIGNAL = 1.3; EXPRESSED IN HEART, SIGNAL = 1.6; EXPRESSED IN ADULT LIVER, SIGNAL = 4.9; EXPRESSED IN PLACENTA, SIGNAL = 8.5; EXPRESSED IN LUNG, SIGNAL = 3.3; SWISSPROT HIT: P29316, EVALUE 1.70e-02
LPAPAPPKAEAKAKALKAKKAVLKGVHSHKKKKIRTSPTLPAGRRHCDSGDSPNILGRALPGETSQ

SEQ ID NO: 29472 - protein, 78 aa, Homo sapiens
  MAP TO CHR17.1; EXPRESSED IN PLACENTA, SIGNAL = 1.4; EXPRESSED IN FETAL LIVER, SIGNAL = 1.1; EXPRESSED IN BONE MARROW, SIGNAL = 1.3; EXPRESSED IN ADULT LIVER, SIGNAL = 0.91; EXPRESSED IN LUNG, SIGNAL = 1.1; EXPRESSED IN HEART, SIGNAL = 1.1; EXPRESSED IN BRAIN, SIGNAL = 1.3; EXPRESSED IN HELA, SIGNAL = 1.4; SWISSPROT HIT: P51954, EVALUE 7.10e-02
VPSQNLPALVLKIMSGTFAPISDRYSPELRQLVLSLLSLEPAQRPPLSHIMAQPLCIRALLNLHTDVGSVRMRRPVQG

SEQ ID NO: 29473 - protein, 82 aa, Homo sapiens
  MAP TO CHR18.1; EXPRESSED IN HEART, SIGNAL = 3.8; EXPRESSED IN FETAL LIVER, SIGNAL = 7.5; EXPRESSED IN LUNG, SIGNAL = 3.2; EXPRESSED IN BRAIN, SIGNAL = 6.8; EXPRESSED IN BONE MARROW, SIGNAL = 8.3; EXPRESSED IN ADULT LIVER, SIGNAL = 6.8; EXPRESSED IN PLACENTA, SIGNAL = 6.8; EXPRESSED IN HELA, SIGNAL = 7.7
HLWPLVLLTEWSNLNLFLKSLLLFENELIHQQIRKQMVSIVHNIVILGTYIIVLRTLVNLLIAKAVALFCRVCLFNHIKADG

SEQ ID NO: 29474 - protein, 21 aa, Homo sapiens
  MAP TO CHR14.1; EXPRESSED IN FETAL LIVER, SIGNAL = 6.1; EXPRESSED IN PLACENTA, SIGNAL = 7.1; EXPRESSED IN LUNG, SIGNAL = 3.2; EXPRESSED IN BRAIN, SIGNAL =   6; EXPRESSED IN HELA, SIGNAL = 7.1; EXPRESSED IN HEART, SIGNAL =   3; EXPRESSED IN BONE MARROW, SIGNAL = 6.8; EXPRESSED IN ADULT LIVER, SIGNAL = 6.1
FVIKFLMTVFPQLSWKIYGGV

SEQ ID NO: 29475 - protein, 47 aa, Homo sapiens
  MAP TO CHR7.1; EXPRESSED IN LUNG, SIGNAL = 0.78; EXPRESSED IN HELA, SIGNAL = 0.83; EXPRESSED IN BRAIN, SIGNAL = 0.69; EXPRESSED IN BONE MARROW, SIGNAL = 0.7
TIFRLPPNLKAVWSKCSDHIFNEMAVRIQGLMIRILGIAYEAFFVLL

SEQ ID NO: 29476 - protein, 62 aa, Homo sapiens
  MAP TO CHR17.1; EXPRESSED IN LUNG, SIGNAL = 0.59; EXPRESSED IN BRAIN, SIGNAL = 0.42; EXPRESSED IN HEART, SIGNAL = 0.69; SWISSPROT HIT: P13369, EVALUE 3.20e-01
RELPAWALRNCCNRMLPTWALQPSCVPQFDKLDRRSQRNTETSASAAFRQPPSGSCEALEGD

SEQ ID NO: 29477 - protein, 43 aa, Homo sapiens
  MAP TO CHR10.1; EXPRESSED IN LUNG, SIGNAL = 1.6; EXPRESSED IN PLACENTA, SIGNAL = 1.3; EXPRESSED IN FETAL LIVER, SIGNAL = 0.95; EXPRESSED IN HELA, SIGNAL = 1.6; EXPRESSED IN BRAIN, SIGNAL = 0.59; EXPRESSED IN BONE MARROW, SIGNAL = 0.64; SWISSPROT HIT: Q99612, EVALUE 9.00e-23
PGEKPYRCSWEGCEWRFARSDELTRHFRKHTGAKPFKCSHCDR

SEQ ID NO: 29478 - protein, 68 aa, Homo sapiens
  MAP TO CHRX.1; EXPRESSED IN ADULT LIVER, SIGNAL = 1.1; EXPRESSED IN BONE MARROW, SIGNAL = 1.4; EXPRESSED IN PLACENTA, SIGNAL = 1.7; EXPRESSED IN FETAL LIVER, SIGNAL = 1.3; EXPRESSED IN LUNG, SIGNAL = 1.5; EXPRESSED IN HELA, SIGNAL = 1.4; EXPRESSED IN BRAIN, SIGNAL = 1.2; EXPRESSED IN HEART, SIGNAL = 1.4; SWISSPROT HIT: P80022, EVALUE 1.50e+00
ELFLCSTTGHLLCFPHTHAETRTSTCCGTPAPSQTGSQPLDSRLHAVWPQKAKGSYRRSWPTWKMRTG

SEQ ID NO: 29479 - protein, 46 aa, Homo sapiens
  MAP TO CHR11.1; EXPRESSED IN FETAL LIVER, SIGNAL = 7.9; EXPRESSED IN LUNG, SIGNAL = 4.7; EXPRESSED IN HELA, SIGNAL = 6.9; EXPRESSED IN BRAIN, SIGNAL = 7.5; EXPRESSED IN BONE MARROW, SIGNAL = 8.8; EXPRESSED IN ADULT LIVER, SIGNAL = 6.4; EXPRESSED IN PLACENTA, SIGNAL = 9.2; EXPRESSED IN HEART, SIGNAL = 5.4; SWISSPROT HIT: Q9Y613, EVALUE 2.20e+00
QPLPQDAETQLQPGGPAGQVAVCQARPQLRSEALPHRAGGHRQVRL

SEQ ID NO: 29480 - protein, 39 aa, Homo sapiens
  MAP TO CHR9.1; EXPRESSED IN BONE MARROW, SIGNAL = 0.39; EXPRESSED IN FETAL LIVER, SIGNAL = 0.34; EXPRESSED IN BRAIN, SIGNAL = 0.38
ATLTDGDFHLVCIVYDNSHGQGVITLVCHRQFSSTRILQ

SEQ ID NO: 29481 - protein, 111 aa, Homo sapiens
  MAP TO CHR2.1; EXPRESSED IN BRAIN, SIGNAL = 0.35; EXPRESSED IN HEART, SIGNAL = 0.63; SWISSPROT HIT: Q9WXB9, EVALUE 8.30e-01
YKMSLPIGSMATMGLEGRLGFPDPLALMAVTRCSYSKPSVRPVERYRVIVTGTLFTRTHRSALTSLRSTIYPVTWEPPSSSGGYQVSVMPSRETSNICNVSGGPGIPAARQ

SEQ ID NO: 29482 - protein, 59 aa, Homo sapiens
  MAP TO CHR13.1; EXPRESSED IN FETAL LIVER, SIGNAL = 2.4; EXPRESSED IN HELA, SIGNAL = 2.6; EXPRESSED IN BRAIN, SIGNAL = 2.6; EXPRESSED IN HEART, SIGNAL = 1.2; EXPRESSED IN ADULT LIVER, SIGNAL = 2.2; EXPRESSED IN PLACENTA, SIGNAL = 2.3; SWISSPROT HIT: P32916, EVALUE 4.70e+00
RQSNQAPGVGDCLRQQLGSRLAWTLTANQPSSQATTSKGVPSAVSRNMTRSRREGDTGG

SEQ ID NO: 29483 - protein, 75 aa, Homo sapiens
  MAP TO CHR17.1; EXPRESSED IN HEART, SIGNAL = 0.63; EXPRESSED IN FETAL LIVER, SIGNAL = 0.48; EXPRESSED IN BRAIN, SIGNAL = 0.37; EXPRESSED IN LUNG, SIGNAL = 0.66
PLTSVASWCRFACSMSMCQSPWNRRRLLSHQGKGGLGSAEGLVKRSTHWPISVQAGSQHGPHTTVYWNISAGVEE

SEQ ID NO: 29484 - protein, 48 aa, Homo sapiens
  MAP TO CHR1.1; EXPRESSED IN FETAL LIVER, SIGNAL = 0.86; EXPRESSED IN BRAIN, SIGNAL = 0.8; EXPRESSED IN LUNG, SIGNAL = 1.4; EXPRESSED IN HEART, SIGNAL = 1.2; EXPRESSED IN BONE MARROW, SIGNAL = 0.68; SWISSPROT HIT: P06308, EVALUE 8.20e+00
CRCFQFADSIEFTLVICSICSETTASIIGRKWRGRQLRDNTKSPSHGH

SEQ ID NO: 29485 - protein, 60 aa, Homo sapiens
  MAP TO AL162413.6; EXPRESSED IN LUNG, SIGNAL = 1.5; EXPRESSED IN BRAIN, SIGNAL = 1.1; EXPRESSED IN BONE MARROW, SIGNAL = 0.8; EXPRESSED IN HEART, SIGNAL = 0.75; EXPRESSED IN FETAL LIVER, SIGNAL = 0.62; SWISSPROT HIT: O55131, EVALUE 1.00e-20
ELQLNCLFAFYSWQPVIDYIDSKFEDYLNAESCVNRHQMPDNRVQCCSYFIAPSGHGSVP

SEQ ID NO: 29486 - protein, 49 aa, Homo sapiens
  MAP TO CHR7.1; EXPRESSED IN HELA, SIGNAL = 2.8; EXPRESSED IN LUNG, SIGNAL = 1.5; EXPRESSED IN BRAIN, SIGNAL = 1.7; EXPRESSED IN HEART, SIGNAL = 2.2; EXPRESSED IN ADULT LIVER, SIGNAL = 0.77; EXPRESSED IN BONE MARROW, SIGNAL = 1.8; EXPRESSED IN PLACENTA, SIGNAL = 2.7; EXPRESSED IN FETAL LIVER, SIGNAL = 1.7
TFAARPFALLTLADAVFLHLIAVGPTGSDARAVICHHIITWGREHERKV

SEQ ID NO: 29487 - protein, 56 aa, Homo sapiens
  MAP TO CHR7.1; EXPRESSED IN HEART, SIGNAL = 0.84; EXPRESSED IN BONE MARROW, SIGNAL = 0.72; EXPRESSED IN FETAL LIVER, SIGNAL = 0.84; EXPRESSED IN BRAIN, SIGNAL = 0.76
EALSFDLVLLTTGHHIAFSVILFFAGIRSVVVSVVPKVDLAEDSFVSDSQVKTSDP

SEQ ID NO: 29488 - protein, 63 aa, Homo sapiens
  MAP TO CHR4.1; EXPRESSED IN FETAL LIVER, SIGNAL = 0.45; EXPRESSED IN BRAIN, SIGNAL = 0.4; EXPRESSED IN HEART, SIGNAL = 0.59; SWISSPROT HIT: P22599, EVALUE 1.60e+00
TSDVSSNVTFMLLIPHLKVKMQCISQKVVLNRSVLSLSAHQPLGKYNLKAISGLLGIAFNLGL

SEQ ID NO: 29489 - protein, 130 aa, Homo sapiens [sequence omitted]

SEQ ID NO: 29490 - protein, 32 aa, Homo sapiens
  MAP TO CHR17.1; EXPRESSED IN HELA, SIGNAL = 0.51; EXPRESSED IN BRAIN, SIGNAL = 0.66; EXPRESSED IN LUNG, SIGNAL =   1; EXPRESSED IN HEART, SIGNAL = 0.82; EXPRESSED IN FETAL LIVER, SIGNAL = 1.2
PAGVHYVFDTTIAADFSILESQKEFVRLSPAQ

SEQ ID NO: 29491 - protein, 50 aa, Homo sapiens
  MAP TO CHR5.1; EXPRESSED IN LUNG, SIGNAL = 7.5; EXPRESSED IN BRAIN, SIGNAL = 8.7; EXPRESSED IN HEART, SIGNAL = 9.8; EXPRESSED IN ADULT LIVER, SIGNAL = 7.3; EXPRESSED IN BONE MARROW, SIGNAL =  12; EXPRESSED IN FETAL LIVER, SIGNAL = 9.7; SWISSPROT HIT: O84005, EVALUE 8.20e+00
SAEEFITRNTAHEDIIYKISVQYSFLSNYPVPLGHIMQLNISHNKNRVLG

SEQ ID NO: 29492 - protein, 43 aa, Homo sapiens
  MAP TO CHR6.1; EXPRESSED IN ADULT LIVER, SIGNAL = 1.9; EXPRESSED IN BONE MARROW, SIGNAL = 2.1; EXPRESSED IN PLACENTA, SIGNAL = 1.2; EXPRESSED IN FETAL LIVER, SIGNAL = 1.6; EXPRESSED IN BRAIN, SIGNAL = 1.8; EXPRESSED IN LUNG, SIGNAL = 2.6; EXPRESSED IN HEART, SIGNAL = 2.4
KKGAQRSTFSIGMNSILKSQNTEFPSLRRGLYVTKITISIGIV

SEQ ID NO: 29493 - protein, 69 aa, Homo sapiens
  MAP TO CHR19.1; EXPRESSED IN HEART, SIGNAL =  14; EXPRESSED IN BONE MARROW, SIGNAL =  12; EXPRESSED IN ADULT LIVER, SIGNAL =  30; EXPRESSED IN PLACENTA, SIGNAL =  17; EXPRESSED IN FETAL LIVER, SIGNAL =  12; EXPRESSED IN BRAIN, SIGNAL =  18; EXPRESSED IN LUNG, SIGNAL = 5.7; SWISSPROT HIT: P29901, EVALUE 2.70e+00
LLQEPLLNLLFLLQRLHKGGLQPAGVLHLERLLLVGCHAVLTHDGAALLLPPAAREVRLALCTHVGLPG

SEQ ID NO: 29494 - protein, 123 aa, Homo sapiens
  MAP TO CHR11.1; EXPRESSED IN ADULT LIVER, SIGNAL = 2.3; EXPRESSED IN FETAL LIVER, SIGNAL = 1.6; EXPRESSED IN LUNG, SIGNAL = 3.2; EXPRESSED IN PLACENTA, SIGNAL = 2.3; EXPRESSED IN BRAIN, SIGNAL = 1.7; EXPRESSED IN BONE MARROW, SIGNAL = 1.8; EXPRESSED IN HEART, SIGNAL = 2.1; SWISSPROT HIT: Q14139, EVALUE 7.00e-64
VLWLCFLVEQFMAQFHEKIYQMLKNLLQLSPETKHCILSWLGNCLHANAGRTKIWANQMPEIFFQMYASDAFFLNLGAALLKLCQPFCKPRSSRLLTFNPTYCALKELNDEERKIKNVHMRGR

SEQ ID NO: 29495 - protein, 42 aa, Homo sapiens
  MAP TO CHR9.1; EXPRESSED IN FETAL LIVER, SIGNAL =   2; EXPRESSED IN LUNG, SIGNAL = 2.4; EXPRESSED IN HELA, SIGNAL = 1.7; EXPRESSED IN BRAIN, SIGNAL =   2; EXPRESSED IN HEART, SIGNAL =   2; EXPRESSED IN BONE MARROW, SIGNAL =   2
LLFFGWRTLKGHVGTSLVQLTQTSECEKGSFLWLLALHLSSA

SEQ ID NO: 29496 - protein, 38 aa, Homo sapiens
  MAP TO CHR11.1; EXPRESSED IN PLACENTA, SIGNAL =   6; EXPRESSED IN FETAL LIVER, SIGNAL =   4; EXPRESSED IN LUNG, SIGNAL = 5.6; EXPRESSED IN HELA, SIGNAL = 4.6; EXPRESSED IN BRAIN, SIGNAL = 4.1; EXPRESSED IN BONE MARROW, SIGNAL = 4.3; EXPRESSED IN HEART, SIGNAL = 4.5
RLRCKSDSAGISSVAVSACRPSGSKSSRPASPSVANCH

SEQ ID NO: 29497 - protein, 59 aa, Homo sapiens
  MAP TO CHR17.1; EXPRESSED IN BRAIN, SIGNAL = 1.2; EXPRESSED IN HEART, SIGNAL = 0.99; EXPRESSED IN ADULT LIVER, SIGNAL = 1.5; EXPRESSED IN BONE MARROW, SIGNAL = 1.3; EXPRESSED IN PLACENTA, SIGNAL = 1.4; EXPRESSED IN FETAL LIVER, SIGNAL = 1.2; EXPRESSED IN LUNG, SIGNAL = 0.71; SWISSPROT HIT: Q9Z123, EVALUE 8.00e+00
LNFPLGALLLILAFRQIPVVSQVPKSENRMLVGTLTAFGYDTPFGRRSQQLSVSVSVWK

SEQ ID NO: 29498 - protein, 64 aa, Homo sapiens
  MAP TO CHR19.1; EXPRESSED IN FETAL LIVER, SIGNAL = 3.2; EXPRESSED IN LUNG, SIGNAL = 1.5; EXPRESSED IN BRAIN, SIGNAL = 2.1; EXPRESSED IN BONE MARROW, SIGNAL = 1.8; EXPRESSED IN ADULT LIVER, SIGNAL = 3.4; SWISSPROT HIT: Q63570, EVALUE 2.00e-21
QKLQQELEFLEVQEEYIKDEQKNLKKEFLHAQEEVKRIQSIPLVIGQFLEAVDQNTAIVGSTTG

SEQ ID NO: 29499 - protein, 57 aa, Homo sapiens
  MAP TO CHR7.1; EXPRESSED IN HELA, SIGNAL = 6.6; EXPRESSED IN BRAIN, SIGNAL = 8.8; EXPRESSED IN HEART, SIGNAL = 8.5; EXPRESSED IN ADULT LIVER, SIGNAL =  13; EXPRESSED IN BONE MARROW, SIGNAL = 7.6; EXPRESSED IN PLACENTA, SIGNAL = 8.9; EXPRESSED IN FETAL LIVER, SIGNAL = 7.2; EXPRESSED IN LUNG, SIGNAL = 8.1; SWISSPROT HIT: P45844, EVALUE 4.70e+00
SPALTSTSSESCQKRQRIQNHMSPLKNSLWNTWDLVSWGNCLYRGSMCTPPPALQDK

SEQ ID NO: 29500 - protein, 42 aa, Homo sapiens
  MAP TO CHRX.1; EXPRESSED IN HELA, SIGNAL = 4.3; EXPRESSED IN BRAIN, SIGNAL = 5.1; EXPRESSED IN PLACENTA, SIGNAL = 5.9; EXPRESSED IN LUNG, SIGNAL = 5.6; EXPRESSED IN HEART, SIGNAL = 4.5; EXPRESSED IN BONE MARROW, SIGNAL = 6.2; EXPRESSED IN ADULT LIVER, SIGNAL = 2.4; EXPRESSED IN FETAL LIVER, SIGNAL = 4.7; SWISSPROT HIT: O70546, EVALUE 2.00e-08
SSPSSAISTATPSPKSTEQTTTNSVTSLNSPHSGLHTINGEG

SEQ ID NO: 29501 - protein, 72 aa, Homo sapiens
  MAP TO CHR19.1; EXPRESSED IN HELA, SIGNAL =   6; EXPRESSED IN BRAIN, SIGNAL = 6.3; EXPRESSED IN LUNG, SIGNAL = 2.9; EXPRESSED IN HEART, SIGNAL =   3; EXPRESSED IN ADULT LIVER, SIGNAL = 5.1; EXPRESSED IN BONE MARROW, SIGNAL = 6.8; EXPRESSED IN PLACENTA, SIGNAL = 5.5; EXPRESSED IN FETAL LIVER, SIGNAL = 5.3; SWISSPROT HIT: Q92072, EVALUE 1.40e-01
ALPQSMLSMALVKALSWSELRLTLSRALSRGELRAELTKVMQGKLAEVLSKALTEEEWVALSQALCQGELGA

SEQ ID NO: 29502 - protein, 85 aa, Homo sapiens
  MAP TO CHR17.1; EXPRESSED IN LUNG, SIGNAL = 2.7; EXPRESSED IN BRAIN, SIGNAL = 5.6; EXPRESSED IN PLACENTA, SIGNAL = 4.2; EXPRESSED IN FETAL LIVER, SIGNAL =   8; EXPRESSED IN HELA, SIGNAL = 5.9; EXPRESSED IN HEART, SIGNAL = 2.6; EXPRESSED IN BONE MARROW, SIGNAL = 6.6; EXPRESSED IN ADULT LIVER, SIGNAL = 3.1; SWISSPROT HIT: P34999, EVALUE 6.40e-01
CVYLSGCLNGRGKPRLQTDMRIRPCCGRWKAFTLTSLCGVRSPVHTCRSCTRSGWRGSTPPRPERCCIPRTRARSVAHTAWTSSG

SEQ ID NO: 29503 - protein, 54 aa, Homo sapiens
  MAP TO CHR11.1; EXPRESSED IN HEART, SIGNAL = 0.83; EXPRESSED IN BONE MARROW, SIGNAL = 0.49; EXPRESSED IN FETAL LIVER, SIGNAL = 0.56; EXPRESSED IN LUNG, SIGNAL = 0.87; EXPRESSED IN BRAIN, SIGNAL = 0.58
GGAARMQLPLAGQFRYVYSGLTPAASAGSHQAPLNNIPLGQEQMDNPSQLGTRK

SEQ ID NO: 29504 - protein, 79 aa, Homo sapiens
  MAP TO CHR5.1; EXPRESSED IN BONE MARROW, SIGNAL = 4.6; EXPRESSED IN ADULT LIVER, SIGNAL = 3.3; EXPRESSED IN PLACENTA, SIGNAL = 3.8; EXPRESSED IN FETAL LIVER, SIGNAL = 4.3; EXPRESSED IN BRAIN, SIGNAL =   5; EXPRESSED IN HELA, SIGNAL = 4.5; EXPRESSED IN LUNG, SIGNAL = 2.5; SWISSPROT HIT: Q05319, EVALUE 7.00e-14
GDSGGPLVCEEPSGRFFLAGIVSWGIGCAEARRPGVYARVTRLRDWILEATTKASMPLAPTMAPAPAAPSTAWPTSPES

SEQ ID NO: 29505 - protein, 22 aa, Homo sapiens
  MAP TO CHR17.1; EXPRESSED IN ADULT LIVER, SIGNAL = 1.6; EXPRESSED IN FETAL LIVER, SIGNAL = 1.9; EXPRESSED IN LUNG, SIGNAL =   1; EXPRESSED IN PLACENTA, SIGNAL = 1.9; EXPRESSED IN BRAIN, SIGNAL = 2.1; EXPRESSED IN HELA, SIGNAL =   2; EXPRESSED IN HEART, SIGNAL = 1.1; EXPRESSED IN BONE MARROW, SIGNAL = 2.3
NAVDLFQMHKNLRRVDLPVLRI

SEQ ID NO: 29506 - protein, 39 aa, Homo sapiens
  MAP TO CHR14.1; EXPRESSED IN HELA, SIGNAL = 2.7; EXPRESSED IN BRAIN, SIGNAL = 2.6; EXPRESSED IN HEART, SIGNAL = 0.93; EXPRESSED IN ADULT LIVER, SIGNAL = 2.4; EXPRESSED IN BONE MARROW, SIGNAL =  14; EXPRESSED IN PLACENTA, SIGNAL = 2.8; EXPRESSED IN FETAL LIVER, SIGNAL = 2.1; EXPRESSED IN LUNG, SIGNAL = 9.2
FSPRVSDSLRMWFFTLCLSHSNTRPCPQISGCSAPCRLC

SEQ ID NO: 29507 - protein, 62 aa, Homo sapiens
  MAP TO CHR7.1; EXPRESSED IN BRAIN, SIGNAL = 0.93; EXPRESSED IN LUNG, SIGNAL = 0.62; EXPRESSED IN HEART, SIGNAL = 0.74; EXPRESSED IN ADULT LIVER, SIGNAL = 0.96; SWISSPROT HIT: O81345, EVALUE 2.70e+00
KQFFHFRNKIFTKKLRNNASKCSKYLFFMEASYSFTYSYCLSEVLEVYTNGIDCGTTPENYS

SEQ ID NO: 29508 - protein, 76 aa, Homo sapiens
  MAP TO CHR19.1; EXPRESSED IN FETAL LIVER, SIGNAL = 5.2; EXPRESSED IN BRAIN, SIGNAL = 5.9; EXPRESSED IN LUNG, SIGNAL = 2.4; EXPRESSED IN HEART, SIGNAL = 2.9; EXPRESSED IN BONE MARROW, SIGNAL = 6.7; SWISSPROT HIT: Q63622, EVALUE 4.00e-10
SLSQATVAAFTASEGHAHPRVVELPKTDEGLGFNIMGGKEQNSPIYISRVIPGGVADRHGGLKRGDQLLSVNGVVS

SEQ ID NO: 29509 - protein, 72 aa, Homo sapiens
  MAP TO CHR7.1; EXPRESSED IN FETAL LIVER, SIGNAL = 1.6; EXPRESSED IN LUNG, SIGNAL = 1.2; EXPRESSED IN BRAIN, SIGNAL =   1; EXPRESSED IN HEART, SIGNAL = 1.2; EXPRESSED IN BONE MARROW, SIGNAL = 1.5; EXPRESSED IN ADULT LIVER, SIGNAL = 2.9; SWISSPROT HIT: P21439, EVALUE 1.00e-27
FLSQATGTRLALIAQNIANLGTGIIISFIYGWQLTLLLLAVVPIIAVSGIVEMKLLAGNAKRDKKELEAAGK

SEQ ID NO: 29510 - protein, 80 aa, Homo sapiens
  MAP TO CHR18.1; EXPRESSED IN FETAL LIVER, SIGNAL = 3.3; EXPRESSED IN LUNG, SIGNAL = 2.4; EXPRESSED IN BRAIN, SIGNAL =   3; EXPRESSED IN HEART, SIGNAL = 3.4; EXPRESSED IN ADULT LIVER, SIGNAL = 2.6; EXPRESSED IN BONE MARROW, SIGNAL = 2.9; SWISSPROT HIT: O95948, EVALUE 2.00e-40
EEINTKEVAQRITAELKRYSIPQAIFAQRVLCRSQGTLSDLLRNPKPWSKLKSGRETFRRMWKWLQEPEFQRMSALRLAG

SEQ ID NO: 29511 - protein, 100 aa, Homo sapiens
  MAP TO CHR19.1; EXPRESSED IN HELA, SIGNAL =   6; EXPRESSED IN BRAIN, SIGNAL = 8.7; EXPRESSED IN LUNG, SIGNAL = 4.5; EXPRESSED IN HEART, SIGNAL = 4.7; EXPRESSED IN ADULT LIVER, SIGNAL = 8.1; EXPRESSED IN BONE MARROW, SIGNAL = 9.6; EXPRESSED IN PLACENTA, SIGNAL = 6.8; EXPRESSED IN FETAL LIVER, SIGNAL = 7.3; SWISSPROT HIT: P57999, EVALUE 2.00e-15
SQVNGVDMKLPVVLANGQIRASQHGSDVVIETDFGLRVAYDLVYYVRVTVPGNYYQQMCGLCGNYNGDPKDDFQKPNGSQAGNANEFGNSWEEVVPDSPC

SEQ ID NO: 29512 - protein, 66 aa, Homo sapiens
  MAP TO CHR17.1; EXPRESSED IN LUNG, SIGNAL = 0.71; EXPRESSED IN HELA, SIGNAL = 2.1; EXPRESSED IN BRAIN, SIGNAL = 1.3; EXPRESSED IN PLACENTA, SIGNAL =   2; EXPRESSED IN FETAL LIVER, SIGNAL = 1.4; EXPRESSED IN HEART, SIGNAL = 0.49; EXPRESSED IN BONE MARROW, SIGNAL = 1.7; EXPRESSED IN ADULT LIVER, SIGNAL = 0.89; SWISSPROT HIT: P43861, EVALUE 8.90e+00
LPASWLAHLSRCRGFDSTCSQLLPTLRGGRTQLGPVPPFFALQDKHRNRIIQKLRSCDPNINQQNL

SEQ ID NO: 29513 - protein, 67 aa, Homo sapiens
  MAP TO CHR2.1; EXPRESSED IN ADULT LIVER, SIGNAL = 1.9; EXPRESSED IN PLACENTA, SIGNAL = 3.6; EXPRESSED IN BRAIN, SIGNAL = 1.8; EXPRESSED IN LUNG, SIGNAL = 2.6; EXPRESSED IN BONE MARROW, SIGNAL = 2.7; EXPRESSED IN HEART, SIGNAL =   2; SWISSPROT HIT: P08578, EVALUE 3.00e-16
GVLFVKFHHGIPWPGPESAEGEDAPINLIFRYLQNRSQIQVWLYEQVNMRTEGCIIGFNEYTNLVIR

SEQ ID NO: 29514 - protein, 59 aa, Homo sapiens
  MAP TO CHR7.1; EXPRESSED IN HEART, SIGNAL = 0.61; EXPRESSED IN ADULT LIVER, SIGNAL = 1.6; EXPRESSED IN BONE MARROW, SIGNAL = 0.63; EXPRESSED IN FETAL LIVER, SIGNAL = 1.8; EXPRESSED IN BRAIN, SIGNAL = 0.81; EXPRESSED IN LUNG, SIGNAL = 0.57; SWISSPROT HIT: Q16850, EVALUE 7.00e-30
TVAGYTIPPGHQVCVSPTVNQRLKDSWVERLDFNPDRYLQDNPASGEKFAYVPFGAGKM

SEQ ID NO: 29515 - protein, 62 aa, Homo sapiens
  MAP TO CHR7.1; EXPRESSED IN FETAL LIVER, SIGNAL = 5.9; EXPRESSED IN LUNG, SIGNAL = 3.4; EXPRESSED IN BRAIN, SIGNAL = 6.3; EXPRESSED IN HELA, SIGNAL = 5.7; EXPRESSED IN HEART, SIGNAL = 3.5; EXPRESSED IN ADULT LIVER, SIGNAL = 5.5; EXPRESSED IN BONE MARROW, SIGNAL = 7.6; EXPRESSED IN PLACENTA, SIGNAL =   4
NIPSIFQVPFQIPFGEIRKHLLEELAFISSPQLPQVFIILLWHLSHSILSCSYRPSISFTAQ

SEQ ID NO: 29516 - protein, 124 aa, Homo sapiens
  MAP TO CHR7.1; EXPRESSED IN HEART, SIGNAL = 2.2; EXPRESSED IN ADULT LIVER, SIGNAL = 3.9; EXPRESSED IN BONE MARROW, SIGNAL = 4.2; EXPRESSED IN FETAL LIVER, SIGNAL = 3.2; EXPRESSED IN PLACENTA, SIGNAL = 3.6; EXPRESSED IN LUNG, SIGNAL =   2; EXPRESSED IN BRAIN, SIGNAL =   4; EXPRESSED IN HELA, SIGNAL = 3.5; SWISSPROT HIT: P10476, EVALUE 3.40e+00
RASNTGAKVDNKTVASTPSSLPQGNRVINEENLPKSSSPQLPPKPSIDLTVAPAGCAVSALATSQVGAWPAATPGLNQPACSDSSLVIPTTIAFCSSINPVSASSCRPGASDSLLVTASGKGIE

SEQ ID NO: 29517 - protein, 77 aa, Homo sapiens
  MAP TO CHR19.1; EXPRESSED IN HEART, SIGNAL = 1.2; EXPRESSED IN ADULT LIVER, SIGNAL = 1.2; EXPRESSED IN BONE MARROW, SIGNAL = 2.1; EXPRESSED IN PLACENTA, SIGNAL = 1.8; EXPRESSED IN FETAL LIVER, SIGNAL = 1.6; EXPRESSED IN BRAIN, SIGNAL = 1.9; EXPRESSED IN LUNG, SIGNAL =   1; SWISSPROT HIT: Q61324, EVALUE 5.30e+00
PGSMGAPTWSADPGLGKVLCPVGLLAPHGQERTMTSLPAEGSRRSCLLGERLLWQLEENGARHCRHLESGTVPSAAV

SEQ ID NO: 29518 - protein, 65 aa, Homo sapiens
  MAP TO CHR19.1; EXPRESSED IN LUNG, SIGNAL =   1; EXPRESSED IN BRAIN, SIGNAL = 1.1; EXPRESSED IN HEART, SIGNAL = 1.2; EXPRESSED IN ADULT LIVER, SIGNAL = 1.7; EXPRESSED IN BONE MARROW, SIGNAL = 1.2
AVQGAVLCVGVGPGAGEAAVLAHVQLLAALTVSVAGRLSMHLSKVSFQGAALRKRFPASTAAEGP

SEQ ID NO: 29519 - protein, 119 aa, Homo sapiens
  MAP TO CHR2.1; EXPRESSED IN BRAIN, SIGNAL = 0.76; EXPRESSED IN BONE MARROW, SIGNAL = 0.81; SWISSPROT HIT: Q9ZHC9, EVALUE 6.00e+00
SLICLRKKDYLTGTGQDSSHLVLVTFKKAVTMTRKVTIPGILVPDLIAFNLKAHVVAVASNTCNIILIYSVIPSSVPNIQQIRLENTERPKGICFLTDQLLLILVGKQKLTDTTFLPSS

SEQ ID NO: 29520 - protein, 44 aa, Homo sapiens
  MAP TO CHR3.1; EXPRESSED IN ADULT LIVER, SIGNAL = 3.8; EXPRESSED IN PLACENTA, SIGNAL =   3; EXPRESSED IN FETAL LIVER, SIGNAL = 3.8; EXPRESSED IN HELA, SIGNAL = 3.8; EXPRESSED IN BRAIN, SIGNAL =   4; EXPRESSED IN BONE MARROW, SIGNAL = 3.7; EXPRESSED IN HEART, SIGNAL = 2.5; SWISSPROT HIT: P11369, EVALUE 6.00e-16
GWFNICKSINVIHHINRIKNKNHMIISIEAEKAFDKIQHCFMIK

SEQ ID NO: 29521 - protein, 97 aa, Homo sapiens
  MAP TO CHR7.1; EXPRESSED IN HEART, SIGNAL = 2.1; EXPRESSED IN LUNG, SIGNAL = 1.9; EXPRESSED IN BONE MARROW, SIGNAL = 4.8; EXPRESSED IN ADULT LIVER, SIGNAL = 4.8; EXPRESSED IN FETAL LIVER, SIGNAL = 4.5; EXPRESSED IN PLACENTA, SIGNAL = 4.7; EXPRESSED IN BRAIN, SIGNAL = 3.9; EXPRESSED IN HELA, SIGNAL = 3.7; SWISSPROT HIT: P47898, EVALUE 2.00e-52
WNLLVLATILRVRTFHRVPHNLVASMAVSDVLVAALVMPLSLVHELSGRRWQLGRRLCQLWIACDVLCCTASIWNVTAIALDRYWSITRHMEYTLRT

SEQ ID NO: 29522 - protein, 73 aa, Homo sapiens
  MAP TO CHR14.1; EXPRESSED IN BRAIN, SIGNAL = 0.97; EXPRESSED IN LUNG, SIGNAL =   1; EXPRESSED IN HEART, SIGNAL = 0.75; EXPRESSED IN ADULT LIVER, SIGNAL = 1.2; EXPRESSED IN PLACENTA, SIGNAL = 2.5
RSGVGLTGSRQTMFYTEVTDAQRSGPGGGLVEEGELIEVVHLPLEGAQAFADDPDIPKTLGVIFGVSWFLSQV

SEQ ID NO: 29523 - protein, 73 aa, Homo sapiens
  MAP TO CHR5.1; EXPRESSED IN LUNG, SIGNAL = 1.7; EXPRESSED IN BRAIN, SIGNAL = 1.8; EXPRESSED IN HELA, SIGNAL =   4; EXPRESSED IN HEART, SIGNAL = 1.7; EXPRESSED IN ADULT LIVER, SIGNAL = 2.7; EXPRESSED IN BONE MARROW, SIGNAL = 2.7; EXPRESSED IN PLACENTA, SIGNAL = 2.2; EXPRESSED IN FETAL LIVER, SIGNAL = 2.6; SWISSPROT HIT: O76082, EVALUE 5.00e-24
QLVICHSPFLPRFGRKNVLFVTMGMQTGFSFLQIFSKNFEMFVVLFVLVGMGQISNYVAAFVLGMAIRLELST

SEQ ID NO: 29524 - protein, 112 aa, Homo sapiens
  MAP TO CHR18.1; EXPRESSED IN ADULT LIVER, SIGNAL = 2.5; EXPRESSED IN PLACENTA, SIGNAL = 2.6; EXPRESSED IN FETAL LIVER, SIGNAL = 2.4; EXPRESSED IN LUNG, SIGNAL = 1.4; EXPRESSED IN HELA, SIGNAL = 2.8; EXPRESSED IN BRAIN, SIGNAL = 2.7; EXPRESSED IN HEART, SIGNAL = 1.7; SWISSPROT HIT: P26749, EVALUE 5.50e+00
IGPDQVPLREEFEQIMLKAMQEFTLRERALQIGAQCVPVSPGQLPWLARLIASVSQDLVHVVVTQNSLAEGISETLRTLSEMRHYQRLPDYVVVICASKIRGNEFCVVVLGE

SEQ ID NO: 29525 - protein, 79 aa, Homo sapiens
  MAP TO CHR19.1; EXPRESSED IN FETAL LIVER, SIGNAL = 3.2; EXPRESSED IN HELA, SIGNAL = 2.7; EXPRESSED IN BRAIN, SIGNAL = 4.1; EXPRESSED IN LUNG, SIGNAL = 1.9; EXPRESSED IN HEART, SIGNAL = 1.8; EXPRESSED IN ADULT LIVER, SIGNAL = 3.6; EXPRESSED IN BONE MARROW, SIGNAL = 3.8; EXPRESSED IN PLACENTA, SIGNAL = 2.3; SWISSPROT HIT: O95897, EVALUE 4.00e-35
QELKDRMTELLPLSSVLEQYKADTRTIVRLREEVRNLSGSLAAIQEEMGAYGYEDLQQRVMALEARLHACAQKLGMPWP

SEQ ID NO: 29526 - protein, 74 aa, Homo sapiens
  MAP TO CHR4.1; EXPRESSED IN BONE MARROW, SIGNAL = 1.8; EXPRESSED IN HEART, SIGNAL = 0.68; EXPRESSED IN ADULT LIVER, SIGNAL = 1.6; EXPRESSED IN PLACENTA, SIGNAL = 2.3; EXPRESSED IN FETAL LIVER, SIGNAL = 1.7; EXPRESSED IN HELA, SIGNAL = 2.7; EXPRESSED IN BRAIN, SIGNAL = 1.7; SWISSPROT HIT: P40222, EVALUE 1.30e+00
VDSCPCCMLLASSILCSQLIFHRLGLVCSGDSVYCFRMHLSLTVRKLSKGSSLQSRPLVPLNLSLLERYSLPCP

SEQ ID NO: 29527 - protein, 37 aa, Homo sapiens
  MAP TO CHR12.1; EXPRESSED IN HEART, SIGNAL = 0.65; EXPRESSED IN ADULT LIVER, SIGNAL = 0.77; EXPRESSED IN FETAL LIVER, SIGNAL = 0.74; EXPRESSED IN HELA, SIGNAL = 0.52; EXPRESSED IN BRAIN, SIGNAL = 0.66; EXPRESSED IN LUNG, SIGNAL = 0.59
FFRCTFQGDCVHSENLENWLDISSGAKKCPKIQIIRS

SEQ ID NO: 29528 - protein, 53 aa, Homo sapiens
  MAP TO CHR7.1; EXPRESSED IN LUNG, SIGNAL = 0.82; EXPRESSED IN BRAIN, SIGNAL = 0.64; EXPRESSED IN HEART, SIGNAL =   1; EXPRESSED IN BONE MARROW, SIGNAL = 0.56
RGIVQSEEKLVISASWAKDDDISRLLKSLPNWMNMAQPKQLRPKREEEEDFIR

SEQ ID NO: 29529 - protein, 47 aa, Homo sapiens
  MAP TO CHR13.1; EXPRESSED IN BRAIN, SIGNAL = 0.65; EXPRESSED IN BONE MARROW, SIGNAL = 0.57; EXPRESSED IN HEART, SIGNAL = 1.1; EXPRESSED IN ADULT LIVER, SIGNAL = 0.63; EXPRESSED IN FETAL LIVER, SIGNAL = 0.75; EXPRESSED IN LUNG, SIGNAL = 1.2
YFAVDYWEGKFPIQGCYVHTFMCLDLTKDLTGPPSRGPSVTVIIWLG

SEQ ID NO: 29530 - protein, 49 aa, Homo sapiens
  MAP TO CHR19.1; EXPRESSED IN HELA, SIGNAL = 1.2; EXPRESSED IN BRAIN, SIGNAL =   1; EXPRESSED IN LUNG, SIGNAL = 0.67; EXPRESSED IN BONE MARROW, SIGNAL = 0.93; EXPRESSED IN HEART, SIGNAL = 0.7; EXPRESSED IN ADULT LIVER, SIGNAL = 0.93; EXPRESSED IN FETAL LIVER, SIGNAL =   1
QRTRPTTSSPSAPTGPSRPSPCTTGTISHRWPGIARSLPRRPRRSGRGE

SEQ ID NO: 29531 - protein, 63 aa, Homo sapiens
  MAP TO CHR12.1; EXPRESSED IN PLACENTA, SIGNAL = 9.5; EXPRESSED IN HELA, SIGNAL =  12; EXPRESSED IN FETAL LIVER, SIGNAL =  10; EXPRESSED IN BRAIN, SIGNAL =  10; EXPRESSED IN LUNG, SIGNAL = 4.4; EXPRESSED IN HEART, SIGNAL = 5.7; EXPRESSED IN ADULT LIVER, SIGNAL =  11; EXPRESSED IN BONE MARROW, SIGNAL = 8.2
NYDMGKRSRIYRAELSVYECLRLAGGRKGKSSPRRALVSEISRRLLGLRLSLADPLWPLWDLA

SEQ ID NO: 29532 - protein, 53 aa, Homo sapiens
  MAP TO CHR7.1; EXPRESSED IN BRAIN, SIGNAL = 0.82; EXPRESSED IN FETAL LIVER, SIGNAL = 0.61; EXPRESSED IN HELA, SIGNAL = 0.72
RLPVSSICDLPEMVEATTPAVAWFTPREACCSWARLGLSLSAFTYQDKADLGS

SEQ ID NO: 29533 - protein, 44 aa, Homo sapiens
  MAP TO CHR7.1; EXPRESSED IN BRAIN, SIGNAL = 0.85; EXPRESSED IN HEART, SIGNAL = 1.6; EXPRESSED IN ADULT LIVER, SIGNAL = 1.4; EXPRESSED IN FETAL LIVER, SIGNAL = 0.97; EXPRESSED IN LUNG, SIGNAL = 1.8; EXPRESSED IN HELA, SIGNAL = 0.73; SWISSPROT HIT: Q09461, EVALUE 1.50e-01
AMYWYNYEILKKWLCEKSGLYEPTFMINFTSGALSGSVSLFFCC

SEQ ID NO: 29534 - protein, 70 aa, Homo sapiens
  MAP TO CHR2.1; EXPRESSED IN FETAL LIVER, SIGNAL =   2; EXPRESSED IN LUNG, SIGNAL = 0.69; EXPRESSED IN HELA, SIGNAL = 2.3; EXPRESSED IN BRAIN, SIGNAL = 1.9; EXPRESSED IN HEART, SIGNAL = 0.71; EXPRESSED IN BONE MARROW, SIGNAL = 1.9; EXPRESSED IN PLACENTA, SIGNAL = 2.2; SWISSPROT HIT: Q13227, EVALUE 7.70e+00
STPRPLTTGKKRCHKRWESLPQAQVEAQQHPAGHWRPGHAQALDRAGQLSKTSSISAGGSSGPRGPPGVT

SEQ ID NO: 29535 - protein, 96 aa, Homo sapiens
  MAP TO CHR16.1; EXPRESSED IN HELA, SIGNAL = 1.9; EXPRESSED IN BRAIN, SIGNAL = 1.6; EXPRESSED IN BONE MARROW, SIGNAL = 1.8; EXPRESSED IN HEART, SIGNAL = 1.1; EXPRESSED IN ADULT LIVER, SIGNAL = 1.8; EXPRESSED IN PLACENTA, SIGNAL = 1.6
SGGFGLHRLALCGHRGARWPRWWFRLQGQGLVLGLCQRVHHGHVYIEVVGLLKPPATLVTGKVQLSLSLVFGHVVLEGCPLPALEPTDLTPGGQRQ

SEQ ID NO: 29536 - protein, 81 aa, Homo sapiens
  MAP TO CHR17.1; EXPRESSED IN LUNG, SIGNAL = 1.2; EXPRESSED IN BRAIN, SIGNAL = 0.7; EXPRESSED IN HEART, SIGNAL =   1; EXPRESSED IN BONE MARROW, SIGNAL = 0.61; SWISSPROT HIT: Q01202, EVALUE 5.40e-01
VQMIVNEFKASTLTIGWRAQEMSEKLLVRISGKRVYRDLEFEEDQREHRAAVQQKLMNLHQDVVTIMTNSYEVFKNDGPEV

SEQ ID NO: 29537 - protein, 79 aa, Homo sapiens
  MAP TO CHR7.1; EXPRESSED IN PLACENTA, SIGNAL = 1.4; EXPRESSED IN HELA, SIGNAL = 0.97; EXPRESSED IN BRAIN, SIGNAL = 0.67; EXPRESSED IN LUNG, SIGNAL = 0.94; EXPRESSED IN BONE MARROW, SIGNAL = 0.68; SWISSPROT HIT: Q12099, EVALUE 2.10e+00
CLSSRFIQEIEHALGLGPAKQCPLREFLTVYIKNIFLNQVLAEINKEIEGVTKTSDPLKILANADTMKVLGVQRPLLQV

SEQ ID NO: 29538 - protein, 59 aa, Homo sapiens
  MAP TO CHR13.1; EXPRESSED IN HEART, SIGNAL = 0.68; EXPRESSED IN BONE MARROW, SIGNAL = 0.49; EXPRESSED IN HELA, SIGNAL = 0.39; EXPRESSED IN FETAL LIVER, SIGNAL = 0.59; EXPRESSED IN LUNG, SIGNAL = 0.72; EXPRESSED IN BRAIN, SIGNAL = 0.44; SWISSPROT HIT: P51587, EVALUE 5.00e-25
LKWSQGYFSEEQLRALNNHRQMLNDKKQAQIQLEIRKAMESAEQKEQGLSRDVTTVWKL

SEQ ID NO: 29539 - protein, 59 aa, Homo sapiens
  MAP TO CHR17.1; EXPRESSED IN HEART, SIGNAL = 2.2; EXPRESSED IN LUNG, SIGNAL = 2.3; EXPRESSED IN BRAIN, SIGNAL = 2.3; EXPRESSED IN BONE MARROW, SIGNAL = 2.3; EXPRESSED IN ADULT LIVER, SIGNAL = 2.1; EXPRESSED IN FETAL LIVER, SIGNAL = 2.8; EXPRESSED IN PLACENTA, SIGNAL = 2.3; EXPRESSED IN HELA, SIGNAL = 2.8; SWISSPROT HIT: O43502, EVALUE 8.00e-26
SMQLAVDVQIPECFGGVAGEAVFIDTEGSFMVDRVVDLATACIQHLQLIAEKHKGEGKL

SEQ ID NO: 29540 - protein, 66 aa, Homo sapiens
  MAP TO CHR5.1; EXPRESSED IN LUNG, SIGNAL = 0.84; EXPRESSED IN HELA, SIGNAL = 1.2; EXPRESSED IN BRAIN, SIGNAL = 1.4; EXPRESSED IN BONE MARROW, SIGNAL = 1.5; SWISSPROT HIT: O76082, EVALUE 5.00e-23
SFPDYYFLSIGLVMLGKFGITSAFSMLYVFTAELYPTLVRNMAVGVTSTASRVGSIIAPYFVYLGE

SEQ ID NO: 29541 - protein, 97 aa, Homo sapiens
  MAP TO CHR6.1; EXPRESSED IN LUNG, SIGNAL = 1.5; EXPRESSED IN HELA, SIGNAL =   3; EXPRESSED IN BRAIN, SIGNAL = 3.3; EXPRESSED IN ADULT LIVER, SIGNAL = 1.7; EXPRESSED IN BONE MARROW, SIGNAL = 3.5; EXPRESSED IN HEART, SIGNAL = 1.7; EXPRESSED IN FETAL LIVER, SIGNAL = 2.7; EXPRESSED IN PLACENTA, SIGNAL = 3.3; SWISSPROT HIT: P22736, EVALUE 1.30e+00
PGPQDRGTPCPCHHDPSLPRVLPSESGTAPGPGQTAAGLGLGGSVPPAGPGRAPTLGPHLQACSHLHPSHTLQCCSLSHSARCGSDHGSTGHRLDCG

SEQ ID NO: 29542 - protein, 73 aa, Homo sapiens
  MAP TO CHR6.1; EXPRESSED IN HEART, SIGNAL = 2.6; EXPRESSED IN ADULT LIVER, SIGNAL = 4.4; EXPRESSED IN HELA, SIGNAL = 3.1; EXPRESSED IN BRAIN, SIGNAL = 4.2; EXPRESSED IN BONE MARROW, SIGNAL = 4.4; EXPRESSED IN FETAL LIVER, SIGNAL = 3.5; EXPRESSED IN PLACENTA, SIGNAL =   3; EXPRESSED IN LUNG, SIGNAL = 2.5; SWISSPROT HIT: P22004, EVALUE 4.00e-18
ALICIKGVHVHPRAAGLVGRDGPYDKQPFMVAFFKVSEVHVRTTRSASSRRRQQSRNRSTQSQDVARVSSASG

SEQ ID NO: 29543 - protein, 166 aa, Homo sapiens
  MAP TO CHR7.1; EXPRESSED IN HEART, SIGNAL = 6.4; EXPRESSED IN FETAL LIVER, SIGNAL = 5.9; EXPRESSED IN BONE MARROW, SIGNAL = 7.1; EXPRESSED IN ADULT LIVER, SIGNAL = 4.9; EXPRESSED IN PLACENTA, SIGNAL = 4.1; EXPRESSED IN LUNG, SIGNAL = 4.5; EXPRESSED IN BRAIN, SIGNAL =   7; EXPRESSED IN HELA, SIGNAL =   4; SWISSPROT HIT: Q9UDV7, EVALUE 7.00e-46
LSHSPHHQEAPVHSPEAPEKDPLTLSPTVPETDMDPLLQSPVSQKDTPFQISSAVQKEQPLPTAEITRLAVWAAVQAVERKLEAQAMRLLTLEGRTGTNEKKIADCEKTAVEFANHLESKWVVLGTLLQEYGLLQRRLENMENLLKNRNFWILRLPPGSNGEVPKV

SEQ ID NO: 29544 - protein, 129 aa, Homo sapiens
  MAP TO CHR19.1; EXPRESSED IN ADULT LIVER, SIGNAL = 0.57; EXPRESSED IN BONE MARROW, SIGNAL = 0.8; EXPRESSED IN FETAL LIVER, SIGNAL = 0.74; EXPRESSED IN HELA, SIGNAL = 0.64; EXPRESSED IN BRAIN, SIGNAL = 0.89; EXPRESSED IN HEART, SIGNAL =   1; SWISSPROT HIT: Q05469, EVALUE 7.00e-59
GVAHLFDLDPETPANGYRSLVHTARCCLAHLLHKSRYVASNRRSIFFRTSHNLAELEAYLAALTQLRALVYYAQRLLVTNRPGVLFFEGDEGLTADFLREYVTLHKGCFYGRCLGFQVSPLPRAPLGPQ

SEQ ID NO: 29545 - protein, 60 aa, Homo sapiens
  MAP TO CHR7.1; EXPRESSED IN LUNG, SIGNAL = 0.65; EXPRESSED IN ADULT LIVER, SIGNAL = 2.6; EXPRESSED IN BONE MARROW, SIGNAL = 0.71; EXPRESSED IN BRAIN, SIGNAL = 0.69; SWISSPROT HIT: P34535, EVALUE 3.00e-07
GITRFDLLGDFGRFNWLGNFYIVLSYNLLFAIVTTLCLVRKFTSAVREELFKALGNPEVY

SEQ ID NO: 29546 - protein, 63 aa, Homo sapiens
  MAP TO CHR7.1; EXPRESSED IN LUNG, SIGNAL = 0.67; EXPRESSED IN HELA, SIGNAL = 0.86; EXPRESSED IN BRAIN, SIGNAL = 1.5; SWISSPROT HIT: P42658, EVALUE 1.00e-27
SLLCFPLEEILKTHIAHWWSPDGTRLAYAAINDSRVPIMELPTYTGSIYPTVKPYHYPKVGKG

SEQ ID NO: 29547 - protein, 75 aa, Homo sapiens
  MAP TO CHR1.1; EXPRESSED IN LUNG, SIGNAL = 2.4; EXPRESSED IN HEART, SIGNAL = 2.4; EXPRESSED IN ADULT LIVER, SIGNAL = 4.1; EXPRESSED IN BRAIN, SIGNAL = 4.4; EXPRESSED IN HELA, SIGNAL = 3.1; EXPRESSED IN BONE MARROW, SIGNAL = 5.1; EXPRESSED IN FETAL LIVER, SIGNAL = 3.8; EXPRESSED IN PLACENTA, SIGNAL = 3.7; SWISSPROT HIT: P51123, EVALUE 4.80e+00
RMSVLTPASNTAHFNTAPRHFGFPRTAGAFWERGATPVPNGSSPKPRGGRDCAASAEEHRALRPRLGLNKEGLFN

SEQ ID NO: 29548 - protein, 59 aa, Homo sapiens
  MAP TO CHR16.1; EXPRESSED IN BRAIN, SIGNAL = 0.61; EXPRESSED IN BONE MARROW, SIGNAL = 0.65; EXPRESSED IN HEART, SIGNAL = 0.72; EXPRESSED IN LUNG, SIGNAL = 0.65; SWISSPROT HIT: O82922, EVALUE 6.50e-02
AMDSFAEGVGAVYGMFDGDRNEELPRLLQCTMADVLLEEVQQSTNDTVFMANTFLVSHR

SEQ ID NO: 29549 - protein, 33 aa, Homo sapiens
  MAP TO CHR7.1; EXPRESSED IN BONE MARROW, SIGNAL = 0.58; EXPRESSED IN FETAL LIVER, SIGNAL = 0.53; EXPRESSED IN LUNG, SIGNAL = 0.64; EXPRESSED IN HELA, SIGNAL = 0.51; EXPRESSED IN BRAIN, SIGNAL = 0.62; EXPRESSED IN HEART, SIGNAL = 0.77
PCLSLCGGFPHNVYSISTVKIEFSPPEGLISGF

SEQ ID NO: 29550 - protein, 63 aa, Homo sapiens
  MAP TO CHR17.1; EXPRESSED IN LUNG, SIGNAL = 0.99; EXPRESSED IN BRAIN, SIGNAL = 0.65; EXPRESSED IN HEART, SIGNAL = 0.82; EXPRESSED IN BONE MARROW, SIGNAL = 0.78
LTLDPQALLVLDDEVLLSLLQFLQLILCVLRDQSQLLKCLVDLKVLLGHGVNQDPSRRAALET

SEQ ID NO: 29551 - protein, 76 aa, Homo sapiens
  MAP TO CHR19.1; EXPRESSED IN PLACENTA, SIGNAL = 1.7; EXPRESSED IN FETAL LIVER, SIGNAL = 1.9; EXPRESSED IN LUNG, SIGNAL = 2.3; EXPRESSED IN HELA, SIGNAL = 2.7; EXPRESSED IN BRAIN, SIGNAL = 2.1; EXPRESSED IN HEART, SIGNAL = 2.6; EXPRESSED IN ADULT LIVER, SIGNAL = 1.7; EXPRESSED IN BONE MARROW, SIGNAL = 1.7
QVWGPVHRSPAADPSKAPAPPPGLPGCPRPLQAVKRPGPGGRGAAGGPGSPDPAHRWRGYRGDPGHHLPGLLCGQV

SEQ ID NO: 29552 - protein, 69 aa, Homo sapiens
  MAP TO CHRX.1; EXPRESSED IN BRAIN, SIGNAL = 0.87; EXPRESSED IN HEART, SIGNAL = 0.9; EXPRESSED IN BONE MARROW, SIGNAL = 0.78; EXPRESSED IN FETAL LIVER, SIGNAL =   1; EXPRESSED IN HELA, SIGNAL =   1; EXPRESSED IN LUNG, SIGNAL = 1.1; SWISSPROT HIT: P70398, EVALUE 5.00e-35
FRYDALCILLRHSKNVRFWFAHNVLFNVSNRFSEYLLECPSAEVRGAFAKLIVFIAHFSLQDGPCPSPF

SEQ ID NO: 29553 - protein, 75 aa, Homo sapiens
  MAP TO CHR19.1; EXPRESSED IN PLACENTA, SIGNAL = 4.7; EXPRESSED IN FETAL LIVER, SIGNAL = 1.3; EXPRESSED IN HEART, SIGNAL = 1.5; EXPRESSED IN LUNG, SIGNAL = 1.6; EXPRESSED IN BRAIN, SIGNAL = 1.3; EXPRESSED IN HELA, SIGNAL = 1.4; EXPRESSED IN BONE MARROW, SIGNAL = 1.1; EXPRESSED IN ADULT LIVER, SIGNAL = 0.82; SWISSPROT HIT: Q96348, EVALUE 1.00e-23
CPQLGLEVSPSTLFAVASILEGCAFLNGSPQNTLVPGALELAWQHRVFVGGDDFKSGQTKVKSVLVDFLIGSGLK

SEQ ID NO: 29554 - protein, 56 aa, Homo sapiens
  MAP TO CHR14.1; EXPRESSED IN HEART, SIGNAL = 0.89; EXPRESSED IN BONE MARROW, SIGNAL = 0.57; EXPRESSED IN ADULT LIVER, SIGNAL = 0.6; EXPRESSED IN LUNG, SIGNAL = 0.84; EXPRESSED IN HELA, SIGNAL = 0.66; EXPRESSED IN BRAIN, SIGNAL = 0.55; SWISSPROT HIT: P20186, EVALUE 2.80e+00
PASKRARQSAPCGRAPTSPAARGSRRCTQRAAQSLARSAARTRTEASAVGTAPAAG

SEQ ID NO: 29555 - protein, 48 aa, Homo sapiens
  MAP TO CHR19.1; EXPRESSED IN BRAIN, SIGNAL = 0.31; EXPRESSED IN HEART, SIGNAL = 0.64; EXPRESSED IN BONE MARROW, SIGNAL = 0.37; EXPRESSED IN FETAL LIVER, SIGNAL = 0.3
YMKEPTLERNLMNVNSVVKPSVVPVIFIYMNEFILERNPMNVKNVENP

SEQ ID NO: 29556 - protein, 51 aa, Homo sapiens
  MAP TO CHR2.1; EXPRESSED IN BRAIN, SIGNAL = 1.7; EXPRESSED IN LUNG, SIGNAL = 1.4; EXPRESSED IN HEART, SIGNAL = 1.6; EXPRESSED IN ADULT LIVER, SIGNAL = 2.5; EXPRESSED IN BONE MARROW, SIGNAL =   2; EXPRESSED IN PLACENTA, SIGNAL = 1.6; EXPRESSED IN FETAL LIVER, SIGNAL = 2.3
YLGATASHDVLRDGIDLILHLHLLEPIVRYFHPKHTEVGPSKIQSQELSVF

SEQ ID NO: 29557 - protein, 62 aa, Homo sapiens
  MAP TO CHR12.1; EXPRESSED IN ADULT LIVER, SIGNAL = 0.96; EXPRESSED IN HELA, SIGNAL = 1.2; EXPRESSED IN FETAL LIVER, SIGNAL = 0.96; EXPRESSED IN LUNG, SIGNAL = 0.99; EXPRESSED IN BRAIN, SIGNAL = 0.94; EXPRESSED IN HEART, SIGNAL = 1.3; SWISSPROT HIT: O43306, EVALUE 5.00e-28
LQFTCNHTPIRSCAARMLNLTPADITACHLQQLNYSLGLDAPLCEGTMPTCSFPEVFEQCSG

SEQ ID NO: 29558 - protein, 49 aa, Homo sapiens
  MAP TO CHR19.1; EXPRESSED IN LUNG, SIGNAL = 1.5; EXPRESSED IN HEART, SIGNAL = 1.7; EXPRESSED IN PLACENTA, SIGNAL = 3.1; EXPRESSED IN FETAL LIVER, SIGNAL = 2.7; EXPRESSED IN HELA, SIGNAL = 2.8; EXPRESSED IN BRAIN, SIGNAL = 2.9; SWISSPROT HIT: Q11122, EVALUE 2.00e-04
HRQAVNATGHLSDTLWLIPITFLTIGYGDVVPGTMWGKIVCLCTGVMVS

SEQ ID NO: 29559 - protein, 76 aa, Homo sapiens
  MAP TO CHR20.1; EXPRESSED IN BRAIN, SIGNAL = 0.67; EXPRESSED IN HEART, SIGNAL = 0.67; EXPRESSED IN BONE MARROW, SIGNAL = 0.71; SWISSPROT HIT: P14895, EVALUE 2.80e+00
VPGLVSSDRVMLMCLSEQEHKTGHCLPAATSTDMLDKTFNPFPEAKMTLVLQNQPLLSMETSPWGHKMGKWHMIET

SEQ ID NO: 29560 - protein, 141 aa, Homo sapiens
  MAP TO CHR6.1; EXPRESSED IN ADULT LIVER, SIGNAL = 0.97; EXPRESSED IN PLACENTA, SIGNAL = 2.3; EXPRESSED IN FETAL LIVER, SIGNAL = 1.3; EXPRESSED IN LUNG, SIGNAL =   1; EXPRESSED IN HEART, SIGNAL = 0.53; EXPRESSED IN BRAIN, SIGNAL = 1.1; EXPRESSED IN HELA, SIGNAL = 3.1; EXPRESSED IN BONE MARROW, SIGNAL = 1.2; SWISSPROT HIT: P19474, EVALUE 6.00e-28
SLEEEVTCSICLDYLRDPVTIDCGHVFCRSCTTDVRPISGSRPVCPLCKKPFKKENIRPVWQLASLVENIERLKVDKGRQPGEVTREQQDAKLCERHREKLHYYCEDDGKLLCVMCRESREHRPHTAVLMEKAAQPHRVSP

SEQ ID NO: 29561 - protein, 43 aa, Homo sapiens
  MAP TO CHR10.1; EXPRESSED IN ADULT LIVER, SIGNAL = 7.3; EXPRESSED IN PLACENTA, SIGNAL = 4.1; EXPRESSED IN LUNG, SIGNAL = 3.1; EXPRESSED IN BRAIN, SIGNAL = 2.8; EXPRESSED IN HEART, SIGNAL = 5.4
PSLLGLALGSHSFHGFAHRLFIPQKLHGLDRLQVLVQFIDNGN

SEQ ID NO: 29562 - protein, 55 aa, Homo sapiens
  MAP TO CHR1.1; EXPRESSED IN BRAIN, SIGNAL = 0.98; EXPRESSED IN HEART, SIGNAL = 6.6; EXPRESSED IN BONE MARROW, SIGNAL = 0.39
AHIQEARELRLQQLFQLLLAQLVLVPLFARVGVEHVDEGLHRRLQLRAHCSSAPT

SEQ ID NO: 29563 - protein, 71 aa, Homo sapiens
  MAP TO CHR22.1; EXPRESSED IN HELA, SIGNAL = 0.78; EXPRESSED IN BRAIN, SIGNAL = 0.81; EXPRESSED IN LUNG, SIGNAL = 0.84; EXPRESSED IN HEART, SIGNAL = 1.2; SWISSPROT HIT: P23961, EVALUE 7.10e-01
PAPQGATPWLSLCGMCAMHRLRRDRGPAWRKTPWWRCSTPSTKSCPTAWITRARSCRHAGCQRWWLSWPPG

SEQ ID NO: 29564 - protein, 77 aa, Homo sapiens
  MAP TO CHR17.1; EXPRESSED IN BRAIN, SIGNAL = 0.63; SWISSPROT HIT: P02446, EVALUE 5.00e-16
WSTVTMSCCDSYLQGCCSVPTGLATTICPSDISCQCEVCLPSTCPHEISLLQPTCCEPGPCLAACLTPMCHPVDCST

SEQ ID NO: 29565 - protein, 105 aa, Homo sapiens
  MAP TO CHR6.1; EXPRESSED IN PLACENTA, SIGNAL =  46; EXPRESSED IN LUNG, SIGNAL =  26; EXPRESSED IN BRAIN, SIGNAL = 4.2; SWISSPROT HIT: P46776, EVALUE 4.00e-55
NFDKYHPGYFGKVGMKHYHLKRNQSFCPTVNLDKLWTLVSEQTRVNAAKNKTGAAPIIDVVRSGYYKVLGKGKLPKQAVTVQAKFFSRRAEEKIKSVGGACVLVA

SEQ ID NO: 29566 - protein, 85 aa, Homo sapiens
  MAP TO CHR5.1; EXPRESSED IN HEART, SIGNAL = 0.55; EXPRESSED IN BONE MARROW, SIGNAL =   1; EXPRESSED IN FETAL LIVER, SIGNAL = 0.88; EXPRESSED IN BRAIN, SIGNAL = 0.89; SWISSPROT HIT: P05452, EVALUE 3.10e+00
QFILDKDVKTHQTPRALSTELLAVYPTRGDQAAVSRIQREKLHPTSGDDADSVLRQLLGLQSQILDDVAYEGAFLQLLGNRVADL

SEQ ID NO: 29567 - protein, 91 aa, Homo sapiens
  MAP TO CHR9.1; EXPRESSED IN FETAL LIVER, SIGNAL = 0.76; EXPRESSED IN BRAIN, SIGNAL = 0.62; EXPRESSED IN LUNG, SIGNAL = 0.57; EXPRESSED IN HEART, SIGNAL = 0.68; EXPRESSED IN BONE MARROW, SIGNAL = 0.88; SWISSPROT HIT: Q15406, EVALUE 2.00e-43
LSLPLRYAVTQAELFALLCRLADELLFRQIAWIKKLPFFCELSIKDYTCLLSSTWQELILLSSLTVYSKQIFGELADVTAKYSPSDEELHR

SEQ ID NO: 29568 - protein, 77 aa, Homo sapiens
  MAP TO CHR12.1; EXPRESSED IN HELA, SIGNAL = 1.9; EXPRESSED IN BRAIN, SIGNAL = 2.6; EXPRESSED IN LUNG, SIGNAL = 2.6; EXPRESSED IN HEART, SIGNAL = 2.5; EXPRESSED IN BONE MARROW, SIGNAL =   3; EXPRESSED IN ADULT LIVER, SIGNAL = 0.65; EXPRESSED IN PLACENTA, SIGNAL = 2.1; SWISSPROT HIT: P49452, EVALUE 8.90e-01
ASKQGLTQSLEPRGHDTGSQGQEGVLDPGSSQGRLQQGQKRVDQNRDVLGQAGRVLGQDDVQQSKRRLQLPIQLQAE

SEQ ID NO: 29569 - protein, 35 aa, Homo sapiens
  MAP TO CHR22.1; EXPRESSED IN BONE MARROW, SIGNAL = 0.51; EXPRESSED IN HEART, SIGNAL = 0.82; EXPRESSED IN LUNG, SIGNAL = 0.78; EXPRESSED IN BRAIN, SIGNAL = 0.49
SLTILQASAAGPGLVAHHSSACMHLRGFKCGWSHI

SEQ ID NO: 29570 - protein, 70 aa, Homo sapiens
  MAP TO CHR3.1; EXPRESSED IN LUNG, SIGNAL = 0.77; EXPRESSED IN BRAIN, SIGNAL = 0.77; EXPRESSED IN HEART, SIGNAL =   1; EXPRESSED IN BONE MARROW, SIGNAL = 0.86; SWISSPROT HIT: P19218, EVALUE 6.80e-01
AGKALIKFNHCEKYIYSFSVPQCCPLCQQDLGSRKLEDAPVSIANPFTNGHQEKCSFLLRPTQGTFLRYS

SEQ ID NO: 29571 - protein, 119 aa, Homo sapiens
  MAP TO CHR5.1; EXPRESSED IN BONE MARROW, SIGNAL = 0.71; EXPRESSED IN FETAL LIVER, SIGNAL = 0.64; EXPRESSED IN HELA, SIGNAL = 0.6; EXPRESSED IN BRAIN, SIGNAL = 0.85; SWISSPROT HIT: Q9Y5I2, EVALUE 1.00e-58
QCLLLSLLLLAAWEVGSGQLHYSVYEEARHGTFVGRIAQDLGLELAELVQRLFRVASKRHGDLLEVNLQNGILFVNSRIDREELCGRSVECSIHLEVIVDRPLQVFHVDVEVKDINDNP

SEQ ID NO: 29572 - protein, 64 aa, Homo sapiens
  MAP TO CHR19.1; EXPRESSED IN PLACENTA, SIGNAL = 5.9; EXPRESSED IN LUNG, SIGNAL = 3.8; EXPRESSED IN BRAIN, SIGNAL = 4.3; EXPRESSED IN HEART, SIGNAL =   5; SWISSPROT HIT: Q9ZB07, EVALUE 9.40e-01
LCPHSLWRWPPCDIRGTGPDAAWPARSPLPGALHAGDELRCGALAPGAGRVLDGQRLCGEYQFA

SEQ ID NO: 29573 - protein, 58 aa, Homo sapiens
  MAP TO AP001878.2; EXPRESSED IN BONE MARROW, SIGNAL =  12; EXPRESSED IN HEART, SIGNAL =   6; EXPRESSED IN ADULT LIVER, SIGNAL = 7.8; EXPRESSED IN HELA, SIGNAL = 5.9; EXPRESSED IN BRAIN, SIGNAL = 9.5; EXPRESSED IN LUNG, SIGNAL = 5.7; SWISSPROT HIT: P35611, EVALUE 1.00e-23
FFFISGLGMVTPVNDLRGSDSIAYDKGEKLLRCKLAAFYRLADLFGWSQLIYNHITVS

SEQ ID NO: 29574 - protein, 63 aa, Homo sapiens
  MAP TO CHR7.1; EXPRESSED IN HELA, SIGNAL = 1.4; EXPRESSED IN BRAIN, SIGNAL = 0.65; EXPRESSED IN LUNG, SIGNAL = 0.64; SWISSPROT HIT: P08581, EVALUE 4.00e-29
SFWNRYEVMLKCWHPKAEMRPSFSELVSRISAIFSTFIGEHYVHVNATYVNVKCVAPYPSLLS

SEQ ID NO: 29575 - protein, 115 aa, Homo sapiens
  MAP TO CHR22.1; EXPRESSED IN LUNG, SIGNAL = 3.2; EXPRESSED IN HELA, SIGNAL = 3.7; EXPRESSED IN BRAIN, SIGNAL = 3.9; EXPRESSED IN HEART, SIGNAL = 2.5; EXPRESSED IN BONE MARROW, SIGNAL = 3.7; SWISSPROT HIT: Q9Y6J0, EVALUE 3.00e-61
FSTVGKNEESLESTEGFRAAEQGVQKPAAETPASACIPGKPSASTPTLWDGKKRGDLPGEPVAFPQGLPAGAEEQRQFLTEQCIASFRLCLSRFPQHYKSLYRLAFLYTYSKTHR

SEQ ID NO: 29576 - protein, 58 aa, Homo sapiens
  MAP TO CHR4.1; EXPRESSED IN FETAL LIVER, SIGNAL = 0.52; EXPRESSED IN BRAIN, SIGNAL = 0.63; EXPRESSED IN ADULT LIVER, SIGNAL = 0.88; EXPRESSED IN BONE MARROW, SIGNAL = 0.69; SWISSPROT HIT: P42680, EVALUE 3.00e-30
RPPPPIPLEEEDNSEEIVVAMYDFQAAEGHDLRLERGQEYLILEKNDVHWWRARDKYG

SEQ ID NO: 29577 - protein, 49 aa, Homo sapiens
  MAP TO CHR8.1; EXPRESSED IN HELA, SIGNAL = 0.82; EXPRESSED IN BRAIN, SIGNAL = 0.94; EXPRESSED IN BONE MARROW, SIGNAL = 0.98; EXPRESSED IN HEART, SIGNAL = 1.1; EXPRESSED IN ADULT LIVER, SIGNAL = 0.94; EXPRESSED IN FETAL LIVER, SIGNAL = 0.9; EXPRESSED IN LUNG, SIGNAL = 0.89
YYFYRLEVPPFPVLLIMVFPTSSCELFNSVQQAFLECLQVSSCVITKPA

SEQ ID NO: 29578 - protein, 70 aa, Homo sapiens
  MAP TO CHR2.1; EXPRESSED IN BRAIN, SIGNAL = 0.82; EXPRESSED IN HELA, SIGNAL = 0.58; EXPRESSED IN BONE MARROW, SIGNAL = 0.78; EXPRESSED IN HEART, SIGNAL = 1.2; EXPRESSED IN LUNG, SIGNAL = 0.93
PRLRQGSSGGSQPGEEVGDLHGGRHSVPLLGLPILAQGDEHAGVLVGLVGVVVVGKENLLERALIGEEGL

SEQ ID NO: 29579 - protein, 51 aa, Homo sapiens
  MAP TO CHR3.1; EXPRESSED IN PLACENTA, SIGNAL = 5.5; EXPRESSED IN LUNG, SIGNAL = 9.2; EXPRESSED IN BRAIN, SIGNAL = 2.7; EXPRESSED IN HEART, SIGNAL = 3.9; SWISSPROT HIT: Q9QUI0, EVALUE 1.00e-23
MAAIRKKLVIVGDGACGKTCLLIVFSKDQFPEVYVPTVFENYVADIEVDGK

SEQ ID NO: 29580 - protein, 75 aa, Homo sapiens
  MAP TO CHRX.1; EXPRESSED IN LUNG, SIGNAL = 0.94; EXPRESSED IN HELA, SIGNAL = 1.1; EXPRESSED IN BRAIN, SIGNAL = 0.83; EXPRESSED IN BONE MARROW, SIGNAL = 0.95; EXPRESSED IN PLACENTA, SIGNAL = 1.1; SWISSPROT HIT: Q13444, EVALUE 6.90e+00
FPDGLTDCVDPDCCQQSNCYISPLCQGSPDPLDLIQQSQTLFSQHTSRLFYDRIKFLIGKDSTHVIPPEVSFDSR

SEQ ID NO: 29581 - protein, 61 aa, Homo sapiens
  MAP TO CHR17.1; EXPRESSED IN BONE MARROW, SIGNAL = 0.53; EXPRESSED IN ADULT LIVER, SIGNAL = 0.59; EXPRESSED IN FETAL LIVER, SIGNAL = 0.54; EXPRESSED IN BRAIN, SIGNAL = 0.57; EXPRESSED IN LUNG, SIGNAL = 0.57; EXPRESSED IN HEART, SIGNAL = 0.49; SWISSPROT HIT: Q9JHD2, EVALUE 3.00e-30
GVLNFVQYKFSHLAPRERQTMFELSKMFLLCLNYWKLETPAQFRQRSQAEDVATYKVNYTR

SEQ ID NO: 29582 - protein, 28 aa, Homo sapiens
  MAP TO CHR16.1; EXPRESSED IN BRAIN, SIGNAL = 0.56; EXPRESSED IN BONE MARROW, SIGNAL = 0.53; EXPRESSED IN HELA, SIGNAL = 0.43
YIRVHGVFLMYSRVSQINWLLCKLLPYL

SEQ ID NO: 29583 - protein, 55 aa, Homo sapiens
  MAP TO CHR13.1; EXPRESSED IN HELA, SIGNAL =   1; EXPRESSED IN BRAIN, SIGNAL = 0.99; EXPRESSED IN BONE MARROW, SIGNAL = 1.2; EXPRESSED IN ADULT LIVER, SIGNAL = 0.87; EXPRESSED IN FETAL LIVER, SIGNAL = 0.84; EXPRESSED IN LUNG, SIGNAL = 1.4
LKLVDFQWKLGMAVSSDTCRSLKYPYVAVMLKVADHSGQVKTKCFEMTIPQFQVC

SEQ ID NO: 29584 - protein, 82 aa, Homo sapiens
  MAP TO CHR11.1; EXPRESSED IN LUNG, SIGNAL = 0.91; EXPRESSED IN HELA, SIGNAL = 0.71; EXPRESSED IN BRAIN, SIGNAL = 0.77; EXPRESSED IN BONE MARROW, SIGNAL = 0.81; EXPRESSED IN HEART, SIGNAL = 0.83; EXPRESSED IN ADULT LIVER, SIGNAL = 0.92; SWISSPROT HIT: Q92148, EVALUE 8.10e+00
TYLQHCFFILRPPNLGLSKQLVQTPQSSGTWQPGHCPHRLDRRPFFTGGSWGALFLVTGLIGLMGGARGSASSEPAIDDLSV

SEQ ID NO: 29585 - protein, 67 aa, Homo sapiens
  MAP TO CHR5.1; EXPRESSED IN LUNG, SIGNAL = 0.77; EXPRESSED IN BRAIN, SIGNAL = 0.65; EXPRESSED IN HEART, SIGNAL = 0.52; EXPRESSED IN ADULT LIVER, SIGNAL = 1.1; EXPRESSED IN BONE MARROW, SIGNAL = 0.65
SLTSDIVIGNCNLGNNIRALREAHINEILILLQGLLYQLQLCVYMSQKKLFHPGVWQRQELQLAAGE

SEQ ID NO: 29586 - protein, 56 aa, Homo sapiens
  MAP TO CHR7.1; EXPRESSED IN FETAL LIVER, SIGNAL = 2.1; EXPRESSED IN HELA, SIGNAL = 1.9; EXPRESSED IN BRAIN, SIGNAL = 2.5; EXPRESSED IN HEART, SIGNAL = 3.2; EXPRESSED IN BONE MARROW, SIGNAL = 2.5; EXPRESSED IN LUNG, SIGNAL = 3.4; SWISSPROT HIT: Q60882, EVALUE 4.70e+00
VLTFLSRLSSPSVELTLSYSLVLEGLWRLFFTESWARVFSAFESRRSVSGTASFKS

SEQ ID NO: 29587 - protein, 123 aa, Homo sapiens
  MAP TO CHR19.1; EXPRESSED IN FETAL LIVER, SIGNAL = 0.35; EXPRESSED IN BRAIN, SIGNAL = 0.54; EXPRESSED IN HEART, SIGNAL = 0.63; SWISSPROT HIT: P54681, EVALUE 5.00e-04
TCISGSRISDTFGSCTSGRCTSGTAISGTLGSFISGSFMSGTFISQTLGSCTSGRCTSGTAISGTLGSFISETFGSCTSGSRTSGTAISGILGSFISGTFGSCTSGRCTSGTAISGTFGSFTS

SEQ ID NO: 29588 - protein, 72 aa, Homo sapiens
  MAP TO CHR1.1; EXPRESSED IN HEART, SIGNAL = 0.91; EXPRESSED IN PLACENTA, SIGNAL = 1.3; EXPRESSED IN LUNG, SIGNAL = 0.73; EXPRESSED IN BRAIN, SIGNAL = 0.77
GLTWVNDRALGLRDVTHLIYLHWVHGHLLGAIIHQVEFSALIESTAQLGLPFSWVRVIHPFLVLPCLYSPGL

SEQ ID NO: 29589 - protein, 126 aa, Homo sapiens
  MAP TO CHR17.1; EXPRESSED IN FETAL LIVER, SIGNAL = 0.69; EXPRESSED IN HELA, SIGNAL = 0.64; EXPRESSED IN BRAIN, SIGNAL = 0.62; SWISSPROT HIT: P70478, EVALUE 8.90e-02
ITENMKELKEARPRKDNRRPDLEIYKPGLSRLRNKPKIKEPPGSEEFKDEIVNDRDCSAVENGTQPVKDVCKELNNQEQNGPIDPENNRGQESFPRTAGQEDRSLKIIKRTKKPDLQIYQPGRRLQ

SEQ ID NO: 29590 - protein, 68 aa, Homo sapiens
  MAP TO CHR3.1; EXPRESSED IN BONE MARROW, SIGNAL = 0.91; EXPRESSED IN FETAL LIVER, SIGNAL = 0.61; EXPRESSED IN BRAIN, SIGNAL = 0.52; EXPRESSED IN LUNG, SIGNAL = 0.87; EXPRESSED IN HEART, SIGNAL = 0.83; SWISSPROT HIT: P17139, EVALUE 2.30e+00
SRKMSQEPYHICPLGRSQLWHSRLYPRKNGRNDGNRARLIIWEQIPLTTSRGNLTLTSSRNTAFFCEH

SEQ ID NO: 29591 - protein, 44 aa, Homo sapiens
  MAP TO CHR2.1; EXPRESSED IN HELA, SIGNAL = 0.67; EXPRESSED IN BRAIN, SIGNAL = 0.77; EXPRESSED IN HEART, SIGNAL = 1.3; EXPRESSED IN LUNG, SIGNAL =   1; SWISSPROT HIT: Q00653, EVALUE 8.00e-03
PDPALTPTCSQIGSTPLHVAVRTRHPDCLEHLIECGAHLNAQDK

SEQ ID NO: 29592 - protein, 48 aa, Homo sapiens
  MAP TO CHR12.1; EXPRESSED IN HEART, SIGNAL = 0.55; EXPRESSED IN HELA, SIGNAL = 1.6; EXPRESSED IN LUNG, SIGNAL = 0.82; EXPRESSED IN BRAIN, SIGNAL =   1; SWISSPROT HIT: P00973, EVALUE 5.00e-20
FQGGSSGKGTTLRGRSDADLVVFLSPLTTFQDQLNRRGEFIQEIRRQL

SEQ ID NO: 29593 - protein, 56 aa, Homo sapiens
  MAP TO CHR19.1; EXPRESSED IN LUNG, SIGNAL = 0.75; EXPRESSED IN FETAL LIVER, SIGNAL = 0.65; EXPRESSED IN BRAIN, SIGNAL = 0.61; EXPRESSED IN HEART, SIGNAL = 0.66; EXPRESSED IN ADULT LIVER, SIGNAL = 0.98; SWISSPROT HIT: P53688, EVALUE 3.60e+00
WTMEERGLAPKFDTTFESARPTQTHMALVQLERVGLLRFLVSQNVDGLHVRSGFPR

SEQ ID NO: 29594 - protein, 70 aa, Homo sapiens
  MAP TO CHR1.1; EXPRESSED IN BONE MARROW, SIGNAL = 0.49; EXPRESSED IN PLACENTA, SIGNAL = 1.3; EXPRESSED IN HELA, SIGNAL = 0.6; EXPRESSED IN LUNG, SIGNAL = 1.1; EXPRESSED IN BRAIN, SIGNAL = 0.6; EXPRESSED IN HEART, SIGNAL = 0.94; SWISSPROT HIT: P51805, EVALUE 1.00e-35
PLRFWVNVIKNPQFVFDIHKGSITDACLSVVAQTFMDSCSTSEHRLGKDSPSNKLLYAKDIPSYKSWVER

SEQ ID NO: 29595 - protein, 90 aa, Homo sapiens
  MAP TO CHR4.1; EXPRESSED IN BONE MARROW, SIGNAL = 0.85; EXPRESSED IN FETAL LIVER, SIGNAL = 0.84; EXPRESSED IN LUNG, SIGNAL =   1; EXPRESSED IN HELA, SIGNAL = 0.59; EXPRESSED IN BRAIN, SIGNAL = 0.81; EXPRESSED IN HEART, SIGNAL = 0.96; SWISSPROT HIT: P16234, EVALUE 2.00e-47
TDPDVAFVPLGMTDYLVIVEDDDSAIIPCRTTDPETPVTLHNSEGVVPASYDSRQGFNGTFTVGPYICEATVKGKKFQTIPFNVYALKGT

SEQ ID NO: 29596 - protein, 67 aa, Homo sapiens
  MAP TO CHR14.1; EXPRESSED IN PLACENTA, SIGNAL = 1.3; EXPRESSED IN FETAL LIVER, SIGNAL = 1.4; EXPRESSED IN LUNG, SIGNAL = 1.3; EXPRESSED IN HELA, SIGNAL = 1.4; EXPRESSED IN BRAIN, SIGNAL = 1.6; EXPRESSED IN HEART, SIGNAL = 1.6; EXPRESSED IN ADULT LIVER, SIGNAL = 1.4; EXPRESSED IN BONE MARROW, SIGNAL = 1.7; SWISSPROT HIT: P28073, EVALUE 4.10e+00
QLPPTLLTSNQVPLHTHIHTPRSMNACGSRSWGTVTTVSLGCHSHCQTMPSTACAWAWTCAGPSGQL

SEQ ID NO: 29597 - protein, 51 aa, Homo sapiens
  MAP TO CHR11.1; EXPRESSED IN HELA, SIGNAL = 1.5; EXPRESSED IN BRAIN, SIGNAL = 1.9; EXPRESSED IN BONE MARROW, SIGNAL = 0.99; EXPRESSED IN HEART, SIGNAL = 1.3; EXPRESSED IN PLACENTA, SIGNAL = 1.3; EXPRESSED IN FETAL LIVER, SIGNAL = 1.4; EXPRESSED IN LUNG, SIGNAL = 1.6
YLLYNFPMTCAFIGVASNFTFLSVIVLFSYMQWVWGGIWPRHRFSLQVERG

SEQ ID NO: 29598 - protein, 74 aa, Homo sapiens
  MAP TO CHR19.1; EXPRESSED IN FETAL LIVER, SIGNAL = 2.9; EXPRESSED IN LUNG, SIGNAL = 3.7; EXPRESSED IN HELA, SIGNAL = 2.2; EXPRESSED IN BRAIN, SIGNAL = 2.3; EXPRESSED IN BONE MARROW, SIGNAL =   2; SWISSPROT HIT: Q92692, EVALUE 3.00e-35
GRPPARISWLSSLDWEAKETQVSGTLAGTVTVTSRFTLVPSGRADGVTVTCKVEHESFEEPALIPVTLSVRCEC

SEQ ID NO: 29599 - protein, 55 aa, Homo sapiens
  MAP TO CHRX.1; EXPRESSED IN FETAL LIVER, SIGNAL = 2.1; EXPRESSED IN LUNG, SIGNAL = 4.3; EXPRESSED IN BRAIN, SIGNAL = 1.3; EXPRESSED IN HEART, SIGNAL = 0.99
NDILSIDFTDVMFCEKTISGCRAIFHYGCYLSIFKDKTNMSSAILMHGNRPFKRP

SEQ ID NO: 29600 - protein, 53 aa, Homo sapiens
  MAP TO CHR5.1; EXPRESSED IN BRAIN, SIGNAL = 1.4; EXPRESSED IN HEART, SIGNAL = 1.1; EXPRESSED IN BONE MARROW, SIGNAL = 1.3; EXPRESSED IN ADULT LIVER, SIGNAL = 1.5; EXPRESSED IN FETAL LIVER, SIGNAL = 1.1; EXPRESSED IN LUNG, SIGNAL = 0.88
LGGPGEEVGHCSCFLPRAMRQSRAKSPPPPHQQLHQPTPAAGGSLCKRERKKG

SEQ ID NO: 29601 - protein, 32 aa, Homo sapiens
  MAP TO CHR6.1; EXPRESSED IN LUNG, SIGNAL = 1.8; EXPRESSED IN HELA, SIGNAL = 3.5; EXPRESSED IN BRAIN, SIGNAL = 3.2; EXPRESSED IN BONE MARROW, SIGNAL = 3.8; EXPRESSED IN PLACENTA, SIGNAL = 3.7; EXPRESSED IN FETAL LIVER, SIGNAL = 3.1
FRISSCHHVGQIEEEPSHLLFVRGFQLFNKSK

SEQ ID NO: 29602 - protein, 64 aa, Homo sapiens
  MAP TO CHR5.1; EXPRESSED IN PLACENTA, SIGNAL =  14; EXPRESSED IN FETAL LIVER, SIGNAL =  12; EXPRESSED IN LUNG, SIGNAL =  12; EXPRESSED IN HELA, SIGNAL =  11; EXPRESSED IN BRAIN, SIGNAL =  15; EXPRESSED IN HEART, SIGNAL =  18; EXPRESSED IN BONE MARROW, SIGNAL =  17
FLSGKEKWPRHWNQQLSWIPCKAQQFCWGPRLEELHVILRDEASLSVQSPLQPARLLRWVNCTG

SEQ ID NO: 29603 - protein, 154 aa, Homo sapiens
  MAP TO CHR20.1; EXPRESSED IN PLACENTA, SIGNAL =  83; EXPRESSED IN LUNG, SIGNAL =  71; EXPRESSED IN BRAIN, SIGNAL = 7.6; EXPRESSED IN HEART, SIGNAL =   5; SWISSPROT HIT: P02792, EVALUE 2.00e-68
MSSQIRQNYSTDVEAAVNSLVNLYLQASYTYLSLGFYFDRDDAALEGVSHFFRELTEEKREGYERLLKMQNQRGGRALFQDIKKPAEDEWGKTPDAMKAAMALEKKLNQALLDLHALDSAHMDPHLCDFLETHFLDEEVKLIKKMGDHLTNLHR

SEQ ID NO: 29604 - protein, 81 aa, Homo sapiens
  MAP TO CHR1.1; EXPRESSED IN FETAL LIVER, SIGNAL = 1.1; EXPRESSED IN HELA, SIGNAL = 0.88; EXPRESSED IN BRAIN, SIGNAL = 1.3; EXPRESSED IN LUNG, SIGNAL = 1.2; EXPRESSED IN HEART, SIGNAL = 1.4; EXPRESSED IN ADULT LIVER, SIGNAL = 0.77; SWISSPROT HIT: O67332, EVALUE 8.30e-01
ARCWVMERGSLRTRSTVSAFFASTVLTRNRIPTATASRKRLQGGREPLREQPLPSKPACRWASRKGPPLASLSPGRGPTVS

SEQ ID NO: 29605 - protein, 70 aa, Homo sapiens
  MAP TO CHR7.1; EXPRESSED IN BRAIN, SIGNAL = 0.74; EXPRESSED IN ADULT LIVER, SIGNAL = 0.42; EXPRESSED IN BONE MARROW, SIGNAL = 0.74; SWISSPROT HIT: P05883, EVALUE 3.30e+00
KAGKRQLVSWDLDTSWVDFVQFYIQIGGESASCNKPDSREEGVLLQYSNNGGIQWHLLAEMYFSDFSKPR

SEQ ID NO: 29606 - protein, 63 aa, Homo sapiens
  MAP TO CHR14.1; EXPRESSED IN PLACENTA, SIGNAL = 3.1; EXPRESSED IN FETAL LIVER, SIGNAL = 4.5; EXPRESSED IN LUNG, SIGNAL = 6.4; EXPRESSED IN BRAIN, SIGNAL =  11; EXPRESSED IN HEART, SIGNAL =   9; EXPRESSED IN BONE MARROW, SIGNAL = 3.5; EXPRESSED IN ADULT LIVER, SIGNAL = 3.1; SWISSPROT HIT: Q9QZC4, EVALUE 4.60e+00
TCASLLKSQPLKHLRELLMLAQVGQLDMHTCPQPGAQVGWAGEDVAQVRVPHELIVLRLEESF

SEQ ID NO: 29607 - protein, 115 aa, Homo sapiens
  MAP TO CHR12.1; EXPRESSED IN HELA, SIGNAL = 3.1; EXPRESSED IN BRAIN, SIGNAL = 1.7; EXPRESSED IN BONE MARROW, SIGNAL = 1.5; EXPRESSED IN ADULT LIVER, SIGNAL = 2.4; EXPRESSED IN HEART, SIGNAL = 1.7; EXPRESSED IN LUNG, SIGNAL = 3.5; EXPRESSED IN FETAL LIVER, SIGNAL = 1.5; EXPRESSED IN PLACENTA, SIGNAL = 2.9; SWISSPROT HIT: P04275, EVALUE 8.00e-67
ICDENGANDFMLRDGTVTTDWKTLVQEWTVQRPGQTCQPILEEQCLVPDSSHCQVLLLPLFAECHKVLAPATFYAICQQDSCHQEQVCEVIASYAHLCRTNGVCVDWRTPDFCGE

SEQ ID NO: 29608 - protein, 34 aa, Homo sapiens
  MAP TO CHR7.1; EXPRESSED IN PLACENTA, SIGNAL = 3.2; EXPRESSED IN FETAL LIVER, SIGNAL = 2.9; EXPRESSED IN LUNG, SIGNAL = 3.6; EXPRESSED IN HELA, SIGNAL = 2.7; EXPRESSED IN BRAIN, SIGNAL = 2.8; EXPRESSED IN BONE MARROW, SIGNAL = 3.3
TTEKELALLAFPINRFSAVYSLANDYTFTGKKCI

SEQ ID NO: 29609 - protein, 154 aa, Homo sapiens
  MAP TO CHR4.1; EXPRESSED IN LUNG, SIGNAL = 0.98; EXPRESSED IN HELA, SIGNAL = 0.82; EXPRESSED IN BRAIN, SIGNAL = 0.76; EXPRESSED IN HEART, SIGNAL = 0.9; EXPRESSED IN FETAL LIVER, SIGNAL = 0.81; SWISSPROT HIT: P23074, EVALUE 6.00e-18
RVRAIMVEKAKWRPLKLPLPRKIVNQKQYCIPGGIVEISATIKDLKDAGVVIPTTFRFNSPIWPVQKTDGSWRMTVDYHKLNQEATPIAAAVPDVVSLLEQINTSPGTWYAATDLANVFFSIPVHKTHQKQFAFSWQSQQYTFTILPQGYINSP

SEQ ID NO: 29610 - protein, 49 aa, Homo sapiens
  MAP TO CHR20.1; EXPRESSED IN FETAL LIVER, SIGNAL = 0.69; EXPRESSED IN BRAIN, SIGNAL = 0.61; EXPRESSED IN HEART, SIGNAL = 0.69; EXPRESSED IN BONE MARROW, SIGNAL = 0.69; EXPRESSED IN ADULT LIVER, SIGNAL = 0.83; EXPRESSED IN LUNG, SIGNAL = 0.77; SWISSPROT HIT: P01549, EVALUE 4.80e+00
IKELSAGYCIGCHSLSQSSITADLRKLSLIKIKIHTSFGFKQRASGNID

SEQ ID NO: 29611 - protein, 75 aa, Homo sapiens
  MAP TO AC009789.19; EXPRESSED IN PLACENTA, SIGNAL = 6.1; EXPRESSED IN FETAL LIVER, SIGNAL = 5.7; EXPRESSED IN LUNG, SIGNAL = 4.5; EXPRESSED IN HELA, SIGNAL = 5.9; EXPRESSED IN BRAIN, SIGNAL = 6.3; EXPRESSED IN HEART, SIGNAL = 4.3; SWISSPROT HIT: P75556, EVALUE 5.30e+00
FFSGYRLVFQRTVELHVRNRETEPAIFLTNTYLFCNLGINYLMNHVTGRGKGVFRFQAQRTTMTFPFRRRNFPAK

SEQ ID NO: 29612 - protein, 86 aa, Homo sapiens
  MAP TO CHR16.1; EXPRESSED IN BRAIN, SIGNAL = 0.58; EXPRESSED IN HEART, SIGNAL = 0.73; EXPRESSED IN LUNG, SIGNAL = 0.63; EXPRESSED IN FETAL LIVER, SIGNAL = 0.52; SWISSPROT HIT: P49595, EVALUE 2.00e-02
LLFLFFLNRKLGMAGQKLGSSALLCYIRPDTADPASSFSLTVANVGTCQAVLCRGGKPVPLSKVFSLEQDPEEAQRVKDQKAIITE

SEQ ID NO: 29613 - protein, 89 aa, Homo sapiens
  MAP TO CHR19.1; EXPRESSED IN FETAL LIVER, SIGNAL = 0.94; EXPRESSED IN LUNG, SIGNAL = 0.82; EXPRESSED IN HELA, SIGNAL = 1.2; EXPRESSED IN BRAIN, SIGNAL = 1.6; EXPRESSED IN HEART, SIGNAL = 0.77; SWISSPROT HIT: P18160, EVALUE 6.70e-01
WEGARGPDSSLTCPWPQILAYGDMNHEWVGNDWLPSLGLPQYRSYFMESLVDARMLDHLNKKELRGQLKMVDSFHRWGLPGQWGQSKGK

SEQ ID NO: 29614 - protein, 77 aa, Homo sapiens
  MAP TO CHR17.1; EXPRESSED IN PLACENTA, SIGNAL = 3.3; EXPRESSED IN FETAL LIVER, SIGNAL = 3.2; EXPRESSED IN LUNG, SIGNAL = 3.1; EXPRESSED IN HELA, SIGNAL = 2.6; EXPRESSED IN BRAIN, SIGNAL = 3.7; EXPRESSED IN HEART, SIGNAL =   5; EXPRESSED IN ADULT LIVER, SIGNAL = 3.3; EXPRESSED IN BONE MARROW, SIGNAL = 3.2; SWISSPROT HIT: Q57571, EVALUE 4.90e-01
SKVWGSPRLLWWWMGRWCQDTEIPKRLREEMKRAEGSQRGEGSLRSGRIRFGVVSDTPLWSSDSGFPESNQQVTVAS

SEQ ID NO: 29615 - protein, 81 aa, Homo sapiens
  MAP TO CHR7.1; EXPRESSED IN HELA, SIGNAL = 0.5; EXPRESSED IN BRAIN, SIGNAL = 0.65; EXPRESSED IN BONE MARROW, SIGNAL = 0.62; EXPRESSED IN FETAL LIVER, SIGNAL = 0.61; SWISSPROT HIT: P08183, EVALUE 2.00e-21
SLICFVLQAIGSRLAVITQNIANLGTGIIISFIYGWQLTLLLLAIVPIIAIAGVVEMKMLSGQALKDKKELEGSGKVSQTK

SEQ ID NO: 29616 - protein, 37 aa, Homo sapiens
  MAP TO CHR17.1; EXPRESSED IN BRAIN, SIGNAL = 0.53; EXPRESSED IN BONE MARROW, SIGNAL = 0.46; SWISSPROT HIT: P41990, EVALUE 1.00e+00
SCLIALGGTMAPVCLISAHCGSLDCTELTCDSCECHL

SEQ ID NO: 29617 - protein, 42 aa, Homo sapiens
  MAP TO CHR7.1; EXPRESSED IN HELA, SIGNAL = 1.4; EXPRESSED IN BRAIN, SIGNAL = 0.88; EXPRESSED IN BONE MARROW, SIGNAL =   1
KMRRSSHSSLAWTKPLLSNISIALCIFQRPLQMYFFPHVTSF

SEQ ID NO: 29618 - protein, 70 aa, Homo sapiens
  MAP TO CHR5.1; EXPRESSED IN FETAL LIVER, SIGNAL = 0.53; EXPRESSED IN HELA, SIGNAL = 0.59; EXPRESSED IN BRAIN, SIGNAL = 0.72; EXPRESSED IN BONE MARROW, SIGNAL = 0.68; EXPRESSED IN ADULT LIVER, SIGNAL = 0.63
KCAEGKKIILVVYEKINLKMRRNAALLLMNLGLGPGVSVFIPDVLMGSAWKLHSHGILTVLWTMTVICLA

SEQ ID NO: 29619 - protein, 50 aa, Homo sapiens
  MAP TO CHR14.1; EXPRESSED IN FETAL LIVER, SIGNAL = 0.56; EXPRESSED IN BRAIN, SIGNAL = 0.46; EXPRESSED IN HEART, SIGNAL = 0.69; SWISSPROT HIT: P28577, EVALUE 1.70e+00
EWLIKAHCCHIPGCLGHLLNNIHHSFTYRPTSWRLGGVPVTQEGLYDQRC

SEQ ID NO: 29620 - protein, 62 aa, Homo sapiens
  MAP TO CHR6.1; EXPRESSED IN BRAIN, SIGNAL = 0.77; EXPRESSED IN HEART, SIGNAL =   1; EXPRESSED IN BONE MARROW, SIGNAL = 0.76; EXPRESSED IN LUNG, SIGNAL = 0.95; EXPRESSED IN FETAL LIVER, SIGNAL = 0.64; SWISSPROT HIT: Q06430, EVALUE 3.00e-33
GHYVHGICIYGNGDLKWLVNSPSLFANKFELNTYPLTVECLELRHRERTLNQSETAIQPSWY

SEQ ID NO: 29621 - protein, 63 aa, Homo sapiens
  MAP TO CHR1.1; EXPRESSED IN PLACENTA, SIGNAL = 1.7; EXPRESSED IN FETAL LIVER, SIGNAL = 0.8; EXPRESSED IN LUNG, SIGNAL = 0.88; EXPRESSED IN HELA, SIGNAL = 1.2; EXPRESSED IN BRAIN, SIGNAL =   1; EXPRESSED IN HEART, SIGNAL = 1.2; EXPRESSED IN BONE MARROW, SIGNAL = 0.97
SPQSVVRICCIRSFGHFIARLQGSILQFNPEVGIFVSIAQSEQESLLQQAQAQFRMVSQAFPS

SEQ ID NO: 29622 - protein, 74 aa, Homo sapiens
  MAP TO CHR7.1; EXPRESSED IN PLACENTA, SIGNAL = 3.3; EXPRESSED IN FETAL LIVER, SIGNAL =   3; EXPRESSED IN LUNG, SIGNAL = 2.4; EXPRESSED IN HELA, SIGNAL = 3.3; EXPRESSED IN BRAIN, SIGNAL = 3.5; EXPRESSED IN BONE MARROW, SIGNAL = 3.5; EXPRESSED IN ADULT LIVER, SIGNAL = 2.7; SWISSPROT HIT: P28964, EVALUE 7.20e+00
SPARWMSKLWNGVIAPRVQEAILSRASVKRQPGFGQTTAKRHPSQGQQAVVKAALSILLNKAVLHGCPLPRAGM

SEQ ID NO: 29623 - protein, 93 aa, Homo sapiens
  MAP TO CHR17.1; EXPRESSED IN BRAIN, SIGNAL = 0.79; EXPRESSED IN BONE MARROW, SIGNAL = 0.93; EXPRESSED IN LUNG, SIGNAL = 0.86; SWISSPROT HIT: Q62981, EVALUE 3.00e-53
IVHVRIHTGDKPYECKVCGKAFCQSSSLTVHMRSHTGEKPYGCNECGKAFSQFSTLALHMRIHTGEKPYQCSECGKAFSQKSHHIRHQRIHTH

SEQ ID NO: 29624 - protein, 68 aa, Homo sapiens
  MAP TO CHR19.1; EXPRESSED IN HELA, SIGNAL = 0.87; EXPRESSED IN BRAIN, SIGNAL = 1.1; EXPRESSED IN HEART, SIGNAL = 0.96; EXPRESSED IN ADULT LIVER, SIGNAL = 0.72; EXPRESSED IN BONE MARROW, SIGNAL = 1.2; EXPRESSED IN FETAL LIVER, SIGNAL = 0.84; SWISSPROT HIT: P05084, EVALUE 3.70e-01
SPSWLQHPPLQTGADILPPPTLCLPPSAQPLTHFRGIPQAPSLSGPQDVLATRASLFEPLLLFLTASL

SEQ ID NO: 29625 - protein, 54 aa, Homo sapiens
  MAP TO CHR14.1; EXPRESSED IN ADULT LIVER, SIGNAL = 4.4; EXPRESSED IN PLACENTA, SIGNAL = 7.5; EXPRESSED IN FETAL LIVER, SIGNAL =   4; EXPRESSED IN HELA, SIGNAL = 8.4; EXPRESSED IN BRAIN, SIGNAL = 5.3; EXPRESSED IN HEART, SIGNAL =   4; EXPRESSED IN BONE MARROW, SIGNAL = 4.3; EXPRESSED IN LUNG, SIGNAL = 2.9; SWISSPROT HIT: P01739, EVALUE 5.00e-11
SNGDKEDGRFTAQLNKASQYVSLLIRDSQPSDSATYLCAVNTQCSPDTCSLYPN

SEQ ID NO: 29626 - protein, 116 aa, Homo sapiens
  MAP TO CHR18.1; EXPRESSED IN PLACENTA, SIGNAL = 3.2; EXPRESSED IN FETAL LIVER, SIGNAL = 2.5; EXPRESSED IN HELA, SIGNAL = 2.5; EXPRESSED IN BRAIN, SIGNAL =   3; EXPRESSED IN LUNG, SIGNAL = 1.9; EXPRESSED IN ADULT LIVER, SIGNAL = 3.6; EXPRESSED IN HEART, SIGNAL = 2.3; SWISSPROT HIT: Q03648, EVALUE 5.50e+00
RYPRLHSMVVRCYLLIQQYSEALMALTTMASLRDHSTPETLSIMDDLISSPGKNKSGRGHMLIIRVPSVQLAMLAKERLQEVRDKLGLQYRFEIILGNPATELSVATHFVARLKVS

SEQ ID NO: 29627 - protein, 99 aa, Homo sapiens
  MAP TO CHR11.1; EXPRESSED IN BRAIN, SIGNAL = 1.1; EXPRESSED IN HEART, SIGNAL = 1.4; EXPRESSED IN ADULT LIVER, SIGNAL = 1.9; EXPRESSED IN BONE MARROW, SIGNAL = 1.1; EXPRESSED IN PLACENTA, SIGNAL = 1.5; EXPRESSED IN LUNG, SIGNAL = 1.6
PAGALVLGAGLLFSLRSVRSVVLRAGGQQVTLTTHAPFGLGAHFTVPLKQVSCMAHRGEVPAMLPLKVKGRRFYFLLDKTGHFPNTKLFDNTVGAYRSL

SEQ ID NO: 29628 - protein, 81 aa, Homo sapiens
  MAP TO CHRX.1; EXPRESSED IN HEART, SIGNAL = 0.45; EXPRESSED IN ADULT LIVER, SIGNAL = 0.68; EXPRESSED IN FETAL LIVER, SIGNAL = 0.54; EXPRESSED IN BRAIN, SIGNAL = 0.59
TGAGGWPGVLAGHPAHLGRAGADPTGHDGAGGGGWAPAAGHHSRAGGVQAQDSGRGPYPQASAAADGQPGVPCGPGVQGRC

SEQ ID NO: 29629 - protein, 91 aa, Homo sapiens
  MAP TO CHR17.1; EXPRESSED IN BRAIN, SIGNAL = 0.41; EXPRESSED IN HEART, SIGNAL = 0.56; EXPRESSED IN BONE MARROW, SIGNAL = 0.35; SWISSPROT HIT: Q9Z985, EVALUE 5.50e+00
FTWTIIGPGRRGNYIHSHQIPRAARPLDQSGPWAQMANILFPSPTYLGSFLQKSDNNRSVPAPHCPIQRAHSTVVNVLDHGPMIYQELDLG

SEQ ID NO: 29630 - protein, 90 aa, Homo sapiens
  MAP TO CHR6.1; EXPRESSED IN PLACENTA, SIGNAL = 2.6; EXPRESSED IN FETAL LIVER, SIGNAL = 3.1; EXPRESSED IN BRAIN, SIGNAL = 3.4; EXPRESSED IN HELA, SIGNAL = 3.2; EXPRESSED IN LUNG, SIGNAL =   2; EXPRESSED IN HEART, SIGNAL = 1.8; EXPRESSED IN ADULT LIVER, SIGNAL = 4.8; EXPRESSED IN BONE MARROW, SIGNAL = 4.3; SWISSPROT HIT: P46013, EVALUE 1.00e-03
DFPLHLGKNVVGRMPDCSVALPFPSISKQHAEIEILAWDKAPILRDCGSLNGTQILRPPKVLSPGVSHRLRDQELILFADLLCQYHRLDV

SEQ ID NO: 29631 - protein, 87 aa, Homo sapiens
  MAP TO CHR17.1; EXPRESSED IN LUNG, SIGNAL = 4.3; EXPRESSED IN PLACENTA, SIGNAL = 4.2; EXPRESSED IN FETAL LIVER, SIGNAL = 3.5; EXPRESSED IN BRAIN, SIGNAL = 4.6; EXPRESSED IN HEART, SIGNAL =   4; EXPRESSED IN ADULT LIVER, SIGNAL = 3.8; EXPRESSED IN BONE MARROW, SIGNAL = 5.2; SWISSPROT HIT: P45700, EVALUE 4.90e-01
SQQGGNIRGPWARGWKSLWTGLGTIRSDLEELWELRGHHYLHQESLKPAPVLVEKPLPEWPVPQFINLFLPEFPIRPIRGQQQLKVS

SEQ ID NO: 29632 - protein, 43 aa, Homo sapiens
  MAP TO CHR19.1; EXPRESSED IN BONE MARROW, SIGNAL = 1.6; EXPRESSED IN PLACENTA, SIGNAL = 1.4; EXPRESSED IN FETAL LIVER, SIGNAL = 1.6; EXPRESSED IN BRAIN, SIGNAL = 1.8; EXPRESSED IN HEART, SIGNAL = 1.8
CSCSSTCPGSVSSQRSGPGFMVQRLSRLLSTCTRGTWYTATSR

SEQ ID NO: 29633 - protein, 38 aa, Homo sapiens
  MAP TO CHR13.1; EXPRESSED IN PLACENTA, SIGNAL = 1.4; EXPRESSED IN FETAL LIVER, SIGNAL = 1.4; EXPRESSED IN BRAIN, SIGNAL = 1.8; EXPRESSED IN HELA, SIGNAL = 1.6; EXPRESSED IN LUNG, SIGNAL = 0.86; EXPRESSED IN HEART, SIGNAL =   1; EXPRESSED IN ADULT LIVER, SIGNAL = 2.2; EXPRESSED IN BONE MARROW, SIGNAL =   2
GTLITQDKALREQLFISTQIDGEIKEWKIQNRNSHLHI

SEQ ID NO: 29634 - protein, 60 aa, Homo sapiens
  MAP TO CHR15.1; EXPRESSED IN LUNG, SIGNAL = 2.6; EXPRESSED IN FETAL LIVER, SIGNAL = 2.2; EXPRESSED IN BRAIN, SIGNAL = 2.3; EXPRESSED IN HEART, SIGNAL = 2.5; EXPRESSED IN ADULT LIVER, SIGNAL = 1.8; EXPRESSED IN BONE MARROW, SIGNAL = 2.8; SWISSPROT HIT: P43487, EVALUE 4.00e-25
GFSCRRAKLFRFASENDLPEWKERGTGDVKLLKHKEKGAIRLLMRRDKTLKICANHYSRW

SEQ ID NO: 29635 - protein, 59 aa, Homo sapiens
  MAP TO CHR5.1; EXPRESSED IN FETAL LIVER, SIGNAL = 0.77; EXPRESSED IN LUNG, SIGNAL = 0.73; EXPRESSED IN BRAIN, SIGNAL = 0.94; EXPRESSED IN BONE MARROW, SIGNAL = 0.99; SWISSPROT HIT: Q61282, EVALUE 1.20e+00
PNYSQGTLPYSYNLCVAHTGKTEFNFLKCSEQLSSGQDILCGDSSGALFPLCNSSESTS

SEQ ID NO: 29636 - protein, 57 aa, Homo sapiens
  MAP TO AC011772.3; EXPRESSED IN ADULT LIVER, SIGNAL = 1.9; EXPRESSED IN FETAL LIVER, SIGNAL = 1.4; EXPRESSED IN PLACENTA, SIGNAL = 8.5; EXPRESSED IN HELA, SIGNAL = 1.4; EXPRESSED IN BRAIN, SIGNAL = 1.4; EXPRESSED IN HEART, SIGNAL = 1.2; EXPRESSED IN BONE MARROW, SIGNAL = 0.95; SWISSPROT HIT: O00470, EVALUE 1.20e+00
PHPGLLLQPCHHDHSGRALFPHHSPEIAHGLGQGALRGDVGILLAVAIDVVGIDVVT

SEQ ID NO: 29637 - protein, 81 aa, Homo sapiens
  MAP TO CHR2.1; EXPRESSED IN HEART, SIGNAL = 6.9; EXPRESSED IN BONE MARROW, SIGNAL = 1.4; EXPRESSED IN PLACENTA, SIGNAL = 1.3; EXPRESSED IN FETAL LIVER, SIGNAL = 1.1; EXPRESSED IN LUNG, SIGNAL = 0.63; EXPRESSED IN HELA, SIGNAL = 1.2; EXPRESSED IN BRAIN, SIGNAL = 1.3
KVLPVVNIVSEVTIMEEKERAYTLEEEAVSVQREEEYEEYEEYDYKEFEEYEPTEEYDQYEEYEEREYERYEEHEEYITGM

SEQ ID NO: 29638 - protein, 68 aa, Homo sapiens
  MAP TO CHR19.1; EXPRESSED IN HELA, SIGNAL = 6.8; EXPRESSED IN BRAIN, SIGNAL = 5.2; EXPRESSED IN HEART, SIGNAL = 4.8; EXPRESSED IN ADULT LIVER, SIGNAL =  10; EXPRESSED IN BONE MARROW, SIGNAL =   5; EXPRESSED IN FETAL LIVER, SIGNAL = 5.7; EXPRESSED IN LUNG, SIGNAL = 3.6; SWISSPROT HIT: Q99541, EVALUE 9.00e-09
QNVVQRVVALPLVRATCTAVCDVYSAAKDRHPLLGSACRLAENCVCGLTTRALDHAQPLLEHLQPQRE

SEQ ID NO: 29639 - protein, 67 aa, Homo sapiens
  MAP TO CHR9.1; EXPRESSED IN PLACENTA, SIGNAL = 2.6; EXPRESSED IN LUNG, SIGNAL = 1.4; EXPRESSED IN HELA, SIGNAL = 3.5; EXPRESSED IN BRAIN, SIGNAL = 2.5; EXPRESSED IN HEART, SIGNAL = 2.1; EXPRESSED IN ADULT LIVER, SIGNAL = 3.4; EXPRESSED IN BONE MARROW, SIGNAL = 2.4
SRWFRRSLRRWEMLARAARGTGALLLRVRARQPFQRVRTEITWVLRWKRAKFQLLERTGVRGHGPHV

SEQ ID NO: 29640 - protein, 46 aa, Homo sapiens
  MAP TO CHR17.1; EXPRESSED IN BRAIN, SIGNAL = 0.55; EXPRESSED IN HEART, SIGNAL = 0.46; EXPRESSED IN BONE MARROW, SIGNAL = 0.55; SWISSPROT HIT: Q00234, EVALUE 2.80e+00
QLTGYGLLDKTPGATYVDSQGGTVGTNRCQWLTQVLGVWSFSFLYY

SEQ ID NO: 29641 - protein, 68 aa, Homo sapiens
  MAP TO CHR16.1; EXPRESSED IN ADULT LIVER, SIGNAL = 0.44; EXPRESSED IN FETAL LIVER, SIGNAL = 0.55; EXPRESSED IN BRAIN, SIGNAL = 0.59; EXPRESSED IN HEART, SIGNAL = 0.58; SWISSPROT HIT: P39219, EVALUE 4.00e-06
GRTHQLRVHCSALGHPVVGDLTYGEVSGREDRPFRMMLHAFYLRIPTDTECVEVCTPDPFLPSLDACW

SEQ ID NO: 29642 - protein, 59 aa, Homo sapiens
  MAP TO CHR12.1; EXPRESSED IN BRAIN, SIGNAL = 0.66; EXPRESSED IN BONE MARROW, SIGNAL = 0.9; EXPRESSED IN FETAL LIVER, SIGNAL = 0.99; SWISSPROT HIT: Q03018, EVALUE 4.00e-06
LWDVTDRDIDRYTEALLQGWLGAGPGAPLLYYVNQARQAPRLKYLIGAAPIAYGLPVSL

SEQ ID NO: 29643 - protein, 48 aa, Homo sapiens
  MAP TO CHR18.1; EXPRESSED IN HELA, SIGNAL = 0.7; EXPRESSED IN BRAIN, SIGNAL = 1.1; EXPRESSED IN HEART, SIGNAL =   1; EXPRESSED IN BONE MARROW, SIGNAL = 1.3; EXPRESSED IN ADULT LIVER, SIGNAL = 1.3; EXPRESSED IN FETAL LIVER, SIGNAL =   1; EXPRESSED IN LUNG, SIGNAL = 0.75; SWISSPROT HIT: Q14586, EVALUE 1.00e-19
HQKIHTGEKPYKCKKCDKAFNKSSHLAQHQRIHTGEKPFKCKECGKAF

SEQ ID NO: 29644 - protein, 65 aa, Homo sapiens
  MAP TO CHR2.1; EXPRESSED IN HEART, SIGNAL = 0.93; EXPRESSED IN BONE MARROW, SIGNAL = 0.58; EXPRESSED IN FETAL LIVER, SIGNAL = 0.63; EXPRESSED IN LUNG, SIGNAL =   1; EXPRESSED IN HELA, SIGNAL = 0.71; EXPRESSED IN BRAIN, SIGNAL = 0.6; SWISSPROT HIT: P22832, EVALUE 2.70e+00
PQVASEVLRRSRPWKFLSKSCQWWGDQRPPFIQYLFSKYTESRIKLRAEFSKPGSHPNRSQKSKG

SEQ ID NO: 29645 - protein, 47 aa, Homo sapiens
  MAP TO CHRX.1; EXPRESSED IN PLACENTA, SIGNAL = 7.4; EXPRESSED IN LUNG, SIGNAL = 4.8; EXPRESSED IN HELA, SIGNAL = 7.6; EXPRESSED IN BRAIN, SIGNAL =   7; EXPRESSED IN ADULT LIVER, SIGNAL = 5.6; EXPRESSED IN BONE MARROW, SIGNAL = 5.6; EXPRESSED IN FETAL LIVER, SIGNAL = 4.6; EXPRESSED IN HEART, SIGNAL = 4.3
FCFERHVEGQMENSMPTCFALWMCWMFPRAPCLTNRALSKPYSCWKR

SEQ ID NO: 29646 - protein, 59 aa, Homo sapiens
  MAP TO CHR19.1; EXPRESSED IN FETAL LIVER, SIGNAL = 1.1; EXPRESSED IN BRAIN, SIGNAL = 0.81; EXPRESSED IN LUNG, SIGNAL = 1.1; EXPRESSED IN BONE MARROW, SIGNAL =   1; SWISSPROT HIT: P01877, EVALUE 6.10e+00
NKQPNPRKKLLVPCALDPPNPNCYVCASKPEVTVRLNVHKVTVLTLQDKVSARPGSLFL

SEQ ID NO: 29647 - protein, 50 aa, Homo sapiens
  MAP TO CHR7.1; EXPRESSED IN FETAL LIVER, SIGNAL = 0.53; EXPRESSED IN BRAIN, SIGNAL = 0.38; EXPRESSED IN BONE MARROW, SIGNAL = 0.42; SWISSPROT HIT: P14210, EVALUE 3.00e-17
ISSFHSDIFFRAFVFDKARKQCLWFPFNSMSSGVKKEFGHEFDLYENKGN

SEQ ID NO: 29648 - protein, 70 aa, Homo sapiens
  MAP TO CHR1.1; EXPRESSED IN FETAL LIVER, SIGNAL = 1.9; EXPRESSED IN LUNG, SIGNAL = 2.3; EXPRESSED IN HELA, SIGNAL = 2.1; EXPRESSED IN BRAIN, SIGNAL =   2; EXPRESSED IN HEART, SIGNAL = 2.2; EXPRESSED IN BONE MARROW, SIGNAL = 2.1; EXPRESSED IN PLACENTA, SIGNAL = 2.4
PFSTGAVSLTTFPRNLLQYILACQFFPSSPIAHLCLLNIIWHIGSSSEKETWIAGDGRWACDLRRNEAVL

SEQ ID NO: 29649 - protein, 60 aa, Homo sapiens
  MAP TO CHR19.1; EXPRESSED IN ADULT LIVER, SIGNAL = 5.2; EXPRESSED IN BONE MARROW, SIGNAL = 1.9; EXPRESSED IN FETAL LIVER, SIGNAL = 2.2; EXPRESSED IN LUNG, SIGNAL =   2; EXPRESSED IN HELA, SIGNAL = 2.3; EXPRESSED IN BRAIN, SIGNAL = 2.3; EXPRESSED IN HEART, SIGNAL = 5.3; SWISSPROT HIT: P43162, EVALUE 6.10e+00
PTVHVLLGNLPEDLQVGTVEDAAQDTWEVTVPWPQEPLRGHAIGYQPHAEEEEEEEHVLH

SEQ ID NO: 29650 - protein, 48 aa, Homo sapiens
  MAP TO CHR5.1; EXPRESSED IN PLACENTA, SIGNAL = 1.2; EXPRESSED IN FETAL LIVER, SIGNAL = 2.2; EXPRESSED IN LUNG, SIGNAL = 1.8; EXPRESSED IN BRAIN, SIGNAL = 1.2; EXPRESSED IN HEART, SIGNAL = 1.7; EXPRESSED IN BONE MARROW, SIGNAL = 1.6; EXPRESSED IN ADULT LIVER, SIGNAL = 0.64; SWISSPROT HIT: Q9Z7Y1, EVALUE 6.30e+00
TLLRRKGNLVPLWLPAGGHRDLEWRINPAPPCSSGRTASHFARTRELA

SEQ ID NO: 29651 - protein, 76 aa, Homo sapiens
  MAP TO CHR11.1; EXPRESSED IN PLACENTA, SIGNAL = 8.4; EXPRESSED IN FETAL LIVER, SIGNAL = 8.9; EXPRESSED IN HELA, SIGNAL =  11; EXPRESSED IN BRAIN, SIGNAL = 7.9; EXPRESSED IN LUNG, SIGNAL = 4.6; EXPRESSED IN HEART, SIGNAL = 4.2; EXPRESSED IN ADULT LIVER, SIGNAL = 7.3; EXPRESSED IN BONE MARROW, SIGNAL = 8.9
CALGQQSKITEDFRALRKTAEDMNLFKTNHVFFLLLLAHIIALESIAWFTVFYFGNGWIPTLITAFVLATSQVRRD

SEQ ID NO: 29652 - protein, 43 aa, Homo sapiens
  MAP TO CHR5.1; EXPRESSED IN FETAL LIVER, SIGNAL = 0.61; EXPRESSED IN LUNG, SIGNAL =   1; EXPRESSED IN BRAIN, SIGNAL = 0.53; EXPRESSED IN HEART, SIGNAL = 0.95; EXPRESSED IN BONE MARROW, SIGNAL = 0.56; SWISSPROT HIT: Q51559, EVALUE 2.20e+00
SVYTGKYHQKHFHCDGNLSIHFLTCLDFLEGRLGFQLCYLLGV

SEQ ID NO: 29653 - protein, 66 aa, Homo sapiens
  MAP TO CHR7.1; EXPRESSED IN FETAL LIVER, SIGNAL = 1.5; EXPRESSED IN LUNG, SIGNAL = 1.1; EXPRESSED IN BRAIN, SIGNAL = 1.6; EXPRESSED IN HELA, SIGNAL = 1.5; EXPRESSED IN ADULT LIVER, SIGNAL = 2.4; EXPRESSED IN HEART, SIGNAL = 1.1; SWISSPROT HIT: O08749, EVALUE 3.00e-32
GSIYAIGDVVAGPMLAHKAEDEGIICVEGMAGGAVHIDYNCVPSVIYTHPEVAWVGKSEEQLKEEV

SEQ ID NO: 29654 - protein, 50 aa, Homo sapiens
  MAP TO CHR5.1; EXPRESSED IN BRAIN, SIGNAL = 0.54; EXPRESSED IN BONE MARROW, SIGNAL = 0.52; EXPRESSED IN HEART, SIGNAL = 0.5; EXPRESSED IN FETAL LIVER, SIGNAL = 0.42; SWISSPROT HIT: O28848, EVALUE 2.20e+00
CKTCQHPSNSDSPIRRLALFLNTGQFQDIQPEVPPNLNFGKDIYNLAKWP

SEQ ID NO: 29655 - protein, 50 aa, Homo sapiens
  MAP TO CHR17.1; EXPRESSED IN HEART, SIGNAL = 1.4; EXPRESSED IN BONE MARROW, SIGNAL = 0.85; EXPRESSED IN FETAL LIVER, SIGNAL = 1.1; EXPRESSED IN LUNG, SIGNAL = 1.8; EXPRESSED IN HELA, SIGNAL = 0.58; EXPRESSED IN BRAIN, SIGNAL = 0.75
RSVVLGEDLILGAVRKHIDEIAQVPQPVSQGPDGEIPRGEWFQVPQVAFR

SEQ ID NO: 29656 - protein, 53 aa, Homo sapiens
  MAP TO CHR14.1; EXPRESSED IN HELA, SIGNAL = 8.9; EXPRESSED IN LUNG, SIGNAL =  19; EXPRESSED IN BRAIN, SIGNAL =  12; EXPRESSED IN HEART, SIGNAL = 8.2; EXPRESSED IN BONE MARROW, SIGNAL =  32; EXPRESSED IN ADULT LIVER, SIGNAL =  13; EXPRESSED IN PLACENTA, SIGNAL =  12; SWISSPROT HIT: Q29100, EVALUE 2.10e+00
SPFPGAWRTQLIQALLKVNPEAAQESLRDPPGFTKPPPDSTSCTSHWTPANTE

SEQ ID NO: 29657 - protein, 77 aa, Homo sapiens
  MAP TO CHR17.1; EXPRESSED IN HELA, SIGNAL = 1.9; EXPRESSED IN BRAIN, SIGNAL = 2.5; EXPRESSED IN ADULT LIVER, SIGNAL = 3.2; EXPRESSED IN HEART, SIGNAL = 2.5; EXPRESSED IN BONE MARROW, SIGNAL = 2.3; EXPRESSED IN FETAL LIVER, SIGNAL = 2.4; EXPRESSED IN LUNG, SIGNAL = 1.9; SWISSPROT HIT: Q39565, EVALUE 2.00e-14
FFPGLLDTLIEMNTILEDIQKSLDMYLETKRHIFPRFYFLSNDDLLEILGQSRNPEAVQPHLKKCFDNIKLLRIQKV

SEQ ID NO: 29658 - protein, 63 aa, Homo sapiens
  MAP TO CHR8.1; EXPRESSED IN ADULT LIVER, SIGNAL = 1.3; EXPRESSED IN FETAL LIVER, SIGNAL = 1.1; EXPRESSED IN BRAIN, SIGNAL = 0.99; EXPRESSED IN LUNG, SIGNAL = 1.1; EXPRESSED IN BONE MARROW, SIGNAL = 1.1; SWISSPROT HIT: P00966, EVALUE 2.70e+00
QKVTSAEEEFNNQVDKMTRSVDSQPLSPAIPVIAQWAHEQSGHGGRDGGYAWAQQHGLPLTKA

SEQ ID NO: 29659 - protein, 60 aa, Homo sapiens
  MAP TO CHR1.1; EXPRESSED IN HELA, SIGNAL = 2.1; EXPRESSED IN ADULT LIVER, SIGNAL = 3.4; EXPRESSED IN BONE MARROW, SIGNAL = 2.8; EXPRESSED IN HEART, SIGNAL = 1.9; EXPRESSED IN PLACENTA, SIGNAL = 2.1; EXPRESSED IN FETAL LIVER, SIGNAL = 2.5; EXPRESSED IN LUNG, SIGNAL = 1.5; EXPRESSED IN BRAIN, SIGNAL = 2.7
SVSFSLGKGLVGRVENDRLFLTQLSIPQFWVLLLLSLLIHRLSFPNIITLYSNRISKATT

SEQ ID NO: 29660 - protein, 125 aa, Homo sapiens
  MAP TO CHR11.1; EXPRESSED IN HEART, SIGNAL = 1.8; EXPRESSED IN ADULT LIVER, SIGNAL = 1.9; EXPRESSED IN BONE MARROW, SIGNAL = 2.5; EXPRESSED IN PLACENTA, SIGNAL = 3.7; EXPRESSED IN FETAL LIVER, SIGNAL = 2.5; EXPRESSED IN LUNG, SIGNAL =   2; EXPRESSED IN HELA, SIGNAL = 5.5; EXPRESSED IN BRAIN, SIGNAL = 2.2; SWISSPROT HIT: P39748, EVALUE 4.00e-68
ESIRGIGPKRAVDLIQKHKSIEEIVRRLDPNKYPVPENWLHKEAHQLFLEPEVLDPESVELKWSEPNEEELIKFMCGEKQFSEERIRSGVKRLSKSRQGSTQGRLDDFFKVTGSLSSAKRKEPEP

SEQ ID NO: 29661 - protein, 77 aa, Homo sapiens
  MAP TO CHR19.1; EXPRESSED IN FETAL LIVER, SIGNAL = 0.48; EXPRESSED IN HELA, SIGNAL = 0.46; EXPRESSED IN BRAIN, SIGNAL = 0.52; EXPRESSED IN HEART, SIGNAL = 0.87; EXPRESSED IN ADULT LIVER, SIGNAL = 0.46; SWISSPROT HIT: O35984, EVALUE 3.00e-17
AQLLRLDNMLLAEGVCRPEKRGRGGAVARAGTATPGGCPNDNSIEHSDYRAKLSQIRQIYHSELEKYEQVIFLHGRV

SEQ ID NO: 29662 - protein, 42 aa, Homo sapiens
  MAP TO CHR7.1; EXPRESSED IN ADULT LIVER, SIGNAL = 7.4; EXPRESSED IN BONE MARROW, SIGNAL = 4.3; EXPRESSED IN HEART, SIGNAL = 5.7; EXPRESSED IN FETAL LIVER, SIGNAL = 4.8; EXPRESSED IN LUNG, SIGNAL = 4.1; EXPRESSED IN BRAIN, SIGNAL = 4.3; SWISSPROT HIT: P13382, EVALUE 3.80e+00
YYLRGNNKVTRTLSTETRNQKTLECYLQSSGIKITANQVQTV

SEQ ID NO: 29663 - protein, 50 aa, Homo sapiens
  MAP TO CHR7.1; EXPRESSED IN FETAL LIVER, SIGNAL = 0.78; EXPRESSED IN HELA, SIGNAL = 0.91; EXPRESSED IN BRAIN, SIGNAL = 0.91; EXPRESSED IN LUNG, SIGNAL = 0.72; EXPRESSED IN HEART, SIGNAL = 0.85; EXPRESSED IN BONE MARROW, SIGNAL =   1; SWISSPROT HIT: P36600, EVALUE 8.20e+00
YLPIRNITKKTSARLTISTISSPTKNRLRLPFPEFVPRTGILSSRANMKQ

SEQ ID NO: 29664 - protein, 68 aa, Homo sapiens
  MAP TO CHR11.1; EXPRESSED IN BRAIN, SIGNAL = 0.53; EXPRESSED IN BONE MARROW, SIGNAL = 0.49; EXPRESSED IN HEART, SIGNAL = 0.51; EXPRESSED IN ADULT LIVER, SIGNAL = 0.72; EXPRESSED IN FETAL LIVER, SIGNAL = 0.5; SWISSPROT HIT: P11260, EVALUE 2.00e-31
QNIQEIQDTMRRPNLRIIGVDENEDFQLKGPANIFNKIIEENLPNLKKEMPMNIQEAYRTPNRLDQKR

SEQ ID NO: 29665 - protein, 42 aa, Homo sapiens
  MAP TO CHR19.1; EXPRESSED IN HELA, SIGNAL = 1.9; EXPRESSED IN BRAIN, SIGNAL = 2.4; EXPRESSED IN HEART, SIGNAL = 2.9; EXPRESSED IN BONE MARROW, SIGNAL = 2.7; EXPRESSED IN PLACENTA, SIGNAL = 1.8; EXPRESSED IN FETAL LIVER, SIGNAL = 2.7
MPSHIPYIHRVSLQYEFLYGFERKREMRRLCHIPYIHRVSLQ

SEQ ID NO: 29666 - protein, 74 aa, Homo sapiens
  MAP TO CHR14.1; EXPRESSED IN FETAL LIVER, SIGNAL = 0.92; EXPRESSED IN LUNG, SIGNAL = 1.4; EXPRESSED IN HELA, SIGNAL = 0.74; EXPRESSED IN BRAIN, SIGNAL = 0.74; EXPRESSED IN HEART, SIGNAL = 1.3; SWISSPROT HIT: P14922, EVALUE 4.00e-03
GSVQGKAQVLMLTGKALNVTPDYSPKAEELLSKAVKLEPELVEAWNQLGEVYWKKGDVAAAHTCFSGALTHVSC

SEQ ID NO: 29667 - protein, 56 aa, Homo sapiens
  MAP TO CHR14.1; EXPRESSED IN BONE MARROW, SIGNAL = 2.8; EXPRESSED IN ADULT LIVER, SIGNAL =   4; EXPRESSED IN FETAL LIVER, SIGNAL =   3; EXPRESSED IN LUNG, SIGNAL = 2.8; EXPRESSED IN HELA, SIGNAL = 4.1; EXPRESSED IN BRAIN, SIGNAL = 3.2; EXPRESSED IN HEART, SIGNAL = 2.3
LPVEEPPVTTVSTLTSVTARSSELFPRWVMAATMAWAAPWIRLLSGRSLAGLKDCG

SEQ ID NO: 29668 - protein, 134 aa, Homo sapiens
  MAP TO CHR17.1; EXPRESSED IN BRAIN, SIGNAL = 0.64; EXPRESSED IN BONE MARROW, SIGNAL = 0.68; SWISSPROT HIT: P30953, EVALUE 2.00e-71
DNVIPHFFCDMSALLKLAFSDTRVNEWVIFIMGGLILVIPFLLILGSYARIVSSILKVPSSKGICKAFSTCGSHLSVVSLFYGTVIGLYLCSSANSSTLKDTVMAMMYTVVTPMLNPFIYSLRNRDMKGALSRV

SEQ ID NO: 29669 - protein, 72 aa, Homo sapiens
  MAP TO CHR1.1; EXPRESSED IN HEART, SIGNAL = 2.6; EXPRESSED IN FETAL LIVER, SIGNAL = 1.3; EXPRESSED IN LUNG, SIGNAL = 3.1; EXPRESSED IN HELA, SIGNAL =   1; EXPRESSED IN BRAIN, SIGNAL = 1.1
EAPSRLRLVRRFGPRLWNECGWEGARSRGSPWPGCWQVYRLLSPPLSSLSFPAKRPRPFLSVLQAAPPHSHA

SEQ ID NO: 29670 - protein, 67 aa, Homo sapiens
  MAP TO CHR2.1; EXPRESSED IN BONE MARROW, SIGNAL = 0.5; EXPRESSED IN FETAL LIVER, SIGNAL = 0.6; EXPRESSED IN HELA, SIGNAL = 0.41; EXPRESSED IN BRAIN, SIGNAL = 0.46; EXPRESSED IN HEART, SIGNAL = 0.63; SWISSPROT HIT: Q9NVP1, EVALUE 2.00e-29
FFLFQLEKLIEKNYFLHKSAQEAYKSYIRAYDSHSLKQIFNVNNLNLPQVALSFGFKVPPFVDLSIL

SEQ ID NO: 29671 - protein, 76 aa, Homo sapiens
  MAP TO CHR13.1; EXPRESSED IN LUNG, SIGNAL = 0.83; EXPRESSED IN BRAIN, SIGNAL = 0.74; EXPRESSED IN HEART, SIGNAL = 0.79; EXPRESSED IN FETAL LIVER, SIGNAL = 0.82; SWISSPROT HIT: P07862, EVALUE 2.20e+00
LLPIRLVEMFTISPEILEGSMFLGESMVFKENISASGKNPSWESLVLANSFWSAGSNSSEVLAIWYTRLGCSGWYL

SEQ ID NO: 29672 - protein, 64 aa, Homo sapiens
  MAP TO CHR4.1; EXPRESSED IN FETAL LIVER, SIGNAL = 0.85; EXPRESSED IN LUNG, SIGNAL = 1.1; EXPRESSED IN BRAIN, SIGNAL = 0.61; EXPRESSED IN HEART, SIGNAL = 1.1; SWISSPROT HIT: P32298, EVALUE 2.00e-32
VSLAYAYETKDALCLVLTIMNGGDLKFHIYNLGNPGFDEQRAVFYAAELCCGLEDLQRERIVYR

SEQ ID NO: 29673 - protein, 67 aa, Homo sapiens
  MAP TO CHR6.1; EXPRESSED IN PLACENTA, SIGNAL = 2.7; EXPRESSED IN FETAL LIVER, SIGNAL = 2.8; EXPRESSED IN LUNG, SIGNAL = 1.2; EXPRESSED IN BRAIN, SIGNAL = 2.5; EXPRESSED IN HELA, SIGNAL = 2.7; EXPRESSED IN HEART, SIGNAL = 1.3; EXPRESSED IN BONE MARROW, SIGNAL = 2.9; EXPRESSED IN ADULT LIVER, SIGNAL = 1.8; SWISSPROT HIT: P37957, EVALUE 6.80e+00
FSGGSMLGLWGQRLPAAWVLLLLPFLPLLLLAAPAPHRASYKPVIVVHGLFDSSYSFRHLLEYINEV

SEQ ID NO: 29674 - protein, 68 aa, Homo sapiens
  MAP TO CHR17.1; EXPRESSED IN HELA, SIGNAL = 0.82; EXPRESSED IN BRAIN, SIGNAL = 1.1; EXPRESSED IN LUNG, SIGNAL = 1.7; EXPRESSED IN HEART, SIGNAL = 1.3; EXPRESSED IN BONE MARROW, SIGNAL = 1.1; SWISSPROT HIT: P36877, EVALUE 4.50e+00
SFRSALQSLHKACEVARAHNYYPGSLFLTWVSYYESHINSDQSSVNEWNAMQDVQSHRPDSPALFTDM

SEQ ID NO: 29675 - protein, 118 aa, Homo sapiens
  MAP TO CHR2.1; EXPRESSED IN BRAIN, SIGNAL = 1.2; EXPRESSED IN BONE MARROW, SIGNAL =   1; SWISSPROT HIT: Q15032, EVALUE 2.00e-63
VVGKVLEITELPDGITRMEAEKLFGELFKIGAKIRWLRDPQSQPRRHPLCCGSGDNTANPERSKPSDLASTYTVLATFPSISAAQNALKKQINSVNKFKLRTSKKHYDFHILERASSQ

SEQ ID NO: 29676 - protein, 162 aa, Homo sapiens
  MAP TO CHR19.1; EXPRESSED IN ADULT LIVER, SIGNAL = 4.6; EXPRESSED IN PLACENTA, SIGNAL = 3.6; EXPRESSED IN FETAL LIVER, SIGNAL = 4.6; EXPRESSED IN LUNG, SIGNAL =   3; EXPRESSED IN HELA, SIGNAL = 3.9; EXPRESSED IN BRAIN, SIGNAL =   5; EXPRESSED IN BONE MARROW, SIGNAL = 5.7; SWISSPROT HIT: O43823, EVALUE 6.00e-72
CSSFRFQPFESYDSRPCLPEHNPYRPSYSYDYEFDLGSDRNGSFGGQYSECRDPARERGSLDGFMRGRGQGRFQDRSNPGTFMRSDPFVPPAASSEPLSTPWNELNYVGGRGLGGPSPSRPPPSLFSQSMAPDYGVMGMQGAGGYDSTMPYGCGRSQPRMRD

SEQ ID NO: 29677 - protein, 50 aa, Homo sapiens
  MAP TO CHR17.1; EXPRESSED IN PLACENTA, SIGNAL = 1.5; EXPRESSED IN HELA, SIGNAL = 1.5; EXPRESSED IN LUNG, SIGNAL = 2.3; EXPRESSED IN BRAIN, SIGNAL =   2; EXPRESSED IN HEART, SIGNAL = 1.9; EXPRESSED IN BONE MARROW, SIGNAL = 1.8; SWISSPROT HIT: Q10709, EVALUE 6.30e+00
ALWPIVPGHSHRLFCVCRKLTSPKAEDAGGAGRLIRQVMLNHPPLRANGI

SEQ ID NO: 29678 - protein, 111 aa, Homo sapiens
  MAP TO CHR19.1; EXPRESSED IN HELA, SIGNAL = 3.5; EXPRESSED IN BRAIN, SIGNAL =   4; EXPRESSED IN HEART, SIGNAL = 4.2; EXPRESSED IN ADULT LIVER, SIGNAL =   3; EXPRESSED IN BONE MARROW, SIGNAL = 3.8; EXPRESSED IN PLACENTA, SIGNAL = 3.5; EXPRESSED IN FETAL LIVER, SIGNAL =   4; EXPRESSED IN LUNG, SIGNAL =   5; SWISSPROT HIT: P34268, EVALUE 6.50e-01
SPPQIILKGQEKPFLWHVLEEQVLLLLRGVLGHVHQGQLSRPQYIELICEPHEEVLEDGHEGLALWTSPSTKEQQHQPVLQPATDLSLRIQLVLVAIVADQDAAREQGGHG

SEQ ID NO: 29679 - protein, 88 aa, Homo sapiens
  MAP TO CHR22.1; EXPRESSED IN BRAIN, SIGNAL = 3.3; EXPRESSED IN HEART, SIGNAL = 3.7; EXPRESSED IN ADULT LIVER, SIGNAL =   4; EXPRESSED IN BONE MARROW, SIGNAL = 3.3; EXPRESSED IN PLACENTA, SIGNAL = 3.2; EXPRESSED IN FETAL LIVER, SIGNAL = 3.9; EXPRESSED IN LUNG, SIGNAL = 2.8; SWISSPROT HIT: Q10567, EVALUE 1.00e-45
KDSDNPDLRDRGYIYWRLLSTDPVAAKEVVLAEKPLISEETDLIEPTLLDELICYIGTLASVYHKPPSAFVEGGRGVVHKSLPPRTAS

SEQ ID NO: 29680 - protein, 62 aa, Homo sapiens
  MAP TO CHR6.1; EXPRESSED IN FETAL LIVER, SIGNAL = 0.76; EXPRESSED IN HELA, SIGNAL = 0.82; EXPRESSED IN BRAIN, SIGNAL = 0.74; EXPRESSED IN HEART, SIGNAL = 0.79; EXPRESSED IN ADULT LIVER, SIGNAL = 0.91; EXPRESSED IN BONE MARROW, SIGNAL = 0.73; SWISSPROT HIT: P71911, EVALUE 2.10e+00
RPPGPLGLRRQVQQLSLLPAVPGRLPSTGAEPLSERVCTSVYKAILPSKEEQNHHLSHPVIK

SEQ ID NO: 29681 - protein, 56 aa, Homo sapiens
  MAP TO CHR9.1; EXPRESSED IN FETAL LIVER, SIGNAL = 0.56; EXPRESSED IN BRAIN, SIGNAL = 0.53; EXPRESSED IN BONE MARROW, SIGNAL = 0.5
KRQHDFQKVKLKVGKKKPKLQNATPTNFKTKTIHLPEQLKEDGTLPTNNRKLNIKV

SEQ ID NO: 29682 - protein, 68 aa, Homo sapiens
  MAP TO CHR8.1; EXPRESSED IN HELA, SIGNAL = 2.1; EXPRESSED IN BRAIN, SIGNAL = 2.9; EXPRESSED IN LUNG, SIGNAL = 2.2; EXPRESSED IN HEART, SIGNAL = 2.8; EXPRESSED IN PLACENTA, SIGNAL = 1.7; EXPRESSED IN FETAL LIVER, SIGNAL = 2.6; SWISSPROT HIT: Q9WUU9, EVALUE 2.70e+00
IPVIGASTSIIVFSCLRMAAPSLIIFKATSSSSRPSFTKWFFKTSTLGFPFSNTSLKVSRWVGGKGTA

SEQ ID NO: 29683 - protein, 123 aa, Homo sapiens
  MAP TO CHR11.1; EXPRESSED IN BRAIN, SIGNAL = 0.59; EXPRESSED IN HEART, SIGNAL = 0.76; EXPRESSED IN BONE MARROW, SIGNAL = 0.64; SWISSPROT HIT: Q9GZM6, EVALUE 9.00e-37
GNHSSVTESILAGLSEQPELQLRLFLLFLGICVVTVVGNLGMITLIGLSSHLHTPMYYFLSSLSFIDFCHSTVITPKMLVNFATEKNIISYPECMAQLYLFSIFAIAECHMLAAMAYDCYVAI

SEQ ID NO: 29684 - protein, 43 aa, Homo sapiens
  MAP TO CHR5.1; EXPRESSED IN BRAIN, SIGNAL = 3.5; EXPRESSED IN HEART, SIGNAL = 1.5; EXPRESSED IN ADULT LIVER, SIGNAL = 3.7; EXPRESSED IN PLACENTA, SIGNAL = 2.6; EXPRESSED IN FETAL LIVER, SIGNAL =   3; EXPRESSED IN HELA, SIGNAL =   4; EXPRESSED IN LUNG, SIGNAL = 1.4
WWELLEAQLGSVQPGLSSEWTKLRCWQLLGWRPGVGTAQADLP

SEQ ID NO: 29685 - protein, 122 aa, Homo sapiens
  MAP TO CHR9.1; EXPRESSED IN HEART, SIGNAL = 3.7; EXPRESSED IN PLACENTA, SIGNAL =  11; EXPRESSED IN LUNG, SIGNAL = 5.5; EXPRESSED IN HELA, SIGNAL =  15; EXPRESSED IN BRAIN, SIGNAL =   3
SEDALKLRLVGGGGIATLVGGLLGDLAALPARWCQVLEHGRQVGGEHALEVGGHGVGPEEVVVEGVIAVDALGRVQHQQLVDEVQCVWVTHIGLQPVLHLPLLALDQLQLFVQLIVVHVWPH

SEQ ID NO: 29686 - protein, 50 aa, Homo sapiens
  MAP TO CHR5.1; EXPRESSED IN LUNG, SIGNAL = 1.4; EXPRESSED IN HELA, SIGNAL = 1.1; EXPRESSED IN BRAIN, SIGNAL = 1.1; EXPRESSED IN HEART, SIGNAL = 1.2; SWISSPROT HIT: Q10697, EVALUE 8.20e+00
YIIGFPILQVFFPLTALVSDFGQSRSLGFRGTSSSFSIAETIKSLCTRHS

SEQ ID NO: 29687 - protein, 60 aa, Homo sapiens
  MAP TO CHR15.1; EXPRESSED IN LUNG, SIGNAL =   2; EXPRESSED IN HELA, SIGNAL = 2.9; EXPRESSED IN BRAIN, SIGNAL = 4.2; EXPRESSED IN HEART, SIGNAL = 2.6; EXPRESSED IN BONE MARROW, SIGNAL = 4.4; EXPRESSED IN ADULT LIVER, SIGNAL = 4.5; EXPRESSED IN FETAL LIVER, SIGNAL = 3.4; EXPRESSED IN PLACENTA, SIGNAL = 2.9
IGNHTLNDGQQDDNDEEEKGNVKDNAIHFIRITSRVFNFITNATSCSHSHVHVEKVTLEK

SEQ ID NO: 29688 - protein, 58 aa, Homo sapiens
  MAP TO CHR19.1; EXPRESSED IN ADULT LIVER, SIGNAL = 0.68; EXPRESSED IN BONE MARROW, SIGNAL = 0.77; EXPRESSED IN LUNG, SIGNAL = 1.5; EXPRESSED IN HELA, SIGNAL = 0.69; EXPRESSED IN BRAIN, SIGNAL = 0.77; EXPRESSED IN HEART, SIGNAL = 1.2; SWISSPROT HIT: P41246, EVALUE 1.60e+00
TGMCSSASPSLMAWSPWPWWMPTMRCQVKPSKSATGLGTVGPWGCPTWKSGVMTRTAE

SEQ ID NO: 29689 - protein, 43 aa, Homo sapiens
  MAP TO CHR12.1; EXPRESSED IN HEART, SIGNAL = 0.86; EXPRESSED IN ADULT LIVER, SIGNAL = 1.2; EXPRESSED IN BONE MARROW, SIGNAL =   1; EXPRESSED IN BRAIN, SIGNAL = 0.82; SWISSPROT HIT: P37287, EVALUE 3.00e-17
LLGALEHKNVRNVLVQGHIFLNTSLTEAFCMAIMEAASCGLQV

SEQ ID NO: 29690 - protein, 34 aa, Homo sapiens
  MAP TO CHR9.1; EXPRESSED IN BONE MARROW, SIGNAL =   1; EXPRESSED IN FETAL LIVER, SIGNAL =   1; EXPRESSED IN LUNG, SIGNAL = 3.2; EXPRESSED IN BRAIN, SIGNAL = 0.61; SWISSPROT HIT: P09526, EVALUE 6.00e-12
RDLYMRNGQGFALVYSIKAQSTFNDLQDLREQIL

SEQ ID NO: 29691 - protein, 143 aa, Homo sapiens
  MAP TO CHR19.1; EXPRESSED IN LUNG, SIGNAL = 0.81; EXPRESSED IN HEART, SIGNAL = 1.3; EXPRESSED IN PLACENTA, SIGNAL = 1.2; EXPRESSED IN FETAL LIVER, SIGNAL = 1.5; EXPRESSED IN BRAIN, SIGNAL = 1.6; EXPRESSED IN HELA, SIGNAL = 1.9; EXPRESSED IN BONE MARROW, SIGNAL = 1.3; EXPRESSED IN ADULT LIVER, SIGNAL = 1.6; SWISSPROT HIT: P50090, EVALUE 1.90e-02
SSSQAARHSHVAVAWAGSLVLMGGELADGSLTNDVWAFSPLGRGHWELLAPPASSSSGPPGLAGHAAALVDDVWLYVSGGRTPHDLFSSGLFRFRLDSTSGGYWEQVIPAGGRPPAATGHSMVFHAPSRALLVHGGHRPSTAR

SEQ ID NO: 29692 - protein, 36 aa, Homo sapiens
  MAP TO CHR19.1; EXPRESSED IN BONE MARROW, SIGNAL = 1.8; EXPRESSED IN ADULT LIVER, SIGNAL = 1.7; EXPRESSED IN FETAL LIVER, SIGNAL = 1.7; EXPRESSED IN LUNG, SIGNAL =   1; EXPRESSED IN BRAIN, SIGNAL = 1.9; EXPRESSED IN PLACENTA, SIGNAL = 1.4; EXPRESSED IN HELA, SIGNAL = 1.2; EXPRESSED IN HEART, SIGNAL = 1.5; SWISSPROT HIT: O43246, EVALUE 8.50e+00
IRPFSSVNSLVFNEGSFLTKGFPTLATLIRLCSSVN

SEQ ID NO: 29693 - protein, 68 aa, Homo sapiens
  MAP TO CHR17.1; EXPRESSED IN LUNG, SIGNAL = 0.85; EXPRESSED IN BRAIN, SIGNAL = 0.55; EXPRESSED IN HEART, SIGNAL = 0.99; EXPRESSED IN ADULT LIVER, SIGNAL = 1.2; EXPRESSED IN FETAL LIVER, SIGNAL = 0.68; SWISSPROT HIT: P38938, EVALUE 4.90e-01
FLQLLCQNPLHRLRYLHHFQVHPFFRGVAFDPELLQKQPVNFVTETQATQPSSAETMPFDDFDCDLES

SEQ ID NO: 29694 - protein, 91 aa, Homo sapiens
  MAP TO CHRX.1; EXPRESSED IN ADULT LIVER, SIGNAL = 2.4; EXPRESSED IN BONE MARROW, SIGNAL = 2.7; EXPRESSED IN PLACENTA, SIGNAL =   3; EXPRESSED IN LUNG, SIGNAL = 1.4; EXPRESSED IN BRAIN, SIGNAL =   2; EXPRESSED IN HEART, SIGNAL = 1.6; SWISSPROT HIT: Q13474, EVALUE 9.00e-47
DTSPKQRIQNLSRFVWKQATVASELWEKLTARCVDQHRHIERTLEQLLEIQGAMEELSTTLSQAEGVRATWEPIGDLFIDSLPEHIQAIKV

SEQ ID NO: 29695 - protein, 57 aa, Homo sapiens
  MAP TO CHR1.1; EXPRESSED IN HEART, SIGNAL = 0.92; EXPRESSED IN ADULT LIVER, SIGNAL = 0.61; EXPRESSED IN BONE MARROW, SIGNAL = 1.2; EXPRESSED IN BRAIN, SIGNAL = 1.2; EXPRESSED IN LUNG, SIGNAL = 0.65; SWISSPROT HIT: P11593, EVALUE 2.80e+00
VEVKGEETRVEETKPSCQVLGNFNTKALSQGQATVLEITSQESLNWSLCPLYLSTDF

SEQ ID NO: 29696 - protein, 57 aa, Homo sapiens
  MAP TO CHR10.1; EXPRESSED IN HELA, SIGNAL = 0.9; EXPRESSED IN BRAIN, SIGNAL = 1.4; EXPRESSED IN HEART, SIGNAL = 0.73; EXPRESSED IN ADULT LIVER, SIGNAL = 1.3; EXPRESSED IN BONE MARROW, SIGNAL = 0.9; EXPRESSED IN FETAL LIVER, SIGNAL =   1
TFHFGDKAQTPLKVRADRVETPSEFCITAIFVGTASVITDIQLVAALCHCWNAQVHL

SEQ ID NO: 29697 - protein, 111 aa, Homo sapiens
  MAP TO CHR14.1; EXPRESSED IN ADULT LIVER, SIGNAL =   1; EXPRESSED IN BRAIN, SIGNAL = 0.49; EXPRESSED IN BONE MARROW, SIGNAL = 0.53; SWISSPROT HIT: P04437, EVALUE 3.00e-28
GVSGQQKEKSDQQQVKQSPQSLIVQKGGISIINCAYENTAFDYFPWYQQFPGKGPALLIAIRPDVSEKKEGRFTISFNKSAKQFSLHIMDSQPGDSATYFCAASTQCSPGT

SEQ ID NO: 29698 - protein, 24 aa, Homo sapiens
  MAP TO AC084117.2; EXPRESSED IN BRAIN, SIGNAL =  38; EXPRESSED IN ADULT LIVER, SIGNAL =  17; EXPRESSED IN LUNG, SIGNAL =  35; EXPRESSED IN HELA, SIGNAL =  25; EXPRESSED IN HEART, SIGNAL =  31; EXPRESSED IN BONE MARROW, SIGNAL =  48; EXPRESSED IN FETAL LIVER, SIGNAL =  36; EXPRESSED IN PLACENTA, SIGNAL =  35
YFFLTFLLGSCCFCDVSCSDNHNC

SEQ ID NO: 29699 - protein, 52 aa, Homo sapiens
  MAP TO CHR3.1; EXPRESSED IN ADULT LIVER, SIGNAL = 0.83; EXPRESSED IN FETAL LIVER, SIGNAL = 0.99; EXPRESSED IN LUNG, SIGNAL = 0.93; EXPRESSED IN HELA, SIGNAL = 1.2; EXPRESSED IN BRAIN, SIGNAL =   1; EXPRESSED IN BONE MARROW, SIGNAL = 1.1; EXPRESSED IN HEART, SIGNAL = 0.62; SWISSPROT HIT: Q63340, EVALUE 4.00e-24
HCLAGISRSVTVTVAYLMQKMNLSLNDAYDFVKRKKSNISPNFNFMGQLLDF

SEQ ID NO: 29700 - protein, 31 aa, Homo sapiens
  MAP TO CHR7.1; EXPRESSED IN BONE MARROW, SIGNAL =   1; EXPRESSED IN HEART, SIGNAL = 0.8; EXPRESSED IN ADULT LIVER, SIGNAL = 0.75; EXPRESSED IN FETAL LIVER, SIGNAL = 1.3; EXPRESSED IN LUNG, SIGNAL = 1.4; EXPRESSED IN HELA, SIGNAL = 1.4; EXPRESSED IN BRAIN, SIGNAL = 0.91
YLPGSAVTLTLESGGKYLSDAGLITLVILQI

SEQ ID NO: 29701 - protein, 63 aa, Homo sapiens
  MAP TO AC068936.2; EXPRESSED IN BRAIN, SIGNAL = 1.7; EXPRESSED IN BONE MARROW, SIGNAL =   2; EXPRESSED IN HEART, SIGNAL = 0.95; EXPRESSED IN PLACENTA, SIGNAL = 1.5; EXPRESSED IN FETAL LIVER, SIGNAL =   2; SWISSPROT HIT: P34369, EVALUE 5.00e-20
GINNLQDVWETSEGECNVMLESRFEKMYEKIDLTLLNRLLRLIVDHNIADYMTAKNNVVINYK

SEQ ID NO: 29702 - protein, 67 aa, Homo sapiens
  MAP TO CHR19.1; EXPRESSED IN BONE MARROW, SIGNAL = 3.5; EXPRESSED IN HEART, SIGNAL =   4; EXPRESSED IN LUNG, SIGNAL =   5; EXPRESSED IN HELA, SIGNAL = 4.6; EXPRESSED IN BRAIN, SIGNAL = 5.1; EXPRESSED IN ADULT LIVER, SIGNAL = 3.1; EXPRESSED IN FETAL LIVER, SIGNAL = 4.7; EXPRESSED IN PLACENTA, SIGNAL = 3.7
PACLEQPPHRRPRLSGPAGGSARPPPRWWRRSPLASGRCPRYGPGSTCSPAHPSLARHLAEGRGADG

SEQ ID NO: 29703 - protein, 105 aa, Homo sapiens
  MAP TO CHR14.1; EXPRESSED IN HEART, SIGNAL = 0.55; EXPRESSED IN FETAL LIVER, SIGNAL = 0.48; EXPRESSED IN LUNG, SIGNAL = 0.69; EXPRESSED IN BRAIN, SIGNAL = 0.49; SWISSPROT HIT: Q9NVP1, EVALUE 2.00e-50
GTGVLILSPTRELAMQTFGVLKELMSHHVHTYGLIMGGSNRSAEAQKLANGINITVVTPGCLLDHMQNIPGFMYKNLQCLVIDEADRILDVEFEEELKQIIKLLP

SEQ ID NO: 29704 - protein, 64 aa, Homo sapiens
  MAP TO CHR17.1; EXPRESSED IN HEART, SIGNAL = 1.4; EXPRESSED IN PLACENTA, SIGNAL = 1.8; EXPRESSED IN FETAL LIVER, SIGNAL = 1.6; EXPRESSED IN LUNG, SIGNAL = 1.4; EXPRESSED IN HELA, SIGNAL = 2.5; EXPRESSED IN BRAIN, SIGNAL = 1.6; EXPRESSED IN BONE MARROW, SIGNAL = 1.7; EXPRESSED IN ADULT LIVER, SIGNAL = 1.7
LFQSLLLFSRSLDTNGDCSRLVADGWLELQLADSESAIRLLAASLRLRARWESALDRQLAHQAQ

SEQ ID NO: 29705 - protein, 89 aa, Homo sapiens
  MAP TO CHR13.1; EXPRESSED IN HELA, SIGNAL = 1.5; EXPRESSED IN LUNG, SIGNAL = 0.82; EXPRESSED IN BRAIN, SIGNAL = 0.88; EXPRESSED IN HEART, SIGNAL = 0.89; EXPRESSED IN BONE MARROW, SIGNAL = 0.89; EXPRESSED IN ADULT LIVER, SIGNAL = 0.84; SWISSPROT HIT: P48566, EVALUE 1.00e-07
FFSSAGRTFPTHPYFSVQLGPGQLSLFNLLKAYSLLDKEVGYCQGISFVAGVLLLHMSEEQAFEMLKFLMYDLGFRKQYRPDMMSLQVR

SEQ ID NO: 29706 - protein, 71 aa, Homo sapiens
  MAP TO CHR12.1; EXPRESSED IN FETAL LIVER, SIGNAL = 0.78; EXPRESSED IN LUNG, SIGNAL = 0.66; EXPRESSED IN HELA, SIGNAL = 1.1; EXPRESSED IN BRAIN, SIGNAL = 0.97; EXPRESSED IN BONE MARROW, SIGNAL = 0.91; SWISSPROT HIT: P11365, EVALUE 9.10e-01
THTDGVDVRLVASESLTAGPLSHIPELGTGITGPRNEEIEVRRHSQAHAVTRVSHKYSLLLPSLNVPQGTA

SEQ ID NO: 29707 - protein, 88 aa, Homo sapiens
  MAP TO CHR1.1; EXPRESSED IN FETAL LIVER, SIGNAL = 0.41; EXPRESSED IN BRAIN, SIGNAL = 0.47; EXPRESSED IN HEART, SIGNAL = 0.78; SWISSPROT HIT: P23249, EVALUE 3.00e-28
PGECYELHVHCKTSFVGYFPATVLWELLGPGESGSEGAGTFYIARFLAAVAHSPLAAQLKPMTPFKRTRITGNPVVTNRIEEGERPDR

SEQ ID NO: 29708 - protein, 72 aa, Homo sapiens
  MAP TO CHR7.1; EXPRESSED IN BRAIN, SIGNAL = 0.54; EXPRESSED IN HEART, SIGNAL = 0.81; EXPRESSED IN LUNG, SIGNAL = 0.58; SWISSPROT HIT: Q10977, EVALUE 9.80e+00
HLGLNLALSSCHVDLLQTSSCANGTCSHTFVYYTAVTDFSRDGDRVSNIVVQPIVNEDFLWNNYIPDSIQVD

SEQ ID NO: 29709 - protein, 50 aa, Homo sapiens
  MAP TO CHR19.1; EXPRESSED IN HELA, SIGNAL = 1.6; EXPRESSED IN FETAL LIVER, SIGNAL = 1.5; EXPRESSED IN LUNG, SIGNAL = 1.2; EXPRESSED IN BRAIN, SIGNAL = 1.4; EXPRESSED IN HEART, SIGNAL = 1.1; EXPRESSED IN BONE MARROW, SIGNAL = 1.6; SWISSPROT HIT: Q08477, EVALUE 7.00e-20
FLRDDLAQLPFLTMCVKESLRLHPPAPFISRCCTQDIVLPDGRVIPKGAH

SEQ ID NO: 29710 - protein, 92 aa, Homo sapiens
  MAP TO CHR9.1; EXPRESSED IN FETAL LIVER, SIGNAL = 0.36; EXPRESSED IN BRAIN, SIGNAL = 0.46; EXPRESSED IN HEART, SIGNAL = 0.57; SWISSPROT HIT: Q10518, EVALUE 2.10e+00
PGCHRCLGGITTSGCPYLGRHMRTWASLALGLTRALGGMGSFLLRILGWSWAMGSRSRARWPRGRLGFTSMLSCMRQCSVCRMIMSLVEVLV

SEQ ID NO: 29711 - protein, 66 aa, Homo sapiens
  MAP TO CHR11.1; EXPRESSED IN PLACENTA, SIGNAL =   3; EXPRESSED IN FETAL LIVER, SIGNAL = 2.9; EXPRESSED IN HELA, SIGNAL = 3.8; EXPRESSED IN BRAIN, SIGNAL = 2.9; EXPRESSED IN HEART, SIGNAL = 1.4; EXPRESSED IN BONE MARROW, SIGNAL = 3.5; EXPRESSED IN ADULT LIVER, SIGNAL = 1.2; EXPRESSED IN LUNG, SIGNAL = 1.3; SWISSPROT HIT: P03291, EVALUE 3.50e+00
LCPWHPRPPPGLWQRSQAGRSRLSARHCKRKRRETAPVSPRSEAWKNSAAGANTKDFSDPAAKVPS

SEQ ID NO: 29712 - protein, 57 aa, Homo sapiens
  MAP TO CHR11.1; EXPRESSED IN FETAL LIVER, SIGNAL = 2.3; EXPRESSED IN LUNG, SIGNAL = 2.5; EXPRESSED IN HELA, SIGNAL = 1.4; EXPRESSED IN BRAIN, SIGNAL = 2.1; EXPRESSED IN HEART, SIGNAL = 1.9; EXPRESSED IN ADULT LIVER, SIGNAL = 1.9; EXPRESSED IN BONE MARROW, SIGNAL = 2.6
QSLGTCSSMSCSCWLVRESIMSMATSLEAWDSAPRTTAPPPGGENRMWHTLTVKSRF

SEQ ID NO: 29713 - protein, 70 aa, Homo sapiens
  MAP TO CHR17.1; EXPRESSED IN LUNG, SIGNAL = 0.96; EXPRESSED IN FETAL LIVER, SIGNAL = 0.94; EXPRESSED IN HELA, SIGNAL = 1.1; EXPRESSED IN BRAIN, SIGNAL =   1; EXPRESSED IN HEART, SIGNAL = 0.75; SWISSPROT HIT: P07359, EVALUE 2.00e-34
LELQRGRQVTVPRAWLLFLRGSLPTFRSSLFLWVRPNGRVGPLVAGRRPSALSQGRGQDLLSTVSIRYSG

SEQ ID NO: 29714 - protein, 89 aa, Homo sapiens
  MAP TO CHR5.1; EXPRESSED IN FETAL LIVER, SIGNAL = 0.84; EXPRESSED IN HELA, SIGNAL = 0.72; EXPRESSED IN BRAIN, SIGNAL = 0.93; EXPRESSED IN ADULT LIVER, SIGNAL = 0.79; SWISSPROT HIT: P29460, EVALUE 1.00e-40
PVYVVELDWYPDAPGEMVVLTCDTPEEDGITWTLDQSSEVLGSGKTLTIQVKEFGDAGQYTCHKGGEVLSHSLLLLHKKEDGIWSTDIL

SEQ ID NO: 29715 - protein, 67 aa, Homo sapiens
  MAP TO CHR19.1; EXPRESSED IN FETAL LIVER, SIGNAL = 2.2; EXPRESSED IN LUNG, SIGNAL = 2.4; EXPRESSED IN HELA, SIGNAL = 2.6; EXPRESSED IN BRAIN, SIGNAL = 2.6; EXPRESSED IN HEART, SIGNAL = 2.4; EXPRESSED IN BONE MARROW, SIGNAL = 2.3; EXPRESSED IN ADULT LIVER, SIGNAL = 2.2; SWISSPROT HIT: Q15459, EVALUE 1.20e+00
PSVVVVHRESVPIDCGVCELNPSTDSLLKVSPPEGAETRKVIEKLARFVAEGGPELEKVAMEDYKDN

SEQ ID NO: 29716 - protein, 120 aa, Homo sapiens
  MAP TO CHR12.1; EXPRESSED IN HELA, SIGNAL = 0.77; EXPRESSED IN BRAIN, SIGNAL = 0.81; EXPRESSED IN PLACENTA, SIGNAL = 4.1
LPVGAELPRHLLHPDGRGQGGPVALHSADRAGVAGGAREATQGGVVGVVDVGVGAGGRVAARGEGGVHQLLVGWRLSVALAAARLVDVQRALSGEGLGEGAPAVALVVADVVAEQATGPL

SEQ ID NO: 29717 - protein, 69 aa, Homo sapiens
  MAP TO CHRX.1; EXPRESSED IN HELA, SIGNAL =   3; EXPRESSED IN BRAIN, SIGNAL = 3.4; EXPRESSED IN LUNG, SIGNAL = 1.2; EXPRESSED IN HEART, SIGNAL = 1.1; EXPRESSED IN BONE MARROW, SIGNAL = 3.7; EXPRESSED IN FETAL LIVER, SIGNAL = 3.4; SWISSPROT HIT: P22105, EVALUE 3.00e-08
SEDCLDPMCSNHGICVKGECHCSTGWGGVNCETPLPVCQEQCSGHGTFLLDAGVCSCDPKWTGSDCSTG

SEQ ID NO: 29718 - protein, 75 aa, Homo sapiens
  MAP TO CHRX.1; EXPRESSED IN FETAL LIVER, SIGNAL = 1.6; EXPRESSED IN BRAIN, SIGNAL = 0.84; EXPRESSED IN LUNG, SIGNAL = 0.67; EXPRESSED IN HEART, SIGNAL = 0.84; EXPRESSED IN BONE MARROW, SIGNAL = 1.2
RTPLNVPRKQKTLKGRRRRQPPWKVRRHFLWRWKRIAPSLSPALAGGLPKRKKRRRKRKRLPMKMLRPQASEIMR

SEQ ID NO: 29719 - protein, 60 aa, Homo sapiens
  MAP TO CHR15.1; EXPRESSED IN HELA, SIGNAL = 0.68; EXPRESSED IN BRAIN, SIGNAL = 1.2; EXPRESSED IN HEART, SIGNAL = 1.4; EXPRESSED IN LUNG, SIGNAL = 1.4; SWISSPROT HIT: Q9UPM8, EVALUE 2.00e-18
FLFLAILFECVHTVYSIYPKSELLEKAAKCIGKFVLSPKINLKYLGKMIGSFDRNYRDSF

SEQ ID NO: 29720 - protein, 81 aa, Homo sapiens
  MAP TO CHRX.1; EXPRESSED IN FETAL LIVER, SIGNAL = 0.42; EXPRESSED IN LUNG, SIGNAL = 0.64; EXPRESSED IN BRAIN, SIGNAL = 0.47; EXPRESSED IN HEART, SIGNAL = 0.72; SWISSPROT HIT: Q14765, EVALUE 3.60e+00
DWLSYAKSWPPSHSGFPLYPEALVGNGRGSLAPSALKCKEKQGCLLAGGQGGPAGHLVHGRLHSRQIVAQFLLLGLWWILE

SEQ ID NO: 29721 - protein, 68 aa, Homo sapiens
  MAP TO AC021705.4; EXPRESSED IN BRAIN, SIGNAL = 0.81; EXPRESSED IN BONE MARROW, SIGNAL = 0.75; EXPRESSED IN ADULT LIVER, SIGNAL = 1.3; EXPRESSED IN LUNG, SIGNAL = 0.74
GSPEAVEVEAWSSSGWPVCRSTRSISSTSIHWLSSCLSSASRCCVAIFSRASRSISCSYSFSFLFRDW

SEQ ID NO: 29722 - protein, 98 aa, Homo sapiens
  MAP TO CHR2.1; EXPRESSED IN FETAL LIVER, SIGNAL = 2.1; EXPRESSED IN BRAIN, SIGNAL = 1.2; EXPRESSED IN BONE MARROW, SIGNAL = 1.3; EXPRESSED IN ADULT LIVER, SIGNAL = 1.7; SWISSPROT HIT: O17438, EVALUE 4.00e-07
STLIPLPTTNVNRFCWDRLLLQEVASTRGTGAWGVLVLDEAQERSVASDSLQGLLQDARLEKLPGDLRVVVVTDPALEPKLRAFWGNPPIVHIPREPG

SEQ ID NO: 29723 - protein, 53 aa, Homo sapiens
  MAP TO CHR17.1; EXPRESSED IN BRAIN, SIGNAL = 0.84; EXPRESSED IN HEART, SIGNAL = 1.2; EXPRESSED IN PLACENTA, SIGNAL = 1.3; EXPRESSED IN LUNG, SIGNAL = 1.1; EXPRESSED IN HELA, SIGNAL = 1.1
SVHRHRHEAAAPCQSRDPPGHAPPPLPGLPGGAGKPGTHLPAHQCQPVLPAGE

SEQ ID NO: 29724 - protein, 25 aa, Homo sapiens
  MAP TO CHR7.1; EXPRESSED IN BONE MARROW, SIGNAL = 1.3; EXPRESSED IN ADULT LIVER, SIGNAL = 0.58; EXPRESSED IN HELA, SIGNAL = 0.97; EXPRESSED IN FETAL LIVER, SIGNAL = 1.2; EXPRESSED IN BRAIN, SIGNAL = 1.1; EXPRESSED IN LUNG, SIGNAL = 1.2; EXPRESSED IN HEART, SIGNAL = 0.61
FLTSKCMVFPGVPGVTGVTGEYMGL

SEQ ID NO: 29725 - protein, 65 aa, Homo sapiens
  MAP TO CHR7.1; EXPRESSED IN HELA, SIGNAL = 0.63; EXPRESSED IN BRAIN, SIGNAL = 0.88; EXPRESSED IN BONE MARROW, SIGNAL = 0.94; EXPRESSED IN FETAL LIVER, SIGNAL = 0.82
NQEKRSSISVILKDVVKFMAKHLIYEHIFAGILEKDLLYATGCFVAKDSHGVMSSRDIEEPIQVS

SEQ ID NO: 29726 - protein, 115 aa, Homo sapiens
  MAP TO CHR6.1; EXPRESSED IN ADULT LIVER, SIGNAL = 0.63; EXPRESSED IN BONE MARROW, SIGNAL = 1.2; EXPRESSED IN BRAIN, SIGNAL = 0.97; SWISSPROT HIT: Q9UGF5, EVALUE 3.00e-58
INEIALAAFTTSAAFICLISIVLSYIRIFSTVLRIPSAEGRTKVFSTCLPHLFVATFFLSAAGFEFLRLPSDSSSTVDLVFSVFYTVIPPTLNPVIYSLRNDSMKAALRKMLSKE

SEQ ID NO: 29727 - protein, 46 aa, Homo sapiens
  MAP TO CHR17.1; EXPRESSED IN HELA, SIGNAL = 0.41; EXPRESSED IN BRAIN, SIGNAL = 0.69; EXPRESSED IN HEART, SIGNAL = 0.51; EXPRESSED IN BONE MARROW, SIGNAL = 0.64; SWISSPROT HIT: Q39575, EVALUE 2.60e-01
CRFRAGIKDLEVMTQNLITSAFELVRDVPHGVLLLDTFHRLASREV

SEQ ID NO: 29728 - protein, 69 aa, Homo sapiens
  MAP TO CHR11.1; EXPRESSED IN HELA, SIGNAL = 1.2; EXPRESSED IN BRAIN, SIGNAL = 1.1; EXPRESSED IN LUNG, SIGNAL = 0.6; EXPRESSED IN HEART, SIGNAL = 0.67; EXPRESSED IN BONE MARROW, SIGNAL = 1.1; SWISSPROT HIT: P22932, EVALUE 1.20e+00
TCSPGPAPCLAVAGPGLWQEDSDSAGGHRNSTVDEERHGGVELGSHAHQWAHDAAHSGHGAAHSHACLP

SEQ ID NO: 29729 - protein, 162 aa, Homo sapiens
  MAP TO CHR14.1; EXPRESSED IN PLACENTA, SIGNAL = 2.5; EXPRESSED IN FETAL LIVER, SIGNAL = 3.2; EXPRESSED IN HELA, SIGNAL = 3.4; EXPRESSED IN BRAIN, SIGNAL = 2.4; EXPRESSED IN LUNG, SIGNAL = 1.5; EXPRESSED IN HEART, SIGNAL = 1.5; EXPRESSED IN BONE MARROW, SIGNAL =   3; SWISSPROT HIT: Q9ULJ3, EVALUE 3.00e-03
MSAQTSPAEKGLNPGLMCQESYACSGTDEAIFECDECCSLQCLRCEEELHRQERLRNHERIRLKPGHVPYCDLCKGLSGHLPGVRQRAIVRCQTCKINLCLECQKRTHSGGNKRRHPVTVYNVSNLQESLEAEEMDEETKRKKMTEKVVSFLLVDENEEIQV

SEQ ID NO: 29730 - protein, 77 aa, Homo sapiens
  MAP TO CHR6.1; EXPRESSED IN BRAIN, SIGNAL = 0.84; EXPRESSED IN LUNG, SIGNAL =   1; EXPRESSED IN HEART, SIGNAL = 1.6; EXPRESSED IN ADULT LIVER, SIGNAL = 1.7; SWISSPROT HIT: P13619, EVALUE 1.00e-26
KYRASIGDFAEKFNEQKIAQLEEVKQASIRQIQDATDLEKSQQALVQKHHYLFDVQKNNIAMALEVTGNDCIDYIRK

SEQ ID NO: 29731 - protein, 53 aa, Homo sapiens
  MAP TO CHRX.1; EXPRESSED IN ADULT LIVER, SIGNAL = 0.9; EXPRESSED IN LUNG, SIGNAL = 0.9; EXPRESSED IN HELA, SIGNAL = 1.1; EXPRESSED IN BRAIN, SIGNAL =   1; EXPRESSED IN BONE MARROW, SIGNAL = 1.1; EXPRESSED IN HEART, SIGNAL =   1; SWISSPROT HIT: Q93008, EVALUE 9.00e-20
FSQTQRSPHVFYRHDLINQLQHNHALVTLVAENLATYMESMRLYARGMYCKLK

SEQ ID NO: 29732 - protein, 55 aa, Homo sapiens
  MAP TO CHRX.1; EXPRESSED IN BRAIN, SIGNAL = 0.93; EXPRESSED IN HEART, SIGNAL = 1.8; EXPRESSED IN PLACENTA, SIGNAL = 3.7; EXPRESSED IN FETAL LIVER, SIGNAL = 2.4; EXPRESSED IN LUNG, SIGNAL =   5; SWISSPROT HIT: Q9Y3K8, EVALUE 2.00e-25
VQQLQLEAGLNSVKVSQAAADLKQFCLQNAQHDPLLTGVSSSTNPFRPQKVCSFL

SEQ ID NO: 29733 - protein, 27 aa, Homo sapiens
  MAP TO CHR14.1; EXPRESSED IN ADULT LIVER, SIGNAL = 6.1; EXPRESSED IN HELA, SIGNAL = 7.1; EXPRESSED IN BRAIN, SIGNAL = 3.6; EXPRESSED IN LUNG, SIGNAL = 9.7; EXPRESSED IN HEART, SIGNAL = 4.1
KFRVRVDISHLACCLTTFHKPTLTFRK

SEQ ID NO: 29734 - protein, 108 aa, Homo sapiens
  MAP TO CHR16.1; EXPRESSED IN BRAIN, SIGNAL = 6.1; EXPRESSED IN HEART, SIGNAL = 4.4; EXPRESSED IN ADULT LIVER, SIGNAL = 6.8; EXPRESSED IN BONE MARROW, SIGNAL = 5.7; EXPRESSED IN FETAL LIVER, SIGNAL = 5.6; EXPRESSED IN PLACENTA, SIGNAL = 7.8; EXPRESSED IN LUNG, SIGNAL = 4.2; EXPRESSED IN HELA, SIGNAL = 6.6; SWISSPROT HIT: P16927, EVALUE 1.50e+00
IMQPSGHRLRDVEHHPLLAENDNYDSSSSSSSEADVADRVWFIRDGCGMICAVMTWLLVAYADFVVTFVMLLPSKDFWYSVVNGVIFNCLAVLALSSHLRTMLTDPVS

SEQ ID NO: 29735 - protein, 94 aa, Homo sapiens
  MAP TO CHR6.1; EXPRESSED IN ADULT LIVER, SIGNAL = 1.1; EXPRESSED IN BRAIN, SIGNAL = 0.7
SPLRDQPLRAEVPRLVHFFVVVPKLGLHSVGPQEHGSLRGAVDLIAKDSFLHLEEEKFLGDVLDELLSHIFRVELGPELELEGILLPDLLGRHL

SEQ ID NO: 29736 - protein, 68 aa, Homo sapiens
  MAP TO CHR19.1; EXPRESSED IN BRAIN, SIGNAL = 1.7; EXPRESSED IN HEART, SIGNAL = 1.5; EXPRESSED IN PLACENTA, SIGNAL = 3.8; EXPRESSED IN FETAL LIVER, SIGNAL = 1.8; EXPRESSED IN LUNG, SIGNAL = 2.3
AGCVHFSYKASCEIRVLMLLYSSEKKIFIGLIPHDQGNFVNGIRRVIANQQQVLQRNLEQEQQQRGVR

SEQ ID NO: 29737 - protein, 75 aa, Homo sapiens
  MAP TO CHR17.1; EXPRESSED IN ADULT LIVER, SIGNAL = 2.2; EXPRESSED IN FETAL LIVER, SIGNAL = 2.3; EXPRESSED IN BRAIN, SIGNAL = 2.3; EXPRESSED IN LUNG, SIGNAL = 1.9; EXPRESSED IN HEART, SIGNAL = 1.5; EXPRESSED IN BONE MARROW, SIGNAL = 2.1; SWISSPROT HIT: Q9JHD2, EVALUE 2.00e-34
AQTSLLSANAARDETARLEERRGIIEFHVIGNSLTPKANRRVLLWLVGLQNVFSHQLPRMPKEYIARLVFDPCVP

SEQ ID NO: 29738 - protein, 48 aa, Homo sapiens
  MAP TO CHR7.1; EXPRESSED IN HELA, SIGNAL = 0.38; EXPRESSED IN BRAIN, SIGNAL = 0.63
SYVKSRQLSTELTAVDLKEHSLIQLRLAFISSEFIRSENCPFESPIFW

SEQ ID NO: 29739 - protein, 73 aa, Homo sapiens
  MAP TO CHR17.1; EXPRESSED IN BRAIN, SIGNAL = 0.93; EXPRESSED IN LUNG, SIGNAL = 0.99; EXPRESSED IN HEART, SIGNAL = 0.64; EXPRESSED IN BONE MARROW, SIGNAL = 0.84; EXPRESSED IN ADULT LIVER, SIGNAL = 0.69; EXPRESSED IN FETAL LIVER, SIGNAL = 0.75; SWISSPROT HIT: P23701, EVALUE 2.90e+00
LTCRDSWKDEAWYCAYLAMVVWERELSQGQICRVPVRSQFSSEGCCTWVRTSTVCSPLASTRVLVEKRPKSGR

SEQ ID NO: 29740 - protein, 101 aa, Homo sapiens
  MAP TO CHR13.1; EXPRESSED IN BRAIN, SIGNAL = 0.54; EXPRESSED IN BONE MARROW, SIGNAL = 0.67; SWISSPROT HIT: P09848, EVALUE 1.60e-01
INLCGYFAYSFNDRTAPRFGLYRYAADQFEPKASMKHYRKIIDSNGFPGPETLERFCPEEFTVCTECSFFHTRKSLLAFIAFLFFASIISLSLIFYYSKKG

SEQ ID NO: 29741 - protein, 78 aa, Homo sapiens
  MAP TO CHR19.1; EXPRESSED IN PLACENTA, SIGNAL = 7.3; EXPRESSED IN LUNG, SIGNAL = 2.4; EXPRESSED IN HELA, SIGNAL = 7.9; EXPRESSED IN BRAIN, SIGNAL = 5.6; EXPRESSED IN HEART, SIGNAL = 3.4; EXPRESSED IN ADULT LIVER, SIGNAL =   5; EXPRESSED IN BONE MARROW, SIGNAL = 4.5; EXPRESSED IN FETAL LIVER, SIGNAL =   5; SWISSPROT HIT: Q05063, EVALUE 2.60e+00
CPEFTVPNVPAHVELHAVEAAQRVRQEHRRGHCPRPQLPLRLPARVHHERIPPAPQLQPHPDRGTPRHQGLRHWHAAG

SEQ ID NO: 29742 - protein, 57 aa, Homo sapiens
  MAP TO CHR12.1; EXPRESSED IN PLACENTA, SIGNAL =   6; EXPRESSED IN LUNG, SIGNAL = 3.7; EXPRESSED IN BRAIN, SIGNAL = 3.5; EXPRESSED IN HEART, SIGNAL = 4.4; EXPRESSED IN ADULT LIVER, SIGNAL = 6.8; EXPRESSED IN BONE MARROW, SIGNAL = 3.1; EXPRESSED IN FETAL LIVER, SIGNAL = 4.6; EXPRESSED IN HELA, SIGNAL = 4.5; SWISSPROT HIT: P54336, EVALUE 8.00e+00
QEGVCILTGLGFNGFEEKGKAKWDACANMKVWLFETNPRFTGTIASFNINTNAWVAR

SEQ ID NO: 29743 - protein, 69 aa, Homo sapiens
  MAP TO CHR13.1; EXPRESSED IN PLACENTA, SIGNAL = 5.7; EXPRESSED IN LUNG, SIGNAL = 3.4; EXPRESSED IN HELA, SIGNAL =   6; EXPRESSED IN BRAIN, SIGNAL = 4.2; EXPRESSED IN HEART, SIGNAL = 3.3; EXPRESSED IN ADULT LIVER, SIGNAL = 4.8; EXPRESSED IN BONE MARROW, SIGNAL = 3.8
PVTFSAHFFMTVASSETTRSTHFKLGSLSFTICFFTMASKAMSGVKSPVLGHAEGRMRQKDTQGQCRPH

SEQ ID NO: 29744 - protein, 101 aa, Homo sapiens
  MAP TO CHR2.1; EXPRESSED IN ADULT LIVER, SIGNAL = 0.46; EXPRESSED IN BONE MARROW, SIGNAL = 0.46; EXPRESSED IN BRAIN, SIGNAL = 0.47; EXPRESSED IN HEART, SIGNAL = 1.1; SWISSPROT HIT: P11799, EVALUE 3.00e-09
VPTEQKLPPSFSRQLRDVQETVGLPVVFDCAISGSEPISVSWYKDGKPLKDSPNVQTSFLDNTATLNIFKTDRSLAGQYSCTATNPIGSASSSARLILTGL

SEQ ID NO: 29745 - protein, 157 aa, Homo sapiens
  MAP TO CHR6.1; EXPRESSED IN FETAL LIVER, SIGNAL = 1.4; EXPRESSED IN HELA, SIGNAL = 1.3; EXPRESSED IN LUNG, SIGNAL = 1.5; EXPRESSED IN BRAIN, SIGNAL = 1.3; EXPRESSED IN ADULT LIVER, SIGNAL = 0.87; SWISSPROT HIT: Q03181, EVALUE 1.00e-81
GPGFQPFVIHDIETLWQAEKGLVWKQLVNGLPPYKEISVHVFYRCQCTTVETVRELTEFAKSIPSFSSLFLNDQVTLLKYGVHEAIFAMLASIVNKDGLLVANGSGFVTREFLRSLRKPFSDIIEPKFEFAVKFNALELDDSDLALFIAAIILCGGE

SEQ ID NO: 29746 - protein, 71 aa, Homo sapiens
  MAP TO CHR15.1; EXPRESSED IN LUNG, SIGNAL = 2.1; EXPRESSED IN HELA, SIGNAL = 5.9; EXPRESSED IN BRAIN, SIGNAL = 1.1; EXPRESSED IN BONE MARROW, SIGNAL = 2.1; SWISSPROT HIT: Q13310, EVALUE 7.00e-20
FPLIQTMHSNLAGKITGMLLEIDNSELLHVLESPESLRSKVDEAVAVLQAHHAKKEAAQKVGAVAAATTQT

SEQ ID NO: 29747 - protein, 60 aa, Homo sapiens
  MAP TO CHR11.1; EXPRESSED IN FETAL LIVER, SIGNAL = 0.56; EXPRESSED IN BRAIN, SIGNAL = 0.64; EXPRESSED IN BONE MARROW, SIGNAL = 0.64; SWISSPROT HIT: P34983, EVALUE 2.00e-20
PKMLVNFATEKNIISYPECMAQLYLFSIFAIAECHMLAAMAYDCYVAICSPLLYNVIMSY

SEQ ID NO: 29748 - protein, 50 aa, Homo sapiens
  MAP TO CHR14.1; EXPRESSED IN LUNG, SIGNAL = 1.3; EXPRESSED IN ADULT LIVER, SIGNAL = 2.2; EXPRESSED IN PLACENTA, SIGNAL = 1.3; EXPRESSED IN FETAL LIVER, SIGNAL = 1.7; EXPRESSED IN BRAIN, SIGNAL = 1.9
LCLVAGIYRELCLESVKNKYECEIQASRQHCEVLSFCITFKLISSLQAFS

SEQ ID NO: 29749 - protein, 53 aa, Homo sapiens
  MAP TO CHR19.1; EXPRESSED IN HELA, SIGNAL =   1; EXPRESSED IN LUNG, SIGNAL = 0.78; EXPRESSED IN BRAIN, SIGNAL =   2; EXPRESSED IN HEART, SIGNAL = 1.6; EXPRESSED IN ADULT LIVER, SIGNAL = 2.4; EXPRESSED IN FETAL LIVER, SIGNAL = 1.2
TQPPWAWIQGVKLCTCSTLSPARVPPSPATRRLSSMARARRARGSGEGGGGPG

SEQ ID NO: 29750 - protein, 82 aa, Homo sapiens
  MAP TO CHR12.1; EXPRESSED IN BRAIN, SIGNAL = 3.7; EXPRESSED IN HEART, SIGNAL = 1.5; EXPRESSED IN PLACENTA, SIGNAL = 1.5; EXPRESSED IN FETAL LIVER, SIGNAL = 1.8; EXPRESSED IN LUNG, SIGNAL = 1.8; SWISSPROT HIT: P07323, EVALUE 2.00e-37
SVAPQAFNVINGGSHAGNKLAMQEFMILPVGAESFRDAMRLGAEVYHTLKGVIKDKYGKDATNVGDEGGFAPNILENSEGEA

SEQ ID NO: 29751 - protein, 46 aa, Homo sapiens
  MAP TO CHR19.1; EXPRESSED IN FETAL LIVER, SIGNAL = 1.6; EXPRESSED IN LUNG, SIGNAL =   3; EXPRESSED IN HELA, SIGNAL = 1.4; EXPRESSED IN BRAIN, SIGNAL = 1.6; EXPRESSED IN HEART, SIGNAL = 1.5; SWISSPROT HIT: P51522, EVALUE 6.00e-19
HHRLHTGEKPYKCNECGKTFSHKSSLTCHRRLHTGEKPYKCEECDK

SEQ ID NO: 29752 - protein, 159 aa, Homo sapiens
  MAP TO CHR20.1; EXPRESSED IN LUNG, SIGNAL = 0.82; EXPRESSED IN BRAIN, SIGNAL = 0.52; EXPRESSED IN HEART, SIGNAL = 0.59; EXPRESSED IN FETAL LIVER, SIGNAL = 0.63; SWISSPROT HIT: P53323, EVALUE 2.00e-19
GISAPVVFFVDYASNCLYMEEIEGSVTVRDYIQSTMETEKTPQGLSNLAKTIGQVLARMHDEDLIHGDLTTSNMLLKPPLEQLNIVLIDFGLSFISALPEDKGVDLYVLEKAFLSTHPNTETVFEAFLKSYSTSSKKARPVLKKLDEVRLRGRKRSMVG

SEQ ID NO: 29753 - protein, 59 aa, Homo sapiens
  MAP TO CHR13.1; EXPRESSED IN FETAL LIVER, SIGNAL = 0.6; EXPRESSED IN BRAIN, SIGNAL = 0.69; EXPRESSED IN BONE MARROW, SIGNAL = 0.66; EXPRESSED IN ADULT LIVER, SIGNAL = 0.73; SWISSPROT HIT: P23481, EVALUE 1.60e+00
SGPQMQMCSAGIPSSLCLCVFCVSAYPSGSPSATFSSIYTHHSQFVFQLFLNQLCYRYI

SEQ ID NO: 29754 - protein, 101 aa, Homo sapiens
  MAP TO CHR17.1; EXPRESSED IN BONE MARROW, SIGNAL = 0.83; EXPRESSED IN HEART, SIGNAL = 0.86; EXPRESSED IN FETAL LIVER, SIGNAL = 0.84; EXPRESSED IN LUNG, SIGNAL = 0.58; EXPRESSED IN BRAIN, SIGNAL = 0.91; SWISSPROT HIT: P08111, EVALUE 1.00e-15
QVLVLELSDVPVEQAVSVAIIDLLQDREGFTWKGHERLSPRTGPLPWPAGFQPRVLVQCLPPAAVTAVTLHTEWSLVAFGTSHGFGLFDYQRKSPVLARCV

SEQ ID NO: 29755 - protein, 92 aa, Homo sapiens
  MAP TO CHR17.1; EXPRESSED IN BONE MARROW, SIGNAL = 0.84; EXPRESSED IN HEART, SIGNAL = 0.71; EXPRESSED IN FETAL LIVER, SIGNAL = 0.76; EXPRESSED IN LUNG, SIGNAL = 0.61; EXPRESSED IN BRAIN, SIGNAL = 0.99; SWISSPROT HIT: O35569, EVALUE 1.10e-02
SCLSPKCLEISIEYDSEDEQEAGSGGISITSSCYPGDGEAWGTATVGRPRGPPKANSGPKPYPRLPAWEKGEPERRGRSATGRAKEPLSRVR

SEQ ID NO: 29756 - protein, 49 aa, Homo sapiens
  MAP TO CHR6.1; EXPRESSED IN ADULT LIVER, SIGNAL =   2; EXPRESSED IN BONE MARROW, SIGNAL = 1.6; EXPRESSED IN FETAL LIVER, SIGNAL = 1.2; EXPRESSED IN BRAIN, SIGNAL = 1.4; EXPRESSED IN LUNG, SIGNAL = 0.91; EXPRESSED IN HEART, SIGNAL = 0.87; SWISSPROT HIT: P20722, EVALUE 6.00e-24
QVHLMNPEYVPKPCCAPTKLNAISVLYFDDNSNVILKKYRNMVVRACGC

SEQ ID NO: 29757 - protein, 92 aa, Homo sapiens
  MAP TO CHR16.1; EXPRESSED IN HEART, SIGNAL = 0.81; EXPRESSED IN BONE MARROW, SIGNAL = 0.69; EXPRESSED IN ADULT LIVER, SIGNAL = 0.57; EXPRESSED IN LUNG, SIGNAL = 0.71; EXPRESSED IN BRAIN, SIGNAL = 0.65
RRGRKDRERERLEKERTEKERLEREKAERERLEKLRALEERSDWEGEGEEDHEGKKEKDLGVPFLDIQTPDFEGLSWKQALESDKLPKGEQV

SEQ ID NO: 29758 - protein, 49 aa, Homo sapiens
  MAP TO CHR6.1; EXPRESSED IN BONE MARROW, SIGNAL = 0.87; EXPRESSED IN HEART, SIGNAL = 0.73; EXPRESSED IN FETAL LIVER, SIGNAL = 0.83; EXPRESSED IN BRAIN, SIGNAL =   1; SWISSPROT HIT: P93736, EVALUE 1.00e-10
WTLRSFQGSSVAVTEAFVRLYKAGLLYRNHQLVNWSCALRSAISDIEVR

SEQ ID NO: 29759 - protein, 83 aa, Homo sapiens
  MAP TO CHR5.1; EXPRESSED IN LUNG, SIGNAL = 0.85; EXPRESSED IN BRAIN, SIGNAL = 0.94; EXPRESSED IN HEART, SIGNAL = 0.65; EXPRESSED IN ADULT LIVER, SIGNAL =   1; EXPRESSED IN BONE MARROW, SIGNAL = 0.62; SWISSPROT HIT: P47870, EVALUE 2.00e-26
GITTVLTMTTINTHLRETLPKIPYVKAIDMYLMGCFVFVFMALLEYALVNYIFFGRGPQRQKKAAEKAASANNEKMRLDVNKV

SEQ ID NO: 29760 - protein, 43 aa, Homo sapiens
  MAP TO CHR17.1; EXPRESSED IN LUNG, SIGNAL = 0.58; EXPRESSED IN BRAIN, SIGNAL = 0.58; EXPRESSED IN BONE MARROW, SIGNAL = 0.61
CGSMGEAGGYHDIRWKRNGTGIRLPQGRPSAVPPFEQEVVVGN

SEQ ID NO: 29761 - protein, 62 aa, Homo sapiens
  MAP TO CHR19.1; EXPRESSED IN BRAIN, SIGNAL = 1.4; EXPRESSED IN HEART, SIGNAL =   1; EXPRESSED IN BONE MARROW, SIGNAL = 1.1; EXPRESSED IN PLACENTA, SIGNAL = 2.1; EXPRESSED IN LUNG, SIGNAL = 1.3; SWISSPROT HIT: Q9Z0X1, EVALUE 4.60e+00
LLLQLLLLDLLVVGDDLPDAVDEAALVVGDEAHEDLLLGRVQEHEHAHLTGRRVGEVHAARL

SEQ ID NO: 29762 - protein, 99 aa, Homo sapiens
  MAP TO CHR6.1; EXPRESSED IN ADULT LIVER, SIGNAL = 0.76; EXPRESSED IN FETAL LIVER, SIGNAL = 0.74; EXPRESSED IN LUNG, SIGNAL = 0.86; EXPRESSED IN HELA, SIGNAL = 0.76; EXPRESSED IN BRAIN, SIGNAL = 0.9; EXPRESSED IN HEART, SIGNAL = 0.86; SWISSPROT HIT: P36938, EVALUE 4.10e-01
LMFFLFPFPEGFQADFCCSFKLDKAAHETQFGRSDQHGSKASSSLQPPAKAQGRDRAKTGVTEPMNHDQFHLVPNHIVVSAEGNISKKTECLGRALKFD

SEQ ID NO: 29763 - protein, 54 aa, Homo sapiens
  MAP TO CHR17.1; EXPRESSED IN BRAIN, SIGNAL = 0.44; EXPRESSED IN BONE MARROW, SIGNAL = 0.45; EXPRESSED IN FETAL LIVER, SIGNAL = 0.43
SLCSIASRKSTSCMGTTEGDRLYSFRAVSMTVFSTVRSVRSSYTLGSFRKSPEP

SEQ ID NO: 29764 - protein, 76 aa, Homo sapiens
  MAP TO CHR22.1; EXPRESSED IN FETAL LIVER, SIGNAL = 1.1; EXPRESSED IN LUNG, SIGNAL = 1.1; EXPRESSED IN HELA, SIGNAL = 1.4; EXPRESSED IN BRAIN, SIGNAL = 0.83; EXPRESSED IN ADULT LIVER, SIGNAL = 2.1; EXPRESSED IN BONE MARROW, SIGNAL = 0.99; SWISSPROT HIT: Q9Y259, EVALUE 9.00e-07
RKLLESTPSPVVFCHNDIQEGRRRHLSLLTQDGRARGLWSEQNLTPFPQGTSCCSQSQKMLTASCWWTSSTAVITI

SEQ ID NO: 29765 - protein, 53 aa, Homo sapiens
  MAP TO CHR7.1; EXPRESSED IN BONE MARROW, SIGNAL = 0.5; EXPRESSED IN FETAL LIVER, SIGNAL = 0.48; EXPRESSED IN BRAIN, SIGNAL = 0.55
VELHVSNFFFPSVLLCFNGFASPVWTEYVITILGILCLLFLCGFLLLESGTLE

SEQ ID NO: 29766 - protein, 120 aa, Homo sapiens
  MAP TO CHR7.1; EXPRESSED IN FETAL LIVER, SIGNAL = 0.4; EXPRESSED IN LUNG, SIGNAL = 0.77; EXPRESSED IN HELA, SIGNAL = 0.61; EXPRESSED IN BRAIN, SIGNAL = 0.64; EXPRESSED IN HEART, SIGNAL = 0.83; EXPRESSED IN ADULT LIVER, SIGNAL = 0.76; EXPRESSED IN BONE MARROW, SIGNAL = 0.58; SWISSPROT HIT: Q62158, EVALUE 2.00e-17
QCPICLEVFKESLMLQCGHSYCKGCLVSLSYHLDTKVRCPMCWQVVDGSSSLPNVSLAWVIEALRLPGDPEPKVCVHHRNPLSLFCEKDQELICGLCGLLGSHQHHPVTPVSTVCSRMKV

SEQ ID NO: 29767 - protein, 64 aa, Homo sapiens
  MAP TO CHR14.1; EXPRESSED IN HELA, SIGNAL =   1; EXPRESSED IN BRAIN, SIGNAL = 0.72; EXPRESSED IN HEART, SIGNAL = 0.9; EXPRESSED IN BONE MARROW, SIGNAL = 0.77; EXPRESSED IN ADULT LIVER, SIGNAL = 0.77; SWISSPROT HIT: P15046, EVALUE 3.50e+00
GDLLSNLWQSPSSAKLLNQPIPILDVVSEYICSLALECLAHLFSCIPLSAGITPSLLTTTFHFA

SEQ ID NO: 29768 - protein, 35 aa, Homo sapiens
  MAP TO CHR13.1; EXPRESSED IN FETAL LIVER, SIGNAL = 0.61; EXPRESSED IN LUNG, SIGNAL = 0.85; EXPRESSED IN BRAIN, SIGNAL = 0.68; EXPRESSED IN HEART, SIGNAL = 0.9; EXPRESSED IN BONE MARROW, SIGNAL = 0.7; EXPRESSED IN ADULT LIVER, SIGNAL = 0.68; SWISSPROT HIT: P15374, EVALUE 5.00e-10
FSESGSTLKKFLEESVSMSPEERARYLENYDVGTF

SEQ ID NO: 29769 - protein, 79 aa, Homo sapiens
  MAP TO CHR7.1; EXPRESSED IN BRAIN, SIGNAL = 0.45; EXPRESSED IN BONE MARROW, SIGNAL = 0.46; EXPRESSED IN LUNG, SIGNAL = 1.5; EXPRESSED IN HELA, SIGNAL = 1.4; SWISSPROT HIT: P07942, EVALUE 4.00e-49
ACECHLQGSVNAFCNPVTGQCHCFQGVYARQCDRCLPGHWGFPSCQPCQCNGHADDCDPVTGECLNCQDYTMGHNCERY

SEQ ID NO: 29770 - protein, 70 aa, Homo sapiens
  MAP TO CHR19.1; EXPRESSED IN BONE MARROW, SIGNAL =   1; EXPRESSED IN FETAL LIVER, SIGNAL = 1.1; EXPRESSED IN HELA, SIGNAL = 1.8; EXPRESSED IN BRAIN, SIGNAL = 0.85; SWISSPROT HIT: Q9TST5, EVALUE 9.10e+00
TCLLAGEGKDDDVVKGPGVVRVRWVEGQVPGRRLPQVDQEGRVHHGNCKAAPAVSLADRDVGRCALVVAL

SEQ ID NO: 29771 - protein, 26 aa, Homo sapiens
  MAP TO CHR7.1; EXPRESSED IN FETAL LIVER, SIGNAL = 0.75; EXPRESSED IN BRAIN, SIGNAL = 0.42; EXPRESSED IN BONE MARROW, SIGNAL = 0.58
NNGPNIAKAILKNRGGRKDNVHSIRY

SEQ ID NO: 29772 - protein, 94 aa, Homo sapiens
  MAP TO CHR2.1; EXPRESSED IN HELA, SIGNAL = 0.95; EXPRESSED IN FETAL LIVER, SIGNAL = 0.88; EXPRESSED IN LUNG, SIGNAL =   1; EXPRESSED IN BRAIN, SIGNAL = 0.82; EXPRESSED IN HEART, SIGNAL = 0.89; SWISSPROT HIT: P79739, EVALUE 2.00e-15
QVFSKIFSHEALESYLPKIQLVIQDTLRAWSSHPEAINVYQEAQKLTFRMAIRVLLGFSIPEEDLGHLFEVYQQFVDNVFSLPVDLPFSGYRRV

SEQ ID NO: 29773 - protein, 56 aa, Homo sapiens
  MAP TO CHR20.1; EXPRESSED IN FETAL LIVER, SIGNAL = 0.57; EXPRESSED IN HELA, SIGNAL =   1; EXPRESSED IN BRAIN, SIGNAL = 0.83; EXPRESSED IN HEART, SIGNAL = 0.5; EXPRESSED IN ADULT LIVER, SIGNAL = 1.2
KDMFLYLCDLGSTLITVFDQVGNIPCLTYEEDFAVHICHRHSHYPQLHVRKARYSW

SEQ ID NO: 29774 - protein, 111 aa, Homo sapiens
  MAP TO CHR11.1; EXPRESSED IN HEART, SIGNAL =   1; EXPRESSED IN ADULT LIVER, SIGNAL = 0.51; EXPRESSED IN FETAL LIVER, SIGNAL = 0.68; EXPRESSED IN LUNG, SIGNAL = 1.1; EXPRESSED IN BRAIN, SIGNAL = 0.48; SWISSPROT HIT: Q14689, EVALUE 7.00e+00
RQTQRTHNTDNAATLPSVVPLPFLSGVSKPVPPEGYRETSVGTGQLLAVSSVISYICPSIGCRCQFRPNRCMAVVSNEKSHLFLLEAETGLPSHKGKVGRVGEHRHSVQFN

SEQ ID NO: 29775 - protein, 59 aa, Homo sapiens
  MAP TO CHR10.1; EXPRESSED IN HELA, SIGNAL = 0.67; EXPRESSED IN BRAIN, SIGNAL = 0.82; EXPRESSED IN HEART, SIGNAL = 0.7; EXPRESSED IN ADULT LIVER, SIGNAL = 1.9; SWISSPROT HIT: P47068, EVALUE 2.70e+00
SGSVSALPGSCLWSVGRAFPLCPGLPPANASWGRRRGLSRSTGPDANRRPDPHRLGGLV

SEQ ID NO: 29776 - protein, 55 aa, Homo sapiens
  MAP TO CHR14.1; EXPRESSED IN BRAIN, SIGNAL = 3.2; EXPRESSED IN LUNG, SIGNAL = 2.9; EXPRESSED IN HELA, SIGNAL = 3.1; EXPRESSED IN HEART, SIGNAL = 2.7; EXPRESSED IN BONE MARROW, SIGNAL = 2.7; EXPRESSED IN ADULT LIVER, SIGNAL =   2; EXPRESSED IN PLACENTA, SIGNAL = 2.5
ACSSHSWSQKIDFLLAKSTSPYLHLSQTCKVIRYEIYMVYARDLSQLPLLSLSIL

SEQ ID NO: 29777 - protein, 126 aa, Homo sapiens
  MAP TO CHR5.1; EXPRESSED IN BONE MARROW, SIGNAL = 1.1; EXPRESSED IN FETAL LIVER, SIGNAL = 0.82; EXPRESSED IN HELA, SIGNAL = 1.2; EXPRESSED IN LUNG, SIGNAL = 0.67; EXPRESSED IN BRAIN, SIGNAL = 1.3; EXPRESSED IN ADULT LIVER, SIGNAL = 1.1; SWISSPROT HIT: Q9UN75, EVALUE 6.00e-63
GPGSQRLLLSLLLLAAWEVGSGQLHYSVYEEAKHGTFVGRIAQDLGLELAELVPRLFRVASKRHGDLLEVNLQNGILFVNSRIDREKLCGRSAECSIHLEVIVDRPLQVFHVDVEVKDINDNPPVF

SEQ ID NO: 29778 - protein, 62 aa, Homo sapiens
  MAP TO CHR19.1; EXPRESSED IN BONE MARROW, SIGNAL = 0.97; EXPRESSED IN HELA, SIGNAL = 0.85; EXPRESSED IN BRAIN, SIGNAL = 0.74; EXPRESSED IN LUNG, SIGNAL = 0.82; EXPRESSED IN HEART, SIGNAL = 0.93; SWISSPROT HIT: P82251, EVALUE 1.00e-29
CVPGALCFAELGTMITKSGGEYPYLMEAYGPIPAYLFSWASLIVIKPTSFAIICLSFSEYVC

SEQ ID NO: 29779 - protein, 57 aa, Homo sapiens
  MAP TO CHR19.1; EXPRESSED IN BONE MARROW, SIGNAL = 1.4; EXPRESSED IN FETAL LIVER, SIGNAL = 1.2; EXPRESSED IN HELA, SIGNAL = 1.5; EXPRESSED IN BRAIN, SIGNAL = 1.3; EXPRESSED IN LUNG, SIGNAL = 1.9; EXPRESSED IN HEART, SIGNAL = 1.7
WPISKFCRMSRYSEALACVRMVLMRLPQCRRSLRHRSAHSSVSSSNSSSGNCPQGPR

SEQ ID NO: 29780 - protein, 134 aa, Homo sapiens
  MAP TO CHR10.1; EXPRESSED IN HELA, SIGNAL = 1.3; EXPRESSED IN LUNG, SIGNAL = 1.7; EXPRESSED IN BRAIN, SIGNAL = 0.98; EXPRESSED IN HEART, SIGNAL = 1.1; EXPRESSED IN BONE MARROW, SIGNAL = 1.3; EXPRESSED IN FETAL LIVER, SIGNAL = 1.3; SWISSPROT HIT: P17026, EVALUE 7.00e-80
KSFSQSSTLFQHQKIHTGKKSHKCADCGKSFFQSSNLIQHRRIHTGEKPYKCDECGESFKQSSNLIQHQRIHTGEKPYQCDECGRCFSQSSHLIQHQRTHTGEKPYQCSECGKCFSQSSHLRQHMKVHKEEKPR

SEQ ID NO: 29781 - protein, 39 aa, Homo sapiens
  MAP TO CHR14.1; EXPRESSED IN BRAIN, SIGNAL = 0.37; EXPRESSED IN HEART, SIGNAL = 0.48; EXPRESSED IN FETAL LIVER, SIGNAL = 0.44
HYSFLVQGDRVKPDSILLVVLGCDKAPGTVAVLSDVPGA

SEQ ID NO: 29782 - protein, 50 aa, Homo sapiens
  MAP TO CHR19.1; EXPRESSED IN BRAIN, SIGNAL = 1.3; EXPRESSED IN BONE MARROW, SIGNAL = 1.2; EXPRESSED IN HEART, SIGNAL = 0.92; EXPRESSED IN ADULT LIVER, SIGNAL = 1.7; EXPRESSED IN LUNG, SIGNAL = 0.7
QYLPNEAGLQDEKKVLDNMHHVLLVWMGPVLPLLVLVHPDYIKPLLGASG

SEQ ID NO: 29783 - protein, 41 aa, Homo sapiens
  MAP TO CHR19.1; EXPRESSED IN HEART, SIGNAL = 1.9; EXPRESSED IN BONE MARROW, SIGNAL = 1.2; EXPRESSED IN PLACENTA, SIGNAL = 1.6; EXPRESSED IN LUNG, SIGNAL = 2.1; EXPRESSED IN HELA, SIGNAL = 1.6; EXPRESSED IN BRAIN, SIGNAL = 1.5
THLIGLADGPQWDPHSAHHCVPDETLIPHLHRQSQIQTVNL

SEQ ID NO: 29784 - protein, 51 aa, Homo sapiens
  MAP TO CHR9.1; EXPRESSED IN BRAIN, SIGNAL = 3.2; EXPRESSED IN HELA, SIGNAL = 2.6; EXPRESSED IN BONE MARROW, SIGNAL = 3.1; EXPRESSED IN HEART, SIGNAL = 3.1; EXPRESSED IN ADULT LIVER, SIGNAL = 3.3; EXPRESSED IN PLACENTA, SIGNAL = 2.6; EXPRESSED IN LUNG, SIGNAL = 3.8; SWISSPROT HIT: Q92574, EVALUE 5.00e-13
LQMDTDVVVLTTGVLVLITMLPMIPQSGKQHLLDFFDIFGRLSSWCLKKPG

SEQ ID NO: 29785 - protein, 58 aa, Homo sapiens
  MAP TO CHR5.1; EXPRESSED IN ADULT LIVER, SIGNAL = 0.96; EXPRESSED IN BONE MARROW, SIGNAL = 0.96; EXPRESSED IN PLACENTA, SIGNAL = 1.7; EXPRESSED IN FETAL LIVER, SIGNAL = 0.92; EXPRESSED IN HELA, SIGNAL = 0.95; EXPRESSED IN LUNG, SIGNAL = 1.2; EXPRESSED IN BRAIN, SIGNAL = 1.1; SWISSPROT HIT: O83401, EVALUE 7.20e-01
QTYSHEVSLTADSRKSHLIFPQPNYADTLISQESCEKKGFLSAPQSLLEDKKEPFSQV

SEQ ID NO: 29786 - protein, 150 aa, Homo sapiens
  MAP TO CHR6.1; EXPRESSED IN HELA, SIGNAL = 4.1; EXPRESSED IN BRAIN, SIGNAL = 1.1; EXPRESSED IN ADULT LIVER, SIGNAL = 2.9; EXPRESSED IN PLACENTA, SIGNAL = 3.5; EXPRESSED IN FETAL LIVER, SIGNAL = 4.9; SWISSPROT HIT: P43277, EVALUE 7.00e-32
KASGPPVSELITKAVAASKERSGVSLAALKKALAAAGYDVEKNNSRIKLGLKSLVSKGTLVQTKGTGASGSFKLNKKAASGEAKPKVKKAGGTKPKKPVGAAKKPKKAAGGATPKKSAKKTPKKAKKPAAATVTKKVAKSPKKAKVAKPK

SEQ ID NO: 29787 - protein, 55 aa, Homo sapiens
  MAP TO CHR19.1; EXPRESSED IN FETAL LIVER, SIGNAL = 7.6; EXPRESSED IN LUNG, SIGNAL = 9.1; EXPRESSED IN HELA, SIGNAL = 8.4; EXPRESSED IN BONE MARROW, SIGNAL = 7.8; EXPRESSED IN ADULT LIVER, SIGNAL = 5.6; EXPRESSED IN PLACENTA, SIGNAL = 7.5; EXPRESSED IN BRAIN, SIGNAL = 7.8; EXPRESSED IN HEART, SIGNAL = 7.2; SWISSPROT HIT: P25123, EVALUE 9.50e-01
DRQRVLGGRGPPDMHGPSPRGGAPGKKRQTQWRLNAPHPERRSWAGLLSSSRFQG

SEQ ID NO: 29788 - protein, 59 aa, Homo sapiens
  MAP TO CHR22.1; EXPRESSED IN HELA, SIGNAL = 5.6; EXPRESSED IN BRAIN, SIGNAL = 5.1; EXPRESSED IN BONE MARROW, SIGNAL = 6.4; EXPRESSED IN HEART, SIGNAL = 6.1; EXPRESSED IN ADULT LIVER, SIGNAL = 4.1; EXPRESSED IN LUNG, SIGNAL = 9.5; EXPRESSED IN FETAL LIVER, SIGNAL = 5.3; EXPRESSED IN PLACENTA, SIGNAL = 6.1; SWISSPROT HIT: P52926, EVALUE 1.20e+00
GSPVCSRHGSPRGSSPAAHLRCRSVPRTRPQSRSWQPGPQAHPGSPDSHTVWQSHSHTW

SEQ ID NO: 29789 - protein, 36 aa, Homo sapiens
  MAP TO CHR6.1; EXPRESSED IN LUNG, SIGNAL =   2; EXPRESSED IN BRAIN, SIGNAL = 1.1; EXPRESSED IN HELA, SIGNAL = 1.2; EXPRESSED IN BONE MARROW, SIGNAL = 1.1; EXPRESSED IN HEART, SIGNAL = 1.5; EXPRESSED IN ADULT LIVER, SIGNAL = 1.3
DSISATPFKDNNGVAIFLNASVTIQYILLTAPKCQH

SEQ ID NO: 29790 - protein, 46 aa, Homo sapiens
  MAP TO CHR18.1; EXPRESSED IN FETAL LIVER, SIGNAL = 0.66; EXPRESSED IN LUNG, SIGNAL = 1.3; EXPRESSED IN HELA, SIGNAL = 0.57; EXPRESSED IN BRAIN, SIGNAL = 0.7; EXPRESSED IN ADULT LIVER, SIGNAL = 0.57; SWISSPROT HIT: O08912, EVALUE 1.00e-22
QVFSYTANKEIRTDDLCLDVSKLNGPVTMLKCHHLKGNQLWEYDPV

SEQ ID NO: 29791 - protein, 60 aa, Homo sapiens
  MAP TO AL390762.3; EXPRESSED IN FETAL LIVER, SIGNAL = 0.69; EXPRESSED IN BRAIN, SIGNAL = 0.67; EXPRESSED IN BONE MARROW, SIGNAL = 0.76
LSLLSSFPLLFYYNKTLLWQASSQEKQLAPYRVFHTPPDISALSTVLLLLYAHHLDSVKM

SEQ ID NO: 29792 - protein, 65 aa, Homo sapiens
  MAP TO CHR22.1; EXPRESSED IN BONE MARROW, SIGNAL = 4.8; EXPRESSED IN HEART, SIGNAL = 5.9; EXPRESSED IN ADULT LIVER, SIGNAL = 3.1; EXPRESSED IN PLACENTA, SIGNAL = 3.9; EXPRESSED IN FETAL LIVER, SIGNAL =   5; EXPRESSED IN LUNG, SIGNAL =   6; EXPRESSED IN BRAIN, SIGNAL = 4.4; SWISSPROT HIT: Q9Z0H3, EVALUE 5.00e-32
QLNIHVGNISLVDQFEWDMSEKENSPEKFALKLCSELGLGGEFVTTIAYSIRGQLSWHQKTYAFR

SEQ ID NO: 29793 - protein, 49 aa, Homo sapiens
  MAP TO CHR7.1; EXPRESSED IN LUNG, SIGNAL = 0.64; EXPRESSED IN HELA, SIGNAL = 0.45; EXPRESSED IN BRAIN, SIGNAL = 0.69; EXPRESSED IN FETAL LIVER, SIGNAL = 0.71
YFAVSVVMVAIYVGIKKVMNISLKWKITCNQENCFCITSFIFMFTYPRL

SEQ ID NO: 29794 - protein, 69 aa, Homo sapiens
  MAP TO CHR19.1; EXPRESSED IN FETAL LIVER, SIGNAL = 0.97; EXPRESSED IN HELA, SIGNAL = 1.3; EXPRESSED IN LUNG, SIGNAL = 0.7; EXPRESSED IN BRAIN, SIGNAL = 0.96; EXPRESSED IN BONE MARROW, SIGNAL = 0.96; EXPRESSED IN HEART, SIGNAL = 0.85; SWISSPROT HIT: P32927, EVALUE 1.40e+00
PASAQHRCDAQQGDGVPADSDLWTQKLPHAQVGAPEAVVPSIHERQPLPSAPGPAPGPCGAGHVWPAAH

SEQ ID NO: 29795 - protein, 70 aa, Homo sapiens
  MAP TO CHR9.1; EXPRESSED IN LUNG, SIGNAL = 1.2; EXPRESSED IN FETAL LIVER, SIGNAL = 0.49; EXPRESSED IN BRAIN, SIGNAL = 0.61; EXPRESSED IN HEART, SIGNAL = 0.89; EXPRESSED IN BONE MARROW, SIGNAL = 0.59; SWISSPROT HIT: P48634, EVALUE 9.10e-01
PASPVARRSSEPQLCPGSAPKTHGESDKGPHTSPSHTLGKASPSPSLSSYSDPDSGHYCQLQPPVRGSRE

SEQ ID NO: 29796 - protein, 42 aa, Homo sapiens
  MAP TO CHRX.1; EXPRESSED IN BONE MARROW, SIGNAL = 0.51; EXPRESSED IN FETAL LIVER, SIGNAL = 0.49; EXPRESSED IN BRAIN, SIGNAL = 0.53; SWISSPROT HIT: P07620, EVALUE 6.40e+00
PHLPLFTLSLACPSLLVPHPPLTVPYHTSHLYLAHSCRMEIF

SEQ ID NO: 29797 - protein, 57 aa, Homo sapiens
  MAP TO CHRX.1; EXPRESSED IN HELA, SIGNAL = 0.6; EXPRESSED IN BRAIN, SIGNAL = 0.66; EXPRESSED IN HEART, SIGNAL = 0.6; SWISSPROT HIT: Q01968, EVALUE 4.00e-25
FARLPREKEASNKEQPKVTNTMRKLFVPNTQSGQREGLIKHILAKREKEYVNIQTFR

SEQ ID NO: 29798 - protein, 61 aa, Homo sapiens
  MAP TO CHR11.1; EXPRESSED IN HELA, SIGNAL = 1.1; EXPRESSED IN BRAIN, SIGNAL = 0.97; EXPRESSED IN LUNG, SIGNAL = 0.88; EXPRESSED IN BONE MARROW, SIGNAL = 1.1; SWISSPROT HIT: Q03164, EVALUE 4.00e-30
GVNGLRMLGILHDAVVFLIEQLSGAKHCRNYKFRFHKPEEANEPPLNPHGSARAEVHLRQV

SEQ ID NO: 29799 - protein, 50 aa, Homo sapiens
  MAP TO CHR3.1; EXPRESSED IN LUNG, SIGNAL = 0.68; EXPRESSED IN FETAL LIVER, SIGNAL = 0.52; EXPRESSED IN HELA, SIGNAL = 0.66; EXPRESSED IN BRAIN, SIGNAL = 0.72; EXPRESSED IN HEART, SIGNAL = 0.56; EXPRESSED IN BONE MARROW, SIGNAL = 0.56; SWISSPROT HIT: P51178, EVALUE 5.00e-05
QALLKGSQLLKVKSSSWRRERSTSCRRTARPSGRSPARSCGPRSPSCVSA

SEQ ID NO: 29800 - protein, 48 aa, Homo sapiens
  MAP TO CHR19.1; EXPRESSED IN PLACENTA, SIGNAL = 1.3; EXPRESSED IN HELA, SIGNAL = 0.97; EXPRESSED IN BRAIN, SIGNAL = 1.1; EXPRESSED IN BONE MARROW, SIGNAL =   1; EXPRESSED IN HEART, SIGNAL = 1.3
HGDHLSVELRLVQVVNAFCGLFCCGHRDKTVTASSRTPGICHNLGAHH

SEQ ID NO: 29801 - protein, 55 aa, Homo sapiens
  MAP TO CHR16.1; EXPRESSED IN ADULT LIVER, SIGNAL = 0.82; EXPRESSED IN LUNG, SIGNAL = 0.77; EXPRESSED IN BRAIN, SIGNAL = 0.53; EXPRESSED IN HEART, SIGNAL = 0.6; SWISSPROT HIT: P49874, EVALUE 1.60e+00
YPCQGEQSTLASQIHVSPSTWLPVHPAGRREERCVTAYRSGSPSGEPSDHTSKLE

SEQ ID NO: 29802 - protein, 87 aa, Homo sapiens
  MAP TO CHR8.1; EXPRESSED IN BONE MARROW, SIGNAL = 0.98; EXPRESSED IN FETAL LIVER, SIGNAL = 0.97; EXPRESSED IN LUNG, SIGNAL = 0.58; EXPRESSED IN HELA, SIGNAL = 1.9; EXPRESSED IN BRAIN, SIGNAL = 0.95; EXPRESSED IN HEART, SIGNAL = 0.78; SWISSPROT HIT: P33991, EVALUE 4.00e-44
GIYRAVPIRVNPRVSNVKSVYKTHIDVIHYRKTDAKRLHGLDEEAEQKLFSEKRVELLKELSRKPDIYERLASALAPSIYEHEDIKK

SEQ ID NO: 29803 - protein, 67 aa, Homo sapiens
  MAP TO CHR22.1; EXPRESSED IN BRAIN, SIGNAL = 0.92; EXPRESSED IN BONE MARROW, SIGNAL = 0.7; EXPRESSED IN HEART, SIGNAL = 1.5; EXPRESSED IN FETAL LIVER, SIGNAL = 1.6; EXPRESSED IN LUNG, SIGNAL =   2; SWISSPROT HIT: P16818, EVALUE 4.60e+00
GQEAATGSGLFCLGRVVLRVVGATLSGAERGPEGQLRPMAGEAGGCSPWNAVKPGRGPEAAVVGQGR

SEQ ID NO: 29804 - protein, 60 aa, Homo sapiens
  MAP TO CHR19.1; EXPRESSED IN FETAL LIVER, SIGNAL = 1.1; EXPRESSED IN LUNG, SIGNAL = 1.2; EXPRESSED IN BRAIN, SIGNAL = 0.67; EXPRESSED IN BONE MARROW, SIGNAL = 1.1
SPFNLFRLTVLQKFLHLLPAALLVFWVLCKVVQDPGETTGRGVMAWGAARQAWVSGLLQH

SEQ ID NO: 29805 - protein, 85 aa, Homo sapiens
  MAP TO CHR6.1; EXPRESSED IN BRAIN, SIGNAL = 0.99; EXPRESSED IN FETAL LIVER, SIGNAL = 0.81; SWISSPROT HIT: P22144, EVALUE 4.80e+00
QPPVSGMQLFLRYMSKAFSNPGRVAGRQPTAHRVGTGQRFCSGLKTRLEDVSLCPDQPCCPSNSYARHPSGQVQPHPLGTSCLQP

SEQ ID NO: 29806 - protein, 52 aa, Homo sapiens
  MAP TO CHR4.1; EXPRESSED IN HELA, SIGNAL = 1.5; EXPRESSED IN BRAIN, SIGNAL = 0.87; EXPRESSED IN HEART, SIGNAL = 0.6; SWISSPROT HIT: Q55058, EVALUE 1.60e+00
FSLAAFCSYGCLSLADCSDHISPNFFAVSPMDRPGCSLLIFGRCSEQNRKKA

SEQ ID NO: 29807 - protein, 57 aa, Homo sapiens
  MAP TO CHR5.1; EXPRESSED IN FETAL LIVER, SIGNAL = 0.91; EXPRESSED IN HELA, SIGNAL = 0.81; EXPRESSED IN BRAIN, SIGNAL = 1.3; EXPRESSED IN BONE MARROW, SIGNAL = 0.91; SWISSPROT HIT: P39693, EVALUE 6.10e+00
QVSQDIWDAVGHSHSECDGGRERGLAMVLDDHYKPLLERVSVQQGPCGAHLACVQPH

SEQ ID NO: 29808 - protein, 67 aa, Homo sapiens
  MAP TO CHR11.1; EXPRESSED IN BRAIN, SIGNAL = 0.56; EXPRESSED IN LUNG, SIGNAL = 0.75
HKPVWHVCFIIIELFIPGFSLKKIIFQCPRNFILWPPIVSLTFFIKTITAHPAKRESRRTFRCKSNL

SEQ ID NO: 29809 - protein, 51 aa, Homo sapiens
  MAP TO CHR4.1; EXPRESSED IN ADULT LIVER, SIGNAL = 0.8; EXPRESSED IN HELA, SIGNAL = 0.76; EXPRESSED IN BRAIN, SIGNAL = 0.64
FHTCCSRANLFIIFSSGLMLLLYSPKRLSLNTLDLSLSLYSFSKVCVRWKT

SEQ ID NO: 29810 - protein, 109 aa, Homo sapiens
  MAP TO CHR2.1; EXPRESSED IN HEART, SIGNAL = 1.3; EXPRESSED IN BONE MARROW, SIGNAL = 0.56; EXPRESSED IN FETAL LIVER, SIGNAL = 0.6; EXPRESSED IN BRAIN, SIGNAL = 0.51
PCTFTLISAFAEPDAFLASTVYTPRWSRVASLTNRLVDPSTSVISIFILFSISTPSLNQVTRGTGLPCTKALILRLSPDLIMRPSKYSGPNSTIGGTIKEREILCISLA

SEQ ID NO: 29811 - protein, 63 aa, Homo sapiens
  MAP TO CHR17.1; EXPRESSED IN FETAL LIVER, SIGNAL = 1.1; EXPRESSED IN LUNG, SIGNAL = 0.75; EXPRESSED IN BRAIN, SIGNAL = 1.1; EXPRESSED IN BONE MARROW, SIGNAL = 1.2; EXPRESSED IN HEART, SIGNAL = 0.75; EXPRESSED IN ADULT LIVER, SIGNAL = 1.5; SWISSPROT HIT: P04637, EVALUE 2.00e-33
QYSPALNKMFCQLAKTCPVQLWVDSTPPPGTRVRAMAIYKQSQHMTEVVRRCPHHERCSDSDG

SEQ ID NO: 29812 - protein, 92 aa, Homo sapiens
  MAP TO CHR9.1; EXPRESSED IN HELA, SIGNAL = 0.5; EXPRESSED IN BRAIN, SIGNAL = 0.48; EXPRESSED IN ADULT LIVER, SIGNAL = 0.4
EDVRDVVAADHHAGQAHAEGPEHQQHAQGHRQHQVAEEELGHHGGAAGVPGREGVDVHGEVVQEAGAHLVRAAPLDELLHAGHRHDVQEQGC

SEQ ID NO: 29813 - protein, 60 aa, Homo sapiens
  MAP TO CHR5.1; EXPRESSED IN BRAIN, SIGNAL = 1.2; EXPRESSED IN HEART, SIGNAL = 0.83; SWISSPROT HIT: Q62188, EVALUE 8.00e-16
LLGNVVFGEPITASLGIDGTHYWSKNWAKAAAFVTSPPLSPDPTTPDYINSLLARLVQEC

SEQ ID NO: 29814 - protein, 79 aa, Homo sapiens
  MAP TO CHR14.1; EXPRESSED IN BRAIN, SIGNAL = 0.71; EXPRESSED IN LUNG, SIGNAL = 6.6; EXPRESSED IN HEART, SIGNAL = 0.61; EXPRESSED IN ADULT LIVER, SIGNAL = 0.95; SWISSPROT HIT: P23083, EVALUE 6.00e-25
VQSGHEVKQPGASVKVSCKASGYSFTTYGMNWVPQAPGQGLEWMGWFNTYTGNPTYAQGFTGRFVFSMDTSASTAYLQI

SEQ ID NO: 29815 - protein, 46 aa, Homo sapiens
  MAP TO CHR12.1; EXPRESSED IN BRAIN, SIGNAL = 0.51; EXPRESSED IN HEART, SIGNAL = 0.51; EXPRESSED IN BONE MARROW, SIGNAL = 0.56
IFTSSCTLSWERVFLMRRAVRRAAPLAYQHSRIIFPITRSACAETQ

SEQ ID NO: 29816 - protein, 89 aa, Homo sapiens
  MAP TO CHR13.1; EXPRESSED IN FETAL LIVER, SIGNAL = 0.44; EXPRESSED IN HELA, SIGNAL = 0.43; EXPRESSED IN BRAIN, SIGNAL = 0.44; EXPRESSED IN BONE MARROW, SIGNAL = 0.45
LFRGKPAIPHNTPQRAPDHAYLPAALAAQHRAGGQQAPPPGSSPSSPEDEVKDREGDVTASHGLRGNGWGSPEATSLVLNNLMYMTAKV

SEQ ID NO: 29817 - protein, 120 aa, Homo sapiens
  MAP TO CHR19.1; EXPRESSED IN LUNG, SIGNAL = 1.4; EXPRESSED IN HELA, SIGNAL = 1.9; EXPRESSED IN BRAIN, SIGNAL = 1.5; EXPRESSED IN HEART, SIGNAL = 1.4; EXPRESSED IN ADULT LIVER, SIGNAL = 1.4; EXPRESSED IN BONE MARROW, SIGNAL = 1.4; EXPRESSED IN PLACENTA, SIGNAL = 1.4
RRPAGTSPPGPAAPHPPGRSPHRSRTGWSSGRSAASEMASCSLGWPAGGSPRPWPSQCTPPASGWPGPGRPASGRGAFSGRAASAPGGTPPRAPRGSPCSVEEAWSPRRPAGWIFGQDSL

SEQ ID NO: 29818 - protein, 76 aa, Homo sapiens
  MAP TO CHRX.1; EXPRESSED IN HELA, SIGNAL =   1; EXPRESSED IN BRAIN, SIGNAL = 0.75; EXPRESSED IN ADULT LIVER, SIGNAL = 0.88; EXPRESSED IN LUNG, SIGNAL = 1.2; SWISSPROT HIT: Q93008, EVALUE 5.00e-40
GNPPLPNPFGDPNLSQPIMPIQQNVADILFVRTSYVKKIIEDCSNSEETVKLLRFCCWENPQFSSTVLSELLWQVK

SEQ ID NO: 29819 - protein, 58 aa, Homo sapiens
  MAP TO CHR17.1; EXPRESSED IN ADULT LIVER, SIGNAL = 0.59; EXPRESSED IN FETAL LIVER, SIGNAL = 0.91; EXPRESSED IN HELA, SIGNAL = 0.87; EXPRESSED IN BRAIN, SIGNAL = 0.91; EXPRESSED IN BONE MARROW, SIGNAL = 0.9; EXPRESSED IN HEART, SIGNAL = 0.58; SWISSPROT HIT: P13588, EVALUE 4.70e+00
RSHQSTTFKFLFSSGGQSFWFSQLIIPNTDHPTFAFLLTVSMRCPSIGSKAPTWRGHL

SEQ ID NO: 29820 - protein, 57 aa, Homo sapiens
  MAP TO CHR22.1; EXPRESSED IN LUNG, SIGNAL = 0.57; EXPRESSED IN BRAIN, SIGNAL = 0.4; SWISSPROT HIT: Q62421, EVALUE 1.20e+00
GSQGPGQGTWWLLCQTEEEWRQVTESFRERTSLRERQLYKLLSEDFLPEICNMIAQK

SEQ ID NO: 29821 - protein, 99 aa, Homo sapiens
  MAP TO CHR5.1; EXPRESSED IN ADULT LIVER, SIGNAL = 0.46; EXPRESSED IN FETAL LIVER, SIGNAL = 1.1; EXPRESSED IN LUNG, SIGNAL =   1; EXPRESSED IN HELA, SIGNAL = 0.94; EXPRESSED IN BRAIN, SIGNAL = 1.1; EXPRESSED IN BONE MARROW, SIGNAL = 0.99; EXPRESSED IN HEART, SIGNAL =   1; SWISSPROT HIT: Q9Y5I1, EVALUE 5.00e-51
QLHYSVSEEAKHGTFVGRIAQDLGLELAELVQRLFRVASKTHGDLLEVNLQNGILFVNSRIDREELCGQSAECSIHLEVIVDRPLQVFHVNVEVKDIND

SEQ ID NO: 29822 - protein, 24 aa, Homo sapiens
  MAP TO CHR19.1; EXPRESSED IN BRAIN, SIGNAL = 0.94; EXPRESSED IN HELA, SIGNAL = 1.3; EXPRESSED IN HEART, SIGNAL = 0.82; EXPRESSED IN ADULT LIVER, SIGNAL = 0.8
VKNDSGFFSISSVSTFTSTMGLRF

SEQ ID NO: 29823 - protein, 65 aa, Homo sapiens
  MAP TO CHR22.1; EXPRESSED IN BONE MARROW, SIGNAL = 0.35; EXPRESSED IN BRAIN, SIGNAL = 0.34
EQRQLPLLGAMGWLISVKGHTFDLEVTVSCHVVDGLQVEAVGELEFVSIWQLDGQVGLVEGDAHL

SEQ ID NO: 29824 - protein, 57 aa, Homo sapiens
  MAP TO CHR17.1; EXPRESSED IN BONE MARROW, SIGNAL = 0.49; EXPRESSED IN BRAIN, SIGNAL = 0.48; SWISSPROT HIT: P36629, EVALUE 8.00e+00
YLLQIGVSIRVSVGKDSSVFLATRILQLQDLLTVLIIQRTLTGCFILVQIYFKLRLP

SEQ ID NO: 29825 - protein, 70 aa, Homo sapiens
  MAP TO CHR6.1; EXPRESSED IN FETAL LIVER, SIGNAL = 1.1; EXPRESSED IN HELA, SIGNAL = 1.3; EXPRESSED IN LUNG, SIGNAL = 0.79; EXPRESSED IN BRAIN, SIGNAL = 1.3; EXPRESSED IN HEART, SIGNAL = 0.73; EXPRESSED IN BONE MARROW, SIGNAL = 1.4; SWISSPROT HIT: P15265, EVALUE 8.90e+00
CQALAYMMSEALCPVPLSMPCPRLPNGCFLEMVWCPCTFFSAVGARVRSCLQQLDSRVSEEPLELALSLA

SEQ ID NO: 29826 - protein, 116 aa, Homo sapiens
  MAP TO AL353601.7; EXPRESSED IN BRAIN, SIGNAL = 0.49; EXPRESSED IN HEART, SIGNAL = 0.47; EXPRESSED IN ADULT LIVER, SIGNAL = 0.39; SWISSPROT HIT: P30825, EVALUE 9.00e-52
QQMLRRKVVDCSREETRLSRCLNTFDLVALGVGSTLGAGVYVLAGAVARENAGPAIVISFLIAALASVLAGLCYGEFGARVPKTGSAYLYSYVTVGELWAFITGWNLILSYIIGRS

SEQ ID NO: 29827 - protein, 60 aa, Homo sapiens
  MAP TO CHR19.1; EXPRESSED IN ADULT LIVER, SIGNAL = 4.8; EXPRESSED IN PLACENTA, SIGNAL =   3; EXPRESSED IN LUNG, SIGNAL = 1.5; EXPRESSED IN HELA, SIGNAL = 3.4; EXPRESSED IN BRAIN, SIGNAL = 2.4; EXPRESSED IN HEART, SIGNAL = 2.1; EXPRESSED IN BONE MARROW, SIGNAL = 1.9; SWISSPROT HIT: Q10549, EVALUE 8.00e+00
WLGLDAISAAEQGSLAGSNFLIRTPSLLARCFSALTPLLRNRTPQASPQTTHTHREPHVY

SEQ ID NO: 29828 - protein, 67 aa, Homo sapiens
  MAP TO CHR5.1; EXPRESSED IN BRAIN, SIGNAL = 0.54; EXPRESSED IN HEART, SIGNAL = 0.65; EXPRESSED IN BONE MARROW, SIGNAL = 0.39; EXPRESSED IN FETAL LIVER, SIGNAL = 0.49; SWISSPROT HIT: Q9H158, EVALUE 1.00e-23
TSATIDVTTVERLSQTYLYRASLGLGSDNNSLLLRGEYNAADLRNLATGVGLNLPISCIQIRNRKGD

SEQ ID NO: 29829 - protein, 78 aa, Homo sapiens
  MAP TO CHR22.1; EXPRESSED IN LUNG, SIGNAL = 0.99; EXPRESSED IN BRAIN, SIGNAL = 0.8; EXPRESSED IN HEART, SIGNAL = 0.95; SWISSPROT HIT: O51741, EVALUE 1.00e-04
DLAGIYSEGKGHAGIYSEGRDLAGIYSKGRDLAGIYSEWRDLAGIYSEWRDLAGIYSEGKGHTGIYSKGRDLTGIYSD

SEQ ID NO: 29830 - protein, 76 aa, Homo sapiens
  MAP TO CHR11.1; EXPRESSED IN LUNG, SIGNAL = 1.5; EXPRESSED IN HELA, SIGNAL = 1.4; EXPRESSED IN BRAIN, SIGNAL = 1.7; EXPRESSED IN ADULT LIVER, SIGNAL = 1.8; EXPRESSED IN FETAL LIVER, SIGNAL = 1.6; SWISSPROT HIT: P54891, EVALUE 1.30e+00
QETGEGEVTCSKRQTQVWVNLEENLGILAPWIPEKSVCPRQCGFLLHKQLFYYSHSLAPARLLQHLPLENTVEEKG

SEQ ID NO: 29831 - protein, 49 aa, Homo sapiens
  MAP TO CHR17.1; EXPRESSED IN BRAIN, SIGNAL = 0.53; EXPRESSED IN HEART, SIGNAL = 0.58; EXPRESSED IN BONE MARROW, SIGNAL = 0.44; SWISSPROT HIT: Q92764, EVALUE 1.00e-10
SLRQLVESDINGLRRILDDLTLCKSDLEAQVESLKEELLCLKKNHEEVS

SEQ ID NO: 29832 - protein, 71 aa, Homo sapiens
  MAP TO CHR19.1; EXPRESSED IN FETAL LIVER, SIGNAL = 0.86; EXPRESSED IN HELA, SIGNAL = 0.69; EXPRESSED IN BRAIN, SIGNAL = 0.85; EXPRESSED IN LUNG, SIGNAL = 0.97; EXPRESSED IN ADULT LIVER, SIGNAL = 1.1; SWISSPROT HIT: P17105, EVALUE 1.00e-27
VLRTYLEEELVKARERPRPRKDMYEKMVAVDPGAPTPEEHAQGAVTKPRYMQWRETMSSTSTLGFRIEGIK

SEQ ID NO: 29833 - protein, 61 aa, Homo sapiens
  MAP TO CHR1.1; EXPRESSED IN FETAL LIVER, SIGNAL = 1.7; EXPRESSED IN LUNG, SIGNAL = 2.3; EXPRESSED IN HELA, SIGNAL = 1.5; EXPRESSED IN BRAIN, SIGNAL = 1.6; EXPRESSED IN BONE MARROW, SIGNAL = 1.7; EXPRESSED IN ADULT LIVER, SIGNAL = 1.5; SWISSPROT HIT: O14896, EVALUE 2.00e-30
IMALHPRRVRLKPWLVAQVDSGLYPGLIWLHRDSKRFQIPWKHATRHSPQQEEENTIFKVK

SEQ ID NO: 29834 - protein, 81 aa, Homo sapiens
  MAP TO CHR10.1; EXPRESSED IN BONE MARROW, SIGNAL = 0.67; EXPRESSED IN LUNG, SIGNAL = 0.78; EXPRESSED IN BRAIN, SIGNAL = 0.49; SWISSPROT HIT: P09914, EVALUE 2.00e-46
LVTWGNFAWMYYHMGRLAEAQTYLDKVENICKKLSNPFRYRMECPEIDCEEGWALLKCGGKNYERAKACFEKVLEVDPENP

SEQ ID NO: 29835 - protein, 80 aa, Homo sapiens
  MAP TO CHR17.1; EXPRESSED IN FETAL LIVER, SIGNAL = 0.64; EXPRESSED IN HELA, SIGNAL = 0.69; EXPRESSED IN BRAIN, SIGNAL = 0.69; EXPRESSED IN HEART, SIGNAL = 0.49; EXPRESSED IN ADULT LIVER, SIGNAL = 0.6
TSGRREDAGAVHAQVDAAVFQQLLLRHAVQQGAVQAAADQAVGVLAEARVQAAQPVRQVAAVARRIVGEGLELRELPKEP

SEQ ID NO: 29836 - protein, 94 aa, Homo sapiens
  MAP TO CHR3.1; EXPRESSED IN FETAL LIVER, SIGNAL = 0.73; EXPRESSED IN LUNG, SIGNAL = 0.89; EXPRESSED IN BRAIN, SIGNAL = 0.58; EXPRESSED IN HEART, SIGNAL = 0.98; SWISSPROT HIT: Q66802, EVALUE 4.70e+00
NHCHLPMTRLNHVSLQLGRAGWASSNFHICTGRSLIGLMAFACLHTLGPVLQESRNPTGPGRKLFPQQQGPPAWGASPPHKIYEKSLSSWPPGQ

SEQ ID NO: 29837 - protein, 55 aa, Homo sapiens
  MAP TO CHR19.1; EXPRESSED IN ADULT LIVER, SIGNAL = 3.2; EXPRESSED IN HEART, SIGNAL = 1.9; EXPRESSED IN HELA, SIGNAL = 2.3; EXPRESSED IN BRAIN, SIGNAL = 1.1; SWISSPROT HIT: P31751, EVALUE 5.00e-19
REEWMRAIQMVANSLKQRAPGEDPMDYKCGSPSDSSTTEEMEVAVSKARAKVVSA

SEQ ID NO: 29838 - protein, 58 aa, Homo sapiens
  MAP TO CHR16.1; EXPRESSED IN BRAIN, SIGNAL = 0.82; EXPRESSED IN FETAL LIVER, SIGNAL = 0.62
QVHSCDCIHLVLFLTCREPQWVYPPHFTCPLLIPRLSPTLHLRHDVVNIFVSLISASL

SEQ ID NO: 29839 - protein, 40 aa, Homo sapiens
  MAP TO CHR7.1; EXPRESSED IN FETAL LIVER, SIGNAL = 0.31; EXPRESSED IN BRAIN, SIGNAL = 0.42; SWISSPROT HIT: P27039, EVALUE 1.70e+00
LTVVGLHVTIPGVHGKHRPAVRHRGLRHVWQGPMDLFLDQ

SEQ ID NO: 29840 - protein, 73 aa, Homo sapiens
  MAP TO CHR12.1; EXPRESSED IN HEART, SIGNAL = 1.2; EXPRESSED IN ADULT LIVER, SIGNAL = 1.7; EXPRESSED IN HELA, SIGNAL =   2; EXPRESSED IN BRAIN, SIGNAL = 1.5; SWISSPROT HIT: Q9VPY8, EVALUE 6.00e-19
ESAPRIMRLVAECSRSRARAGELWLPHGTVATPVFMPVGTQATMKGITTEQLDALGCRICLGNTYHLGLRPVG

SEQ ID NO: 29841 - protein, 55 aa, Homo sapiens
  MAP TO CHR5.1; EXPRESSED IN BRAIN, SIGNAL = 0.54; EXPRESSED IN FETAL LIVER, SIGNAL = 0.32; SWISSPROT HIT: Q9Y5I2, EVALUE 3.00e-24
VGLYTGEISTTRALDETDSPRQRLLVLVKDHGEPSLTATATVLVSLVEGSQAPKA

SEQ ID NO: 29842 - protein, 152 aa, Homo sapiens
  MAP TO CHR19.1; EXPRESSED IN BONE MARROW, SIGNAL = 4.7; EXPRESSED IN ADULT LIVER, SIGNAL = 4.2; EXPRESSED IN PLACENTA, SIGNAL = 5.4; EXPRESSED IN FETAL LIVER, SIGNAL = 4.2; EXPRESSED IN LUNG, SIGNAL = 4.5; EXPRESSED IN HELA, SIGNAL = 6.3; EXPRESSED IN BRAIN, SIGNAL = 4.9; SWISSPROT HIT: Q9ULX6, EVALUE 2.00e-71
YDSYESCDSRAVLSERDLYRSGYDYSELDPEMEMAYEGQYDAYRDQFRMRGNDTFGPRAQGWARDARSGRPMASGYGRMWEDPMGARGQCMSGASRLPSLFSQNIIPEYGMFQGMRGGGAFPGGSRFGFGFGNGMKQMRRTWKTWTTADFRV

SEQ ID NO: 29843 - protein, 69 aa, Homo sapiens
  MAP TO CHR5.1; EXPRESSED IN BONE MARROW, SIGNAL = 1.2; EXPRESSED IN HEART, SIGNAL = 1.7; EXPRESSED IN ADULT LIVER, SIGNAL = 0.87; EXPRESSED IN LUNG, SIGNAL = 1.8; EXPRESSED IN HELA, SIGNAL = 1.2; EXPRESSED IN BRAIN, SIGNAL = 1.1; SWISSPROT HIT: Q9UKP4, EVALUE 1.00e-03
KLIICTFFSRLDSEARDCNGPRKQYRICENPPCPAGLPGFRDWQCQAYSVRTSSPKHILQWQAVLDEGM

SEQ ID NO: 29844 - protein, 48 aa, Homo sapiens
  MAP TO CHR19.1; EXPRESSED IN LUNG, SIGNAL = 1.1; EXPRESSED IN BRAIN, SIGNAL = 0.49; EXPRESSED IN BONE MARROW, SIGNAL = 0.56; EXPRESSED IN ADULT LIVER, SIGNAL = 0.46; SWISSPROT HIT: Q14584, EVALUE 1.00e-22
HERVHTGEKPYKCKQCGKAFSYSTSLQIHERTHTGEKPYECKECGKAF

SEQ ID NO: 29845 - protein, 70 aa, Homo sapiens
  MAP TO CHR11.1; EXPRESSED IN BRAIN, SIGNAL = 0.52; EXPRESSED IN HEART, SIGNAL = 0.45; SWISSPROT HIT: Q15620, EVALUE 7.00e-27
IHSTEGRSKAFSTCSSHILAVAVFFGSAAFMYLQPSSVSSMDQRKVSSVFYTTIVPMLNPLIYSLRNKDV

SEQ ID NO: 29846 - protein, 72 aa, Homo sapiens
  MAP TO CHR3.1; EXPRESSED IN ADULT LIVER, SIGNAL = 0.41; EXPRESSED IN FETAL LIVER, SIGNAL = 0.6; EXPRESSED IN BRAIN, SIGNAL = 0.63; SWISSPROT HIT: Q05086, EVALUE 2.00e-37
IGMFTYDESTKLFWFNPSSFETEGQFTLIGIVLGLAIYNNCILDVHFPMVVYRKLMGKKGTFRDLGDSHPVS

SEQ ID NO: 29847 - protein, 73 aa, Homo sapiens
  MAP TO CHR17.1; EXPRESSED IN LUNG, SIGNAL = 0.82; EXPRESSED IN HELA, SIGNAL = 0.48; EXPRESSED IN BRAIN, SIGNAL = 0.69; EXPRESSED IN HEART, SIGNAL = 0.78; SWISSPROT HIT: P34703, EVALUE 3.00e-25
SSSTDSYIEVLDGSRVHPETYEWARKMAVDALEYDESAEDANPAGALEEILENPERLKDLDLDAFAEELERQV

SEQ ID NO: 29848 - protein, 44 aa, Homo sapiens
  MAP TO CHR19.1; EXPRESSED IN ADULT LIVER, SIGNAL =   8; EXPRESSED IN PLACENTA, SIGNAL =  12; EXPRESSED IN FETAL LIVER, SIGNAL = 9.5; EXPRESSED IN HELA, SIGNAL = 8.6; EXPRESSED IN HEART, SIGNAL = 5.3; EXPRESSED IN BONE MARROW, SIGNAL =  14; EXPRESSED IN LUNG, SIGNAL = 6.2; EXPRESSED IN BRAIN, SIGNAL =  11
SLAFFMIPRACHVRQAGSHGFNEPHEPIPNTGVVLIQVVGKVSW

SEQ ID NO: 29849 - protein, 64 aa, Homo sapiens
  MAP TO CHR11.1; EXPRESSED IN BRAIN, SIGNAL = 0.86; EXPRESSED IN HEART, SIGNAL = 0.89; EXPRESSED IN LUNG, SIGNAL = 0.9; SWISSPROT HIT: Q03164, EVALUE 7.00e-20
CLGSPTPTTHEIVTVGDPLLSSGLRSIGSRRHSTSSLSPQRSKLRIMSPMRTGNTYSRNNVSSV

SEQ ID NO: 29850 - protein, 56 aa, Homo sapiens
  MAP TO CHR19.1; EXPRESSED IN LUNG, SIGNAL = 1.1; EXPRESSED IN BRAIN, SIGNAL = 0.61; EXPRESSED IN HEART, SIGNAL = 0.89; EXPRESSED IN BONE MARROW, SIGNAL = 0.85; SWISSPROT HIT: Q9Y2G4, EVALUE 2.30e-02
QAHGNTALHMAAALPPGPAQEAIVRHLLAAGADPTLRNLENEQPVHLLRPGPGPEG

SEQ ID NO: 29851 - protein, 77 aa, Homo sapiens
  MAP TO CHR17.1; EXPRESSED IN LUNG, SIGNAL = 0.7; EXPRESSED IN HELA, SIGNAL = 0.66; EXPRESSED IN BRAIN, SIGNAL = 0.59; EXPRESSED IN HEART, SIGNAL = 0.53; EXPRESSED IN BONE MARROW, SIGNAL = 0.49; SWISSPROT HIT: P37959, EVALUE 1.00e-05
VFDQVQTHKPYLVTFDLTDSGAIVAAAAEILQCFGYVDILVNNAGISYRGTIMDTTVDVDKRVMETNYFGPVALTKG

SEQ ID NO: 29852 - protein, 39 aa, Homo sapiens
  MAP TO CHR14.1; EXPRESSED IN HEART, SIGNAL = 0.76; EXPRESSED IN BONE MARROW, SIGNAL = 3.4; EXPRESSED IN ADULT LIVER, SIGNAL = 0.96; EXPRESSED IN PLACENTA, SIGNAL = 1.2; EXPRESSED IN FETAL LIVER, SIGNAL = 0.93; EXPRESSED IN BRAIN, SIGNAL = 1.1; EXPRESSED IN LUNG, SIGNAL = 1.4
VKVYPEALQETFTEAPGFFTSAPDCTSCTWEWAPVERTQ

SEQ ID NO: 29853 - protein, 18 aa, Homo sapiens
  MAP TO AL356000.4; EXPRESSED IN BONE MARROW, SIGNAL = 0.78; EXPRESSED IN ADULT LIVER, SIGNAL = 0.53; EXPRESSED IN BRAIN, SIGNAL = 0.72; EXPRESSED IN HEART, SIGNAL = 0.44
TSVIAAPVETKNSTRNTR

SEQ ID NO: 29854 - protein, 74 aa, Homo sapiens
  MAP TO CHR17.1; EXPRESSED IN LUNG, SIGNAL = 1.3; EXPRESSED IN BRAIN, SIGNAL = 0.73; EXPRESSED IN HEART, SIGNAL = 0.75; SWISSPROT HIT: Q99536, EVALUE 4.00e-35
KAGDRVMVLNRSGMWQEEVTVPSVQTFLIPEAMTFEEAAALLVNYITAYMVLFDFGNLQPGHSVLVHMAAGDRS

SEQ ID NO: 29855 - protein, 62 aa, Homo sapiens
  MAP TO CHR12.1; EXPRESSED IN FETAL LIVER, SIGNAL = 1.8; EXPRESSED IN LUNG, SIGNAL = 3.9; EXPRESSED IN HELA, SIGNAL = 3.5; EXPRESSED IN BRAIN, SIGNAL = 2.3; EXPRESSED IN HEART, SIGNAL = 1.6; SWISSPROT HIT: P35354, EVALUE 7.90e+00
RAVWLSLLVFELIGQPVQAFVQPVPAGGTGGLNVPVTVTKGMQAQLVCDLSSVHSIRQILEH

SEQ ID NO: 29856 - protein, 36 aa, Homo sapiens
  MAP TO CHR7.1; EXPRESSED IN FETAL LIVER, SIGNAL = 0.34; EXPRESSED IN BRAIN, SIGNAL = 0.3
VITTLWDFSHLSQQASTYGLCVCTSPHGPCETFPAM

SEQ ID NO: 29857 - protein, 62 aa, Homo sapiens
  MAP TO CHR7.1; EXPRESSED IN BONE MARROW, SIGNAL = 0.52; EXPRESSED IN LUNG, SIGNAL = 0.57; EXPRESSED IN BRAIN, SIGNAL = 0.46; SWISSPROT HIT: P97603, EVALUE 7.90e+00
SYTNQQKRCPFPQSTAGALSNGKLSVSDPDVFDPCFVSLTALSQPGVGHHLMAGLFSTKACL

SEQ ID NO: 29858 - protein, 83 aa, Homo sapiens
  MAP TO CHR17.1; EXPRESSED IN HEART, SIGNAL = 0.87; EXPRESSED IN BONE MARROW, SIGNAL = 1.3; EXPRESSED IN ADULT LIVER, SIGNAL = 1.5; EXPRESSED IN FETAL LIVER, SIGNAL = 1.2; EXPRESSED IN HELA, SIGNAL = 0.92; EXPRESSED IN BRAIN, SIGNAL = 1.2; EXPRESSED IN LUNG, SIGNAL = 0.79; SWISSPROT HIT: Q39565, EVALUE 1.00e-09
PAASMIHWTRQIKEMLSAQETVETGENLGPLEEIEFWRNRCMDLSGISKQLVKKGVKHVESILHLAKSSYLAPFMKLAQQIQV

SEQ ID NO: 29859 - protein, 110 aa, Homo sapiens
  MAP TO AC026803.4; EXPRESSED IN FETAL LIVER, SIGNAL = 0.67; EXPRESSED IN LUNG, SIGNAL = 1.1; EXPRESSED IN HELA, SIGNAL = 0.93; EXPRESSED IN BRAIN, SIGNAL = 0.83; EXPRESSED IN HEART, SIGNAL = 1.1; SWISSPROT HIT: O93343, EVALUE 2.60e+00
VCRPRGTATHGQPRCHRRPRCHDTPARTRVRTRRIPGTGRWRKTASATMRTRRPPRTGATSVHQSGRAERPAPPPPAAASATLWTRPPPAHSAPRASPSAPPAPWARSVT

SEQ ID NO: 29860 - protein, 66 aa, Homo sapiens
  MAP TO CHR19.1; EXPRESSED IN BRAIN, SIGNAL = 0.92; EXPRESSED IN HEART, SIGNAL = 0.96; EXPRESSED IN BONE MARROW, SIGNAL = 0.96; EXPRESSED IN FETAL LIVER, SIGNAL = 0.72; EXPRESSED IN LUNG, SIGNAL = 0.78; SWISSPROT HIT: P51680, EVALUE 2.30e+00
FTPMSLVVMDVKIEQVICKVLLKHKICKLCQAPISACLHCSFVRKHMSDCEKLMQTCYTPSHVGGN

SEQ ID NO: 29861 - protein, 68 aa, Homo sapiens
  MAP TO CHR17.1; EXPRESSED IN ADULT LIVER, SIGNAL = 1.5; EXPRESSED IN FETAL LIVER, SIGNAL = 1.1; EXPRESSED IN BRAIN, SIGNAL = 1.1; EXPRESSED IN LUNG, SIGNAL = 1.2; EXPRESSED IN BONE MARROW, SIGNAL = 1.9; SWISSPROT HIT: P16928, EVALUE 6.80e-01
PHPLTGEGPHVPGNVVAPAGGLHPVHSPRINPHEVSGSLHEAVHRNIGCIEIIQDWPPGTRQVVHAVP

SEQ ID NO: 29862 - protein, 29 aa, Homo sapiens
  MAP TO CHR6.1; EXPRESSED IN BONE MARROW, SIGNAL = 0.82; EXPRESSED IN LUNG, SIGNAL = 0.57; EXPRESSED IN HELA, SIGNAL = 0.49; EXPRESSED IN BRAIN, SIGNAL = 0.79; EXPRESSED IN HEART, SIGNAL = 0.61
GVLCLVPAATLEVLLLNNSHELWNVSGHL

SEQ ID NO: 29863 - protein, 83 aa, Homo sapiens
  MAP TO CHR10.1; EXPRESSED IN BRAIN, SIGNAL = 0.61; EXPRESSED IN BONE MARROW, SIGNAL = 0.71; SWISSPROT HIT: P27935, EVALUE 6.30e-01
PMSVVKSIELVLPEDRIYLAGSSIKGQVILTLNSTLVDPIVKVELVGRGYVEWSEEAGASCDYSRNVICNNKADYVHKTKTFP

SEQ ID NO: 29864 - protein, 57 aa, Homo sapiens
  MAP TO CHRX.1; EXPRESSED IN FETAL LIVER, SIGNAL = 0.88; EXPRESSED IN LUNG, SIGNAL = 0.99; EXPRESSED IN BRAIN, SIGNAL = 0.77
MAHAPACKTSQTGPPSSPRPRNNSHPPGKLQKEKVRRPELWALGITPPPPLWLQPIR

SEQ ID NO: 29865 - protein, 58 aa, Homo sapiens
  MAP TO CHR4.1; EXPRESSED IN BRAIN, SIGNAL = 0.72; EXPRESSED IN BONE MARROW, SIGNAL = 0.67; EXPRESSED IN HEART, SIGNAL = 0.43; SWISSPROT HIT: Q9R0Y8, EVALUE 5.00e-20
GITTVLTMTTLSTIARKSLPKVSYVTAMDLFVSVCFIFVFAALMEYGTLHYFTSNQKG

SEQ ID NO: 29866 - protein, 47 aa, Homo sapiens
  MAP TO CHR14.1; EXPRESSED IN BONE MARROW, SIGNAL = 0.82; EXPRESSED IN LUNG, SIGNAL = 0.89; EXPRESSED IN BRAIN, SIGNAL = 0.81; EXPRESSED IN HEART, SIGNAL = 0.86; EXPRESSED IN ADULT LIVER, SIGNAL = 0.88
YFTSRQRRAASAGGRVRRRLCDKSRWVTKSSCSRWQSTVRSWGVKGG

SEQ ID NO: 29867 - protein, 46 aa, Homo sapiens
  MAP TO CHRX.1; EXPRESSED IN BRAIN, SIGNAL = 1.2; EXPRESSED IN HEART, SIGNAL = 0.99; EXPRESSED IN ADULT LIVER, SIGNAL = 0.96; EXPRESSED IN FETAL LIVER, SIGNAL = 0.81; EXPRESSED IN LUNG, SIGNAL = 1.4; SWISSPROT HIT: P53935, EVALUE 3.00e-02
QKRKRHLEEGKERPEKEQSKHKRKKSYEDTDLDKDKSIRQRKREED

SEQ ID NO: 29868 - protein, 123 aa, Homo sapiens
  MAP TO CHR7.1; EXPRESSED IN LUNG, SIGNAL = 0.65; EXPRESSED IN HELA, SIGNAL = 0.61; EXPRESSED IN BRAIN, SIGNAL = 0.66; EXPRESSED IN HEART, SIGNAL = 0.7; EXPRESSED IN ADULT LIVER, SIGNAL = 0.8; EXPRESSED IN FETAL LIVER, SIGNAL = 0.62; SWISSPROT HIT: Q28247, EVALUE 2.00e-04
GPASVSHQPGGLQGVPNATVRPLLLQGLPGFPVLPPGHQGALPHVLAGGGRQQLLAQRLPGLGDRSPEAPWGPGAQGLRAPPEPAQPFLREGPGAHLWPLRSAGLPPTPPGHARLHRLQPHEG

SEQ ID NO: 29869 - protein, 79 aa, Homo sapiens
  MAP TO CHR9.1; EXPRESSED IN BONE MARROW, SIGNAL = 0.49; EXPRESSED IN BRAIN, SIGNAL = 0.53; SWISSPROT HIT: P16157, EVALUE 4.00e-08
GGARVDLVDQDGHSLLHWAALGGNADVCQILIENKINPNVQDYAGRTPLQCAAYGGYINCMAVLMENNADPNIQDKEVE

SEQ ID NO: 29870 - protein, 18 aa, Homo sapiens
  MAP TO CHR16.1; EXPRESSED IN BRAIN, SIGNAL = 0.66; EXPRESSED IN LUNG, SIGNAL = 0.7; EXPRESSED IN BONE MARROW, SIGNAL = 0.61; EXPRESSED IN ADULT LIVER, SIGNAL = 0.8
PHVLLIVIQNRTAVLNNK

SEQ ID NO: 29871 - protein, 144 aa, Homo sapiens
  MAP TO CHR19.1; EXPRESSED IN FETAL LIVER, SIGNAL = 0.76; EXPRESSED IN LUNG, SIGNAL = 1.1; EXPRESSED IN HELA, SIGNAL = 0.48; EXPRESSED IN BRAIN, SIGNAL = 0.71; EXPRESSED IN HEART, SIGNAL = 0.75; EXPRESSED IN ADULT LIVER, SIGNAL = 0.7; EXPRESSED IN BONE MARROW, SIGNAL = 0.76; SWISSPROT HIT: P77171, EVALUE 3.80e+00
QVCINAHPLGQEGRLRLKDLQELRVWQGEVGQVDSVSASQVGSPEAEGANGHNGVVALCEQGKVFPRCSLLSIASKRHIALGGVDVFFTPLHAVAGDHENGGFVPCPEPVHGLPEVGAVAHHTLPALRHNLQIVPTAHVDADKG

SEQ ID NO: 29872 - protein, 49 aa, Homo sapiens
  MAP TO CHR17.1; EXPRESSED IN LUNG, SIGNAL = 0.63; EXPRESSED IN BRAIN, SIGNAL = 0.87; EXPRESSED IN ADULT LIVER, SIGNAL = 1.7; EXPRESSED IN BONE MARROW, SIGNAL = 0.76; EXPRESSED IN FETAL LIVER, SIGNAL = 0.98; SWISSPROT HIT: O14019, EVALUE 1.30e+00
SPALHQLHGGCAQHSVGKQVDLFHDVGQAHRQLLPEEGEGGFLTGIAGS

SEQ ID NO: 29873 - protein, 60 aa, Homo sapiens
  MAP TO CHR20.1; EXPRESSED IN BONE MARROW, SIGNAL = 1.3; EXPRESSED IN ADULT LIVER, SIGNAL = 3.9; EXPRESSED IN FETAL LIVER, SIGNAL = 3.3; EXPRESSED IN PLACENTA, SIGNAL = 1.7; EXPRESSED IN LUNG, SIGNAL = 1.1; EXPRESSED IN BRAIN, SIGNAL = 1.5; EXPRESSED IN HEART, SIGNAL = 1.3; SWISSPROT HIT: P17858, EVALUE 2.00e-27
QSCDRIKQSASGTKRRVFIVETMGGYCGYLATVTGIAVGADAAYVFEDPFNIHDLKVSPA

SEQ ID NO: 29874 - protein, 71 aa, Homo sapiens
  MAP TO CHR13.1; EXPRESSED IN ADULT LIVER, SIGNAL = 1.5; EXPRESSED IN BONE MARROW, SIGNAL = 1.7; EXPRESSED IN FETAL LIVER, SIGNAL = 1.5; EXPRESSED IN LUNG, SIGNAL = 1.5; EXPRESSED IN HELA, SIGNAL = 1.8; EXPRESSED IN BRAIN, SIGNAL = 1.7; EXPRESSED IN HEART, SIGNAL = 1.5; SWISSPROT HIT: P08722, EVALUE 2.00e+00
PALGSASLSGFWKILALMSSRSFGLGAAVSPACNGEFTRAARNPSRDGDTRAHPVTSSPRTRRRTGPCSSR

SEQ ID NO: 29875 - protein, 141 aa, Homo sapiens
  MAP TO CHR19.1; EXPRESSED IN LUNG, SIGNAL = 1.3; EXPRESSED IN FETAL LIVER, SIGNAL = 0.88; EXPRESSED IN BRAIN, SIGNAL = 0.92; EXPRESSED IN HEART, SIGNAL = 0.86; EXPRESSED IN ADULT LIVER, SIGNAL = 0.83
SPALLASDSSRWMSLQSASECSRQSCRKRAWVRVTRFRSDRRATVCSHSFQPLNQPARMPTWSRNIMVPGLGPGSGDGGGEGQRRHMVPALASCYLSPEGQGLRTFLGVVATVVGGGGSLLTWGEVLVQPRLSSFLKKEAK

SEQ ID NO: 29876 - protein, 74 aa, Homo sapiens
  MAP TO CHRX.1; EXPRESSED IN BRAIN, SIGNAL = 4.9; EXPRESSED IN BONE MARROW, SIGNAL =   5; EXPRESSED IN HEART, SIGNAL = 2.5; EXPRESSED IN ADULT LIVER, SIGNAL = 6.1; EXPRESSED IN FETAL LIVER, SIGNAL = 3.9; EXPRESSED IN HELA, SIGNAL = 4.5; EXPRESSED IN LUNG, SIGNAL = 2.1
RDFLLKLCKAFDYLKGNLVLMKDASLTVTENEGSILYSQSTSSQNEESSLMVKRVTPYFLIFVGSTHMLDDGKI

SEQ ID NO: 29877 - protein, 77 aa, Homo sapiens
  MAP TO CHR19.1; EXPRESSED IN BRAIN, SIGNAL = 0.35; EXPRESSED IN HEART, SIGNAL = 0.61; SWISSPROT HIT: P71354, EVALUE 1.50e+00
QEQRARAALRERYLRSLLAMVGHQVSFTLHEGVRVAAHFGATDLDVANFYVSQLQTPIGVQAEALLRCSDIISYTFK

SEQ ID NO: 29878 - protein, 90 aa, Homo sapiens
  MAP TO CHR3.1; EXPRESSED IN ADULT LIVER, SIGNAL = 3.9; EXPRESSED IN BONE MARROW, SIGNAL = 2.9; EXPRESSED IN PLACENTA, SIGNAL =   3; EXPRESSED IN HELA, SIGNAL = 3.6; EXPRESSED IN BRAIN, SIGNAL = 3.1; EXPRESSED IN LUNG, SIGNAL = 1.8; SWISSPROT HIT: P37238, EVALUE 3.00e-31
SNDSSCHSSSSIAIRFGRMPQAEKEKLLAEISSDIDQLNPESADLRALAKHLYDSYIKSFPLTKAKARAILTGKTTDKSVSSLLLSSLGE

SEQ ID NO: 29879 - protein, 88 aa, Homo sapiens
  MAP TO CHR2.1; EXPRESSED IN BRAIN, SIGNAL = 1.7; EXPRESSED IN HEART, SIGNAL = 3.4; EXPRESSED IN ADULT LIVER, SIGNAL = 9.5; SWISSPROT HIT: Q95140, EVALUE 9.00e-44
QLLDDYPKCFIVGADNVGSKQMQQIRMSLRGKVVVLMGKNTMMRKAIRGHLENNPALEKLLPHIWGNVGFVFTKEDLTEIRDMLLANK

SEQ ID NO: 29880 - protein, 112 aa, Homo sapiens
  MAP TO CHR12.1; EXPRESSED IN ADULT LIVER, SIGNAL = 0.91; EXPRESSED IN BONE MARROW, SIGNAL = 0.99; EXPRESSED IN FETAL LIVER, SIGNAL = 0.88; EXPRESSED IN LUNG, SIGNAL = 0.98; EXPRESSED IN HELA, SIGNAL = 0.64; EXPRESSED IN BRAIN, SIGNAL = 0.99
SPAHALGVTPRFPCSRKRRLPGHPPRLTILPKRWGPGAVGQFQRRFRNCHLHSRTALCSPPLTLCRIPGFWRIRRRCLRLNSCRLGSSTSCRLLESVSRFVEEATFTIPLVG

SEQ ID NO: 29881 - protein, 28 aa, Homo sapiens
  MAP TO CHR1.1; EXPRESSED IN BRAIN, SIGNAL = 0.33; EXPRESSED IN HEART, SIGNAL = 0.57
ACQQHWVTQPPAGDNDHTVGSHTSTTAQ

SEQ ID NO: 29882 - protein, 81 aa, Homo sapiens
  MAP TO CHRX.1; EXPRESSED IN ADULT LIVER, SIGNAL = 1.1; EXPRESSED IN BONE MARROW, SIGNAL = 0.86; EXPRESSED IN HELA, SIGNAL = 0.77; EXPRESSED IN BRAIN, SIGNAL = 0.87; SWISSPROT HIT: P14547, EVALUE 6.20e+00
STENTQSTYRVNPDGSLRVTFASGMEIGLSSEPHILAGAVNPTLGKCNISLPGEHNANLIEWRQRKEQNKGNVSAFERRLR

SEQ ID NO: 29883 - protein, 47 aa, Homo sapiens
  MAP TO CHR5.1; EXPRESSED IN FETAL LIVER, SIGNAL = 0.62; EXPRESSED IN HELA, SIGNAL = 0.76; EXPRESSED IN BRAIN, SIGNAL = 0.76; EXPRESSED IN BONE MARROW, SIGNAL = 0.82; EXPRESSED IN ADULT LIVER, SIGNAL = 0.73
WNRTKVNIMWISASIFTHIATGASHIQFGELEQLTVSLIFAKSTYLA

SEQ ID NO: 29884 - protein, 86 aa, Homo sapiens
  MAP TO CHRX.1; EXPRESSED IN FETAL LIVER, SIGNAL = 0.63; EXPRESSED IN BRAIN, SIGNAL = 0.99; EXPRESSED IN BONE MARROW, SIGNAL = 0.78
LTWAMSPTTSAATGTWRSCPFRMTVNFCSCSIRLCRPRNCFSLLQSLKAVTSTTQMTDSRMAAPSIQPASASPSSSAPPDTFPQAV

SEQ ID NO: 29885 - protein, 68 aa, Homo sapiens
  MAP TO CHR19.1; EXPRESSED IN FETAL LIVER, SIGNAL = 0.84; EXPRESSED IN LUNG, SIGNAL = 0.91; EXPRESSED IN BRAIN, SIGNAL = 1.1; EXPRESSED IN HEART, SIGNAL = 1.1; EXPRESSED IN BONE MARROW, SIGNAL = 1.3; SWISSPROT HIT: O00507, EVALUE 4.50e+00
SPVIKGFSNLSNRLKFIKIIFSESHKPEATKVWLQEILNPGRMLSGTELKTIVHHLSFPGSRISQGNA

SEQ ID NO: 29886 - protein, 37 aa, Homo sapiens
  MAP TO CHR6.1; EXPRESSED IN HELA, SIGNAL = 0.61; EXPRESSED IN BRAIN, SIGNAL = 0.68; EXPRESSED IN BONE MARROW, SIGNAL = 0.74; EXPRESSED IN ADULT LIVER, SIGNAL = 0.67; SWISSPROT HIT: Q50636, EVALUE 6.50e+00
SPCVAFTSQLTSWPQFPCLQNKTHNPNLDVSVGHCVH

SEQ ID NO: 29887 - protein, 61 aa, Homo sapiens
  MAP TO CHRX.1; EXPRESSED IN BRAIN, SIGNAL = 0.62; EXPRESSED IN LUNG, SIGNAL = 0.7; EXPRESSED IN HEART, SIGNAL = 0.74; EXPRESSED IN BONE MARROW, SIGNAL = 0.69; EXPRESSED IN FETAL LIVER, SIGNAL = 1.3; EXPRESSED IN HELA, SIGNAL = 0.57; SWISSPROT HIT: Q93008, EVALUE 7.00e-30
FLRLWGEPVNLREQHDALEFFNSLVDSLDEALKALGHPAMLSKVLGGSFADQKICQGCPHR

SEQ ID NO: 29888 - protein, 48 aa, Homo sapiens
  MAP TO CHR5.1; EXPRESSED IN HELA, SIGNAL =   1; EXPRESSED IN BRAIN, SIGNAL =   1; EXPRESSED IN HEART, SIGNAL = 1.1; EXPRESSED IN BONE MARROW, SIGNAL = 1.2; EXPRESSED IN FETAL LIVER, SIGNAL = 0.87; EXPRESSED IN LUNG, SIGNAL = 0.95; SWISSPROT HIT: P55314, EVALUE 8.20e+00
SSSVAAAPGSLYFPLKTSCPEGRSPQSGGRKTQVNECIETTGGHGPRH

SEQ ID NO: 29889 - protein, 51 aa, Homo sapiens
  MAP TO CHR17.1; EXPRESSED IN BONE MARROW, SIGNAL = 0.55; EXPRESSED IN BRAIN, SIGNAL = 0.53
CIYCWSPGKREDRLFQKYKPKAKTFPPRGCSEIRLVCQIRLERNLKSFSTN

SEQ ID NO: 29890 - protein, 59 aa, Homo sapiens
  MAP TO CHR4.1; EXPRESSED IN HELA, SIGNAL = 0.61; EXPRESSED IN BRAIN, SIGNAL = 0.72; EXPRESSED IN BONE MARROW, SIGNAL = 0.73; EXPRESSED IN FETAL LIVER, SIGNAL = 0.69
FITVFELTTSAEKDKDKREDTLLTDEETTEGASIWMERDTANEAETHSVLLTAVESRYD

SEQ ID NO: 29891 - protein, 40 aa, Homo sapiens
  MAP TO CHRX.1; EXPRESSED IN BRAIN, SIGNAL = 0.44; EXPRESSED IN BONE MARROW, SIGNAL = 0.49; EXPRESSED IN LUNG, SIGNAL = 0.68; SWISSPROT HIT: P48190, EVALUE 8.40e+00
THLKILNMHLHFLTRHFILFPMHLKIKTNILSMFFTLKKD

SEQ ID NO: 29892 - protein, 51 aa, Homo sapiens
  MAP TO CHR1.1; EXPRESSED IN BONE MARROW, SIGNAL = 0.9; EXPRESSED IN ADULT LIVER, SIGNAL = 0.97; EXPRESSED IN FETAL LIVER, SIGNAL = 0.81; EXPRESSED IN HELA, SIGNAL = 1.1; EXPRESSED IN BRAIN, SIGNAL = 0.76; SWISSPROT HIT: Q9NYT6, EVALUE 1.00e-26
SNLYIHQRVHTGEKPYKCEECGKGFSRPSSLQAHQGVHTGEKSYICTVCGK

SEQ ID NO: 29893 - protein, 84 aa, Homo sapiens
  MAP TO AC068936.2; EXPRESSED IN PLACENTA, SIGNAL = 1.3; EXPRESSED IN FETAL LIVER, SIGNAL = 0.79; EXPRESSED IN BRAIN, SIGNAL = 0.95; EXPRESSED IN HEART, SIGNAL = 0.94; SWISSPROT HIT: P34369, EVALUE 2.00e-35
PHSVNVASLTQSEIRDIILGMEISAPSQQRQQIAEIEKQTKEQSQLTATQTRTVNKHGDEIITSTTSNYETQTFSSKTEWRVRY

SEQ ID NO: 29894 - protein, 46 aa, Homo sapiens
  MAP TO CHR1.1; EXPRESSED IN HEART, SIGNAL = 1.1; EXPRESSED IN ADULT LIVER, SIGNAL = 1.5; EXPRESSED IN FETAL LIVER, SIGNAL = 1.5; EXPRESSED IN LUNG, SIGNAL = 0.91; EXPRESSED IN BRAIN, SIGNAL = 1.9; SWISSPROT HIT: P40367, EVALUE 8.30e+00
THFFNTAISFSRLLSRKAGDFLMHFRAKSFPVSLCFTRKTSEKAPL

SEQ ID NO: 29895 - protein, 80 aa, Homo sapiens
  MAP TO CHR19.1; EXPRESSED IN HEART, SIGNAL = 9.8; EXPRESSED IN ADULT LIVER, SIGNAL = 3.1; EXPRESSED IN FETAL LIVER, SIGNAL = 4.7; EXPRESSED IN BRAIN, SIGNAL = 5.2; EXPRESSED IN LUNG, SIGNAL =   9
HPGQEQHINKVQGLPLLGLKPGLGPLLTQCPPPFLDDFSGEVVHHVTGLPEPPPIRRAVVNEVEVVVQAILAPDRQSAQF

SEQ ID NO: 29896 - protein, 74 aa, Homo sapiens
  MAP TO CHR5.1; EXPRESSED IN BRAIN, SIGNAL = 0.62; EXPRESSED IN HEART, SIGNAL = 0.8; EXPRESSED IN FETAL LIVER, SIGNAL = 0.64; SWISSPROT HIT: P32997, EVALUE 2.50e+00
IYHRFASHICTCLDYARNHSILETFKDILCLSHTGLPSINAVYIFLVFKIHWSKVLYYAGWCALLLMFFLFFRN

SEQ ID NO: 29897 - protein, 49 aa, Homo sapiens
  MAP TO CHR19.1; EXPRESSED IN HELA, SIGNAL = 1.3; EXPRESSED IN BRAIN, SIGNAL = 1.7; EXPRESSED IN BONE MARROW, SIGNAL = 0.94; EXPRESSED IN FETAL LIVER, SIGNAL = 0.8; EXPRESSED IN LUNG, SIGNAL = 0.73; SWISSPROT HIT: Q98919, EVALUE 2.00e-01
LALKDERFQLEEFSPRRVRIRLSDARLEDEGGYFCQLYTEDTHHQIATL

SEQ ID NO: 29898 - protein, 68 aa, Homo sapiens
  MAP TO CHR12.1; EXPRESSED IN BRAIN, SIGNAL = 0.41; EXPRESSED IN ADULT LIVER, SIGNAL = 0.41; SWISSPROT HIT: P14895, EVALUE 1.40e+00
ENRIQNFDKHFSLKYYSIASLLESLKGQWPLLVEAAAMGSWARKGEGWEGGASCKLCLVPPLPALGGN

SEQ ID NO: 29899 - protein, 39 aa, Homo sapiens
  MAP TO CHR2.1; EXPRESSED IN ADULT LIVER, SIGNAL =   1; EXPRESSED IN BRAIN, SIGNAL = 0.5; EXPRESSED IN HEART, SIGNAL = 0.77; SWISSPROT HIT: Q00918, EVALUE 8.00e-11
SLQCGKALPGLSKQEDCCGTVGTSWGFNKCQKCPKKPCK

SEQ ID NO: 29900 - protein, 61 aa, Homo sapiens
  MAP TO CHR19.1; EXPRESSED IN BRAIN, SIGNAL = 0.72; EXPRESSED IN ADULT LIVER, SIGNAL = 0.7; EXPRESSED IN BONE MARROW, SIGNAL = 0.71; EXPRESSED IN HELA, SIGNAL = 0.72; SWISSPROT HIT: P10266, EVALUE 5.50e-01
LSPQLTLNWGRGSSTASPGESSVPHLYASSAPLRFHSSRNSVDQITLKRAKTTQETSRLVC

SEQ ID NO: 29901 - protein, 49 aa, Homo sapiens
  MAP TO CHR2.1; EXPRESSED IN PLACENTA, SIGNAL = 1.7; EXPRESSED IN FETAL LIVER, SIGNAL = 1.7; EXPRESSED IN LUNG, SIGNAL = 0.59; EXPRESSED IN HELA, SIGNAL = 2.6; EXPRESSED IN BRAIN, SIGNAL =   2; EXPRESSED IN ADULT LIVER, SIGNAL = 1.4; EXPRESSED IN BONE MARROW, SIGNAL = 1.7; SWISSPROT HIT: P52020, EVALUE 3.70e+00
PSAVPWLLPVGFLHCSNDPGLEGELIRHFLAAYTCPSCWCLASAPWVLI

SEQ ID NO: 29902 - protein, 78 aa, Homo sapiens
  MAP TO CHR9.1; EXPRESSED IN HELA, SIGNAL = 5.4; EXPRESSED IN BRAIN, SIGNAL = 3.3; EXPRESSED IN LUNG, SIGNAL = 2.9; EXPRESSED IN ADULT LIVER, SIGNAL = 1.6; EXPRESSED IN BONE MARROW, SIGNAL = 3.7; EXPRESSED IN PLACENTA, SIGNAL = 3.8; EXPRESSED IN FETAL LIVER, SIGNAL = 4.1; SWISSPROT HIT: P20785, EVALUE 9.80e+00
DHAHGLCAHQEPHLPGREARELPGGAPGDQAAARHPHHRPRAGQGVHWSQDQEAHPVQPAQELDRYGVLHEHQHAPGQ

SEQ ID NO: 29903 - protein, 73 aa, Homo sapiens
  MAP TO CHR11.1; EXPRESSED IN BRAIN, SIGNAL = 0.61; EXPRESSED IN BONE MARROW, SIGNAL = 0.65; SWISSPROT HIT: Q14896, EVALUE 3.00e-32
PKISWFKNGLDLGEDARFRMFSKQGVLTLEIRKPCPFDGGIYVCRATNLQGEARCECRLEVRGEEPSGPGPGR

SEQ ID NO: 29904 - protein, 32 aa, Homo sapiens
  MAP TO CHRX.1; EXPRESSED IN BRAIN, SIGNAL = 0.33; EXPRESSED IN ADULT LIVER, SIGNAL = 0.52
VFFPNDCTFDRNARNNKNAYLPSVLGLNQHQP

SEQ ID NO: 29905 - protein, 63 aa, Homo sapiens
  MAP TO CHR5.1; EXPRESSED IN FETAL LIVER, SIGNAL = 0.85; EXPRESSED IN HELA, SIGNAL = 1.2; EXPRESSED IN BRAIN, SIGNAL = 0.94; EXPRESSED IN LUNG, SIGNAL = 0.67; EXPRESSED IN BONE MARROW, SIGNAL =   1; SWISSPROT HIT: Q05228, EVALUE 7.90e+00
LLTNRACKEKGSFQGWSAIVGGSQPVWEASPKTYDVGVGTRQTGGIKSPFSPTLIFLPNLEVT

SEQ ID NO: 29906 - protein, 43 aa, Homo sapiens
  MAP TO CHR12.1; EXPRESSED IN FETAL LIVER, SIGNAL = 0.61; EXPRESSED IN HELA, SIGNAL = 0.67; EXPRESSED IN BRAIN, SIGNAL = 0.77; EXPRESSED IN BONE MARROW, SIGNAL = 1.1; SWISSPROT HIT: P09706, EVALUE 1.30e+00
CQLFANISISMWFLPHRPFASGSRSAQLKPPNRLNPPRVPSLP

SEQ ID NO: 29907 - protein, 41 aa, Homo sapiens
  MAP TO CHR6.1; EXPRESSED IN HEART, SIGNAL = 0.76; EXPRESSED IN LUNG, SIGNAL = 0.77; EXPRESSED IN BRAIN, SIGNAL = 0.51; EXPRESSED IN BONE MARROW, SIGNAL = 0.37; SWISSPROT HIT: P42752, EVALUE 4.90e+00
GYFCVIKVMTYQTEEASRRPLINSIQQAPDKSNNSRGGFKE

SEQ ID NO: 29908 - protein, 60 aa, Homo sapiens
  MAP TO CHR4.1; EXPRESSED IN LUNG, SIGNAL = 2.6; EXPRESSED IN PLACENTA, SIGNAL = 2.3; EXPRESSED IN BRAIN, SIGNAL = 1.7; EXPRESSED IN HEART, SIGNAL = 1.9; SWISSPROT HIT: P53984, EVALUE 4.70e+00
VFSLGGHWGGLLTGLHPGPYARSLPAPGNGTLVCPALRSLRPAVHLLLPARDAAPGETGR

SEQ ID NO: 29909 - protein, 73 aa, Homo sapiens
  MAP TO CHR1.1; EXPRESSED IN LUNG, SIGNAL =   3; EXPRESSED IN BRAIN, SIGNAL = 2.4; EXPRESSED IN HEART, SIGNAL =   4; EXPRESSED IN ADULT LIVER, SIGNAL =   4; SWISSPROT HIT: Q9Y483, EVALUE 5.00e-34
NRDSTGAGNSLVHKRSPLRRNQKTPTSLTKLSLQDGHKAKKPACKFEEGQDVLARWSDGLFYLGTIKKASYFN

SEQ ID NO: 29910 - protein, 150 aa, Homo sapiens
  MAP TO CHR9.1; EXPRESSED IN HEART, SIGNAL = 0.46; EXPRESSED IN FETAL LIVER, SIGNAL = 0.32; EXPRESSED IN BRAIN, SIGNAL = 0.3
PAQQLPHHRSAAQGLAAQLLVPQPQGSLDRQPSGRPQSLGSRRAVLQVSFPSVSLGSVPCLPSVSLLPPLPHPPVEVSLVPPQVPVAPVPSHLDSLLPTQEGGCLAKATLLLLGRVLALDREALSLVVPQLPPQQQQPLGSAFAKLQVRI

SEQ ID NO: 29911 - protein, 87 aa, Homo sapiens
  MAP TO CHR19.1; EXPRESSED IN BONE MARROW, SIGNAL = 3.7; EXPRESSED IN ADULT LIVER, SIGNAL = 3.7; EXPRESSED IN PLACENTA, SIGNAL = 4.6; EXPRESSED IN FETAL LIVER, SIGNAL = 5.2; EXPRESSED IN HELA, SIGNAL = 5.5; EXPRESSED IN BRAIN, SIGNAL = 4.3; EXPRESSED IN LUNG, SIGNAL = 1.3; SWISSPROT HIT: Q58105, EVALUE 7.40e-01
TLALMFQKDFWDFKDKRRFPKLPKLEKKTQPISKKKEELPLWETFVALYHVLRMLQQRYPKDSTAWMEQFYQLMDLYQLKSPRIQKL

SEQ ID NO: 29912 - protein, 64 aa, Homo sapiens
  MAP TO CHR20.1; EXPRESSED IN BRAIN, SIGNAL = 4.3; EXPRESSED IN HEART, SIGNAL = 4.3; EXPRESSED IN ADULT LIVER, SIGNAL =  21; SWISSPROT HIT: P34322, EVALUE 6.00e+00
EPVLNVGRKLFVLGQLDGVHPFGDFQLPGLFEKGCQSSDEVPLVHVVYRNSRHRAASALPARGK

SEQ ID NO: 29913 - protein, 52 aa, Homo sapiens
  MAP TO CHR20.1; EXPRESSED IN BONE MARROW, SIGNAL = 0.71; EXPRESSED IN BRAIN, SIGNAL = 0.64; SWISSPROT HIT: P42415, EVALUE 3.70e+00
TRLSADDKDCLSSAIPLVCEFSSTPGGIAHSWHSSSPRTLSGSVRPCFSAAS

SEQ ID NO: 29914 - protein, 22 aa, Homo sapiens
  MAP TO CHR17.1; EXPRESSED IN BONE MARROW, SIGNAL = 0.77; EXPRESSED IN HELA, SIGNAL = 0.84; EXPRESSED IN BRAIN, SIGNAL = 0.79
LNSQLLVFRWLASVSLRTASVQ

SEQ ID NO: 29915 - protein, 58 aa, Homo sapiens
  MAP TO CHR17.1; EXPRESSED IN BONE MARROW, SIGNAL = 0.4; EXPRESSED IN HELA, SIGNAL = 1.4; EXPRESSED IN BRAIN, SIGNAL = 0.42; SWISSPROT HIT: O88329, EVALUE 2.70e+00
PSPSESFLGHFPRNRKSFPRTQALQPEWRASKKRTQYFRSSAFTCRVRQVRGYCLGVI

SEQ ID NO: 29916 - protein, 65 aa, Homo sapiens
  MAP TO CHR14.1; EXPRESSED IN ADULT LIVER, SIGNAL = 0.65; EXPRESSED IN BRAIN, SIGNAL = 0.41; EXPRESSED IN HEART, SIGNAL = 0.55; SWISSPROT HIT: P01739, EVALUE 1.00e-04
GEEDPQALSIQEGENATMNCSYKTSINNLQWYRQNSGRGLVHLILIRSNEREKHSGRLRVTLDTS

SEQ ID NO: 29917 - protein, 70 aa, Homo sapiens
  MAP TO CHR7.1; EXPRESSED IN HELA, SIGNAL = 0.64; EXPRESSED IN BRAIN, SIGNAL = 0.46; EXPRESSED IN ADULT LIVER, SIGNAL = 0.96; SWISSPROT HIT: P40879, EVALUE 3.00e-34
KDSDEELDNNQIEVLDQPINTTDLPFHIDWNDDLPLNIEVPKISLHSLILDFSAVSFLDVSSVRGLKSVI

SEQ ID NO: 29918 - protein, 26 aa, Homo sapiens
  MAP TO CHR17.1; EXPRESSED IN LUNG, SIGNAL = 1.1; EXPRESSED IN BRAIN, SIGNAL = 0.62; EXPRESSED IN BONE MARROW, SIGNAL = 0.57
NLVSHNSLLKYPIKNCQVIHHCLFWS

SEQ ID NO: 29919 - protein, 49 aa, Homo sapiens
  MAP TO AL355432.3; EXPRESSED IN BRAIN, SIGNAL = 0.37; EXPRESSED IN HEART, SIGNAL = 0.45; EXPRESSED IN BONE MARROW, SIGNAL = 0.38; SWISSPROT HIT: P08545, EVALUE 9.70e-01
TCNSFSFVVFISRYLTWFSKDIFLIMSSVACFSCSISSSTLLICFSFLK

SEQ ID NO: 29920 - protein, 72 aa, Homo sapiens
  MAP TO CHR13.1; EXPRESSED IN ADULT LIVER, SIGNAL = 3.8; EXPRESSED IN BRAIN, SIGNAL = 1.4; SWISSPROT HIT: P31142, EVALUE 9.80e+00
PYVLSSCCLTTRKGVANADPKYKHILASNDHLFSTENGKFFPGPSSQWLLRTTEVVNLRMLWPNVALLEALR

SEQ ID NO: 29921 - protein, 70 aa, Homo sapiens
  MAP TO CHR14.1; EXPRESSED IN BONE MARROW, SIGNAL = 1.1; EXPRESSED IN BRAIN, SIGNAL = 0.89; EXPRESSED IN LUNG, SIGNAL = 0.82; SWISSPROT HIT: Q16822, EVALUE 5.00e-33
SSTGRTMYVLPFSMGPVGSPLSRIGVQLTDSAYVVASMRIMTRLGTPVLQALGDGDFVKCLHSVGQPLTG

SEQ ID NO: 29922 - protein, 58 aa, Homo sapiens
  MAP TO CHR14.1; EXPRESSED IN FETAL LIVER, SIGNAL = 0.55; EXPRESSED IN HELA, SIGNAL = 0.82; EXPRESSED IN BRAIN, SIGNAL = 0.6; SWISSPROT HIT: P26446, EVALUE 7.00e-06
FFPFGRNGSTVPLGPASDTGILNPDGYTLNYNEYIVYNPNQVRMRYLLKVQFNFLQLW

SEQ ID NO: 29923 - protein, 59 aa, Homo sapiens
  MAP TO CHR14.1; EXPRESSED IN HELA, SIGNAL =   1; EXPRESSED IN BRAIN, SIGNAL = 0.65; SWISSPROT HIT: Q9SZW5, EVALUE 8.00e+00
FSFSLSWMLVIPVLAAIFHLLRLGRAVISTTVLASLLTTKCREVFLQAKSKDATVTMVS

SEQ ID NO: 29924 - protein, 33 aa, Homo sapiens
  MAP TO CHR21_68.0; EXPRESSED IN BONE MARROW, SIGNAL = 1.9; EXPRESSED IN HEART, SIGNAL = 1.4; EXPRESSED IN LUNG, SIGNAL = 0.89; EXPRESSED IN HELA, SIGNAL = 3.2; EXPRESSED IN PLACENTA, SIGNAL = 1.1; EXPRESSED IN ADULT LIVER, SIGNAL = 1.1; EXPRESSED IN FETAL LIVER, SIGNAL = 1.8; SWISSPROT HIT: Q05860, EVALUE 3.00e+00
IPPGIHRIPPVPLVRPVCITIEDIQASPLFGFD

SEQ ID NO: 29925 - protein, 32 aa, Homo sapiens
  MAP TO CHR21_69.0; EXPRESSED IN HEART, SIGNAL = 1.2; EXPRESSED IN BONE MARROW, SIGNAL = 1.5; EXPRESSED IN LUNG, SIGNAL = 0.79; EXPRESSED IN ADULT LIVER, SIGNAL = 0.92; EXPRESSED IN HELA, SIGNAL = 4.3; EXPRESSED IN FETAL LIVER, SIGNAL = 1.4; EXPRESSED IN PLACENTA, SIGNAL = 0.78
RGSAVHPPRLSSPPRGLRWQGSGSGKLTGAML

SEQ ID NO: 29926 - protein, 59 aa, Homo sapiens
  MAP TO AL160058.2; EXPRESSED IN PLACENTA, SIGNAL = 1.9; EXPRESSED IN FETAL LIVER, SIGNAL = 1.3; EXPRESSED IN LUNG, SIGNAL = 1.6; EXPRESSED IN ADULT LIVER, SIGNAL = 1.8; EXPRESSED IN BONE MARROW, SIGNAL = 1.4; EXPRESSED IN HELA, SIGNAL = 1.2; SWISSPROT HIT: P28705, EVALUE 9.00e-20
KHYGVYSCEGCKGFFKRTIRKDLIYTCRDNKDCLIDKRQRNRCQYCRYQKCLVMGMKRE

SEQ ID NO: 29927 - protein, 19 aa, Homo sapiens
  MAP TO AL160058.2; EXPRESSED IN PLACENTA, SIGNAL = 1.9; EXPRESSED IN FETAL LIVER, SIGNAL = 1.3; EXPRESSED IN LUNG, SIGNAL = 1.6; EXPRESSED IN ADULT LIVER, SIGNAL = 1.8; EXPRESSED IN BONE MARROW, SIGNAL = 1.4; EXPRESSED IN HELA, SIGNAL = 1.2
ESTTGYTVVKAAKGSSRGR

SEQ ID NO: 29928 - protein, 60 aa, Homo sapiens
  MAP TO CHR21_71.0; EXPRESSED IN HELA, SIGNAL = 3.8; EXPRESSED IN HEART, SIGNAL = 1.3; EXPRESSED IN FETAL LIVER, SIGNAL = 1.7; EXPRESSED IN PLACENTA, SIGNAL = 0.89; EXPRESSED IN LUNG, SIGNAL = 0.9; EXPRESSED IN BONE MARROW, SIGNAL = 1.7; EXPRESSED IN ADULT LIVER, SIGNAL = 1.3; SWISSPROT HIT: Q14684, EVALUE 1.00e-27
HTLVQTIARGVFEAIVDQSPFVPEETMEEQKTKVGDGDLSAEEIPENEVSLRRAVSKKKT

SEQ ID NO: 29929 - protein, 23 aa, Homo sapiens
  MAP TO CHR21_71.0; EXPRESSED IN HELA, SIGNAL = 3.8; EXPRESSED IN HEART, SIGNAL = 1.3; EXPRESSED IN FETAL LIVER, SIGNAL = 1.7; EXPRESSED IN PLACENTA, SIGNAL = 0.89; EXPRESSED IN LUNG, SIGNAL = 0.9; EXPRESSED IN BONE MARROW, SIGNAL = 1.7; EXPRESSED IN ADULT LIVER, SIGNAL = 1.3
PHPGTDHSSGCLRSYRRSVSFCA

SEQ ID NO: 29930 - protein, 38 aa, Homo sapiens
  MAP TO AL138747.1; EXPRESSED IN ADULT LIVER, SIGNAL = 1.1; EXPRESSED IN HELA, SIGNAL = 0.69; EXPRESSED IN FETAL LIVER, SIGNAL = 1.1; EXPRESSED IN PLACENTA, SIGNAL = 0.89; EXPRESSED IN BONE MARROW, SIGNAL = 1.2
HEVGQDDSMEVSNNCLPCRNTKFDNYLHKKYTHKNQKS

SEQ ID NO: 29931 - protein, 59 aa, Homo sapiens
  MAP TO AL138919.2; EXPRESSED IN FETAL LIVER, SIGNAL =   2; EXPRESSED IN PLACENTA, SIGNAL = 1.9; EXPRESSED IN LUNG, SIGNAL = 2.1; EXPRESSED IN ADULT LIVER, SIGNAL = 2.2; EXPRESSED IN BONE MARROW, SIGNAL = 1.7; EXPRESSED IN HELA, SIGNAL = 1.6
MFVQIDGGGISASQKELLWQTWQAMGFPVRQPGVESWLLLIGDLTLGKLLSLSEMQISD

SEQ ID NO: 29932 - protein, 51 aa, Homo sapiens
  MAP TO AC015855.4; EXPRESSED IN PLACENTA, SIGNAL = 1.8; EXPRESSED IN LUNG, SIGNAL = 1.7; EXPRESSED IN ADULT LIVER, SIGNAL = 2.4; EXPRESSED IN HELA, SIGNAL =   3; EXPRESSED IN FETAL LIVER, SIGNAL = 1.9; EXPRESSED IN BONE MARROW, SIGNAL = 1.6; EXPRESSED IN HEART, SIGNAL = 1.7; SWISSPROT HIT: P25250, EVALUE 1.60e+00
CMMPWWEWLEDWTQLGMVTGAPTRGLSSMVASGCWASSMMAGAPRVSATRS

SEQ ID NO: 29933 - protein, 30 aa, Homo sapiens
  MAP TO AL139135.2; EXPRESSED IN PLACENTA, SIGNAL = 1.1; EXPRESSED IN LUNG, SIGNAL = 0.93; EXPRESSED IN FETAL LIVER, SIGNAL =   1; EXPRESSED IN ADULT LIVER, SIGNAL = 1.3; EXPRESSED IN BONE MARROW, SIGNAL = 0.87; EXPRESSED IN HELA, SIGNAL = 1.4
SRYRKKSEGRGGVKIGMEASKPPGTGSRER

SEQ ID NO: 29934 - protein, 44 aa, Homo sapiens
  MAP TO AF238280.1; EXPRESSED IN HELA, SIGNAL = 0.5; EXPRESSED IN FETAL LIVER, SIGNAL = 0.66; EXPRESSED IN PLACENTA, SIGNAL = 0.61; EXPRESSED IN LUNG, SIGNAL = 0.63; EXPRESSED IN ADULT LIVER, SIGNAL = 0.74; EXPRESSED IN BONE MARROW, SIGNAL = 0.61; SWISSPROT HIT: P08547, EVALUE 2.00e-01
LNIMKMKIFLKFICEFSASPVKIQIGSIGELVQIISKFTQKKTH

SEQ ID NO: 29935 - protein, 36 aa, Homo sapiens
  MAP TO AL137802.2; EXPRESSED IN BONE MARROW, SIGNAL = 2.2; EXPRESSED IN HELA, SIGNAL = 1.7; EXPRESSED IN HEART, SIGNAL = 2.5; EXPRESSED IN PLACENTA, SIGNAL = 3.1; EXPRESSED IN LUNG, SIGNAL =   3; EXPRESSED IN ADULT LIVER, SIGNAL = 2.9
WVKQQCEFAKQAQNPDQGPKLDLGFKEGQTIKLNIA

SEQ ID NO: 29936 - protein, 33 aa, Homo sapiens
  MAP TO CHR22_163.0; EXPRESSED IN HEART, SIGNAL = 1.6; EXPRESSED IN BONE MARROW, SIGNAL = 0.73; EXPRESSED IN LUNG, SIGNAL = 1.2; EXPRESSED IN PLACENTA, SIGNAL = 1.3; EXPRESSED IN ADULT LIVER, SIGNAL = 1.3; EXPRESSED IN HELA, SIGNAL =   1; EXPRESSED IN FETAL LIVER, SIGNAL = 0.82; SWISSPROT HIT: Q61545, EVALUE 2.30e+00
AAQGDRGGWQRRSTRLSPGPACGIRQEARDWEC

SEQ ID NO: 29937 - protein, 28 aa, Homo sapiens
  MAP TO CHR22_163.0; EXPRESSED IN HEART, SIGNAL = 1.6; EXPRESSED IN BONE MARROW, SIGNAL = 0.73; EXPRESSED IN LUNG, SIGNAL = 1.2; EXPRESSED IN PLACENTA, SIGNAL = 1.3; EXPRESSED IN ADULT LIVER, SIGNAL = 1.3; EXPRESSED IN HELA, SIGNAL =   1; EXPRESSED IN FETAL LIVER, SIGNAL = 0.82
CPRRPRRVATQEYKAIPRACLWNSAGST

SEQ ID NO: 29938 - protein, 53 aa, Homo sapiens
  MAP TO CHR22_88.0; EXPRESSED IN BONE MARROW, SIGNAL = 0.95; EXPRESSED IN HEART, SIGNAL = 1.2; EXPRESSED IN HELA, SIGNAL = 1.6; EXPRESSED IN PLACENTA, SIGNAL = 1.2; EXPRESSED IN LUNG, SIGNAL = 0.97; EXPRESSED IN ADULT LIVER, SIGNAL =   1; EXPRESSED IN FETAL LIVER, SIGNAL = 0.88
QDLTKRLARRTNLEGKSKRKVASVLQKRIERSDLDYSHPNCPFEIVPSQRFTG

SEQ ID NO: 29939 - protein, 42 aa, Homo sapiens
  MAP TO AC019287.3; EXPRESSED IN HELA, SIGNAL = 0.64; EXPRESSED IN FETAL LIVER, SIGNAL = 1.8; EXPRESSED IN LUNG, SIGNAL = 1.8; EXPRESSED IN PLACENTA, SIGNAL = 1.7; EXPRESSED IN BONE MARROW, SIGNAL = 1.8; EXPRESSED IN ADULT LIVER, SIGNAL = 1.9
KLTIKWPQADPSGSFSEEGLVIVGDDSSTHVIAPEDLGQDVE

SEQ ID NO: 29940 - protein, 53 aa, Homo sapiens
  MAP TO CHR22_95.0; EXPRESSED IN HELA, SIGNAL = 1.9; EXPRESSED IN FETAL LIVER, SIGNAL = 0.48; EXPRESSED IN BONE MARROW, SIGNAL = 0.49; EXPRESSED IN PLACENTA, SIGNAL = 0.65; EXPRESSED IN LUNG, SIGNAL = 0.51; EXPRESSED IN ADULT LIVER, SIGNAL = 0.64
PPASVPEVADSPALLRLERNAFQVIQALIRWNINRLINNSPEMDKLSELQRTS

SEQ ID NO: 29941 - protein, 59 aa, Homo sapiens
  MAP TO AC020588.4; EXPRESSED IN LUNG, SIGNAL = 4.4; EXPRESSED IN PLACENTA, SIGNAL = 5.4; EXPRESSED IN BONE MARROW, SIGNAL = 3.2; EXPRESSED IN ADULT LIVER, SIGNAL = 3.7; EXPRESSED IN HELA, SIGNAL = 2.5; EXPRESSED IN FETAL LIVER, SIGNAL = 3.3; SWISSPROT HIT: Q9PW71, EVALUE 1.00e-30
AYHAARRDMLDALGITALLNVSSDCPNHFEGHYQYKCIPVEDNHKADISSWFMEAIEYI

SEQ ID NO: 29942 - protein, 18 aa, Homo sapiens
  MAP TO AC020588.4; EXPRESSED IN LUNG, SIGNAL = 4.4; EXPRESSED IN PLACENTA, SIGNAL = 5.4; EXPRESSED IN BONE MARROW, SIGNAL = 3.2; EXPRESSED IN ADULT LIVER, SIGNAL = 3.7; EXPRESSED IN HELA, SIGNAL = 2.5; EXPRESSED IN FETAL LIVER, SIGNAL = 3.3
PTMLPGETCWTPWASRLC

SEQ ID NO: 29943 - protein, 27 aa, Homo sapiens
  MAP TO AL138499.1; EXPRESSED IN HEART, SIGNAL = 2.6; EXPRESSED IN PLACENTA, SIGNAL = 3.5; EXPRESSED IN LUNG, SIGNAL = 2.5; EXPRESSED IN ADULT LIVER, SIGNAL = 3.1; EXPRESSED IN FETAL LIVER, SIGNAL = 3.4; EXPRESSED IN BONE MARROW, SIGNAL =   2; EXPRESSED IN HELA, SIGNAL =   2
VYVKDDKIRLLEEQLQHEISNKMEEFK

SEQ ID NO: 29944 - protein, 61 aa, Homo sapiens
  MAP TO AC024326.2; EXPRESSED IN HELA, SIGNAL = 1.1; EXPRESSED IN FETAL LIVER, SIGNAL = 1.7; EXPRESSED IN BONE MARROW, SIGNAL = 1.8; EXPRESSED IN LUNG, SIGNAL = 2.7; EXPRESSED IN ADULT LIVER, SIGNAL = 2.6; SWISSPROT HIT: P38386, EVALUE 1.20e+00
EFVKTVNNFVQRDTFVVWDKLSVNHRRTHLTKLMHTVEQATLRISQSFQKTTEFDTNSTDI

SEQ ID NO: 29945 - protein, 30 aa, Homo sapiens
  MAP TO AC016078.3; EXPRESSED IN FETAL LIVER, SIGNAL = 1.8; EXPRESSED IN PLACENTA, SIGNAL = 1.2; EXPRESSED IN LUNG, SIGNAL = 1.2; EXPRESSED IN ADULT LIVER, SIGNAL = 1.4; EXPRESSED IN HELA, SIGNAL = 1.1
AKNAQAMERDAFGVVYIQTKLIWLFAASHK

SEQ ID NO: 29946 - protein, 30 aa, Homo sapiens
  MAP TO AC016078.3; EXPRESSED IN FETAL LIVER, SIGNAL = 1.8; EXPRESSED IN PLACENTA, SIGNAL = 1.2; EXPRESSED IN LUNG, SIGNAL = 1.2; EXPRESSED IN ADULT LIVER, SIGNAL = 1.4; EXPRESSED IN HELA, SIGNAL = 1.1
VLRTLKPWREMHLELFTFRQSSSGCLQLVT

SEQ ID NO: 29947 - protein, 49 aa, Homo sapiens
  MAP TO CHR22_27.0; EXPRESSED IN HELA, SIGNAL = 2.6; EXPRESSED IN FETAL LIVER, SIGNAL = 3.2; EXPRESSED IN PLACENTA, SIGNAL = 3.2; EXPRESSED IN LUNG, SIGNAL = 2.9; EXPRESSED IN ADULT LIVER, SIGNAL = 3.3; EXPRESSED IN BONE MARROW, SIGNAL =   3
MAFFWTFDCKTVNSIRCLSVLAAVAAEVLKAFCLRVCAEHRNNRFSLFA

SEQ ID NO: 29948 - protein, 35 aa, Homo sapiens
  MAP TO AL136224.3; EXPRESSED IN HELA, SIGNAL = 1.6; EXPRESSED IN LUNG, SIGNAL = 5.4; EXPRESSED IN ADULT LIVER, SIGNAL = 5.1; EXPRESSED IN FETAL LIVER, SIGNAL = 2.9; SWISSPROT HIT: P53283, EVALUE 8.60e+00
LLNGFDQNADNDMDNEIQAEVVLDGDEDLVGNWSK

SEQ ID NO: 29949 - protein, 22 aa, Homo sapiens
  MAP TO AL136140.2; EXPRESSED IN LUNG, SIGNAL = 2.8; EXPRESSED IN HELA, SIGNAL = 1.9; EXPRESSED IN FETAL LIVER, SIGNAL = 2.2; EXPRESSED IN BONE MARROW, SIGNAL = 2.1
AVMPWLQVQVENGGLCSPVVPR

SEQ ID NO: 29950 - protein, 56 aa, Homo sapiens
  MAP TO AC021010.3; EXPRESSED IN FETAL LIVER, SIGNAL = 2.5; EXPRESSED IN HELA, SIGNAL = 1.7; EXPRESSED IN PLACENTA, SIGNAL =   3; EXPRESSED IN ADULT LIVER, SIGNAL =   3; EXPRESSED IN LUNG, SIGNAL = 3.3
MLTLINYHANKSKLKRNSQLNYGGIQVYTGYELQGYTQNEILSFGVQILLGKADNN

SEQ ID NO: 29951 - protein, 20 aa, Homo sapiens
  MAP TO CHR22_21.0; EXPRESSED IN LUNG, SIGNAL = 2.5; EXPRESSED IN BONE MARROW, SIGNAL = 2.4; EXPRESSED IN HELA, SIGNAL = 3.3; EXPRESSED IN HEART, SIGNAL = 2.2; EXPRESSED IN PLACENTA, SIGNAL = 2.7; EXPRESSED IN FETAL LIVER, SIGNAL = 2.5; EXPRESSED IN ADULT LIVER, SIGNAL =   3
EQAGPDGCGVEPYKNDGQPE

SEQ ID NO: 29952 - protein, 47 aa, Homo sapiens
  MAP TO AL137802.2; EXPRESSED IN BONE MARROW, SIGNAL =   1; EXPRESSED IN PLACENTA, SIGNAL = 1.2; EXPRESSED IN LUNG, SIGNAL = 1.5; EXPRESSED IN ADULT LIVER, SIGNAL = 2.2; EXPRESSED IN HELA, SIGNAL = 1.4; EXPRESSED IN FETAL LIVER, SIGNAL =   1
GKFFLQSVDFSAPGREGNWQGLWRTFCAVEPRGLSWAVVRPWGGRSR

SEQ ID NO: 29953 - protein, 36 aa, Homo sapiens
  MAP TO CHR22_77.0; EXPRESSED IN HELA, SIGNAL = 0.66; EXPRESSED IN ADULT LIVER, SIGNAL = 0.43; EXPRESSED IN PLACENTA, SIGNAL = 0.38; SWISSPROT HIT: O34261, EVALUE 2.70e-01
MGVKIPDPEPAPSGSIPVPLQEILITPPTPQGPKAA

SEQ ID NO: 29954 - protein, 76 aa, Homo sapiens
  MAP TO AL138781.2; EXPRESSED IN HELA, SIGNAL = 3.1; EXPRESSED IN FETAL LIVER, SIGNAL = 1.7; EXPRESSED IN ADULT LIVER, SIGNAL = 2.3; EXPRESSED IN LUNG, SIGNAL = 2.1
MKPRTARHRDSCPGWRSQPRGRVRPRPPPCGPRAHPDSGVSRPSCDASSLEGQAWGPVHQVDGRSGCLGLHGTPLG

SEQ ID NO: 29955 - protein, 19 aa, Homo sapiens
  MAP TO CHR22_84.0; EXPRESSED IN HELA, SIGNAL = 0.9; EXPRESSED IN ADULT LIVER, SIGNAL = 0.32
QPSEARLAPSALLHLPSGS

SEQ ID NO: 29956 - protein, 48 aa, Homo sapiens
  MAP TO CHR22_84.0; EXPRESSED IN HELA, SIGNAL = 0.9; EXPRESSED IN ADULT LIVER, SIGNAL = 0.32
PALGGQTRTVCSSPSPIRLLAYRASCSSRLSWSSWPDGSPSWKPSSGQ

SEQ ID NO: 29957 - protein, 39 aa, Homo sapiens
  MAP TO CHR22_115.0; EXPRESSED IN BONE MARROW, SIGNAL = 0.62; EXPRESSED IN HELA, SIGNAL = 0.65; EXPRESSED IN PLACENTA, SIGNAL = 0.38; EXPRESSED IN LUNG, SIGNAL = 0.52; EXPRESSED IN ADULT LIVER, SIGNAL = 0.55
MALMDKGENELTGSASEESQETTTSTIITTTVITTEQAP

SEQ ID NO: 29958 - protein, 87 aa, Homo sapiens
  MAP TO CHR22_115.0; EXPRESSED IN BONE MARROW, SIGNAL = 0.62; EXPRESSED IN HELA, SIGNAL = 0.65; EXPRESSED IN PLACENTA, SIGNAL = 0.38; EXPRESSED IN LUNG, SIGNAL = 0.52; EXPRESSED IN ADULT LIVER, SIGNAL = 0.55; SWISSPROT HIT: O14497, EVALUE 6.60e-01
ISSPPPRRSLAHRGTRTPSWPPRRHQKCPFGWTERRVRSLQHPHPCKSPPSLRSPMWPTHSPRGQNPGSLGLTWPRRPPRRTPAPWP

SEQ ID NO: 29959 - protein, 144 aa, Homo sapiens
  MAP TO AC016714.2; EXPRESSED IN HELA, SIGNAL = 0.69; EXPRESSED IN FETAL LIVER, SIGNAL = 0.97; EXPRESSED IN PLACENTA, SIGNAL = 0.77; EXPRESSED IN LUNG, SIGNAL = 0.85; EXPRESSED IN BONE MARROW, SIGNAL = 0.96; EXPRESSED IN ADULT LIVER, SIGNAL = 0.88; SWISSPROT HIT: P47179, EVALUE 5.00e-07
NSTTGTSPYATIITTGTSPYATTITTGTSPYDTGTTTGTSPYDTGITTGTSYDTVITTGTSPYDTGITTDTSPYDTGITTGTSPYDTVIATGTSPYDTVITTGTSPYDTVIATGTSPYDTVITTGTSPYDTVITTGTSYDTIIT

SEQ ID NO: 29960 - protein, 32 aa, Homo sapiens
  MAP TO AL137185.3; EXPRESSED IN HEART, SIGNAL =   3; EXPRESSED IN BONE MARROW, SIGNAL = 3.3; EXPRESSED IN LUNG, SIGNAL =   2; EXPRESSED IN HELA, SIGNAL = 1.3; EXPRESSED IN FETAL LIVER, SIGNAL = 3.2
ESVEIVSEVRVEVGELNIIKDWGRESVEKGGA

SEQ ID NO: 29961 - protein, 47 aa, Homo sapiens
  MAP TO AL160168.1; EXPRESSED IN HELA, SIGNAL = 0.95; EXPRESSED IN PLACENTA, SIGNAL = 0.54; EXPRESSED IN LUNG, SIGNAL = 0.6; EXPRESSED IN FETAL LIVER, SIGNAL = 0.56; EXPRESSED IN ADULT LIVER, SIGNAL = 0.52; EXPRESSED IN BONE MARROW, SIGNAL = 0.54; SWISSPROT HIT: P46450, EVALUE 6.30e+00
HLFDAQDFKFYVYVDDSQVQITHPYLAPEIQRQILSFILHTGYPTGT

SEQ ID NO: 29962 - protein, 48 aa, Homo sapiens
  MAP TO AL160168.1; EXPRESSED IN HELA, SIGNAL = 0.95; EXPRESSED IN PLACENTA, SIGNAL = 0.54; EXPRESSED IN LUNG, SIGNAL = 0.6; EXPRESSED IN FETAL LIVER, SIGNAL = 0.56; EXPRESSED IN ADULT LIVER, SIGNAL = 0.52; EXPRESSED IN BONE MARROW, SIGNAL = 0.54; SWISSPROT HIT: P41658, EVALUE 6.30e+00
VIFLMPRISSSMYTLMTHKYKLPTRILLLKFRGKYSASSCTLDILLAL

SEQ ID NO: 29963 - protein, 77 aa, Homo sapiens
  MAP TO CHR22_146.0; EXPRESSED IN HELA, SIGNAL = 4.7; EXPRESSED IN FETAL LIVER, SIGNAL = 0.84; EXPRESSED IN PLACENTA, SIGNAL =   1; EXPRESSED IN BONE MARROW, SIGNAL = 0.63; EXPRESSED IN LUNG, SIGNAL = 0.7
MDTSWGGPNSLPLALRPAFSRGGGRVQPTLTAASEATGGLQLQQQRTRRLCRCRGVDIEPRKLPGEGRRLGRNHSPN

SEQ ID NO: 29964 - protein, 73 aa, Homo sapiens
  MAP TO CHR22_148.0; EXPRESSED IN FETAL LIVER, SIGNAL = 0.59; EXPRESSED IN HELA, SIGNAL = 1.2; SWISSPROT HIT: Q11126, EVALUE 6.10e+00
EEIEAQRVIGPQAPIKHVSELELRPGFTPPPGVRQAWCSMPAFSECNSPGTLLRLSVLICEMETMIPASCILK

SEQ ID NO: 29965 - protein, 95 aa, Homo sapiens
  MAP TO CHR22_174.0; EXPRESSED IN HEART, SIGNAL = 3.1; EXPRESSED IN LUNG, SIGNAL = 3.9; EXPRESSED IN HELA, SIGNAL =   3; EXPRESSED IN ADULT LIVER, SIGNAL = 3.8; EXPRESSED IN PLACENTA, SIGNAL = 3.8; EXPRESSED IN FETAL LIVER, SIGNAL = 3.4; EXPRESSED IN BONE MARROW, SIGNAL = 3.8; SWISSPROT HIT: P19474, EVALUE 6.00e-07
MAALFQEASSCPVCSDYLEKPMSLECGCTVCLKCINSLQKEPHGEDLLCCCCSMVSQRNKIRPNRQLERLVSHIKELEPKLKKILQMNPRMRKFQ

SEQ ID NO: 29966 - protein, 37 aa, Homo sapiens
  MAP TO CHR22_174.0; EXPRESSED IN HEART, SIGNAL = 3.1; EXPRESSED IN LUNG, SIGNAL = 3.9; EXPRESSED IN HELA, SIGNAL =   3; EXPRESSED IN ADULT LIVER, SIGNAL = 3.8; EXPRESSED IN PLACENTA, SIGNAL = 3.8; EXPRESSED IN FETAL LIVER, SIGNAL = 3.4; EXPRESSED IN BONE MARROW, SIGNAL = 3.8; SWISSPROT HIT: Q9RJH9, EVALUE 1.30e+00
EQNQAQSAAREAGFPHQGTGAQAEEDSTDEPKDAEVP

SEQ ID NO: 29967 - protein, 57 aa, Homo sapiens
  MAP TO CHR22_175.0; EXPRESSED IN HELA, SIGNAL = 0.74; EXPRESSED IN PLACENTA, SIGNAL = 0.46; EXPRESSED IN LUNG, SIGNAL = 0.52; EXPRESSED IN ADULT LIVER, SIGNAL =   2; SWISSPROT HIT: P34150, EVALUE 8.00e+00
NFPKACELWEQILQDHPTDMLALKFSHDAYFYLGYQEQMRDSVARIYPFWTPDIPLS

SEQ ID NO: 29968 - protein, 29 aa, Homo sapiens
  MAP TO CHR22_183_1.0; EXPRESSED IN HELA, SIGNAL = 2.4; EXPRESSED IN FETAL LIVER, SIGNAL = 1.2; EXPRESSED IN LUNG, SIGNAL = 6.6; EXPRESSED IN ADULT LIVER, SIGNAL = 4.3; EXPRESSED IN PLACENTA, SIGNAL = 1.3
VSPRLPPRSLCSHPPLRSFKPTRPHWCVS

SEQ ID NO: 29969 - protein, 27 aa, Homo sapiens
  MAP TO AC019325.3; EXPRESSED IN FETAL LIVER, SIGNAL = 9.2; EXPRESSED IN HEART, SIGNAL = 7.8; EXPRESSED IN PLACENTA, SIGNAL =  11; EXPRESSED IN LUNG, SIGNAL =  10; EXPRESSED IN ADULT LIVER, SIGNAL =  10; EXPRESSED IN BONE MARROW, SIGNAL = 9.4; EXPRESSED IN HELA, SIGNAL = 5.9
ILIILTFETGAIFIGAFSQLTLLQLKK

SEQ ID NO: 29970 - protein, 18 aa, Homo sapiens
  MAP TO CHR22_119.0; EXPRESSED IN HELA, SIGNAL = 0.55; EXPRESSED IN ADULT LIVER, SIGNAL = 0.45; EXPRESSED IN PLACENTA, SIGNAL = 0.51
PTQNKNASELQCNWSNTS

SEQ ID NO: 29971 - protein, 43 aa, Homo sapiens
  MAP TO AL137068.1; EXPRESSED IN PLACENTA, SIGNAL =  11; EXPRESSED IN LUNG, SIGNAL =  10; EXPRESSED IN ADULT LIVER, SIGNAL =  11; EXPRESSED IN HELA, SIGNAL = 4.6; EXPRESSED IN FETAL LIVER, SIGNAL = 9.7; EXPRESSED IN BONE MARROW, SIGNAL = 8.5; SWISSPROT HIT: P03876, EVALUE 8.40e+00
ADSHAGVRYITEALIKKLTKQDNLALIKSLNLSLSKDGGKKFK

SEQ ID NO: 29972 - protein, 26 aa, Homo sapiens
  MAP TO AL137068.1; EXPRESSED IN PLACENTA, SIGNAL =  11; EXPRESSED IN LUNG, SIGNAL =  10; EXPRESSED IN ADULT LIVER, SIGNAL =  11; EXPRESSED IN HELA, SIGNAL = 4.6; EXPRESSED IN FETAL LIVER, SIGNAL = 9.7; EXPRESSED IN BONE MARROW, SIGNAL = 8.5
ELIHMQELDILQRPSLKNLLNRIIWL

SEQ ID NO: 29973 - protein, 18 aa, Homo sapiens
  MAP TO CHR22_102.0; EXPRESSED IN FETAL LIVER, SIGNAL = 5.3; EXPRESSED IN BONE MARROW, SIGNAL =   6; EXPRESSED IN HEART, SIGNAL = 3.6; EXPRESSED IN PLACENTA, SIGNAL =   2; EXPRESSED IN LUNG, SIGNAL = 1.9; EXPRESSED IN HELA, SIGNAL =  19
LCHLPPRLLPLVEAHSWL

SEQ ID NO: 29974 - protein, 29 aa, Homo sapiens
  MAP TO AL137159.1; EXPRESSED IN HELA, SIGNAL = 0.77; EXPRESSED IN FETAL LIVER, SIGNAL = 9.4; EXPRESSED IN HEART, SIGNAL =  14; EXPRESSED IN PLACENTA, SIGNAL =  17; EXPRESSED IN LUNG, SIGNAL =  19; SWISSPROT HIT: P08548, EVALUE 7.90e-01
MIKGIYEEPTVDTILNGEKLNGFMQRLET

SEQ ID NO: 29975 - protein, 105 aa, Homo sapiens
  MAP TO AC010125.3; EXPRESSED IN HELA, SIGNAL = 6.8; EXPRESSED IN LUNG, SIGNAL = 2.5; EXPRESSED IN ADULT LIVER, SIGNAL = 2.3; EXPRESSED IN FETAL LIVER, SIGNAL = 2.4; SWISSPROT HIT: P08728, EVALUE 9.20e-01
KVNIKGNIKSVLKKNAGKGQEIKITEIEENTNYQKPKSSPSPPILYTHYLGEIYDLRASARKVTIKNISVMILALNSRRILVQLCWMKDEVEKYTSASLPCPSMD

SEQ ID NO: 29976 - protein, 33 aa, Homo sapiens
  MAP TO AL136975.1; EXPRESSED IN HELA, SIGNAL = 1.9; EXPRESSED IN FETAL LIVER, SIGNAL = 2.6; EXPRESSED IN BONE MARROW, SIGNAL = 2.7; EXPRESSED IN ADULT LIVER, SIGNAL = 2.8; EXPRESSED IN PLACENTA, SIGNAL = 2.9; EXPRESSED IN LUNG, SIGNAL = 2.9
CKLLLPAPTAGTLCSPIVSAPCSPAMNAFWAPT

SEQ ID NO: 29977 - protein, 19 aa, Homo sapiens
  MAP TO AL136443.5; EXPRESSED IN BONE MARROW, SIGNAL = 1.2; EXPRESSED IN LUNG, SIGNAL =   2; EXPRESSED IN ADULT LIVER, SIGNAL = 2.1; EXPRESSED IN HELA, SIGNAL = 0.6; EXPRESSED IN FETAL LIVER, SIGNAL = 1.2
SCCCSVFGSTLLLELWHSA

SEQ ID NO: 29978 - protein, 52 aa, Homo sapiens
  MAP TO AC020759.3; EXPRESSED IN BONE MARROW, SIGNAL =   2; EXPRESSED IN LUNG, SIGNAL = 2.5; EXPRESSED IN ADULT LIVER, SIGNAL = 1.8; EXPRESSED IN HELA, SIGNAL = 1.6; SWISSPROT HIT: P82853, EVALUE 2.80e+00
VDYTHEAVTIKCTFSATGCPSEQPTCLWFRYGAHQPENLCLDGCKSEADKFT

SEQ ID NO: 29979 - protein, 31 aa, Homo sapiens
  MAP TO AC016078.3; EXPRESSED IN HELA, SIGNAL = 0.66; EXPRESSED IN FETAL LIVER, SIGNAL = 0.66; EXPRESSED IN BONE MARROW, SIGNAL = 0.6; EXPRESSED IN LUNG, SIGNAL = 0.52; EXPRESSED IN ADULT LIVER, SIGNAL = 0.58
HRKRRHKRRERRRIGERQTTGKEERTKKRRE

SEQ ID NO: 29980 - protein, 53 aa, Homo sapiens
  MAP TO CHR21_66.0; EXPRESSED IN BONE MARROW, SIGNAL = 1.5; EXPRESSED IN HELA, SIGNAL = 4.2; EXPRESSED IN FETAL LIVER, SIGNAL = 1.5; EXPRESSED IN HEART, SIGNAL = 1.2; EXPRESSED IN PLACENTA, SIGNAL = 0.79; EXPRESSED IN ADULT LIVER, SIGNAL = 0.59; SWISSPROT HIT: Q9JT68, EVALUE 8.10e+00
RFDYGGLELPHLRGQHLGVIDRWLLGVHMLGPVLRRAWSHRGSHGDSVLSLPH

SEQ ID NO: 29981 - protein, 55 aa, Homo sapiens
  MAP TO CHR21_66.0; EXPRESSED IN BONE MARROW, SIGNAL = 1.5; EXPRESSED IN HELA, SIGNAL = 4.2; EXPRESSED IN FETAL LIVER, SIGNAL = 1.5; EXPRESSED IN HEART, SIGNAL = 1.2; EXPRESSED IN PLACENTA, SIGNAL = 0.79; EXPRESSED IN ADULT LIVER, SIGNAL = 0.59; SWISSPROT HIT: P57057, EVALUE 3.00e-27
RGLIMGVWNSHTSVGNILGSLIAGYWVSTCWGLSFVVPGAIVAAMGIVCFLFLIE

SEQ ID NO: 29982 - protein, 43 aa, Homo sapiens
  MAP TO CHR22_168.0; EXPRESSED IN HELA, SIGNAL = 0.79; EXPRESSED IN LUNG, SIGNAL = 0.72; EXPRESSED IN ADULT LIVER, SIGNAL = 0.75; EXPRESSED IN FETAL LIVER, SIGNAL = 0.6; EXPRESSED IN BONE MARROW, SIGNAL = 0.58; SWISSPROT HIT: P46196, EVALUE 6.00e-20
ILGSPSQEDLNCIINLKARNYLLSLPHKNKVPWNRLFPNADSK

SEQ ID NO: 29983 - protein, 62 aa, Homo sapiens
  MAP TO AL138781.2; EXPRESSED IN HELA, SIGNAL =   2; EXPRESSED IN FETAL LIVER, SIGNAL = 1.7; EXPRESSED IN PLACENTA, SIGNAL = 1.7; EXPRESSED IN LUNG, SIGNAL = 2.2; EXPRESSED IN ADULT LIVER, SIGNAL =   2; SWISSPROT HIT: Q63042, EVALUE 3.80e-02
FEDDPQAVLQTMRRYVHTFFGCKECGEHFEEMAKESMDSVKTPDQAILWLWKKHNMVNGRLA

SEQ ID NO: 29984 - protein, 51 aa, Homo sapiens
  MAP TO AL160314.1; EXPRESSED IN FETAL LIVER, SIGNAL =   2; EXPRESSED IN BONE MARROW, SIGNAL = 2.3; EXPRESSED IN LUNG, SIGNAL = 1.9; EXPRESSED IN ADULT LIVER, SIGNAL = 1.9; EXPRESSED IN HELA, SIGNAL = 0.71; SWISSPROT HIT: P23267, EVALUE 2.00e-06
CIFMYIQSGKSDQKEDRNKVAALLNTVVTLMLNPFIYTLRNKQVKQVFRQQ

SEQ ID NO: 29985 - protein, 29 aa, Homo sapiens
  MAP TO CHR21_69.0; EXPRESSED IN FETAL LIVER, SIGNAL = 1.3; EXPRESSED IN BONE MARROW, SIGNAL = 1.3; EXPRESSED IN LUNG, SIGNAL = 0.7; EXPRESSED IN ADULT LIVER, SIGNAL = 0.66; EXPRESSED IN HELA, SIGNAL =   4
HQQQQGHAGRGPARLLSPTLQCFSTPMLQ

SEQ ID NO: 29986 - protein, 44 aa, Homo sapiens
  MAP TO AC017112.5; EXPRESSED IN FETAL LIVER, SIGNAL = 0.86; EXPRESSED IN HEART, SIGNAL = 1.3; EXPRESSED IN BONE MARROW, SIGNAL = 1.1; EXPRESSED IN HELA, SIGNAL = 0.53; EXPRESSED IN PLACENTA, SIGNAL = 1.3; EXPRESSED IN LUNG, SIGNAL = 1.5; EXPRESSED IN ADULT LIVER, SIGNAL = 1.4; SWISSPROT HIT: O64765, EVALUE 6.40e+00
SNEQGLGICMFKALPMSLIQRVQEPHLEKCWSTGEKADFSGKNS

SEQ ID NO: 29987 - protein, 33 aa, Homo sapiens
  MAP TO AL160237.1; EXPRESSED IN BONE MARROW, SIGNAL = 2.3; EXPRESSED IN LUNG, SIGNAL = 1.9; EXPRESSED IN ADULT LIVER, SIGNAL =   2; EXPRESSED IN PLACENTA, SIGNAL = 1.7; EXPRESSED IN HELA, SIGNAL = 2.1; EXPRESSED IN FETAL LIVER, SIGNAL = 2.5
VSAQKGKENLMQCACFSSWAAHLDTLEIEPNLK

SEQ ID NO: 29988 - protein, 31 aa, Homo sapiens
  MAP TO AL160237.1; EXPRESSED IN BONE MARROW, SIGNAL = 2.3; EXPRESSED IN LUNG, SIGNAL = 1.9; EXPRESSED IN ADULT LIVER, SIGNAL =   2; EXPRESSED IN PLACENTA, SIGNAL = 1.7; EXPRESSED IN HELA, SIGNAL = 2.1; EXPRESSED IN FETAL LIVER, SIGNAL = 2.5
SVPKKVKKTSCSVLASPHGQPIWIPWKLNLI

SEQ ID NO: 29989 - protein, 27 aa, Homo sapiens
  MAP TO AC022117.2; EXPRESSED IN HELA, SIGNAL =  13; EXPRESSED IN FETAL LIVER, SIGNAL = 2.3; EXPRESSED IN PLACENTA, SIGNAL = 6.1; EXPRESSED IN BONE MARROW, SIGNAL = 0.61
CKPSKRPPPPTGQWMAKWCLRPTTPKF

SEQ ID NO: 29990 - protein, 52 aa, Homo sapiens
  MAP TO AL160192.1; EXPRESSED IN BONE MARROW, SIGNAL = 1.3; EXPRESSED IN HELA, SIGNAL =   1; EXPRESSED IN FETAL LIVER, SIGNAL = 1.6; EXPRESSED IN LUNG, SIGNAL = 1.1; EXPRESSED IN ADULT LIVER, SIGNAL =   1; EXPRESSED IN PLACENTA, SIGNAL = 1.1
ATTNQPFACNSHLKVNLRQGDSNCSAPPTVAMHNHVDPLMSDLVFQEKLEMQ

SEQ ID NO: 29991 - protein, 17 aa, Homo sapiens
  MAP TO AL160192.1; EXPRESSED IN BONE MARROW, SIGNAL = 1.3; EXPRESSED IN HELA, SIGNAL =   1; EXPRESSED IN FETAL LIVER, SIGNAL = 1.6; EXPRESSED IN LUNG, SIGNAL = 1.1; EXPRESSED IN ADULT LIVER, SIGNAL =   1; EXPRESSED IN PLACENTA, SIGNAL = 1.1
EQPPINLLHATPISKSI

SEQ ID NO: 29992 - protein, 30 aa, Homo sapiens
  MAP TO CHR22_41.0; EXPRESSED IN PLACENTA, SIGNAL = 0.62; EXPRESSED IN LUNG, SIGNAL = 0.49; EXPRESSED IN FETAL LIVER, SIGNAL = 0.69; EXPRESSED IN BONE MARROW, SIGNAL = 0.49; EXPRESSED IN HELA, SIGNAL = 0.87
GKAEGAAPLPTLGRGSISESQMPHRHASQV

SEQ ID NO: 29993 - protein, 17 aa, Homo sapiens
  MAP TO CHR22_233.0; EXPRESSED IN BONE MARROW, SIGNAL = 2.9; EXPRESSED IN HELA, SIGNAL =   3; EXPRESSED IN HEART, SIGNAL = 2.3; EXPRESSED IN LUNG, SIGNAL = 2.8; EXPRESSED IN PLACENTA, SIGNAL = 3.2; EXPRESSED IN FETAL LIVER, SIGNAL = 2.6
DQPFTQSWTTSFSSNVV

SEQ ID NO: 29994 - protein, 28 aa, Homo sapiens
  MAP TO AC006477.3; EXPRESSED IN HELA, SIGNAL = 6.4; EXPRESSED IN LUNG, SIGNAL = 2.8; EXPRESSED IN ADULT LIVER, SIGNAL = 2.7
LLQHLTVLPCLLPVGAASLQNLLCQWCS

SEQ ID NO: 29995 - protein, 26 aa, Homo sapiens
  MAP TO CHR21_43.0; EXPRESSED IN HELA, SIGNAL = 0.58; EXPRESSED IN FETAL LIVER, SIGNAL = 0.44; EXPRESSED IN ADULT LIVER, SIGNAL = 0.31
ARHSSKSRGHYTPEHRRRNTCLLSPA

SEQ ID NO: 29996 - protein, 110 aa, Homo sapiens
  MAP TO CHR21_43.0; EXPRESSED IN HELA, SIGNAL = 0.58; EXPRESSED IN FETAL LIVER, SIGNAL = 0.44; EXPRESSED IN ADULT LIVER, SIGNAL = 0.31; SWISSPROT HIT: P31792, EVALUE 2.00e-10
RDILAKAGAIIHLNIGEGTPVCCPLLEEGINPEVWATEGQYGRAKNACAVQVKLKDSASFPYQRQYPLRPEAQQGLQKIVKDLKAHGLVKPCNSPCNTPILGVQKPNRQW

SEQ ID NO: 29997 - protein, 41 aa, Homo sapiens
  MAP TO AC018876.4; EXPRESSED IN HELA, SIGNAL = 1.9; EXPRESSED IN FETAL LIVER, SIGNAL = 2.7; EXPRESSED IN ADULT LIVER, SIGNAL = 2.8; EXPRESSED IN LUNG, SIGNAL = 2.8; SWISSPROT HIT: P52645, EVALUE 4.90e+00
IKGNEQIEKYSWREACDTGSSRMDRKHGKYILNVEHSENQP

SEQ ID NO: 29998 - protein, 114 aa, Homo sapiens
  MAP TO CHR22_18.0; EXPRESSED IN HELA, SIGNAL = 1.1; EXPRESSED IN FETAL LIVER, SIGNAL = 0.95; EXPRESSED IN LUNG, SIGNAL =   1; EXPRESSED IN BONE MARROW, SIGNAL = 1.4; SWISSPROT HIT: P34341, EVALUE 3.60e+00
NPNIPPMQKFISQCRVVTSVVMKHHRSPCTRHLTSEESWFMVVHGSGLAVPQVQIILCTKGCSCLDNFMKGNQYLQSWVYWRIISKVGILLESDPDVDLQEKKQNHRIFKHSEG

SEQ ID NO: 29999 - protein, 51 aa, Homo sapiens
  MAP TO AC013718.3; EXPRESSED IN FETAL LIVER, SIGNAL = 3.1; EXPRESSED IN PLACENTA, SIGNAL = 3.5; EXPRESSED IN ADULT LIVER, SIGNAL = 3.7; EXPRESSED IN HEART, SIGNAL = 2.3; EXPRESSED IN LUNG, SIGNAL = 3.6; EXPRESSED IN BONE MARROW, SIGNAL = 3.3; EXPRESSED IN HELA, SIGNAL = 2.2
INASLLSSFWNSPTSLHVCTHHHLISSLNSPELQPLILSLHPFPISLLYLH

SEQ ID NO: 30000 - protein, 49 aa, Homo sapiens
  MAP TO AC019287.3; EXPRESSED IN HELA, SIGNAL =   3; EXPRESSED IN PLACENTA, SIGNAL = 2.2; EXPRESSED IN ADULT LIVER, SIGNAL = 2.7; EXPRESSED IN FETAL LIVER, SIGNAL = 2.7; EXPRESSED IN HEART, SIGNAL = 1.9; EXPRESSED IN LUNG, SIGNAL = 2.4; EXPRESSED IN BONE MARROW, SIGNAL = 2.8; SWISSPROT HIT: P35452, EVALUE 2.80e+00
NEDEAEFKGDTKGPLTISLSWENSVVLRGISKNLADTCPNSMGQRNKGK

SEQ ID NO: 30001 - protein, 24 aa, Homo sapiens
  MAP TO AC019287.3; EXPRESSED IN HELA, SIGNAL =   3; EXPRESSED IN PLACENTA, SIGNAL = 2.2; EXPRESSED IN ADULT LIVER, SIGNAL = 2.7; EXPRESSED IN FETAL LIVER, SIGNAL = 2.7; EXPRESSED IN HEART, SIGNAL = 1.9; EXPRESSED IN LUNG, SIGNAL = 2.4; EXPRESSED IN BONE MARROW, SIGNAL = 2.8
MKMRQNSRVIPRAHSQFLFHGKTV

SEQ ID NO: 30002 - protein, 59 aa, Homo sapiens
  MAP TO AL121916.12; EXPRESSED IN LUNG, SIGNAL = 4.5; EXPRESSED IN ADULT LIVER, SIGNAL =   6; EXPRESSED IN HELA, SIGNAL =  14; SWISSPROT HIT: P43216, EVALUE 4.70e+00
STRREAPLLPSHRLTWKTKELWLSWWKLSGPITATDTMRSAVTGEVMSWVPSLWLASPS

SEQ ID NO: 30003 - protein, 40 aa, Homo sapiens
  MAP TO AL136122.1; EXPRESSED IN LUNG, SIGNAL = 0.71; EXPRESSED IN PLACENTA, SIGNAL = 0.98; EXPRESSED IN ADULT LIVER, SIGNAL = 0.49; EXPRESSED IN HELA, SIGNAL = 0.7; EXPRESSED IN FETAL LIVER, SIGNAL = 0.87
QQFSTRAVSITHKHTPGHFGNSWRLLIGAMMTGCCRHLVI

SEQ ID NO: 30004 - protein, 49 aa, Homo sapiens
  MAP TO CHR22_137.0; EXPRESSED IN FETAL LIVER, SIGNAL = 0.49; EXPRESSED IN BONE MARROW, SIGNAL = 0.45; EXPRESSED IN ADULT LIVER, SIGNAL = 0.45; EXPRESSED IN HELA, SIGNAL = 2.6
CCWCCWCCWCWCWCCCCCCHRRRCLIHLEFVVAGLAKPGVAEHGLCIWV

SEQ ID NO: 30005 - protein, 27 aa, Homo sapiens
  MAP TO AL136530.3; EXPRESSED IN HELA, SIGNAL = 2.9; EXPRESSED IN LUNG, SIGNAL =   1; EXPRESSED IN FETAL LIVER, SIGNAL = 3.7; EXPRESSED IN ADULT LIVER, SIGNAL = 0.79; EXPRESSED IN BONE MARROW, SIGNAL = 3.6; EXPRESSED IN HEART, SIGNAL = 3.6
TSWGWPYHHHHRHHHHHHPSPTKEKSK

SEQ ID NO: 30006 - protein, 78 aa, Homo sapiens
  MAP TO CHR22_24.0; EXPRESSED IN PLACENTA, SIGNAL =   1; EXPRESSED IN LUNG, SIGNAL = 0.92; EXPRESSED IN HELA, SIGNAL = 1.7; EXPRESSED IN ADULT LIVER, SIGNAL = 0.83; SWISSPROT HIT: P53675, EVALUE 3.00e-42
LKLLLPWLESQIQEGCEEPATHNALAKIYIDSNNSPECFLRENAYYDSSVVGRYCEKRDPHLACVAYERGQCDLELIK

SEQ ID NO: 30007 - protein, 39 aa, Homo sapiens
  MAP TO CHR22_24.0; EXPRESSED IN PLACENTA, SIGNAL =   1; EXPRESSED IN LUNG, SIGNAL = 0.92; EXPRESSED IN HELA, SIGNAL = 1.7; EXPRESSED IN ADULT LIVER, SIGNAL = 0.83
SSCCFPGWSPRFRKAVRSLPLTMHWLKSTSTATTAPSAS

SEQ ID NO: 30008 - protein, 25 aa, Homo sapiens
  MAP TO AC011931.3; EXPRESSED IN ADULT LIVER, SIGNAL = 2.1; EXPRESSED IN HELA, SIGNAL = 1.1; EXPRESSED IN FETAL LIVER, SIGNAL = 1.7; EXPRESSED IN HEART, SIGNAL = 1.7; EXPRESSED IN PLACENTA, SIGNAL = 2.3; EXPRESSED IN LUNG, SIGNAL =   2; EXPRESSED IN BONE MARROW, SIGNAL = 1.8
QPNPSRRQRAVSRLSRSDPGVQQHH

SEQ ID NO: 30009 - protein, 17 aa, Homo sapiens
  MAP TO AC011931.3; EXPRESSED IN ADULT LIVER, SIGNAL = 2.1; EXPRESSED IN HELA, SIGNAL = 1.1; EXPRESSED IN FETAL LIVER, SIGNAL = 1.7; EXPRESSED IN HEART, SIGNAL = 1.7; EXPRESSED IN PLACENTA, SIGNAL = 2.3; EXPRESSED IN LUNG, SIGNAL =   2; EXPRESSED IN BONE MARROW, SIGNAL = 1.8
PTQPEQAAESRIQAQQK

SEQ ID NO: 30010 - protein, 65 aa, Homo sapiens
  MAP TO CHR21_69.0; EXPRESSED IN FETAL LIVER, SIGNAL = 9.6; EXPRESSED IN BONE MARROW, SIGNAL = 5.6; EXPRESSED IN PLACENTA, SIGNAL = 7.3; EXPRESSED IN LUNG, SIGNAL = 6.8; EXPRESSED IN HELA, SIGNAL = 3.6; EXPRESSED IN ADULT LIVER, SIGNAL = 7.7; SWISSPROT HIT: P33485, EVALUE 7.80e+00
SCCHHHHAREHERGQPSVSVLGRGHPGGAAGHDGRAERGRVCGQHRGGCGCPGPCPHQRAGLGEQ

SEQ ID NO: 30011 - protein, 47 aa, Homo sapiens
  MAP TO CHR22_43.0; EXPRESSED IN HELA, SIGNAL = 1.2; EXPRESSED IN FETAL LIVER, SIGNAL = 1.6; EXPRESSED IN BONE MARROW, SIGNAL = 1.4; EXPRESSED IN ADULT LIVER, SIGNAL =   2; EXPRESSED IN LUNG, SIGNAL =   2
EREVQGALHRASVRGGDRAPRHGGGGHLPHVWGGRRHPGTEGRLQRQ

SEQ ID NO: 30012 - protein, 39 aa, Homo sapiens
  MAP TO CHR22_43.0; EXPRESSED IN HELA, SIGNAL = 1.2; EXPRESSED IN FETAL LIVER, SIGNAL = 1.6; EXPRESSED IN BONE MARROW, SIGNAL = 1.4; EXPRESSED IN ADULT LIVER, SIGNAL =   2; EXPRESSED IN LUNG, SIGNAL =   2
ERGPRCPTSCVSAWRRSSAEAWRRWASTACLGWPQTSRH

SEQ ID NO: 30013 - protein, 27 aa, Homo sapiens
  MAP TO AC016729.5; EXPRESSED IN HELA, SIGNAL = 1.9; EXPRESSED IN FETAL LIVER, SIGNAL = 4.3; EXPRESSED IN LUNG, SIGNAL = 5.4; EXPRESSED IN PLACENTA, SIGNAL = 4.9; EXPRESSED IN ADULT LIVER, SIGNAL = 5.9; EXPRESSED IN BONE MARROW, SIGNAL = 3.9
LYRKHGSIYLATWLLGRPWETFSHGGR

SEQ ID NO: 30014 - protein, 29 aa, Homo sapiens
  MAP TO AL138895.4; EXPRESSED IN HELA, SIGNAL = 0.88; EXPRESSED IN HEART, SIGNAL = 2.2; EXPRESSED IN LUNG, SIGNAL = 2.8; EXPRESSED IN PLACENTA, SIGNAL = 2.2; EXPRESSED IN ADULT LIVER, SIGNAL = 2.4; EXPRESSED IN FETAL LIVER, SIGNAL = 1.9; EXPRESSED IN BONE MARROW, SIGNAL = 1.7
PKGTDRRHHHHHHHHHHHHHHHHHYGHNH

SEQ ID NO: 30015 - protein, 22 aa, Homo sapiens
  MAP TO AL138895.4; EXPRESSED IN HELA, SIGNAL = 0.88; EXPRESSED IN HEART, SIGNAL = 2.2; EXPRESSED IN LUNG, SIGNAL = 2.8; EXPRESSED IN PLACENTA, SIGNAL = 2.2; EXPRESSED IN ADULT LIVER, SIGNAL = 2.4; EXPRESSED IN FETAL LIVER, SIGNAL = 1.9; EXPRESSED IN BONE MARROW, SIGNAL = 1.7
QTTSSSSSSSSSSSSSSSSLWT

SEQ ID NO: 30016 - protein, 30 aa, Homo sapiens
  MAP TO AC016692.4; EXPRESSED IN BONE MARROW, SIGNAL = 0.59; EXPRESSED IN HELA, SIGNAL = 0.59; EXPRESSED IN PLACENTA, SIGNAL = 0.72; EXPRESSED IN LUNG, SIGNAL = 0.71; SWISSPROT HIT: Q04205, EVALUE 1.30e+00
LSRAPSPGVGSNALARTTARTPETPGLGRP

SEQ ID NO: 30017 - protein, 51 aa, Homo sapiens
  MAP TO AL133216.10; EXPRESSED IN LUNG, SIGNAL = 1.1; EXPRESSED IN FETAL LIVER, SIGNAL =   1; EXPRESSED IN ADULT LIVER, SIGNAL = 1.5; EXPRESSED IN BONE MARROW, SIGNAL = 0.68; EXPRESSED IN HELA, SIGNAL = 0.55; SWISSPROT HIT: P56937, EVALUE 5.00e-21
SQLIWTSSRNARKSNFSLEDFQHSKGKEPYSSSKYATDLLSVALNRNFQPA

SEQ ID NO: 30018 - protein, 39 aa, Homo sapiens
  MAP TO AL133216.10; EXPRESSED IN LUNG, SIGNAL = 1.1; EXPRESSED IN FETAL LIVER, SIGNAL =   1; EXPRESSED IN ADULT LIVER, SIGNAL = 1.5; EXPRESSED IN BONE MARROW, SIGNAL = 0.68; EXPRESSED IN HELA, SIGNAL = 0.55
LSSSGHHLAMQGNLISASRTSSTAKARNPTALPNMPLTF

SEQ ID NO: 30019 - protein, 55 aa, Homo sapiens
  MAP TO CHR22_101.0; EXPRESSED IN LUNG, SIGNAL = 0.71; EXPRESSED IN FETAL LIVER, SIGNAL = 0.77; EXPRESSED IN ADULT LIVER, SIGNAL = 0.99; EXPRESSED IN BONE MARROW, SIGNAL = 0.59; EXPRESSED IN HELA, SIGNAL = 1.6; SWISSPROT HIT: Q9Y295, EVALUE 2.00e-28
VYIPCIYVLNKIDQISIEELDIIYKVPHCVPISAHHRWNFDDLLEKIWDYLKLVR

SEQ ID NO: 30020 - protein, 55 aa, Homo sapiens
  MAP TO AL137157.2; EXPRESSED IN BONE MARROW, SIGNAL = 4.2; EXPRESSED IN HEART, SIGNAL = 4.7; EXPRESSED IN PLACENTA, SIGNAL = 2.7; EXPRESSED IN LUNG, SIGNAL = 2.5; EXPRESSED IN HELA, SIGNAL =  13; EXPRESSED IN ADULT LIVER, SIGNAL = 5.5; EXPRESSED IN FETAL LIVER, SIGNAL = 5.2
VTIILLQIPSQTGLLPDLQQGFPLLPHEIYSNQRCKEHLNSYFLQEVFPDHLQLK

SEQ ID NO: 30021 - protein, 40 aa, Homo sapiens
  MAP TO AL138499.1; EXPRESSED IN FETAL LIVER, SIGNAL = 0.73; EXPRESSED IN LUNG, SIGNAL = 1.1; EXPRESSED IN ADULT LIVER, SIGNAL = 1.3; EXPRESSED IN BONE MARROW, SIGNAL = 0.6; EXPRESSED IN HELA, SIGNAL = 0.65
ESSEKETMSVSLNQTVTQLQQLLQAVNQQLTKEKEHYQVL

SEQ ID NO: 30022 - protein, 65 aa, Homo sapiens
  MAP TO CHR22_83.0; EXPRESSED IN HELA, SIGNAL =   2; SWISSPROT HIT: P13290, EVALUE 2.10e+00
RSSSQPPGSHSGTCRIRAAAAAPPAPAPPAFSTPCPQSPPGLRSSPYQPSSHWPASLCPWSPSNP

SEQ ID NO: 30023 - protein, 33 aa, Homo sapiens
  MAP TO AL139135.2; EXPRESSED IN HELA, SIGNAL = 0.65; EXPRESSED IN FETAL LIVER, SIGNAL = 0.82; EXPRESSED IN PLACENTA, SIGNAL = 0.62; EXPRESSED IN LUNG, SIGNAL = 0.65; EXPRESSED IN BONE MARROW, SIGNAL = 0.78
MTSSKTLNNSENNQFSHMSSFQEEDLYDFIIRH

SEQ ID NO: 30024 - protein, 48 aa, Homo sapiens
  MAP TO AL136304.2; EXPRESSED IN FETAL LIVER, SIGNAL = 5.4; EXPRESSED IN BONE MARROW, SIGNAL = 5.8; EXPRESSED IN HEART, SIGNAL = 5.6; EXPRESSED IN PLACENTA, SIGNAL =   8; EXPRESSED IN LUNG, SIGNAL = 7.8; EXPRESSED IN ADULT LIVER, SIGNAL = 7.9; EXPRESSED IN HELA, SIGNAL = 4.4
MRMALAPWVGCWTSTWSVRKLSSTPRAAAQLSSRGCAVSLTCWCMSSP

SEQ ID NO: 30025 - protein, 48 aa, Homo sapiens
  MAP TO CHR22_152.0; EXPRESSED IN HELA, SIGNAL = 0.83; EXPRESSED IN ADULT LIVER, SIGNAL = 0.29; SWISSPROT HIT: Q39578, EVALUE 3.70e+00
IQAGVSVPAHTVHTAHTSSGELLVHISPQVHFQCCHVVPEICHRNWPM

SEQ ID NO: 30026 - protein, 49 aa, Homo sapiens
  MAP TO CHR22_152.0; EXPRESSED IN HELA, SIGNAL = 0.83; EXPRESSED IN ADULT LIVER, SIGNAL = 0.29; SWISSPROT HIT: P43975, EVALUE 4.80e+00
ASKQVSQCQLTPFTLLTPALESCLYTSLHKSTFSVATWYRKFAIEIGRW

SEQ ID NO: 30027 - protein, 23 aa, Homo sapiens
  MAP TO CHR22_108.0; EXPRESSED IN BONE MARROW, SIGNAL = 2.1; EXPRESSED IN HEART, SIGNAL =   2; EXPRESSED IN LUNG, SIGNAL = 2.1; EXPRESSED IN PLACENTA, SIGNAL = 2.1; EXPRESSED IN ADULT LIVER, SIGNAL = 2.2; EXPRESSED IN HELA, SIGNAL = 0.61
GCRRHHHHRHHPCPTANQRWELG

SEQ ID NO: 30028 - protein, 18 aa, Homo sapiens
  MAP TO CHR22_147.0; EXPRESSED IN HELA, SIGNAL = 0.7
TGLKPSSSAIPVVSVTGF

SEQ ID NO: 30029 - protein, 34 aa, Homo sapiens
  MAP TO CHR22_52.0; EXPRESSED IN HELA, SIGNAL = 0.52; EXPRESSED IN FETAL LIVER, SIGNAL = 0.54; EXPRESSED IN BONE MARROW, SIGNAL = 0.48; SWISSPROT HIT: Q9YF35, EVALUE 8.60e+00
EGAEVPRGGWGGSQPSLGLLHHAVHVPSGGRGLH

SEQ ID NO: 30030 - protein, 59 aa, Homo sapiens
  MAP TO CHR22_52.0; EXPRESSED IN HELA, SIGNAL = 0.52; EXPRESSED IN FETAL LIVER, SIGNAL = 0.54; EXPRESSED IN BONE MARROW, SIGNAL = 0.48
YILAQSKYCYMHWKLLSQAPALSQMKVLKFPGVAGAGASQAWGFSTTLCMCPVVVGAFM

SEQ ID NO: 30031 - protein, 47 aa, Homo sapiens
  MAP TO AC015956.3; EXPRESSED IN BONE MARROW, SIGNAL = 0.59; EXPRESSED IN LUNG, SIGNAL =   1; EXPRESSED IN ADULT LIVER, SIGNAL = 0.72; EXPRESSED IN HELA, SIGNAL = 0.88; EXPRESSED IN FETAL LIVER, SIGNAL = 0.57; SWISSPROT HIT: P07609, EVALUE 9.80e-01
PTVRAELMEQVPHIALFCQENRPSIPYAFSKFLLPIVVRYLADQNNQ

SEQ ID NO: 30032 - protein, 58 aa, Homo sapiens
  MAP TO AJ239319.2; EXPRESSED IN FETAL LIVER, SIGNAL = 5.2; EXPRESSED IN BONE MARROW, SIGNAL = 4.3; EXPRESSED IN HELA, SIGNAL = 0.72; EXPRESSED IN LUNG, SIGNAL = 6.2; EXPRESSED IN ADULT LIVER, SIGNAL = 7.6; SWISSPROT HIT: P21675, EVALUE 9.00e-28
IKKLSRWEVIDVVRTMSTEQARSGEGPMSKFARGSRFSVAEHQERYKEECQRIFDLQN

SEQ ID NO: 30033 - protein, 38 aa, Homo sapiens
  MAP TO AC011636.3; EXPRESSED IN BONE MARROW, SIGNAL = 2.9; EXPRESSED IN HEART, SIGNAL = 2.3; EXPRESSED IN PLACENTA, SIGNAL = 3.2; EXPRESSED IN LUNG, SIGNAL = 2.9; EXPRESSED IN ADULT LIVER, SIGNAL = 2.7; EXPRESSED IN HELA, SIGNAL = 1.6
QKHVASPECPREKKEEKQEKVEPGYWGLPLKSTFPTAP

SEQ ID NO: 30034 - protein, 27 aa, Homo sapiens
  MAP TO AL133520.2; EXPRESSED IN FETAL LIVER, SIGNAL = 3.2; EXPRESSED IN PLACENTA, SIGNAL =   3; EXPRESSED IN LUNG, SIGNAL = 3.3; EXPRESSED IN ADULT LIVER, SIGNAL = 3.5; EXPRESSED IN BONE MARROW, SIGNAL =   3; EXPRESSED IN HELA, SIGNAL = 1.9
VGVFRTAASASPGKLLAMQILRPVSDL

SEQ ID NO: 30035 - protein, 65 aa, Homo sapiens
  MAP TO CHR22_83.0; EXPRESSED IN HELA, SIGNAL =   2; SWISSPROT HIT: Q9UJY5, EVALUE 2.00e-10
EKQQPTPRLTLRDLQNKSSSCSSPSSSATSLLHTVSPEPPRPPQQPVPTELSLASITVPLESIKP

SEQ ID NO: 30036 - protein, 29 aa, Homo sapiens
  MAP TO AC020588.4; EXPRESSED IN FETAL LIVER, SIGNAL = 2.7; EXPRESSED IN BONE MARROW, SIGNAL = 2.5; EXPRESSED IN LUNG, SIGNAL = 8.4; EXPRESSED IN ADULT LIVER, SIGNAL = 5.3; EXPRESSED IN HELA, SIGNAL = 4.3
MKLKLGEMMLRRCLTNSKASSSLTRFFII

SEQ ID NO: 30037 - protein, 24 aa, Homo sapiens
  MAP TO CHR22_122.0; EXPRESSED IN FETAL LIVER, SIGNAL = 0.8; EXPRESSED IN BONE MARROW, SIGNAL = 0.9; EXPRESSED IN PLACENTA, SIGNAL = 0.76; EXPRESSED IN LUNG, SIGNAL = 0.96; EXPRESSED IN ADULT LIVER, SIGNAL = 0.87; EXPRESSED IN HELA, SIGNAL = 0.55
CDGDDDDGDEDNGVDGDDHNDDDD

SEQ ID NO: 30038 - protein, 44 aa, Homo sapiens
  MAP TO CHR22_138.0; EXPRESSED IN HELA, SIGNAL = 0.97; EXPRESSED IN PLACENTA, SIGNAL = 0.35; SWISSPROT HIT: P09352, EVALUE 6.40e+00
GNRDVVGQWPNSGHWEHSPGVSGGVTETRCALRLLYHRTGGHQI

SEQ ID NO: 30039 - protein, 30 aa, Homo sapiens
  MAP TO AC016672.4; EXPRESSED IN HELA, SIGNAL = 0.55; EXPRESSED IN LUNG, SIGNAL = 0.6
PWPVPWMSTDPKKGLHMSRSSCVGPNASIV

SEQ ID NO: 30040 - protein, 34 aa, Homo sapiens
  MAP TO CHR22_141.0; EXPRESSED IN HELA, SIGNAL = 1.3; SWISSPROT HIT: P35626, EVALUE 5.00e-14
IKEYEKLDNEEDRLCRSRQIYDAYIMKELLSCSH

SEQ ID NO: 30041 - protein, 20 aa, Homo sapiens
  MAP TO CHR21_10.0; EXPRESSED IN HELA, SIGNAL = 0.69; EXPRESSED IN FETAL LIVER, SIGNAL = 0.43; EXPRESSED IN ADULT LIVER, SIGNAL = 0.47; EXPRESSED IN BONE MARROW, SIGNAL = 0.44
VSRMVHCSDPQGCLLYSPAL

SEQ ID NO: 30042 - protein, 90 aa, Homo sapiens
  MAP TO AC013341.3; EXPRESSED IN LUNG, SIGNAL = 2.4; EXPRESSED IN HELA, SIGNAL = 0.9; EXPRESSED IN ADULT LIVER, SIGNAL = 2.7
KTICILSTQDFMALFHIFRDITIHTCTHKCARAHTHTHTHTHIHRTRLMRYVFQEVLVSNSPVQSICKPTGSPVIVIKSELEVSSWLGKF

SEQ ID NO: 30043 - protein, 59 aa, Homo sapiens
  MAP TO AL137068.1; EXPRESSED IN HELA, SIGNAL = 1.7; EXPRESSED IN FETAL LIVER, SIGNAL = 1.8; EXPRESSED IN BONE MARROW, SIGNAL = 1.7; EXPRESSED IN PLACENTA, SIGNAL = 2.7; EXPRESSED IN ADULT LIVER, SIGNAL = 2.3; EXPRESSED IN LUNG, SIGNAL = 2.6; SWISSPROT HIT: P57784, EVALUE 1.70e-02
ISKLKPLQDLISLILVENPVVTLPHYLQFTIFHLRSLESLEGQPVTTQDRQEAFERFSL

SEQ ID NO: 30044 - protein, 30 aa, Homo sapiens
  MAP TO AC020996.4; EXPRESSED IN BONE MARROW, SIGNAL = 4.3; EXPRESSED IN HELA, SIGNAL = 1.7; EXPRESSED IN PLACENTA, SIGNAL = 7.1; EXPRESSED IN LUNG, SIGNAL = 6.1; EXPRESSED IN FETAL LIVER, SIGNAL = 3.9; EXPRESSED IN ADULT LIVER, SIGNAL = 5.6
IWTMKSRMRCSQMEMRNLLGTGVKITLLML

SEQ ID NO: 30045 - protein, 30 aa, Homo sapiens
  MAP TO AC020550.2; EXPRESSED IN HELA, SIGNAL = 2.5; EXPRESSED IN ADULT LIVER, SIGNAL = 4.3; EXPRESSED IN PLACENTA, SIGNAL = 0.79; EXPRESSED IN LUNG, SIGNAL = 1.9; EXPRESSED IN FETAL LIVER, SIGNAL = 1.4; SWISSPROT HIT: P26772, EVALUE 6.00e-11
GGEIQPVSVKVGDKVLLPEYGGTKVVLDDK

SEQ ID NO: 30046 - protein, 117 aa, Homo sapiens
  MAP TO AL136444.1; EXPRESSED IN FETAL LIVER, SIGNAL = 0.86; EXPRESSED IN HELA, SIGNAL = 2.4; EXPRESSED IN ADULT LIVER, SIGNAL = 1.3; EXPRESSED IN PLACENTA, SIGNAL = 0.97; EXPRESSED IN LUNG, SIGNAL =   1; SWISSPROT HIT: P35372, EVALUE 2.00e-57
YTKMKTATNIYIFNLALADALATSTLPFQSVNYLMGTWPFGTILCKIVISIDYYNMFTSIFTLCTMSVDRYIAVCHPVKALDFRTPRNAKIINVCNWILSSAIGLPVMFMATTKYRQ

SEQ ID NO: 30047 - protein, 29 aa, Homo sapiens
  MAP TO AL133552.2; EXPRESSED IN LUNG, SIGNAL = 0.9; EXPRESSED IN FETAL LIVER, SIGNAL = 2.9; EXPRESSED IN BONE MARROW, SIGNAL = 3.2; EXPRESSED IN HELA, SIGNAL = 2.4; EXPRESSED IN HEART, SIGNAL = 3.1
RLMAWLCPIEWRNPRGGCITSKGWASQGC

SEQ ID NO: 30048 - protein, 50 aa, Homo sapiens
  MAP TO AL137846.1; EXPRESSED IN PLACENTA, SIGNAL = 3.1; EXPRESSED IN LUNG, SIGNAL = 4.1; EXPRESSED IN HELA, SIGNAL =  12; SWISSPROT HIT: Q09841, EVALUE 7.00e-09
EEEAKNLVSEAIAAGIFNDLGSGSNIDLCVISKNKLDFLRPYTVPNKKGT

SEQ ID NO: 30049 - protein, 19 aa, Homo sapiens
  MAP TO AF238280.1; EXPRESSED IN HELA, SIGNAL = 1.7; EXPRESSED IN FETAL LIVER, SIGNAL = 5.3; EXPRESSED IN LUNG, SIGNAL = 8.1; EXPRESSED IN PLACENTA, SIGNAL = 7.6; EXPRESSED IN ADULT LIVER, SIGNAL = 8.3; EXPRESSED IN BONE MARROW, SIGNAL = 5.7
DFSLDFIVHIIFSILVKAI

SEQ ID NO: 30050 - protein, 75 aa, Homo sapiens
  MAP TO CHR22_4.0; EXPRESSED IN LUNG, SIGNAL = 2.4; EXPRESSED IN BONE MARROW, SIGNAL = 1.4; EXPRESSED IN ADULT LIVER, SIGNAL = 2.1; EXPRESSED IN HELA, SIGNAL = 1.3; EXPRESSED IN FETAL LIVER, SIGNAL = 1.7; SWISSPROT HIT: O04379, EVALUE 4.10e-02
GMSCLLVFKVICILPNDDKRRYDSIKRYLCTKCPIPSQCVVKKTLEKVQARTIVTKIAQQMNCKMGGALWKVETD

SEQ ID NO: 30051 - protein, 63 aa, Homo sapiens
  MAP TO CHR22_153.0; EXPRESSED IN BONE MARROW, SIGNAL = 0.43; EXPRESSED IN ADULT LIVER, SIGNAL = 0.44; EXPRESSED IN HELA, SIGNAL = 2.4; EXPRESSED IN FETAL LIVER, SIGNAL = 0.4; SWISSPROT HIT: Q14112, EVALUE 2.50e+00
LSLVWAHPAAGLTFACKNTAPKHSQYPKNSPCHLWRHRCWPSCSCQCCPGSWRAAGQEPSPSG

SEQ ID NO: 30052 - protein, 34 aa, Homo sapiens
  MAP TO AL135920.4; EXPRESSED IN FETAL LIVER, SIGNAL = 2.5; EXPRESSED IN BONE MARROW, SIGNAL = 2.5; EXPRESSED IN HEART, SIGNAL = 2.8; EXPRESSED IN HELA, SIGNAL = 3.8; EXPRESSED IN LUNG, SIGNAL = 3.7; EXPRESSED IN ADULT LIVER, SIGNAL = 3.9; EXPRESSED IN PLACENTA, SIGNAL = 3.4
NMRSHSHQQRTTLCFSPKPHRDLLYYLSDNSYPK

SEQ ID NO: 30053 - protein, 54 aa, Homo sapiens
  MAP TO AL136987.1; EXPRESSED IN LUNG, SIGNAL = 2.8; EXPRESSED IN ADULT LIVER, SIGNAL = 2.2; EXPRESSED IN HELA, SIGNAL =   2; EXPRESSED IN PLACENTA, SIGNAL = 1.9; EXPRESSED IN FETAL LIVER, SIGNAL = 1.6; EXPRESSED IN BONE MARROW, SIGNAL = 1.7; EXPRESSED IN HEART, SIGNAL = 1.8; SWISSPROT HIT: Q08116, EVALUE 2.00e-26
GQNVFGSFLKSEFSEENIEFWLACEDYKKTESDLLPCKAEEIYKAFVHSDAAKQ

SEQ ID NO: 30054 - protein, 48 aa, Homo sapiens
  MAP TO AL138781.2; EXPRESSED IN HEART, SIGNAL = 1.7; EXPRESSED IN PLACENTA, SIGNAL = 1.9; EXPRESSED IN LUNG, SIGNAL = 1.7; EXPRESSED IN HELA, SIGNAL = 2.2; EXPRESSED IN FETAL LIVER, SIGNAL = 1.9; EXPRESSED IN BONE MARROW, SIGNAL = 1.7; SWISSPROT HIT: P07304, EVALUE 4.80e+00
VILDLIPYESIVVTRALDGDKAFLEKLGVSSVPSCYLIYPNGSHGLIN

SEQ ID NO: 30055 - protein, 19 aa, Homo sapiens
  MAP TO CHR22_21.0; EXPRESSED IN HELA, SIGNAL = 2.7; EXPRESSED IN FETAL LIVER, SIGNAL = 1.7; EXPRESSED IN BONE MARROW, SIGNAL = 1.6; EXPRESSED IN LUNG, SIGNAL = 1.9; EXPRESSED IN ADULT LIVER, SIGNAL = 1.8; EXPRESSED IN PLACENTA, SIGNAL = 1.7
LSWPCPCLARSVGPSSGGR

SEQ ID NO: 30056 - protein, 34 aa, Homo sapiens
  MAP TO AL035633.18; EXPRESSED IN FETAL LIVER, SIGNAL = 1.5; EXPRESSED IN HELA, SIGNAL = 0.81; EXPRESSED IN PLACENTA, SIGNAL = 1.4; EXPRESSED IN LUNG, SIGNAL = 1.1; EXPRESSED IN ADULT LIVER, SIGNAL =   1
KLFPPSSLVDPTLTPLTRRASQSSLESSTGPPCI

SEQ ID NO: 30057 - protein, 34 aa, Homo sapiens
  MAP TO AL035633.18; EXPRESSED IN FETAL LIVER, SIGNAL = 1.5; EXPRESSED IN HELA, SIGNAL = 0.81; EXPRESSED IN PLACENTA, SIGNAL = 1.4; EXPRESSED IN LUNG, SIGNAL = 1.1; EXPRESSED IN ADULT LIVER, SIGNAL =   1
NCSHRPHWWIPHSLPSPGGLPSHLWKVQLGLPVF

SEQ ID NO: 30058 - protein, 25 aa, Homo sapiens
  MAP TO CHR21_28.0; EXPRESSED IN FETAL LIVER, SIGNAL = 2.8; EXPRESSED IN BONE MARROW, SIGNAL = 3.6; EXPRESSED IN HEART, SIGNAL = 1.9; EXPRESSED IN PLACENTA, SIGNAL = 1.7; EXPRESSED IN LUNG, SIGNAL = 3.5; EXPRESSED IN HELA, SIGNAL =   4; EXPRESSED IN ADULT LIVER, SIGNAL = 3.6
VASLVFSDLGFLASRISRNGILGHA

SEQ ID NO: 30059 - protein, 68 aa, Homo sapiens
  MAP TO CHR21_66.0; EXPRESSED IN FETAL LIVER, SIGNAL = 1.2; EXPRESSED IN BONE MARROW, SIGNAL = 1.3; EXPRESSED IN PLACENTA, SIGNAL = 0.73; EXPRESSED IN LUNG, SIGNAL = 0.83; EXPRESSED IN ADULT LIVER, SIGNAL = 0.8; EXPRESSED IN HELA, SIGNAL = 3.8; SWISSPROT HIT: P23726, EVALUE 3.10e-01
LPRQKELLPIFSFMCLVALLYHTGHVSGAAPHPSPDRVPQGKADTSLIFAPPETSTAPKTEFVLPKCV

SEQ ID NO: 30060 - protein, 22 aa, Homo sapiens
  MAP TO CHR21_33.0; EXPRESSED IN FETAL LIVER, SIGNAL = 1.9; EXPRESSED IN BONE MARROW, SIGNAL = 2.2; EXPRESSED IN HEART, SIGNAL = 1.5; EXPRESSED IN LUNG, SIGNAL = 1.3; EXPRESSED IN ADULT LIVER, SIGNAL = 1.5; EXPRESSED IN PLACENTA, SIGNAL = 1.1; EXPRESSED IN HELA, SIGNAL = 4.2
AYSMIYDIQYPGEQHNISLPCG

SEQ ID NO: 30061 - protein, 76 aa, Homo sapiens
  MAP TO AL132671.19; EXPRESSED IN FETAL LIVER, SIGNAL = 0.93; EXPRESSED IN HELA, SIGNAL = 0.54; SWISSPROT HIT: P08922, EVALUE 8.00e-35
INPFPHLITLLGNKIVFLDMDQNQVVWTFSAERVISAVCYTADNEMGYYAEGDSLFLLHLHNRSSSEVFHYVILPK

SEQ ID NO: 30062 - protein, 57 aa, Homo sapiens
  MAP TO CHR21_69.0; EXPRESSED IN BONE MARROW, SIGNAL =  23; EXPRESSED IN ADULT LIVER, SIGNAL =  18; EXPRESSED IN HELA, SIGNAL =  18; EXPRESSED IN HEART, SIGNAL =  20; EXPRESSED IN FETAL LIVER, SIGNAL =  20; EXPRESSED IN PLACENTA, SIGNAL =  23; EXPRESSED IN LUNG, SIGNAL =  24; SWISSPROT HIT: P55347, EVALUE 2.00e-28
HPLFPLLALLFEKCEQSTQGSEGTTSASFDVDIENFVRKQEKEGKPFFCEDPETDNL

SEQ ID NO: 30063 - protein, 29 aa, Homo sapiens
  MAP TO AL121954.3; EXPRESSED IN LUNG, SIGNAL = 1.1; EXPRESSED IN HELA, SIGNAL = 0.59; EXPRESSED IN PLACENTA, SIGNAL = 0.95; EXPRESSED IN ADULT LIVER, SIGNAL = 0.95; EXPRESSED IN FETAL LIVER, SIGNAL = 0.7; EXPRESSED IN BONE MARROW, SIGNAL = 0.73
FTLLKICFNFKSDDKKVWTPLQDQPDKSL

SEQ ID NO: 30064 - protein, 76 aa, Homo sapiens
  MAP TO AL138840.1; EXPRESSED IN HELA, SIGNAL = 1.2; EXPRESSED IN FETAL LIVER, SIGNAL = 2.8; EXPRESSED IN BONE MARROW, SIGNAL = 2.9; EXPRESSED IN PLACENTA, SIGNAL = 2.9; EXPRESSED IN ADULT LIVER, SIGNAL = 2.8; SWISSPROT HIT: P22333, EVALUE 5.10e+00
VILLLLLLLLLLLLFLLLLLLLLLVGPRALLIAWLSDQLPALSLGSNDLGHPGQVFFSGPIIYGQGMELQGVDTAA

SEQ ID NO: 30065 - protein, 63 aa, Homo sapiens
  MAP TO AL137798.1; EXPRESSED IN LUNG, SIGNAL = 2.3; EXPRESSED IN PLACENTA, SIGNAL = 2.6; EXPRESSED IN BONE MARROW, SIGNAL = 1.9; EXPRESSED IN HELA, SIGNAL = 1.8; EXPRESSED IN FETAL LIVER, SIGNAL = 2.1; SWISSPROT HIT: P50478, EVALUE 9.30e-01
AAQAGPAAAGPPGRPAACATRRPAPPAAASATPRSGVPAPWALASPAHQIAATEPAPAAGKGP

SEQ ID NO: 30066 - protein, 55 aa, Homo sapiens
  MAP TO AC016692.4; EXPRESSED IN HELA, SIGNAL = 3.1; EXPRESSED IN ADULT LIVER, SIGNAL = 2.9
MEEEAARLRHEEEERKRKELEVQRQKELMRQRQQQQEALRRLQQQQQQQQLAQMK

SEQ ID NO: 30067 - protein, 17 aa, Homo sapiens
  MAP TO AC016692.4; EXPRESSED IN HELA, SIGNAL = 3.1; EXPRESSED IN ADULT LIVER, SIGNAL = 2.9
KRRLQNGPGKKKKPSVD

SEQ ID NO: 30068 - protein, 29 aa, Homo sapiens
  MAP TO AL137798.1; EXPRESSED IN BONE MARROW, SIGNAL = 1.9; EXPRESSED IN HELA, SIGNAL = 5.7; EXPRESSED IN FETAL LIVER, SIGNAL = 1.8; EXPRESSED IN ADULT LIVER, SIGNAL = 5.6
SLAPPLLPQTSAWWYQLALGPARRQRRTF

SEQ ID NO: 30069 - protein, 26 aa, Homo sapiens
  MAP TO AC011931.3; EXPRESSED IN PLACENTA, SIGNAL = 1.4; EXPRESSED IN LUNG, SIGNAL = 1.3; EXPRESSED IN ADULT LIVER, SIGNAL = 1.2; EXPRESSED IN HELA, SIGNAL = 1.1; EXPRESSED IN FETAL LIVER, SIGNAL = 1.3
PQMTSLWPQQSVPAMMRTLTPVSRAQ

SEQ ID NO: 30070 - protein, 149 aa, Homo sapiens
  MAP TO AC017050.4; EXPRESSED IN HELA, SIGNAL = 1.1; EXPRESSED IN FETAL LIVER, SIGNAL = 0.64; EXPRESSED IN PLACENTA, SIGNAL = 0.77; EXPRESSED IN ADULT LIVER, SIGNAL =   1; EXPRESSED IN BONE MARROW, SIGNAL = 0.84; SWISSPROT HIT: O35682, EVALUE 8.00e-28
PVPRPFPRPRHRRHRLLWHRLCGLRHRSNLDPARPGEITDYMASELGLLKVLETFVACLIFVFINSPYVYHNRPALEWWVAVYALCFVLAALTILLSLGHCTNMLPIRFPSFLLGLALLSVLLYATALVLWPLYQFNEKYGVQPWQTRD

SEQ ID NO: 30071 - protein, 49 aa, Homo sapiens
  MAP TO AC017050.4; EXPRESSED IN HELA, SIGNAL = 1.1; EXPRESSED IN FETAL LIVER, SIGNAL = 0.64; EXPRESSED IN PLACENTA, SIGNAL = 0.77; EXPRESSED IN ADULT LIVER, SIGNAL =   1; EXPRESSED IN BONE MARROW, SIGNAL = 0.84; SWISSPROT HIT: O35682, EVALUE 9.00e-10
FLSHGRSRDHAIAAIVFSGIACVAYATEVTWTRPGPARSLTTWPPSWGC

SEQ ID NO: 30072 - protein, 57 aa, Homo sapiens
  MAP TO CHR22_173.0; EXPRESSED IN HELA, SIGNAL = 1.1; EXPRESSED IN ADULT LIVER, SIGNAL = 2.8; EXPRESSED IN FETAL LIVER, SIGNAL = 2.4; EXPRESSED IN BONE MARROW, SIGNAL = 2.8; SWISSPROT HIT: P38432, EVALUE 1.60e+00
AILTAAQWGYRSCGHSPAHQPTVAPGMLPHCTAFWKESLANVNSCSALTANTPWSHT

SEQ ID NO: 30073 - protein, 22 aa, Homo sapiens
  MAP TO CHR22_173.0; EXPRESSED IN HELA, SIGNAL = 1.1; EXPRESSED IN ADULT LIVER, SIGNAL = 2.8; EXPRESSED IN FETAL LIVER, SIGNAL = 2.4; EXPRESSED IN BONE MARROW, SIGNAL = 2.8
PSSLLPSGAIAPVDTAQLISPQ

SEQ ID NO: 30074 - protein, 49 aa, Homo sapiens
  MAP TO AL121939.3; EXPRESSED IN HELA, SIGNAL = 1.2; EXPRESSED IN HEART, SIGNAL = 1.3; EXPRESSED IN PLACENTA, SIGNAL = 1.5; EXPRESSED IN LUNG, SIGNAL = 1.5; EXPRESSED IN ADULT LIVER, SIGNAL = 1.2; EXPRESSED IN FETAL LIVER, SIGNAL = 1.2; EXPRESSED IN BONE MARROW, SIGNAL = 1.5; SWISSPROT HIT: Q61548, EVALUE 3.00e-03
FDGLGDLLMPTMAPAGQPAPVSMVPPSPAMAASKALGSDLDSSLASLVG

SEQ ID NO: 30075 - protein, 62 aa, Homo sapiens
  MAP TO AL132875.5; EXPRESSED IN HELA, SIGNAL = 1.1; EXPRESSED IN FETAL LIVER, SIGNAL = 0.7; EXPRESSED IN BONE MARROW, SIGNAL = 0.7; EXPRESSED IN LUNG, SIGNAL = 0.79; SWISSPROT HIT: Q03574, EVALUE 7.30e-02
KRVENWPLMQSPWPTLSISTLYLLFVWLGPKWMKDREPFQMRLVLIIYNFGMVLLNLFIFRE

SEQ ID NO: 30076 - protein, 77 aa, Homo sapiens
  MAP TO CHR22_126.0; EXPRESSED IN HELA, SIGNAL = 1.2; EXPRESSED IN FETAL LIVER, SIGNAL = 1.1; EXPRESSED IN PLACENTA, SIGNAL = 1.2; EXPRESSED IN LUNG, SIGNAL = 1.3; EXPRESSED IN BONE MARROW, SIGNAL =   1; EXPRESSED IN ADULT LIVER, SIGNAL = 1.5; SWISSPROT HIT: Q9Z0H3, EVALUE 4.00e-25
KLMTPEMFSEILCDDLDLNPLTFVPAIASAIRQQIESYPTDSILEDQSDQRVIIKVGDFSPSTGAFLALRVGVIMEH

SEQ ID NO: 30077 - protein, 50 aa, Homo sapiens
  MAP TO AL160192.1; EXPRESSED IN FETAL LIVER, SIGNAL =  44; EXPRESSED IN PLACENTA, SIGNAL =  27; EXPRESSED IN ADULT LIVER, SIGNAL =  47; EXPRESSED IN LUNG, SIGNAL =  43; EXPRESSED IN HELA, SIGNAL =  20; SWISSPROT HIT: Q90835, EVALUE 3.00e-16
MYHEALSEALPRDNVSFNVKKVPVKDVHCGNTAGNSKNDPPVEEAGFTAQ

SEQ ID NO: 30078 - protein, 59 aa, Homo sapiens
  MAP TO AC022525.3; EXPRESSED IN PLACENTA, SIGNAL = 0.7; EXPRESSED IN LUNG, SIGNAL = 0.71; EXPRESSED IN HELA, SIGNAL = 0.55; EXPRESSED IN ADULT LIVER, SIGNAL = 0.67; EXPRESSED IN FETAL LIVER, SIGNAL = 0.63; EXPRESSED IN BONE MARROW, SIGNAL = 0.73; SWISSPROT HIT: P35563, EVALUE 2.70e+00
MDTFNDSASVNWVCPYPSLLMAVSIHSFIVSETVPFTAPDFPILVVYIFKNIHPFAIIF

SEQ ID NO: 30079 - protein, 44 aa, Homo sapiens
  MAP TO CHR22_75.0; EXPRESSED IN HELA, SIGNAL = 5.7; SWISSPROT HIT: Q9Y512, EVALUE 3.00e-19
VLGLKLPNLLGRAEKVTFQFSYGTKETSYGLSFFKPRPGNFERK

SEQ ID NO: 30080 - protein, 73 aa, Homo sapiens
  MAP TO CHR22_144.0; EXPRESSED IN ADULT LIVER, SIGNAL = 0.31; EXPRESSED IN HELA, SIGNAL =   1
RRRGRGRGRGRRRRRRRRRKDEEEERRKRMRRRRRRRRRRRRKRRRRRRRKRRRRRKRRRRRRRGREKKGKGE

SEQ ID NO: 30081 - protein, 25 aa, Homo sapiens
  MAP TO AL138889.2; EXPRESSED IN HELA, SIGNAL = 3.2; EXPRESSED IN FETAL LIVER, SIGNAL = 1.9; EXPRESSED IN HEART, SIGNAL = 1.1; EXPRESSED IN LUNG, SIGNAL = 1.3; EXPRESSED IN BONE MARROW, SIGNAL = 1.9; EXPRESSED IN PLACENTA, SIGNAL = 1.1; EXPRESSED IN ADULT LIVER, SIGNAL = 1.3
PLMKMLWRYLANNIFKVMRRGELNC

SEQ ID NO: 30082 - protein, 81 aa, Homo sapiens
  MAP TO U82695.2; EXPRESSED IN PLACENTA, SIGNAL = 0.96; EXPRESSED IN HELA, SIGNAL = 0.7; EXPRESSED IN ADULT LIVER, SIGNAL = 1.1; EXPRESSED IN LUNG, SIGNAL = 1.1; EXPRESSED IN BONE MARROW, SIGNAL =   1; SWISSPROT HIT: Q16720, EVALUE 4.00e-41
PPEKEGALPRQVGNKTECALLGFVLDLKRDFQPVREQIPEDKLYKVYTFNSVRKSMSTVIRMPDGGFRLFSKGASEILLKK

SEQ ID NO: 30083 - protein, 41 aa, Homo sapiens
  MAP TO AL133500.2; EXPRESSED IN HELA, SIGNAL = 0.97; EXPRESSED IN HEART, SIGNAL = 1.9; EXPRESSED IN FETAL LIVER, SIGNAL =   2; EXPRESSED IN PLACENTA, SIGNAL = 2.1; EXPRESSED IN LUNG, SIGNAL = 2.1; EXPRESSED IN ADULT LIVER, SIGNAL = 1.9; EXPRESSED IN BONE MARROW, SIGNAL = 2.2; SWISSPROT HIT: P34620, EVALUE 3.80e+00
VAKSNGQFSVLILLDFSAAYDTVGHSLFLETLSSQEDNTLF

SEQ ID NO: 30084 - protein, 30 aa, Homo sapiens
  MAP TO AL137070.3; EXPRESSED IN ADULT LIVER, SIGNAL = 6.5; EXPRESSED IN BONE MARROW, SIGNAL =   5; EXPRESSED IN HELA, SIGNAL = 3.4; EXPRESSED IN FETAL LIVER, SIGNAL =   4
WCVWSLFFLMFGSVRSFFLLVGLWSRWLQE

SEQ ID NO: 30085 - protein, 79 aa, Homo sapiens
  MAP TO AC005627.2; EXPRESSED IN HELA, SIGNAL = 3.3; EXPRESSED IN FETAL LIVER, SIGNAL = 2.1; SWISSPROT HIT: Q60675, EVALUE 3.30e+00
SSWLGLQAQLLPHNSLFWPSSCPAHGGQCRPKTSSSQTLQAHLLLPGGMNRPSFDLRTASAGPALASQGLFPGPALASW

SEQ ID NO: 30086 - protein, 28 aa, Homo sapiens
  MAP TO AC004845.2; EXPRESSED IN HELA, SIGNAL = 0.86; EXPRESSED IN FETAL LIVER, SIGNAL =   1; EXPRESSED IN ADULT LIVER, SIGNAL = 1.2
QLDRFLSPLQRAFLWPTKTSWRWLKLAY

SEQ ID NO: 30087 - protein, 68 aa, Homo sapiens
  MAP TO CHR22_72.0; EXPRESSED IN ADULT LIVER, SIGNAL = 0.44; EXPRESSED IN BONE MARROW, SIGNAL = 0.45; EXPRESSED IN HELA, SIGNAL = 2.9; SWISSPROT HIT: Q9Y217, EVALUE 7.00e-04
HQSNGAVIARCGQPEVSWWGWRNADDEHLVQSVAKACASDSRSSGSKLSTRNTSRDFPNGGDLSDVEF

SEQ ID NO: 30088 - protein, 29 aa, Homo sapiens
  MAP TO AL135920.4; EXPRESSED IN BONE MARROW, SIGNAL = 8.7; EXPRESSED IN HELA, SIGNAL = 3.5; EXPRESSED IN FETAL LIVER, SIGNAL =  13; EXPRESSED IN HEART, SIGNAL =   8
ERERKREGGRRRRRRRRGRRRRKRRRRRR

SEQ ID NO: 30089 - protein, 60 aa, Homo sapiens
  MAP TO AL137855.1; EXPRESSED IN HELA, SIGNAL = 1.2; EXPRESSED IN HEART, SIGNAL = 1.5; EXPRESSED IN FETAL LIVER, SIGNAL = 1.9; EXPRESSED IN BONE MARROW, SIGNAL = 1.8; EXPRESSED IN PLACENTA, SIGNAL = 2.2; EXPRESSED IN LUNG, SIGNAL =   2; EXPRESSED IN ADULT LIVER, SIGNAL = 2.1; SWISSPROT HIT: P10052, EVALUE 7.20e-01
NKRQQLRDRRFLFSIFQLVAMVSCGENPSATHSVLYQEATVSPQLIIHAFIRSNNEKQFK

SEQ ID NO: 30090 - protein, 60 aa, Homo sapiens
  MAP TO AC012360.2; EXPRESSED IN HELA, SIGNAL = 1.1; EXPRESSED IN FETAL LIVER, SIGNAL = 1.6; EXPRESSED IN HEART, SIGNAL = 1.5; EXPRESSED IN PLACENTA, SIGNAL = 1.6; EXPRESSED IN BONE MARROW, SIGNAL = 1.4; EXPRESSED IN ADULT LIVER, SIGNAL = 1.6; EXPRESSED IN LUNG, SIGNAL = 1.7; SWISSPROT HIT: P33173, EVALUE 5.50e-01
SAFGPPPDHLWPVEKKGLTGKLKEPAGYLHMMELLETFEKPHSHSQDEKYTNLAPRFPYL

SEQ ID NO: 30091 - protein, 17 aa, Homo sapiens
  MAP TO AC012360.2; EXPRESSED IN HELA, SIGNAL = 1.1; EXPRESSED IN FETAL LIVER, SIGNAL = 1.6; EXPRESSED IN HEART, SIGNAL = 1.5; EXPRESSED IN PLACENTA, SIGNAL = 1.6; EXPRESSED IN BONE MARROW, SIGNAL = 1.4; EXPRESSED IN ADULT LIVER, SIGNAL = 1.6; EXPRESSED IN LUNG, SIGNAL = 1.7
QLSDLPLIICGQWRRKA

SEQ ID NO: 30092 - protein, 87 aa, Homo sapiens
  MAP TO AC013371.4; EXPRESSED IN HELA, SIGNAL =   2; EXPRESSED IN PLACENTA, SIGNAL = 1.9; EXPRESSED IN LUNG, SIGNAL = 1.2; EXPRESSED IN ADULT LIVER, SIGNAL = 1.8; EXPRESSED IN FETAL LIVER, SIGNAL = 1.4; EXPRESSED IN BONE MARROW, SIGNAL = 1.1; SWISSPROT HIT: Q11124, EVALUE 7.70e+00
MRAKLCLRDLISSQKSPSTNIITLEVKVSTCEFWVYTNIQTVAVKMICHSGHSSFPVIMALSSATFSHEPLEREMAQIIILGPNDMY

SEQ ID NO: 30093 - protein, 39 aa, Homo sapiens
  MAP TO AL138743.1; EXPRESSED IN BONE MARROW, SIGNAL = 0.6; EXPRESSED IN HELA, SIGNAL = 2.7; EXPRESSED IN PLACENTA, SIGNAL = 0.86; EXPRESSED IN ADULT LIVER, SIGNAL = 0.94; EXPRESSED IN LUNG, SIGNAL = 0.85; SWISSPROT HIT: O35777, EVALUE 5.00e-16
QADEEFQILANSWRYSSAFTNRIFFAMVDFDEGSDVFQM

SEQ ID NO: 30094 - protein, 116 aa, Homo sapiens
  MAP TO AC015534.5; EXPRESSED IN HELA, SIGNAL = 0.61; SWISSPROT HIT: O20130, EVALUE 4.30e+00
FHLSGTVTELATASEPAVTYKVAISFDRCKITSVTCGCGNKDIFYCAHVVALSLYRIRKPDQVKLRLPISETLFQMNRDQLQKFIQYLITAHHTEVLPTAQKLADEILSSNSEINQ

SEQ ID NO: 30095 - protein, 55 aa, Homo sapiens
  MAP TO AL137006.2; EXPRESSED IN ADULT LIVER, SIGNAL = 5.1; EXPRESSED IN HELA, SIGNAL =  18
QASRLETACCSSCTTPRRLWFSTSRLAIWRTSSLWSSLGPSSGGRRWPQAHSSAC

SEQ ID NO: 30096 - protein, 32 aa, Homo sapiens
  MAP TO CHR22_105.0; EXPRESSED IN FETAL LIVER, SIGNAL = 2.5; EXPRESSED IN BONE MARROW, SIGNAL = 2.1; EXPRESSED IN LUNG, SIGNAL = 2.4; EXPRESSED IN HELA, SIGNAL = 4.3; EXPRESSED IN PLACENTA, SIGNAL = 2.2; EXPRESSED IN ADULT LIVER, SIGNAL = 2.4
YFGFITKHPLLSRFACHVFVSQESMRPVAQSV

SEQ ID NO: 30097 - protein, 33 aa, Homo sapiens
  MAP TO CHR22_105.0; EXPRESSED IN FETAL LIVER, SIGNAL = 2.5; EXPRESSED IN BONE MARROW, SIGNAL = 2.1; EXPRESSED IN LUNG, SIGNAL = 2.4; EXPRESSED IN HELA, SIGNAL = 4.3; EXPRESSED IN PLACENTA, SIGNAL = 2.2; EXPRESSED IN ADULT LIVER, SIGNAL = 2.4
LFRLHHQTPPAEPLRLPRLCLPGVHEAGGAECG

SEQ ID NO: 30098 - protein, 26 aa, Homo sapiens
  MAP TO AL138974.1; EXPRESSED IN HELA, SIGNAL = 1.5
MAAINYTLLCSIIESISIQFPHVDQN

SEQ ID NO: 30099 - protein, 34 aa, Homo sapiens
  MAP TO AC009472.2; EXPRESSED IN HELA, SIGNAL = 1.2; EXPRESSED IN PLACENTA, SIGNAL = 1.8; EXPRESSED IN LUNG, SIGNAL = 2.1; EXPRESSED IN ADULT LIVER, SIGNAL = 2.1
VLQANQPQVKVTFQTFHTTMSSTLVLPARTNPDQ

SEQ ID NO: 30100 - protein, 34 aa, Homo sapiens
  MAP TO AC009472.2; EXPRESSED IN HELA, SIGNAL = 1.2; EXPRESSED IN PLACENTA, SIGNAL = 1.8; EXPRESSED IN LUNG, SIGNAL = 2.1; EXPRESSED IN ADULT LIVER, SIGNAL = 2.1
VFFKLINHKSRSPFRHSIPPCPQLLCCLQGPIQI

SEQ ID NO: 30101 - protein, 28 aa, Homo sapiens
  MAP TO AC021722.4; EXPRESSED IN BONE MARROW, SIGNAL = 0.58; EXPRESSED IN LUNG, SIGNAL = 0.79; EXPRESSED IN HELA, SIGNAL = 0.71; EXPRESSED IN FETAL LIVER, SIGNAL = 0.64
WTSSPTVLVLIAFLSFFSKSLGLSSFTF

SEQ ID NO: 30102 - protein, 98 aa, Homo sapiens
  MAP TO CHR22_166.0; EXPRESSED IN BONE MARROW, SIGNAL = 1.1; EXPRESSED IN PLACENTA, SIGNAL = 0.66; EXPRESSED IN HELA, SIGNAL = 1.5; EXPRESSED IN FETAL LIVER, SIGNAL = 1.7; SWISSPROT HIT: P25325, EVALUE 7.00e-55
IEPGHIPGTVNIPFTDFLSQEGLEKSPEEIRHLFQEKKVDLSKPLVATCGSGVTACHVALGAYLCGKPDVPIYDGSWVEWYMRARPEDVISEGRGKTH

SEQ ID NO: 30103 - protein, 55 aa, Homo sapiens
  MAP TO CHR22_183_2.0; EXPRESSED IN HELA, SIGNAL = 1.2; EXPRESSED IN FETAL LIVER, SIGNAL = 1.6; EXPRESSED IN HEART, SIGNAL = 1.3; EXPRESSED IN BONE MARROW, SIGNAL = 1.7; EXPRESSED IN PLACENTA, SIGNAL = 1.7; EXPRESSED IN LUNG, SIGNAL = 1.5; EXPRESSED IN ADULT LIVER, SIGNAL = 1.7; SWISSPROT HIT: P54864, EVALUE 4.30e-01
KTVSTGEKEARLVSQSANGIVTTTPPTYFLLGSHKQAPQLGAWTSRDQGSRHLLG

SEQ ID NO: 30104 - protein, 149 aa, Homo sapiens
  MAP TO CHR22_153.0; EXPRESSED IN BONE MARROW, SIGNAL = 0.84; EXPRESSED IN HELA, SIGNAL = 0.53; EXPRESSED IN FETAL LIVER, SIGNAL =   1; EXPRESSED IN ADULT LIVER, SIGNAL = 0.72; SWISSPROT HIT: P29951, EVALUE 1.40e+00
KPWRMWCAHSCHSIQGTCAAALSIVGHRECKGVPEASLAPRPRKSYWFRTLKLQDQPRGCSGHSAFSNIHKSSSSLWMGELPSLYSLQVQRLNCELGMKKRSILLLPHSSVAEGSRVPLLTGRLSVKWTNWEEAARSRASCCHLILLKD

SEQ ID NO: 30105 - protein, 62 aa, Homo sapiens
  MAP TO CHR21_53.0; EXPRESSED IN HELA, SIGNAL = 0.53; EXPRESSED IN BONE MARROW, SIGNAL = 0.47; SWISSPROT HIT: O95644, EVALUE 7.10e-01
GCSAPETVAGGWQRGVLHRPLGERPGQPVHPPPCLSLRGGPHQQGCPRPGAEVHAGDQSPTH

SEQ ID NO: 30106 - protein, 63 aa, Homo sapiens
  MAP TO CHR21_53.0; EXPRESSED IN HELA, SIGNAL = 0.53; EXPRESSED IN BONE MARROW, SIGNAL = 0.47; SWISSPROT HIT: Q9Y3R5, EVALUE 3.00e-30
TDALLLRLSLVVGKEVFYTALWGSVLASPSIRLPASVFVVGHINRDAPGREQKYMLGTNHQLT

SEQ ID NO: 30107 - protein, 60 aa, Homo sapiens
  MAP TO AL132765.16; EXPRESSED IN BONE MARROW, SIGNAL = 3.3; EXPRESSED IN ADULT LIVER, SIGNAL = 3.6; EXPRESSED IN HELA, SIGNAL = 9.9; SWISSPROT HIT: P18282, EVALUE 1.00e-29
KKCIIVEEGKEILVGDVGVTITDPFKHFVGMLPEKDCRYALYDASFETKESRKEELMFFL

SEQ ID NO: 30108 - protein, 31 aa, Homo sapiens
  MAP TO AL138499.1; EXPRESSED IN HELA, SIGNAL = 0.71; EXPRESSED IN PLACENTA, SIGNAL = 0.72; EXPRESSED IN BONE MARROW, SIGNAL = 0.62; EXPRESSED IN ADULT LIVER, SIGNAL = 1.5; SWISSPROT HIT: Q05000, EVALUE 1.00e+00
EGILQKLQRSVEQEENKWKVKVDESHKTIKQ

SEQ ID NO: 30109 - protein, 47 aa, Homo sapiens
  MAP TO AL138499.1; EXPRESSED IN HELA, SIGNAL = 0.71; EXPRESSED IN PLACENTA, SIGNAL = 0.72; EXPRESSED IN BONE MARROW, SIGNAL = 0.62; EXPRESSED IN ADULT LIVER, SIGNAL = 1.5
KEFYRSYREVLSKKKINGKLRSMNHTRLLNRYLQKKSLEQWFSMCGA

SEQ ID NO: 30110 - protein, 76 aa, Homo sapiens
  MAP TO AL133263.2; EXPRESSED IN PLACENTA, SIGNAL =   1; EXPRESSED IN BONE MARROW, SIGNAL = 0.83; EXPRESSED IN LUNG, SIGNAL = 0.9; EXPRESSED IN ADULT LIVER, SIGNAL = 0.99; EXPRESSED IN HELA, SIGNAL = 0.59; SWISSPROT HIT: Q9Y603, EVALUE 2.00e-42
VTGPSQMDTRRGHLLQPPDPGLTSNFGHLDDPGLARWTPGKEESLNLCHCAELGCRTQGVCSFPAMPQAPIDGRIA

SEQ ID NO: 30111 - protein, 82 aa, Homo sapiens
  MAP TO CHR22_172.0; EXPRESSED IN LUNG, SIGNAL = 0.52; EXPRESSED IN ADULT LIVER, SIGNAL = 0.59; EXPRESSED IN BONE MARROW, SIGNAL = 1.5; EXPRESSED IN HELA, SIGNAL = 1.8; EXPRESSED IN FETAL LIVER, SIGNAL = 1.4; SWISSPROT HIT: P16258, EVALUE 2.00e-32
VNFNEPLSMLQRLTEDLEYHHLLDKAVHCTSSVEQMCLVAAFSVSSYSTTVHRIAKPFNPMLGETFELDRLDDMGLRSLCEQ

SEQ ID NO: 30112 - protein, 21 aa, Homo sapiens
  MAP TO CHR22_32.0; EXPRESSED IN FETAL LIVER, SIGNAL = 2.9; EXPRESSED IN BONE MARROW, SIGNAL = 2.9; EXPRESSED IN LUNG, SIGNAL = 3.5; EXPRESSED IN HELA, SIGNAL = 2.8; EXPRESSED IN HEART, SIGNAL = 2.9; EXPRESSED IN PLACENTA, SIGNAL = 3.4
PQCLGLRHCLRHYYHSHHHYC

SEQ ID NO: 30113 - protein, 47 aa, Homo sapiens
  MAP TO CHR21_17.0; EXPRESSED IN HELA, SIGNAL = 3.8; EXPRESSED IN FETAL LIVER, SIGNAL = 1.9; EXPRESSED IN BONE MARROW, SIGNAL = 1.8; EXPRESSED IN PLACENTA, SIGNAL =   1; EXPRESSED IN ADULT LIVER, SIGNAL =   2
DADLRRPPEHTGLRIVLKRNFLFPLPILLLINLFLENYDKEDRQAQK

SEQ ID NO: 30114 - protein, 57 aa, Homo sapiens
  MAP TO AL138842.2; EXPRESSED IN HELA, SIGNAL =  13; EXPRESSED IN FETAL LIVER, SIGNAL = 3.7; EXPRESSED IN LUNG, SIGNAL = 6.3; EXPRESSED IN BONE MARROW, SIGNAL = 4.3; SWISSPROT HIT: P75870, EVALUE 4.70e+00
LSRELLDEKEPEVLQDSLDRCYSTPSGYLELPDLGQPYSSAVYSLEEQYLGLALDVD

SEQ ID NO: 30115 - protein, 33 aa, Homo sapiens
  MAP TO AL138842.2; EXPRESSED IN HELA, SIGNAL =  13; EXPRESSED IN FETAL LIVER, SIGNAL = 3.7; EXPRESSED IN LUNG, SIGNAL = 6.3; EXPRESSED IN BONE MARROW, SIGNAL = 4.3
SAGSCWMRKSLKSCRTHWIDVIRLLQVILNCLT

SEQ ID NO: 30116 - protein, 31 aa, Homo sapiens
  MAP TO CHR21_52.0; EXPRESSED IN HELA, SIGNAL = 0.62
HPEPRAGSPGIGGLDSLAPANQGEPQEQLPL

SEQ ID NO: 30117 - protein, 56 aa, Homo sapiens
  MAP TO CHR21_52.0; EXPRESSED IN HELA, SIGNAL = 0.62; SWISSPROT HIT: P50411, EVALUE 4.70e+00
TLSQEPEVPALAAWTASHRPIKENLKNNFLYDFLYGGVGLTAPRECGRGAEQKNSR

SEQ ID NO: 30118 - protein, 29 aa, Homo sapiens
  MAP TO AL137251.2; EXPRESSED IN HELA, SIGNAL = 0.76; EXPRESSED IN FETAL LIVER, SIGNAL = 0.75; EXPRESSED IN BONE MARROW, SIGNAL = 0.9; EXPRESSED IN PLACENTA, SIGNAL = 0.89; EXPRESSED IN LUNG, SIGNAL =   1; EXPRESSED IN ADULT LIVER, SIGNAL =   1
MNVPGKLRESTDTLMEVDCSCRPQETLKN

SEQ ID NO: 30119 - protein, 26 aa, Homo sapiens
  MAP TO CHR22_154.0; EXPRESSED IN HELA, SIGNAL = 1.2
GRHSCYPGGKGRWPRPRGREGRDECT

SEQ ID NO: 30120 - protein, 26 aa, Homo sapiens
  MAP TO CHR22_163.0; EXPRESSED IN HELA, SIGNAL = 0.81; EXPRESSED IN ADULT LIVER, SIGNAL = 0.97; EXPRESSED IN BONE MARROW, SIGNAL = 0.93; EXPRESSED IN LUNG, SIGNAL = 0.93
RSRTLQGWKPPHFRGTQGIEAQGERP

SEQ ID NO: 30121 - protein, 31 aa, Homo sapiens
  MAP TO CHR22_163.0; EXPRESSED IN HELA, SIGNAL = 0.81; EXPRESSED IN ADULT LIVER, SIGNAL = 0.97; EXPRESSED IN BONE MARROW, SIGNAL = 0.93; EXPRESSED IN LUNG, SIGNAL = 0.93
QEPNSARMEAPTLSWYAGDRSPGRKALRIQK

SEQ ID NO: 30122 - protein, 77 aa, Homo sapiens
  MAP TO CHR22_145.0; EXPRESSED IN HELA, SIGNAL = 1.1; EXPRESSED IN ADULT LIVER, SIGNAL = 0.61; SWISSPROT HIT: Q13164, EVALUE 6.00e-03
PQKPQEHGLGMAQPAAPSLTRPFLAEAPTALVPHSPLPGALSSAPGPKQPPTASTGPELLLLPLSSFMPCGAAAPAR

SEQ ID NO: 30123 - protein, 72 aa, Homo sapiens
  MAP TO AL160236.1; EXPRESSED IN FETAL LIVER, SIGNAL = 8.1; EXPRESSED IN HELA, SIGNAL = 8.7; EXPRESSED IN ADULT LIVER, SIGNAL = 8.7; SWISSPROT HIT: P80272, EVALUE 2.00e+00
MPKRKTEGDAKGDKAKVKDESQRRSARLSAKPAPPKPEPKPKKAPAKKGEKVPKGKKRKADAGKEREGAGDP

SEQ ID NO: 30124 - protein, 30 aa, Homo sapiens
  MAP TO CHR22_89.0; EXPRESSED IN HELA, SIGNAL = 0.84; EXPRESSED IN LUNG, SIGNAL = 1.1; EXPRESSED IN FETAL LIVER, SIGNAL = 0.43
RGRLDLARPVPHRDLPARWPDLAEESSGQL

SEQ ID NO: 30125 - protein, 35 aa, Homo sapiens
  MAP TO AC022528.3; EXPRESSED IN HELA, SIGNAL = 0.53; EXPRESSED IN BONE MARROW, SIGNAL = 0.96; EXPRESSED IN PLACENTA, SIGNAL = 1.1; EXPRESSED IN LUNG, SIGNAL = 1.1; SWISSPROT HIT: P06687, EVALUE 6.60e+00
QLIPYVEEDGSKNDDRAGPPRFASEERREIAEVNK

SEQ ID NO: 30126 - protein, 32 aa, Homo sapiens
  MAP TO AC022528.3; EXPRESSED IN HELA, SIGNAL = 0.53; EXPRESSED IN BONE MARROW, SIGNAL = 0.96; EXPRESSED IN PLACENTA, SIGNAL = 1.1; EXPRESSED IN LUNG, SIGNAL = 1.1
NLFHMWKKMAQRMMIGLAHLVLLVKRGEKLLK

SEQ ID NO: 30127 - protein, 115 aa, Homo sapiens
  MAP TO AL138499.1; EXPRESSED IN LUNG, SIGNAL = 1.6; EXPRESSED IN ADULT LIVER, SIGNAL = 1.4; EXPRESSED IN BONE MARROW, SIGNAL = 1.2; EXPRESSED IN HELA, SIGNAL = 0.55; SWISSPROT HIT: P10569, EVALUE 8.00e-05
LTPPPPTPPDNVLMFDDFPPPPSPTPVDYEDEEAAIVQYNVSYADKDTARSPKNYIENIIAVYDYTKDKDDELSFMEGAVIYVIKNVNGLYEGVFNQVTGLFPGSCVESIIHYAD

SEQ ID NO: 30128 - protein, 90 aa, Homo sapiens
  MAP TO CHR21_44.0; EXPRESSED IN BONE MARROW, SIGNAL = 0.99; EXPRESSED IN HELA, SIGNAL = 0.98; EXPRESSED IN FETAL LIVER, SIGNAL = 0.79; EXPRESSED IN LUNG, SIGNAL = 1.3; EXPRESSED IN ADULT LIVER, SIGNAL = 1.1; SWISSPROT HIT: P70213, EVALUE 3.30e-01
RNSFPIPSSGNIHSPPRPMLPSSFPPLSEEVNPVLPEATVMASPEAVARQDNVDYPQEPPPTPLFASRPITRLKSWQAPRGEVESVTNEE

SEQ ID NO: 30129 - protein, 58 aa, Homo sapiens
  MAP TO CHR21_53.0; EXPRESSED IN HELA, SIGNAL = 0.68; EXPRESSED IN BONE MARROW, SIGNAL = 0.43; SWISSPROT HIT: Q9URV0, EVALUE 2.10e+00
RRNRLGHTIGSKLENQDLDLGHSDCSLSFHCLDCASSLWSGDLRILILRATERGRPVS

SEQ ID NO: 30130 - protein, 25 aa, Homo sapiens
  MAP TO AL138784.1; EXPRESSED IN FETAL LIVER, SIGNAL = 1.1; EXPRESSED IN ADULT LIVER, SIGNAL = 0.52; EXPRESSED IN HELA, SIGNAL = 2.1
MKPIILKMRKSRLREIKWVTRVTQL

SEQ ID NO: 30131 - protein, 20 aa, Homo sapiens
  MAP TO CHR21_52.0; EXPRESSED IN HELA, SIGNAL = 0.54
FSGSLPLTGPVGRLTAREVH

SEQ ID NO: 30132 - protein, 74 aa, Homo sapiens
  MAP TO CHR22_144.0; EXPRESSED IN HELA, SIGNAL = 1.4; EXPRESSED IN PLACENTA, SIGNAL = 0.32
MESPGLRPLWLLLSLAPLPLAVWQFLEVSKLFPASSPCPRSLCPRPQPAVTFSGQLSQHPVHLKWMLPCPSLDQ

SEQ ID NO: 30133 - protein, 17 aa, Homo sapiens
  MAP TO CHR22_150.0; EXPRESSED IN HELA, SIGNAL = 0.84
TLTAVACGPTQGAQGGH

SEQ ID NO: 30134 - protein, 66 aa, Homo sapiens
  MAP TO CHR22_143.0; EXPRESSED IN HELA, SIGNAL = 1.1; SWISSPROT HIT: P56848, EVALUE 2.70e+00
NILLNVLIPPNMPCTRTGKNNVLIVCVPNPPIDEKNATMPVTMLIRVKTSEDADELHKILLEKKDA

SEQ ID NO: 30135 - protein, 20 aa, Homo sapiens
  MAP TO CHR22_143.0; EXPRESSED IN HELA, SIGNAL = 1.1
QHIAERSDSTQYAMYANREE

SEQ ID NO: 30136 - protein, 26 aa, Homo sapiens
  MAP TO CHR22_79.0; EXPRESSED IN HELA, SIGNAL = 0.75
TADVLEVTSAGFDEGKEADEKEGVYE

SEQ ID NO: 30137 - protein, 127 aa, Homo sapiens
  MAP TO CHR22_96.0; EXPRESSED IN HELA, SIGNAL = 2.1; SWISSPROT HIT: Q12816, EVALUE 4.00e-04
RQLRLVPSPARAPRSSFGGDLPAGTCTPRSSFGGDLPAGTCTPRSSFGGDLPAGTCTPRSSFGGDLPAGTCTPRSSFGGDLPAGTCTSRSSFGGDLPAGTCTPRSSFGGDLPAGTCTPPDTSWEPRL

SEQ ID NO: 30138 - protein, 73 aa, Homo sapiens
  MAP TO CHR22_75.0; EXPRESSED IN HELA, SIGNAL = 0.59; SWISSPROT HIT: Q28686, EVALUE 5.30e-01
ICNRPQPGLKSSSEGMDPEVAMPSWANMSLDSSPESAALAVRLEGDELLDHLRLSILPWDESILDTLSPRLAT

SEQ ID NO: 30139 - protein, 18 aa, Homo sapiens
  MAP TO CHR22_75.0; EXPRESSED IN HELA, SIGNAL = 0.59
HLQQAPARPEVILRRDGS

SEQ ID NO: 30140 - protein, 52 aa, Homo sapiens
  MAP TO CHR21_41.0; EXPRESSED IN HELA, SIGNAL = 0.68
GSSEVCQIQRRCPRPHGLTSTFLWMPAGPGKGDDFHQGSRWLSSVEGYHREG

SEQ ID NO: 30141 - protein, 33 aa, Homo sapiens
  MAP TO CHR21_41.0; EXPRESSED IN HELA, SIGNAL = 0.68
WIFGGVPNTAKVSTPSWPYIHLSLDASRPWEGR

SEQ ID NO: 30142 - protein, 18 aa, Homo sapiens
  MAP TO CHR22_79.0; EXPRESSED IN HELA, SIGNAL = 1.1
SFWWGRQTHPPAMVTQSG

SEQ ID NO: 30143 - protein, 45 aa, Homo sapiens
  MAP TO CHR21_50.0; EXPRESSED IN HELA, SIGNAL = 0.79
IENVKDEEEEEDKGEGDKEKKIKERKGMEREEEGLRDRKNDEEEE

SEQ ID NO: 30144 - protein, 93 aa, Homo sapiens
  MAP TO CHR22.1; EXPRESSED IN BONE MARROW, SIGNAL = 2.6; EXPRESSED IN ADULT LIVER, SIGNAL = 3.8; EXPRESSED IN FETAL LIVER, SIGNAL = 2.2; EXPRESSED IN LUNG, SIGNAL = 5.4; EXPRESSED IN HELA, SIGNAL = 2.2; EXPRESSED IN HEART, SIGNAL = 4.7; SWISSPROT HIT: P08775, EVALUE 3.50e-01
EETERRALLLKKWSLYKQQERKMERDTIRAMLEAQQEALEELQLESPKLHAEAIKRDPNLFPFEKEGPHYTPPIPNYQPPEGRYNDITKVYTQ

SEQ ID NO: 30145 - protein, 56 aa, Homo sapiens
  MAP TO CHR5.1; EXPRESSED IN LUNG, SIGNAL = 0.8; EXPRESSED IN HEART, SIGNAL =   1; EXPRESSED IN ADULT LIVER, SIGNAL = 1.6; EXPRESSED IN PLACENTA, SIGNAL = 1.3; EXPRESSED IN HELA, SIGNAL = 1.9
NTYVSTCPALWLFSAFIRVSAAAASSSAQLTEDVSLRSTSGSAKALPSAVDNLPIP

SEQ ID NO: 30146 - protein, 52 aa, Homo sapiens
  MAP TO CHR15.1; EXPRESSED IN LUNG, SIGNAL = 0.68; EXPRESSED IN HELA, SIGNAL = 0.82; SWISSPROT HIT: P30597, EVALUE 4.80e+00
LLDLSELITITEDQIHMLVKSLKGANEDSAILQDTSHSIVNVLQHLATLANS

SEQ ID NO: 30147 - protein, 105 aa, Homo sapiens
  MAP TO CHR3.1; EXPRESSED IN ADULT LIVER, SIGNAL =   3; EXPRESSED IN BONE MARROW, SIGNAL = 4.5; EXPRESSED IN PLACENTA, SIGNAL = 3.4; EXPRESSED IN FETAL LIVER, SIGNAL = 3.6; EXPRESSED IN LUNG, SIGNAL = 1.9; EXPRESSED IN HELA, SIGNAL =   3; EXPRESSED IN HEART, SIGNAL = 1.6; SWISSPROT HIT: P54922, EVALUE 4.00e-50
GVKERDQFYTSLSYSGWGGSSGHDAPMIAYDAVLAAGDSWKELAHRAFFHGGDSDSTAAIAGCWWGVMYGFKGVSPSNYEKLEYRNRLEETARALYSLGSKEDTV

SEQ ID NO: 30148 - protein, 46 aa, Homo sapiens
  MAP TO CHR22.1; EXPRESSED IN BONE MARROW, SIGNAL = 1.5; EXPRESSED IN PLACENTA, SIGNAL = 3.2; EXPRESSED IN FETAL LIVER, SIGNAL = 2.4; EXPRESSED IN HELA, SIGNAL =   3; EXPRESSED IN LUNG, SIGNAL = 1.7; EXPRESSED IN HEART, SIGNAL = 0.92; SWISSPROT HIT: P21964, EVALUE 1.00e-21
HNLLMGDTKEQRILNHVLQHAEPGNAQSVLEAIDTYCEQKEWAMNV

SEQ ID NO: 30149 - protein, 76 aa, Homo sapiens
  MAP TO CHR11.1; EXPRESSED IN HEART, SIGNAL = 1.5; EXPRESSED IN ADULT LIVER, SIGNAL = 2.4; EXPRESSED IN FETAL LIVER, SIGNAL = 1.7; EXPRESSED IN HELA, SIGNAL = 1.4; EXPRESSED IN LUNG, SIGNAL = 1.2; SWISSPROT HIT: Q14139, EVALUE 2.00e-31
AHLAFCPFCRMKNPHLRAKLAEVLEAVMPHLDQTPNPLVSSVFHRKRVFCNFQYAPQLAEALIKVFVDIEFTGKAV

SEQ ID NO: 30150 - protein, 102 aa, Homo sapiens
  MAP TO CHR19.1; EXPRESSED IN PLACENTA, SIGNAL = 3.4; EXPRESSED IN HELA, SIGNAL = 1.9; EXPRESSED IN LUNG, SIGNAL = 1.7; EXPRESSED IN HEART, SIGNAL = 1.9; EXPRESSED IN BONE MARROW, SIGNAL = 0.76
WLRLRWPPPLLPLSESLSLPPWACPLSSSSESASSSESASLPKISSLSRAARASSSLLSSSPLPLLSLASSLSPSSRSLSLPECSSSLPSFSLLLPFSCSSS

SEQ ID NO: 30151 - protein, 35 aa, Homo sapiens
  MAP TO AL355310.9; EXPRESSED IN HEART, SIGNAL = 1.8; EXPRESSED IN BONE MARROW, SIGNAL = 4.4; EXPRESSED IN ADULT LIVER, SIGNAL = 3.1; EXPRESSED IN PLACENTA, SIGNAL =  36; EXPRESSED IN FETAL LIVER, SIGNAL = 1.9; EXPRESSED IN LUNG, SIGNAL = 2.6; EXPRESSED IN HELA, SIGNAL = 2.1
PLPCLLQTMAASPETLSRALAFQGVPPSILASVSP

SEQ ID NO: 30152 - protein, 59 aa, Homo sapiens
  MAP TO CHR22.1; EXPRESSED IN PLACENTA, SIGNAL = 9.1; EXPRESSED IN HELA, SIGNAL = 8.3; EXPRESSED IN FETAL LIVER, SIGNAL = 5.5; EXPRESSED IN LUNG, SIGNAL = 7.4; EXPRESSED IN HEART, SIGNAL = 5.1; EXPRESSED IN BONE MARROW, SIGNAL = 8.5; EXPRESSED IN ADULT LIVER, SIGNAL = 6.7; SWISSPROT HIT: Q03391, EVALUE 3.20e-01
WSLQLGKAGCPALLRASCGAARDHPGLPREPGGSSTHPAVQPRVPPLAPRLRTVPRKRR

SEQ ID NO: 30153 - protein, 83 aa, Homo sapiens
  MAP TO CHR5.1; EXPRESSED IN ADULT LIVER, SIGNAL = 2.3; EXPRESSED IN PLACENTA, SIGNAL = 2.8; EXPRESSED IN FETAL LIVER, SIGNAL = 2.8; EXPRESSED IN LUNG, SIGNAL = 2.8; EXPRESSED IN HELA, SIGNAL = 3.5; EXPRESSED IN BONE MARROW, SIGNAL = 2.3; EXPRESSED IN HEART, SIGNAL = 2.6; SWISSPROT HIT: Q62241, EVALUE 1.00e-31
SNMPKFYCDYCNTYLTHDSPPVRKTHCSGRKHKENVKDYYQKWMKEQAQSLIDKTTAAFQQGKIPPAPFSAPPPVGAMIPPPP

SEQ ID NO: 30154 - protein, 58 aa, Homo sapiens
  MAP TO CHR11.1; EXPRESSED IN LUNG, SIGNAL = 0.97; EXPRESSED IN HELA, SIGNAL = 0.53; EXPRESSED IN BONE MARROW, SIGNAL = 0.64; EXPRESSED IN ADULT LIVER, SIGNAL = 0.59; EXPRESSED IN FETAL LIVER, SIGNAL = 0.67; SWISSPROT HIT: Q14896, EVALUE 1.00e-25
RLKDGVELTREETFKYRFKKDGQRHHLIINEAMLEDAGHYALCTSGGQALAELIVQGE

SEQ ID NO: 30155 - protein, 89 aa, Homo sapiens
  MAP TO CHR3.1; EXPRESSED IN FETAL LIVER, SIGNAL =   2; EXPRESSED IN LUNG, SIGNAL = 3.3; EXPRESSED IN HELA, SIGNAL = 2.4; EXPRESSED IN BONE MARROW, SIGNAL = 2.1; EXPRESSED IN HEART, SIGNAL = 1.9; EXPRESSED IN ADULT LIVER, SIGNAL = 2.7
QNKTMVKNQNRCPEGGTMAITSISDKGRLQTGRPVATPPLRLELRGQGELRTKRGKRRKAAGEQAGSVIFLPPSSSGVGGYKVGGGPGG

SEQ ID NO: 30156 - protein, 41 aa, Homo sapiens
  MAP TO CHR5.1; EXPRESSED IN ADULT LIVER, SIGNAL = 0.87; EXPRESSED IN LUNG, SIGNAL = 1.1; EXPRESSED IN HELA, SIGNAL = 0.84; EXPRESSED IN HEART, SIGNAL =   1; EXPRESSED IN BONE MARROW, SIGNAL = 0.74
TFFKLLFQFFYFFLELTQQSILWIFINSSFIFNILSTIGIP

SEQ ID NO: 30157 - protein, 53 aa, Homo sapiens
  MAP TO CHR9.1; EXPRESSED IN HELA, SIGNAL = 0.82; EXPRESSED IN ADULT LIVER, SIGNAL = 1.3; EXPRESSED IN LUNG, SIGNAL = 3.4; EXPRESSED IN FETAL LIVER, SIGNAL = 0.81; SWISSPROT HIT: P21580, EVALUE 1.10e-01
QKNMAQETNQTPGPMLCSTGCGFYGNPRTNGMCSVCYKEHLQRQQNSGRMSPM

SEQ ID NO: 30158 - protein, 57 aa, Homo sapiens
  MAP TO CHR19.1; EXPRESSED IN PLACENTA, SIGNAL = 2.9; EXPRESSED IN LUNG, SIGNAL = 2.1; EXPRESSED IN FETAL LIVER, SIGNAL = 1.8; EXPRESSED IN HELA, SIGNAL = 2.5; EXPRESSED IN HEART, SIGNAL = 1.5; EXPRESSED IN ADULT LIVER, SIGNAL = 2.3; EXPRESSED IN BONE MARROW, SIGNAL = 2.2; SWISSPROT HIT: P78325, EVALUE 6.10e+00
LLQQAVGSMALARPLQGVGQQFRHAVVQLQGWPSQCHLILVAGTLGIQAAHEGKHIL

SEQ ID NO: 30159 - protein, 57 aa, Homo sapiens
  MAP TO CHR5.1; EXPRESSED IN BONE MARROW, SIGNAL = 0.68; EXPRESSED IN ADULT LIVER, SIGNAL = 0.98; EXPRESSED IN HELA, SIGNAL = 0.93; EXPRESSED IN FETAL LIVER, SIGNAL = 0.66; EXPRESSED IN LUNG, SIGNAL =   1; EXPRESSED IN HEART, SIGNAL = 0.87; SWISSPROT HIT: Q9Y5H8, EVALUE 5.00e-27
AVSELVPRSVGAGHVVAKVRAVDADSGYNAWLSYELQPGTGGARIPFRVGLYTGEIS

SEQ ID NO: 30160 - protein, 46 aa, Homo sapiens
  MAP TO CHR5.1; EXPRESSED IN ADULT LIVER, SIGNAL = 2.2; EXPRESSED IN PLACENTA, SIGNAL =   2; EXPRESSED IN LUNG, SIGNAL = 2.1; EXPRESSED IN FETAL LIVER, SIGNAL = 1.3; EXPRESSED IN HELA, SIGNAL = 1.5; EXPRESSED IN HEART, SIGNAL = 1.4; SWISSPROT HIT: P08133, EVALUE 1.00e-16
WLHQGAGTDEKTLTRIMVSRSEIDLLNIRREFIEKYDKSLHQAIEV

SEQ ID NO: 30161 - protein, 54 aa, Homo sapiens
  MAP TO CHR18.1; EXPRESSED IN HELA, SIGNAL = 0.56; EXPRESSED IN LUNG, SIGNAL = 0.73; EXPRESSED IN HEART, SIGNAL = 0.84; EXPRESSED IN ADULT LIVER, SIGNAL =   1; SWISSPROT HIT: Q9Y2Z2, EVALUE 8.10e+00
IHLLPVLHRGLRSDERSKQGLSSTLPAPDRRVVRFCNHGTVVLKEAAETLTPGH

SEQ ID NO: 30162 - protein, 146 aa, Homo sapiens
  MAP TO CHR12.1; EXPRESSED IN HELA, SIGNAL =  18; EXPRESSED IN LUNG, SIGNAL =  22; EXPRESSED IN HEART, SIGNAL =  11; EXPRESSED IN BONE MARROW, SIGNAL = 4.3; EXPRESSED IN ADULT LIVER, SIGNAL =  25; EXPRESSED IN PLACENTA, SIGNAL =  25
CFFGRSFQESCLLKLLNFILDYSVPRFLCLHNFKTIKICHLVFPFSGFNLLGPSCGCPFCIDVCLLPGLLDILLAGTVRKLEDEISELHALERHGLSPHLSARSIDQSPVLINNIYNRDQFSGMRSKGDIGHPANLHEAPEHHVGG

SEQ ID NO: 30163 - protein, 137 aa, Homo sapiens
  MAP TO CHR5.1; EXPRESSED IN BONE MARROW, SIGNAL = 0.83; EXPRESSED IN HEART, SIGNAL = 0.84; EXPRESSED IN ADULT LIVER, SIGNAL = 1.8; EXPRESSED IN FETAL LIVER, SIGNAL = 1.2; EXPRESSED IN LUNG, SIGNAL = 0.6; EXPRESSED IN HELA, SIGNAL = 1.6; SWISSPROT HIT: Q9UN75, EVALUE 3.00e-74
VVTARDGGSPSLWATARVSVEVADVNDNAPAFAQPEYTVFVKENNPPGCHIFTVSAWDADAQKNALVSYSLVERRVGEHALSSYVSVHAESGKVYALQPLDHEELELLQFQVSARDAGVPPLGSNVTLQVFVLDEND

SEQ ID NO: 30164 - protein, 56 aa, Homo sapiens
  MAP TO CHR17.1; EXPRESSED IN BONE MARROW, SIGNAL = 0.57; EXPRESSED IN ADULT LIVER, SIGNAL = 0.61; EXPRESSED IN LUNG, SIGNAL = 0.91; EXPRESSED IN HELA, SIGNAL = 0.41; EXPRESSED IN HEART, SIGNAL = 0.84; SWISSPROT HIT: Q04844, EVALUE 1.00e-26
HSIDGQFGVAYDANVLVYEGGSVTWLPPAIYRSVCAVEVTYFPFDWQNCSLIFRWE

SEQ ID NO: 30165 - protein, 52 aa, Homo sapiens
  MAP TO AC009789.19; EXPRESSED IN ADULT LIVER, SIGNAL = 1.4; EXPRESSED IN FETAL LIVER, SIGNAL = 1.2; EXPRESSED IN LUNG, SIGNAL = 1.5; EXPRESSED IN HELA, SIGNAL = 1.3; EXPRESSED IN HEART, SIGNAL = 1.4
SLLFALLLIHFLHFHPPVLKPDFDLSLTQIEESGHFVPTVPGEVHIEQKLLL

SEQ ID NO: 30166 - protein, 72 aa, Homo sapiens
  MAP TO CHRX.1; EXPRESSED IN LUNG, SIGNAL = 1.1; EXPRESSED IN HELA, SIGNAL = 0.49; EXPRESSED IN HEART, SIGNAL = 0.85; EXPRESSED IN ADULT LIVER, SIGNAL = 0.57; EXPRESSED IN BONE MARROW, SIGNAL = 0.74; SWISSPROT HIT: P23074, EVALUE 1.00e-06
LDVVSLLEQIYTSPGTWYVANDLTNAFFSITVHKAHQKQSAFSWQGQQYTFTVLPQGYIKSPALCQSYSERA

SEQ ID NO: 30167 - protein, 63 aa, Homo sapiens
  MAP TO CHR9.1; EXPRESSED IN BONE MARROW, SIGNAL = 0.91; EXPRESSED IN FETAL LIVER, SIGNAL = 0.99; EXPRESSED IN HELA, SIGNAL = 0.86; EXPRESSED IN HEART, SIGNAL = 0.7; SWISSPROT HIT: P26568, EVALUE 3.50e+00
ALEVKVENISKATMTFPLVLCYTVWKVIQTVHNISMLNIKNLASLKVSGRLLARKAKMKLPSA

SEQ ID NO: 30168 - protein, 42 aa, Homo sapiens
  MAP TO CHR1.1; EXPRESSED IN HEART, SIGNAL =   2; EXPRESSED IN BONE MARROW, SIGNAL = 0.84; EXPRESSED IN FETAL LIVER, SIGNAL = 0.98; EXPRESSED IN HELA, SIGNAL = 0.52; EXPRESSED IN LUNG, SIGNAL = 2.5; SWISSPROT HIT: P33331, EVALUE 8.40e+00
TDATLLSEFNQLYYRRINNSSSLLHSLYRQCLLLNVYSLQGF

SEQ ID NO: 30169 - protein, 55 aa, Homo sapiens
  MAP TO CHR20.1; EXPRESSED IN PLACENTA, SIGNAL = 3.7; EXPRESSED IN HELA, SIGNAL = 1.2; EXPRESSED IN LUNG, SIGNAL = 4.1; EXPRESSED IN BONE MARROW, SIGNAL = 2.7; EXPRESSED IN HEART, SIGNAL = 1.4; EXPRESSED IN ADULT LIVER, SIGNAL =   3
SFSLPAGYFCGTLWEQCSSREPKGPGTLQPLVPDGHDCGRRGSAGLTLQSEMTRH

SEQ ID NO: 30170 - protein, 79 aa, Homo sapiens
  MAP TO CHR10.1; EXPRESSED IN FETAL LIVER, SIGNAL = 0.3; EXPRESSED IN LUNG, SIGNAL =   1; EXPRESSED IN HELA, SIGNAL = 0.46; EXPRESSED IN BONE MARROW, SIGNAL = 0.32; EXPRESSED IN HEART, SIGNAL = 0.78; EXPRESSED IN ADULT LIVER, SIGNAL =   1; SWISSPROT HIT: P09913, EVALUE 1.00e-44
LVTWGNYAWVYYHMGRLSDVQIYVDKVKHVCEKFSSPYRIESPELDCEEGWTRLKCGGNQNERAKVCFEKALEKKPKNP

SEQ ID NO: 30171 - protein, 73 aa, Homo sapiens
  MAP TO CHR13.1; EXPRESSED IN PLACENTA, SIGNAL = 3.9; EXPRESSED IN FETAL LIVER, SIGNAL = 3.7; EXPRESSED IN HELA, SIGNAL =   6; EXPRESSED IN LUNG, SIGNAL = 2.2; EXPRESSED IN HEART, SIGNAL =   2; EXPRESSED IN ADULT LIVER, SIGNAL = 3.5; EXPRESSED IN BONE MARROW, SIGNAL = 3.2; SWISSPROT HIT: P39054, EVALUE 7.00e-33
SLPVLNLTLIDLPGITKVPVGDQPPDIEYQIKDMILQFISRESSLILAVTPANMDLANSDALKLAKEVDPQGN

SEQ ID NO: 30172 - protein, 75 aa, Homo sapiens
  MAP TO CHR12.1; EXPRESSED IN HEART, SIGNAL = 0.8; EXPRESSED IN ADULT LIVER, SIGNAL = 1.1; EXPRESSED IN BONE MARROW, SIGNAL = 0.86; EXPRESSED IN HELA, SIGNAL = 0.81; EXPRESSED IN FETAL LIVER, SIGNAL = 1.1; EXPRESSED IN LUNG, SIGNAL = 0.64; SWISSPROT HIT: P49425, EVALUE 2.20e+00
QESQSPAPPLTVISILLRHDGHALLPHCAHVGAVALAGPDEGGQQQRLCHGAPQHSQHHPGGRRVRLEGEEAHHL

SEQ ID NO: 30173 - protein, 61 aa, Homo sapiens
  MAP TO CHR6.1; EXPRESSED IN ADULT LIVER, SIGNAL = 0.86; EXPRESSED IN LUNG, SIGNAL = 0.58; EXPRESSED IN FETAL LIVER, SIGNAL = 0.91; EXPRESSED IN HELA, SIGNAL = 0.73; EXPRESSED IN BONE MARROW, SIGNAL = 0.78; SWISSPROT HIT: P33485, EVALUE 2.50e-01
QGGDHSTCRCPRKAVGCFQHPGGQVPQGVHSPRLVEGEESTAREGDGVRGVRVPLEHLFFH

SEQ ID NO: 30174 - protein, 41 aa, Homo sapiens
  MAP TO CHR17.1; EXPRESSED IN FETAL LIVER, SIGNAL = 1.3; EXPRESSED IN HELA, SIGNAL = 0.8; EXPRESSED IN BONE MARROW, SIGNAL = 1.2; EXPRESSED IN HEART, SIGNAL = 1.9; EXPRESSED IN ADULT LIVER, SIGNAL = 1.3; SWISSPROT HIT: P34402, EVALUE 8.40e+00
PSSVCSSPRIPPMFPRGAVKFSDNSQNKINFDTFSFKNNKC

SEQ ID NO: 30175 - protein, 76 aa, Homo sapiens
  MAP TO CHR19.1; EXPRESSED IN FETAL LIVER, SIGNAL = 0.82; EXPRESSED IN LUNG, SIGNAL =   1; EXPRESSED IN HELA, SIGNAL = 0.73; EXPRESSED IN HEART, SIGNAL = 0.82; EXPRESSED IN ADULT LIVER, SIGNAL = 0.87; EXPRESSED IN BONE MARROW, SIGNAL = 1.1; SWISSPROT HIT: P17027, EVALUE 9.00e-29
HQKFHTGEKPFECNECGKAFSLLTLLNRHKNIHTGEKLFECKECGKSFNRSSNLVQHQSIHSGVKPYECKECGKGF

SEQ ID NO: 30176 - protein, 68 aa, Homo sapiens
  MAP TO CHR19.1; EXPRESSED IN BONE MARROW, SIGNAL = 1.4; EXPRESSED IN ADULT LIVER, SIGNAL = 1.8; EXPRESSED IN FETAL LIVER, SIGNAL = 1.5; EXPRESSED IN PLACENTA, SIGNAL = 2.1; EXPRESSED IN LUNG, SIGNAL = 1.2; EXPRESSED IN HELA, SIGNAL = 1.6; EXPRESSED IN HEART, SIGNAL = 1.3; SWISSPROT HIT: P16258, EVALUE 4.90e-01
PELPPRRGKPPPLLPSVLGPAGGDREALGLGPPAAQLTPPPAPVGLRGSGLRGLQKDSGPLPTPPGVR

SEQ ID NO: 30177 - protein, 65 aa, Homo sapiens
  MAP TO CHR12.1; EXPRESSED IN HELA, SIGNAL =  79; EXPRESSED IN BONE MARROW, SIGNAL =  12; EXPRESSED IN HEART, SIGNAL =  10; EXPRESSED IN FETAL LIVER, SIGNAL =  18; EXPRESSED IN LUNG, SIGNAL =   7
HKHGDICRGDGDDEPFGSPLQVSPSLCQGSEDAIGLHDIISTSIISFGFGELSLLEDSDGISIDD

SEQ ID NO: 30178 - protein, 66 aa, Homo sapiens
  MAP TO CHR4.1; EXPRESSED IN HELA, SIGNAL = 0.47; EXPRESSED IN HEART, SIGNAL = 0.65; EXPRESSED IN BONE MARROW, SIGNAL = 0.72; EXPRESSED IN FETAL LIVER, SIGNAL = 0.57; EXPRESSED IN LUNG, SIGNAL = 0.6
NTKYLSGFSQMHLCYPLNKNPQVMYPFNHVGLIINRLYNCEIYVYKVVNFTLAQLHCKEAFVHICS

SEQ ID NO: 30179 - protein, 69 aa, Homo sapiens
  MAP TO CHR14.1; EXPRESSED IN FETAL LIVER, SIGNAL = 0.94; EXPRESSED IN LUNG, SIGNAL = 0.98; EXPRESSED IN HELA, SIGNAL = 1.1; EXPRESSED IN HEART, SIGNAL = 0.93; EXPRESSED IN ADULT LIVER, SIGNAL =   1; EXPRESSED IN BONE MARROW, SIGNAL =   1; SWISSPROT HIT: P09356, EVALUE 4.50e+00
VKVKFQHEVYPPCKPDCDSSLSEHPVSRQVFIVQDLEIRDRLATSQMNKFLYLYCSKEMPRKAHSNMVR

SEQ ID NO: 30180 - protein, 45 aa, Homo sapiens
  MAP TO CHR17.1; EXPRESSED IN HELA, SIGNAL = 0.88; EXPRESSED IN HEART, SIGNAL = 1.3; EXPRESSED IN PLACENTA, SIGNAL = 1.7; SWISSPROT HIT: P03181, EVALUE 4.90e+00
PACCRRCQTWCSGCLLPTWLRQGLMPGPPRHTRCPGCPHSQREPG

SEQ ID NO: 30181 - protein, 78 aa, Homo sapiens
  MAP TO CHR6.1; EXPRESSED IN FETAL LIVER, SIGNAL = 1.6; EXPRESSED IN LUNG, SIGNAL = 1.6; EXPRESSED IN HELA, SIGNAL = 2.2; EXPRESSED IN HEART, SIGNAL = 1.8; EXPRESSED IN BONE MARROW, SIGNAL = 2.1; EXPRESSED IN PLACENTA, SIGNAL = 2.3
MEPPHFSDEIPLKVVAAVKQKALCAKIQRVSQERTPQQRDPIRLSCRRPFRVGRSIPQEGICKGKNCNHDSKAKWLKL

SEQ ID NO: 30182 - protein, 48 aa, Homo sapiens
  MAP TO CHR11.1; EXPRESSED IN PLACENTA, SIGNAL = 2.7; EXPRESSED IN FETAL LIVER, SIGNAL =   2; EXPRESSED IN LUNG, SIGNAL = 2.4; EXPRESSED IN HELA, SIGNAL = 2.6; EXPRESSED IN BONE MARROW, SIGNAL = 2.2; EXPRESSED IN HEART, SIGNAL = 2.2; SWISSPROT HIT: P17437, EVALUE 7.50e-01
APAVDGAVVDHVHNGHAQVAADTEGDAEAQAAHDGDNVAAGQAEARAV

SEQ ID NO: 30183 - protein, 61 aa, Homo sapiens
  MAP TO CHR5.1; EXPRESSED IN LUNG, SIGNAL = 0.77; EXPRESSED IN HELA, SIGNAL = 1.4; EXPRESSED IN HEART, SIGNAL = 0.62; EXPRESSED IN ADULT LIVER, SIGNAL = 1.9; EXPRESSED IN BONE MARROW, SIGNAL = 0.93
LPWTSLASGAAPLAYKAFWGLIQMAELGLQELQIQMGEVEAYPFRVEVEECQGLREMEEVE

SEQ ID NO: 30184 - protein, 135 aa, Homo sapiens
  MAP TO CHRX.1; EXPRESSED IN FETAL LIVER, SIGNAL = 1.5; EXPRESSED IN LUNG, SIGNAL = 1.9; EXPRESSED IN HELA, SIGNAL = 1.7; EXPRESSED IN HEART, SIGNAL = 1.7; EXPRESSED IN ADULT LIVER, SIGNAL = 0.99; EXPRESSED IN BONE MARROW, SIGNAL = 1.9; SWISSPROT HIT: P51793, EVALUE 5.00e-71
GGVTRMTVSLVVIMFELTGGLEYIVPLMAAAVTSKWVADAFGKEGIYEAHIHLNGYPFLDVKDEFTHRTLATDVMRPRRGEPPLSVLTQDSMTVEDVETLIKETDYNGFPVVVSRDSERLIGFAQRRELILAISE

SEQ ID NO: 30185 - protein, 89 aa, Homo sapiens
  MAP TO CHR4.1; EXPRESSED IN LUNG, SIGNAL = 0.72; EXPRESSED IN FETAL LIVER, SIGNAL = 0.65; EXPRESSED IN HELA, SIGNAL = 0.73; EXPRESSED IN HEART, SIGNAL = 0.86; EXPRESSED IN BONE MARROW, SIGNAL = 0.81; SWISSPROT HIT: Q02004, EVALUE 3.10e+00
RLRSDVLQKLYLPPGVTILESRSCDWRILQHFPLLKLGDSRNLCPTGCQSLSGGPSARPISRCKSQADLLTQENLFLQVCFEFQDTDPG

SEQ ID NO: 30186 - protein, 60 aa, Homo sapiens
  MAP TO CHR2.1; EXPRESSED IN HEART, SIGNAL = 0.68; EXPRESSED IN HELA, SIGNAL = 0.41; SWISSPROT HIT: P97717, EVALUE 2.70e+00
LLICASCMFFPFGYLSLPIRNAPPGPVTRMDSRPLADFLKVNSTASPSFKLRKPSMGSLL

SEQ ID NO: 30187 - protein, 90 aa, Homo sapiens
  MAP TO CHR17.1; EXPRESSED IN HELA, SIGNAL = 1.2; EXPRESSED IN HEART, SIGNAL =   1; EXPRESSED IN FETAL LIVER, SIGNAL = 1.1; SWISSPROT HIT: Q12809, EVALUE 3.00e-07
VCLLTASPATFLQTSLVHLLKTVRLLRLLRLLQKLERYSQCSAVVLTLLMSVFALLAHWMACIWYVIGRREMEANDPLLWDIGEPPTPNF

SEQ ID NO: 30188 - protein, 82 aa, Homo sapiens [sequence omitted]

SEQ ID NO: 30189 - protein, 77 aa, Homo sapiens
  MAP TO CHR19.1; EXPRESSED IN LUNG, SIGNAL = 1.7; EXPRESSED IN HELA, SIGNAL = 1.4; EXPRESSED IN HEART, SIGNAL =   1; EXPRESSED IN BONE MARROW, SIGNAL = 0.94; EXPRESSED IN PLACENTA, SIGNAL = 1.9; EXPRESSED IN FETAL LIVER, SIGNAL = 0.96
TPTAKDGAPGEPPLPGAEPPLAHPGTDKGTEAKDPPAVENYPPPPAPAPTDGSEPAPAPVADGDIPSQFTRVMGKGE

SEQ ID NO: 30190 - protein, 62 aa, Homo sapiens
  MAP TO CHR12.1; EXPRESSED IN ADULT LIVER, SIGNAL = 3.9; EXPRESSED IN PLACENTA, SIGNAL = 6.4; EXPRESSED IN FETAL LIVER, SIGNAL = 3.9; EXPRESSED IN LUNG, SIGNAL = 5.6; EXPRESSED IN HELA, SIGNAL = 4.6; EXPRESSED IN HEART, SIGNAL = 4.4; EXPRESSED IN BONE MARROW, SIGNAL = 4.2; SWISSPROT HIT: Q53515, EVALUE 2.70e+00
LGTRPAFEVPAIVVEDARGKRRSSLDGSESAKTSLQVTNLVSAIVFLYDSLTGVPILVRSGS

SEQ ID NO: 30191 - protein, 64 aa, Homo sapiens
  MAP TO CHR12.1; EXPRESSED IN PLACENTA, SIGNAL = 1.9; EXPRESSED IN FETAL LIVER, SIGNAL = 1.9; EXPRESSED IN LUNG, SIGNAL = 1.2; EXPRESSED IN HELA, SIGNAL =   4; EXPRESSED IN HEART, SIGNAL = 1.3; EXPRESSED IN ADULT LIVER, SIGNAL = 2.3; EXPRESSED IN BONE MARROW, SIGNAL = 1.5; SWISSPROT HIT: P50085, EVALUE 2.00e-20
SDLQMVNISLRVLSRPNAQELPSMYQRLGLDYEERVLPSIVNEVLKSVVAKFNASQLITQRAQV

SEQ ID NO: 30192 - protein, 53 aa, Homo sapiens
  MAP TO CHR12.1; EXPRESSED IN FETAL LIVER, SIGNAL = 0.97; EXPRESSED IN LUNG, SIGNAL = 1.1; EXPRESSED IN HELA, SIGNAL = 1.3; EXPRESSED IN HEART, SIGNAL = 1.4; EXPRESSED IN BONE MARROW, SIGNAL = 0.8; EXPRESSED IN ADULT LIVER, SIGNAL =   1; SWISSPROT HIT: Q61702, EVALUE 8.10e+00
PHLLPILMLQVEPGLDVTAGLLKGLALRHLCWIVCADANDVGAEEQQHIGTEL

SEQ ID NO: 30193 - protein, 117 aa, Homo sapiens
  MAP TO CHR9.1; EXPRESSED IN FETAL LIVER, SIGNAL = 3.8; EXPRESSED IN PLACENTA, SIGNAL = 3.2; EXPRESSED IN LUNG, SIGNAL = 2.4; EXPRESSED IN HELA, SIGNAL = 5.5; EXPRESSED IN HEART, SIGNAL = 2.5; SWISSPROT HIT: Q08379, EVALUE 4.00e-34
PFSAEPPPPEPPAGPSEVEQQLQAEAEHLRKELEGLAGQLQAQVQDNEGLSRLNREQEERLLELERAAELWGEQAEARRQILETMQNDRTTISRALSQNRELKEQLAELQSGFVKLV

SEQ ID NO: 30194 - protein, 116 aa, Homo sapiens
  MAP TO CHR19.1; EXPRESSED IN FETAL LIVER, SIGNAL = 0.65; EXPRESSED IN HELA, SIGNAL = 0.46; EXPRESSED IN LUNG, SIGNAL =   1; EXPRESSED IN HEART, SIGNAL =   1; EXPRESSED IN BONE MARROW, SIGNAL = 0.41; SWISSPROT HIT: O60673, EVALUE 2.70e+00
LISNRHHNEELSLYGINFKTSGFDVSGKNTVWGSNCCLLLLLASPGAHFLGDENSDKPFSQAESRQRSSHSHRPPGHPVTPPKSHIHFALEKGKIMLEAFYLKPCEIRKCEDVKMK

SEQ ID NO: 30195 - protein, 55 aa, Homo sapiens
  MAP TO CHR5.1; EXPRESSED IN HEART, SIGNAL = 0.53; EXPRESSED IN ADULT LIVER, SIGNAL = 0.96; EXPRESSED IN BONE MARROW, SIGNAL = 0.68; EXPRESSED IN HELA, SIGNAL = 0.74; EXPRESSED IN FETAL LIVER, SIGNAL = 0.47; SWISSPROT HIT: P70478, EVALUE 1.20e+00
NTKSFELLGENSPCKCKVSPLYHGNETPTSLNQLPRRDGASNKRSQSCPSLNPGK

SEQ ID NO: 30196 - protein, 146 aa, Homo sapiens
  MAP TO CHR19.1; EXPRESSED IN HEART, SIGNAL =  13; EXPRESSED IN BONE MARROW, SIGNAL =  11; EXPRESSED IN ADULT LIVER, SIGNAL =  11; EXPRESSED IN PLACENTA, SIGNAL =  12; EXPRESSED IN FETAL LIVER, SIGNAL =  10; EXPRESSED IN LUNG, SIGNAL =  15; EXPRESSED IN HELA, SIGNAL =   8; SWISSPROT HIT: P53539, EVALUE 5.00e-72
EKAELESEIAELQKEKERLEFVLVAHKPGCKIPYEEGPGPGPLAEVRDLPGSAPAKEDGFSWLLPPPPPPPLPFQTSQDAPPNLTASLFTHSEVQVLGDPFPVVNPSYTSSFVLTCPEVSAFAGAQRTSGSDQPSDPLNSPSLLAL

SEQ ID NO: 30197 - protein, 88 aa, Homo sapiens
  MAP TO CHR6.1; EXPRESSED IN HEART, SIGNAL = 2.5; EXPRESSED IN ADULT LIVER, SIGNAL = 4.2; EXPRESSED IN PLACENTA, SIGNAL =   4; EXPRESSED IN FETAL LIVER, SIGNAL = 3.3; EXPRESSED IN LUNG, SIGNAL = 2.1; EXPRESSED IN HELA, SIGNAL = 4.9; SWISSPROT HIT: P30020, EVALUE 1.20e-01
GLPEMKEISLKSNQGPAKRKRHCRKRATRPPRGTETARALGSPRLPPRLWRMGSPSQAMAGPRRKRHSTPPGRRAPSVCMLLQWTWGE

SEQ ID NO: 30198 - protein, 76 aa, Homo sapiens
  MAP TO CHR13.1; EXPRESSED IN HELA, SIGNAL = 0.9; EXPRESSED IN HEART, SIGNAL = 1.1; EXPRESSED IN ADULT LIVER, SIGNAL =   1; EXPRESSED IN BONE MARROW, SIGNAL = 0.94; EXPRESSED IN FETAL LIVER, SIGNAL = 0.85; EXPRESSED IN LUNG, SIGNAL = 0.75; SWISSPROT HIT: P40182, EVALUE 2.50e+00
DYSPGDSPPGTPPASPPSSAWQTFPEEDSDSPQFRRRAHTFSHPPSSTKRKLNLQDGRAQGVRSPLLRQSSSEQCR

SEQ ID NO: 30199 - protein, 62 aa, Homo sapiens
  MAP TO CHR10.1; EXPRESSED IN HELA, SIGNAL =  24; EXPRESSED IN HEART, SIGNAL =  19; EXPRESSED IN ADULT LIVER, SIGNAL =  14; EXPRESSED IN BONE MARROW, SIGNAL =  12; EXPRESSED IN PLACENTA, SIGNAL =  21; EXPRESSED IN LUNG, SIGNAL =   8; SWISSPROT HIT: P05065, EVALUE 2.00e-09
TFSYGRALQASALKAWGRKKENLKAAQEESSEPWPTAWPVKESTPQAVRLGLLLESPSSSLT

SEQ ID NO: 30200 - protein, 66 aa, Homo sapiens
  MAP TO CHRX.1; EXPRESSED IN ADULT LIVER, SIGNAL = 0.88; EXPRESSED IN BONE MARROW, SIGNAL = 0.6; EXPRESSED IN FETAL LIVER, SIGNAL = 0.67; EXPRESSED IN HELA, SIGNAL = 0.4; EXPRESSED IN HEART, SIGNAL = 0.75; SWISSPROT HIT: P70398, EVALUE 4.00e-33
LSACEALTEWEYLPPVGPRPPKGFVGLKNAGATCYMNSVIQQLYMIPSIRNGILAIEGTGSDVDDD

SEQ ID NO: 30201 - protein, 53 aa, Homo sapiens
  MAP TO CHR11.1; EXPRESSED IN HEART, SIGNAL = 1.4; EXPRESSED IN BONE MARROW, SIGNAL = 1.6; EXPRESSED IN PLACENTA, SIGNAL = 1.5; EXPRESSED IN FETAL LIVER, SIGNAL = 1.6; EXPRESSED IN LUNG, SIGNAL = 1.5; EXPRESSED IN HELA, SIGNAL = 3.5; SWISSPROT HIT: P47832, EVALUE 1.00e-24
HYKGQQIGKVVQVYRKKYVIYIERVQREKANGTTVHVGIHPSKVVITRLKLDK

SEQ ID NO: 30202 - protein, 60 aa, Homo sapiens
  MAP TO CHR3.1; EXPRESSED IN HELA, SIGNAL =   2; EXPRESSED IN LUNG, SIGNAL = 0.71; EXPRESSED IN ADULT LIVER, SIGNAL =   2; SWISSPROT HIT: Q13200, EVALUE 6.00e-27
HQLRYGEPTLRRAVPLALALISVSNPRLNILDTLSKFSHDADPEVSYNSIFAMGMVGSGE

SEQ ID NO: 30203 - protein, 37 aa, Homo sapiens
  MAP TO CHR11.1; EXPRESSED IN HELA, SIGNAL = 2.3; EXPRESSED IN LUNG, SIGNAL = 1.4; EXPRESSED IN ADULT LIVER, SIGNAL = 3.9; EXPRESSED IN BONE MARROW, SIGNAL = 2.1; EXPRESSED IN HEART, SIGNAL = 1.6; EXPRESSED IN FETAL LIVER, SIGNAL = 2.3; EXPRESSED IN PLACENTA, SIGNAL = 1.9
TLLYKPILIQIQREMNVKHLFQIVPHLTVTCLTKFQF

SEQ ID NO: 30204 - protein, 75 aa, Homo sapiens
  MAP TO CHR10.1; EXPRESSED IN PLACENTA, SIGNAL =  19; EXPRESSED IN FETAL LIVER, SIGNAL =  13; EXPRESSED IN LUNG, SIGNAL =  17; EXPRESSED IN HELA, SIGNAL =  12; EXPRESSED IN HEART, SIGNAL = 4.9; EXPRESSED IN ADULT LIVER, SIGNAL =  10; EXPRESSED IN BONE MARROW, SIGNAL =  11
HCRLFQFCRGNTCGHSFLNNIHSLDVYNITFLIDSHIHGQRNNSMFSKRPREHTSGAFLLFLCVHHFGELLEDGC

SEQ ID NO: 30205 - protein, 68 aa, Homo sapiens
  MAP TO CHR9.1; EXPRESSED IN PLACENTA, SIGNAL = 2.1; EXPRESSED IN FETAL LIVER, SIGNAL = 1.2; EXPRESSED IN LUNG, SIGNAL = 1.7; EXPRESSED IN HELA, SIGNAL = 2.1; EXPRESSED IN HEART, SIGNAL = 1.7; EXPRESSED IN BONE MARROW, SIGNAL = 1.1; EXPRESSED IN ADULT LIVER, SIGNAL = 0.66; SWISSPROT HIT: P48634, EVALUE 1.40e-01
KDSEQGSGQSKEHRPGPIGNERSLKNRKGSEGAERLQGAVVPPVNGVEIHVDSVLPVPPIEFGVSPKV

SEQ ID NO: 30206 - protein, 90 aa, Homo sapiens
  MAP TO CHR12.1; EXPRESSED IN PLACENTA, SIGNAL = 2.1; EXPRESSED IN FETAL LIVER, SIGNAL = 0.68; EXPRESSED IN HELA, SIGNAL = 0.88; EXPRESSED IN HEART, SIGNAL = 0.78; EXPRESSED IN ADULT LIVER, SIGNAL = 0.8; EXPRESSED IN BONE MARROW, SIGNAL = 0.87
LAEELEEAVLTVRLVVLLLEGALVELLEAEGTDEVLGVELLGHGGDAAAGDGLLAARTQRAAPLVVVHLTVGLPVVLEEAAVHEWREAFL

SEQ ID NO: 30207 - protein, 68 aa, Homo sapiens
  MAP TO CHR15.1; EXPRESSED IN HEART, SIGNAL = 0.87; EXPRESSED IN ADULT LIVER, SIGNAL = 0.85; EXPRESSED IN BONE MARROW, SIGNAL = 0.63; EXPRESSED IN FETAL LIVER, SIGNAL = 0.74; EXPRESSED IN LUNG, SIGNAL = 0.56; EXPRESSED IN HELA, SIGNAL = 0.77
AGELISSWAVNITQVLTTPKCVLQPGPSAELSLHSPRDTPAQMSPGPRQSGRSSRRPHLRDGRPVPAA

SEQ ID NO: 30208 - protein, 136 aa, Homo sapiens
  MAP TO CHR8.1; EXPRESSED IN FETAL LIVER, SIGNAL = 1.3; EXPRESSED IN HELA, SIGNAL = 1.4; EXPRESSED IN LUNG, SIGNAL =   1; EXPRESSED IN HEART, SIGNAL = 1.2; EXPRESSED IN ADULT LIVER, SIGNAL = 0.94; EXPRESSED IN BONE MARROW, SIGNAL =   1; SWISSPROT HIT: P10272, EVALUE 1.00e-13
PSWKGQRFVLTGVDTYSGYGFAFPARNASAKTTIHGLTECLIYRHGIPHSIASDQGTHFTAREVRQWAHDHGIHWSYHIPHHPEAAGLIERWNGLLKTQLQRQLGGNSLEGWGRVLQKAVYALNQRSIYGTVSPIA

SEQ ID NO: 30209 - protein, 59 aa, Homo sapiens
  MAP TO CHR1.1; EXPRESSED IN FETAL LIVER, SIGNAL = 3.4; EXPRESSED IN LUNG, SIGNAL = 2.8; EXPRESSED IN HELA, SIGNAL = 7.1; EXPRESSED IN HEART, SIGNAL =   3; EXPRESSED IN BONE MARROW, SIGNAL = 2.8; EXPRESSED IN ADULT LIVER, SIGNAL = 2.4; EXPRESSED IN PLACENTA, SIGNAL = 5.6; SWISSPROT HIT: P17526, EVALUE 7.20e-01
LTLLHPRDDGGKVVIQQDHVGCLLRDVRARDAHGNANVSLLQCRGVVHPVTRHGHNGSL

SEQ ID NO: 30210 - protein, 41 aa, Homo sapiens
  MAP TO CHR1.1; EXPRESSED IN BONE MARROW, SIGNAL = 4.2; EXPRESSED IN HEART, SIGNAL = 2.6; EXPRESSED IN ADULT LIVER, SIGNAL = 4.2; EXPRESSED IN PLACENTA, SIGNAL = 4.3; EXPRESSED IN FETAL LIVER, SIGNAL = 5.1; EXPRESSED IN LUNG, SIGNAL = 2.8; EXPRESSED IN HELA, SIGNAL = 3.6
LHGDPELHGVLGLGHTGPHQLNEEVGSEHPKLWATQPVQGV

SEQ ID NO: 30211 - protein, 156 aa, Homo sapiens
  MAP TO CHR5.1; EXPRESSED IN HEART, SIGNAL = 1.1; EXPRESSED IN FETAL LIVER, SIGNAL = 0.67; EXPRESSED IN LUNG, SIGNAL =   1; EXPRESSED IN HELA, SIGNAL = 0.47; SWISSPROT HIT: Q9Y5I0, EVALUE 2.00e-29
DYKGLVLLGILLGTLWETGCTQIRYSVPEELEKGSRVGDISRDLGLEPRELAERGVRIIPRGRTQLFALNPRSGSLVTAGRIDREELCMGAIKCQLNLDILMEDKVKIYGVEVEVRDINDNAPYFRESELEIKISENAATEMRFPLPHAWDPDIGK

SEQ ID NO: 30212 - protein, 59 aa, Homo sapiens
  MAP TO CHR17.1; EXPRESSED IN HELA, SIGNAL = 1.5; EXPRESSED IN BONE MARROW, SIGNAL = 0.63; EXPRESSED IN HEART, SIGNAL = 0.5; EXPRESSED IN PLACENTA, SIGNAL = 1.3; EXPRESSED IN FETAL LIVER, SIGNAL = 0.77; EXPRESSED IN LUNG, SIGNAL = 1.2; SWISSPROT HIT: P38681, EVALUE 3.60e+00
PEMVMSRLSPSSTSICWKRRRPMSPYTLPCPLRSSNISPFSVPTSRLTPATGALGQVRG

SEQ ID NO: 30213 - protein, 51 aa, Homo sapiens
  MAP TO CHR17.1; EXPRESSED IN HELA, SIGNAL = 0.4; EXPRESSED IN BONE MARROW, SIGNAL = 0.36; SWISSPROT HIT: Q13495, EVALUE 3.30e-01
AGTPQWSGVVPTGLANPQRVSQPLQPALVHCLGVARGYCEAELSPALPGTP

SEQ ID NO: 30214 - protein, 73 aa, Homo sapiens
  MAP TO CHR22.1; EXPRESSED IN FETAL LIVER, SIGNAL = 1.1; EXPRESSED IN LUNG, SIGNAL = 1.1; EXPRESSED IN HELA, SIGNAL = 1.1; EXPRESSED IN HEART, SIGNAL = 0.96; EXPRESSED IN BONE MARROW, SIGNAL = 0.85; EXPRESSED IN ADULT LIVER, SIGNAL = 0.79; SWISSPROT HIT: Q9Y6J0, EVALUE 4.00e-34
FKVDLIWEDALFMFEYFKPKTLPEFDSYKTSTVSADLANLLKRIATIVPRTERPALSLDKVSAYIEGTSTEVG

SEQ ID NO: 30215 - protein, 55 aa, Homo sapiens
  MAP TO CHR2.1; EXPRESSED IN HELA, SIGNAL =  14; EXPRESSED IN HEART, SIGNAL = 3.3; EXPRESSED IN PLACENTA, SIGNAL =  17; EXPRESSED IN FETAL LIVER, SIGNAL = 6.7; EXPRESSED IN LUNG, SIGNAL =  15
SFWKNHLFLPILYLSSNLTLTSRQALRLRAGSLKTSLLMTVLFKGISTEYLVGIR

SEQ ID NO: 30216 - protein, 110 aa, Homo sapiens
  MAP TO CHR1.1; EXPRESSED IN PLACENTA, SIGNAL = 1.5; EXPRESSED IN LUNG, SIGNAL =   1; EXPRESSED IN HELA, SIGNAL = 1.7; EXPRESSED IN HEART, SIGNAL = 1.3; EXPRESSED IN ADULT LIVER, SIGNAL = 2.2; SWISSPROT HIT: Q01552, EVALUE 1.30e+00
GKKTGTSGVQKSRKMGKNQEDEYMIISYTKERSKKKPGFGHRRLARRPAAGLMKHLRRGTFANATKKMCLGSADVPGPPEQNNDIITISVTDQTVHKVTGEGRPVMRTQG

SEQ ID NO: 30217 - protein, 20 aa, Homo sapiens
  MAP TO CHR7.1; EXPRESSED IN PLACENTA, SIGNAL = 3.5; EXPRESSED IN FETAL LIVER, SIGNAL = 2.8; EXPRESSED IN LUNG, SIGNAL = 4.7; EXPRESSED IN HELA, SIGNAL = 3.5; EXPRESSED IN BONE MARROW, SIGNAL = 2.7; EXPRESSED IN ADULT LIVER, SIGNAL = 1.6; EXPRESSED IN HEART, SIGNAL = 1.3
FFTSSGILRCGTTVPTLPSS

SEQ ID NO: 30218 - protein, 65 aa, Homo sapiens
  MAP TO CHR20.1; EXPRESSED IN ADULT LIVER, SIGNAL = 1.2; EXPRESSED IN HELA, SIGNAL = 1.1; EXPRESSED IN HEART, SIGNAL = 0.83; EXPRESSED IN BONE MARROW, SIGNAL = 1.2; SWISSPROT HIT: P11387, EVALUE 6.00e-32
QLALRAGNEKEEGETADTVGCCSLRVEHINLHPELDGQEYVVEFDFLGKDSIRYYNKVPVEKRVS

SEQ ID NO: 30219 - protein, 71 aa, Homo sapiens
  MAP TO CHR19.1; EXPRESSED IN HEART, SIGNAL = 1.5; EXPRESSED IN FETAL LIVER, SIGNAL =   1; EXPRESSED IN LUNG, SIGNAL = 1.9; EXPRESSED IN HELA, SIGNAL = 0.89; SWISSPROT HIT: P12785, EVALUE 3.70e-01
AHVLQVVVEVHGTGTQVAPQQRGMGGEDGCYRQSPGTTQAESNACQPLMEVSNHMWLLLTLCQELWATGTG

SEQ ID NO: 30220 - protein, 60 aa, Homo sapiens
  MAP TO CHR22.1; EXPRESSED IN ADULT LIVER, SIGNAL =   2; EXPRESSED IN BONE MARROW, SIGNAL = 1.2; EXPRESSED IN FETAL LIVER, SIGNAL = 1.3; EXPRESSED IN LUNG, SIGNAL = 3.2; EXPRESSED IN HELA, SIGNAL = 1.1; EXPRESSED IN HEART, SIGNAL =   2
CRPGRLPRVQVRALWPRDGGAALLVPPCPGEQQPHEGHPSGAAAAVAGALEAAPNWQPLP

SEQ ID NO: 30221 - protein, 50 aa, Homo sapiens
  MAP TO AC009789.19; EXPRESSED IN HELA, SIGNAL = 1.7; EXPRESSED IN HEART, SIGNAL = 2.5; EXPRESSED IN PLACENTA, SIGNAL = 1.7; EXPRESSED IN FETAL LIVER, SIGNAL = 1.8; EXPRESSED IN LUNG, SIGNAL = 3.1
VHFRLPVSTPVKKISVRPFGIFPLHFSSLIQIGREGVKMNTQMEAWERVR

SEQ ID NO: 30222 - protein, 75 aa, Homo sapiens
  MAP TO CHR5.1; EXPRESSED IN FETAL LIVER, SIGNAL = 0.94; EXPRESSED IN HELA, SIGNAL = 1.5; EXPRESSED IN HEART, SIGNAL = 1.2; EXPRESSED IN BONE MARROW, SIGNAL =   1; EXPRESSED IN ADULT LIVER, SIGNAL = 0.8; SWISSPROT HIT: P38938, EVALUE 5.10e+00
YLVFTHLSLFRKHVGAQKGISPASRTLPKLSLLSWAHPPQPGLDQAGEAVLGPHQRICVQGFKYWGSASVGITAC

SEQ ID NO: 30223 - protein, 100 aa, Homo sapiens
  MAP TO CHR17.1; EXPRESSED IN FETAL LIVER, SIGNAL = 2.1; EXPRESSED IN HELA, SIGNAL = 2.2; EXPRESSED IN LUNG, SIGNAL = 1.8; EXPRESSED IN HEART, SIGNAL = 1.2; EXPRESSED IN BONE MARROW, SIGNAL = 1.4; EXPRESSED IN ADULT LIVER, SIGNAL = 1.2; EXPRESSED IN PLACENTA, SIGNAL = 2.3; SWISSPROT HIT: P18394, EVALUE 3.10e+00
LTLGGASLSGRTQAGGFGLGPGPSEVGSEFWRMTAPRALGVAVGAGMAGSGSWEAGKAARFRVGWSCRDWDRGTGAAYGFSGTRCATRLCRERPGRVGCL

SEQ ID NO: 30224 - protein, 89 aa, Homo sapiens
  MAP TO CHR9.1; EXPRESSED IN LUNG, SIGNAL = 1.8; EXPRESSED IN HELA, SIGNAL =   3; EXPRESSED IN ADULT LIVER, SIGNAL = 3.9; EXPRESSED IN HEART, SIGNAL = 2.3; EXPRESSED IN FETAL LIVER, SIGNAL = 2.8
SADRSSRHSPTLSRVLLCGNSAQQHFDGKIYEESNYCCWEGIKTIFHSRRPRAMSAGATLGALCTSHPSLWPTITGTDYSCNSLLIGSG

SEQ ID NO: 30225 - protein, 75 aa, Homo sapiens
  MAP TO CHR19.1; EXPRESSED IN HELA, SIGNAL = 1.1; EXPRESSED IN HEART, SIGNAL = 0.69; EXPRESSED IN ADULT LIVER, SIGNAL = 1.4
QILSHRKPPSSLGMTPAPVPTSLGLPPGPSSYLLPGSLPLGGCGSTPPTPTGLAATSDKREGSSSSEGRGDTDKV

SEQ ID NO: 30226 - protein, 75 aa, Homo sapiens
  MAP TO CHR9.1; EXPRESSED IN FETAL LIVER, SIGNAL = 0.86; EXPRESSED IN LUNG, SIGNAL = 0.78; EXPRESSED IN HELA, SIGNAL = 0.88; EXPRESSED IN HEART, SIGNAL = 0.79; EXPRESSED IN BONE MARROW, SIGNAL = 0.86
TCRVPGGPGGQPLPLQQHRPTHAQLGQVVQGLAAQAASTNDHHVGRAGQGPAWALGHHRGALSLLQGPLIWHTLL

SEQ ID NO: 30227 - protein, 70 aa, Homo sapiens
  MAP TO CHR18.1; EXPRESSED IN HELA, SIGNAL = 0.93; EXPRESSED IN FETAL LIVER, SIGNAL = 1.6; EXPRESSED IN LUNG, SIGNAL = 1.3; EXPRESSED IN HEART, SIGNAL = 0.85; EXPRESSED IN BONE MARROW, SIGNAL = 1.5; EXPRESSED IN ADULT LIVER, SIGNAL = 0.82; EXPRESSED IN PLACENTA, SIGNAL = 1.5; SWISSPROT HIT: P25059, EVALUE 4.00e-05
LTECLIHHHDIPHSIASDQGTHFMAKEVRQWAHDHGIHWSYHVSHHPEAAGLIEWWNGLLKSQLQCQLGD

SEQ ID NO: 30228 - protein, 56 aa, Homo sapiens
  MAP TO CHR12.1; EXPRESSED IN FETAL LIVER, SIGNAL = 1.8; EXPRESSED IN PLACENTA, SIGNAL = 3.9; EXPRESSED IN LUNG, SIGNAL = 3.4; EXPRESSED IN HELA, SIGNAL = 3.1; EXPRESSED IN HEART, SIGNAL = 2.6; EXPRESSED IN ADULT LIVER, SIGNAL = 2.8; SWISSPROT HIT: P23918, EVALUE 4.70e+00
TDLHGQADGVEQDEDEHQVLEVGGVDHVPHFVLVLVLGDVPPQGPGLEGVFHALSL

SEQ ID NO: 30229 - protein, 69 aa, Homo sapiens
  MAP TO CHR5.1; EXPRESSED IN PLACENTA, SIGNAL =  83; EXPRESSED IN HELA, SIGNAL = 1.8e+02; EXPRESSED IN LUNG, SIGNAL =  53; EXPRESSED IN BONE MARROW, SIGNAL =  67; SWISSPROT HIT: P53506, EVALUE 2.00e-32
QVITIGNEWFCCPEALFQPSFLGMESCGIHETTFNSIMKCDLDIRKDLYTSTVLSGGTTMYPGIADRMQ

SEQ ID NO: 30230 - protein, 93 aa, Homo sapiens
  MAP TO CHR11.1; EXPRESSED IN HELA, SIGNAL = 1.2; EXPRESSED IN HEART, SIGNAL = 1.3; EXPRESSED IN BONE MARROW, SIGNAL =   1; EXPRESSED IN PLACENTA, SIGNAL = 1.3; EXPRESSED IN LUNG, SIGNAL =   2; SWISSPROT HIT: P15442, EVALUE 1.60e+00
KLFTKSSWKSERQLPLQGLKSIKTTTEQLKQSEREKEKETTSNIWHLVLSTGFPRAPLGIESKIYWQTLLLNTQEGEPQCLLPTEAALCSQTV

SEQ ID NO: 30231 - protein, 93 aa, Homo sapiens
  MAP TO CHR17.1; EXPRESSED IN FETAL LIVER, SIGNAL = 1.2; EXPRESSED IN LUNG, SIGNAL = 1.3; EXPRESSED IN PLACENTA, SIGNAL = 1.2; EXPRESSED IN HELA, SIGNAL = 1.2; EXPRESSED IN HEART, SIGNAL =   1; EXPRESSED IN ADULT LIVER, SIGNAL = 0.89; SWISSPROT HIT: P51692, EVALUE 5.00e-35
LLWLEGINHATVFSSDSGLSPSQGRVPFAVPDKVLWPQLCEALNMKFKAEVQSNRGLTKENLVFLAQKLFNNSSSHLEDYSGLSVSWSQFNRV

SEQ ID NO: 30232 - protein, 62 aa, Homo sapiens
  MAP TO CHR20.1; EXPRESSED IN ADULT LIVER, SIGNAL = 1.6e+02; EXPRESSED IN PLACENTA, SIGNAL =  89; EXPRESSED IN HELA, SIGNAL =  54; EXPRESSED IN LUNG, SIGNAL =  79; EXPRESSED IN HEART, SIGNAL =  11; SWISSPROT HIT: P18086, EVALUE 7.90e+00
ALALLLGQFAEEVAHAFQSRIIAVEIEAQREVGVGGLQVQIDQAVDGCLHVGGIILTNLGAH

SEQ ID NO: 30233 - protein, 66 aa, Homo sapiens
  MAP TO CHR13.1; EXPRESSED IN HELA, SIGNAL =   1; EXPRESSED IN HEART, SIGNAL = 1.6; EXPRESSED IN BONE MARROW, SIGNAL = 1.9; EXPRESSED IN ADULT LIVER, SIGNAL = 2.5; EXPRESSED IN LUNG, SIGNAL = 1.9; EXPRESSED IN FETAL LIVER, SIGNAL = 1.6; SWISSPROT HIT: P51587, EVALUE 5.00e-25
SAQMTSKSCKGEKEIDDQKNCKKRRALDFLSRLPLPPPVSPICTFVSPAAQKAFQPPRSCGTKYET

SEQ ID NO: 30234 - protein, 92 aa, Homo sapiens
  MAP TO CHR5.1; EXPRESSED IN LUNG, SIGNAL = 3.1; EXPRESSED IN HELA, SIGNAL = 0.65; EXPRESSED IN HEART, SIGNAL = 1.4; EXPRESSED IN BONE MARROW, SIGNAL =   1; SWISSPROT HIT: P08571, EVALUE 2.00e-48
RNVSWATGRSWLAELQQWLKPGLKVLSIAQAHSPAFSCEQVRAFPALTSLDLSDNPGLGERGLMAALCPHKFPAIQNLALRNTGMETPTGVC

SEQ ID NO: 30235 - protein, 62 aa, Homo sapiens
  MAP TO CHR7.1; EXPRESSED IN HELA, SIGNAL =   1; EXPRESSED IN HEART, SIGNAL = 0.78; EXPRESSED IN BONE MARROW, SIGNAL = 1.1; EXPRESSED IN FETAL LIVER, SIGNAL = 1.1; EXPRESSED IN PLACENTA, SIGNAL = 1.2; EXPRESSED IN LUNG, SIGNAL = 0.6; SWISSPROT HIT: Q06397, EVALUE 1.20e+00
TLVLWPLFHSQHVQWVACDVWLLTLNDISSDLISTQLRWPSVQMPQGTAPMGPRRVFIFQRE

SEQ ID NO: 30236 - protein, 60 aa, Homo sapiens
  MAP TO CHR2.1; EXPRESSED IN FETAL LIVER, SIGNAL = 0.61; EXPRESSED IN LUNG, SIGNAL = 0.97; EXPRESSED IN HELA, SIGNAL = 0.6; EXPRESSED IN HEART, SIGNAL = 0.86; SWISSPROT HIT: P52789, EVALUE 2.00e-31
GSNACYMEEMRHIDMVEGDEGRMCINMEWGAFGDDGSLNDIRTEFDQEIDMGSLNPGKQL

SEQ ID NO: 30237 - protein, 66 aa, Homo sapiens
  MAP TO CHR19.1; EXPRESSED IN HELA, SIGNAL = 4.1; EXPRESSED IN LUNG, SIGNAL = 1.5; EXPRESSED IN BONE MARROW, SIGNAL = 2.9; EXPRESSED IN HEART, SIGNAL = 1.5; EXPRESSED IN ADULT LIVER, SIGNAL = 3.2; EXPRESSED IN PLACENTA, SIGNAL = 3.3; EXPRESSED IN FETAL LIVER, SIGNAL = 3.1; SWISSPROT HIT: P12955, EVALUE 1.00e-30
TGVWWPDMHRLADRIHLEELAHMGILSGSVDAMVQAHLGAVFMPHGLGHFLGIDVHDVGGYPEVSV

SEQ ID NO: 30238 - protein, 33 aa, Homo sapiens
  MAP TO CHR5.1; EXPRESSED IN FETAL LIVER, SIGNAL = 1.4; EXPRESSED IN LUNG, SIGNAL = 0.7; EXPRESSED IN HELA, SIGNAL = 1.5; EXPRESSED IN HEART, SIGNAL = 0.87; EXPRESSED IN BONE MARROW, SIGNAL = 1.4
HFKQELFINKWKSLLCDFIQHNIIWKKIGSQAA

SEQ ID NO: 30239 - protein, 78 aa, Homo sapiens
  MAP TO CHR4.1; EXPRESSED IN ADULT LIVER, SIGNAL = 1.5; EXPRESSED IN FETAL LIVER, SIGNAL = 0.77; EXPRESSED IN HELA, SIGNAL = 1.3; EXPRESSED IN LUNG, SIGNAL = 2.1; EXPRESSED IN HEART, SIGNAL = 1.8; EXPRESSED IN BONE MARROW, SIGNAL = 0.75; SWISSPROT HIT: P16870, EVALUE 2.00e-32
ILWICFLGSAHEYSSSPDDAIFQSLARAYSSFNPAMSDPNRPPCRKNDDDSSFVDGTTNGGAWYSVPGGEFPLCSLIM

SEQ ID NO: 30240 - protein, 60 aa, Homo sapiens
  MAP TO CHR7.1; EXPRESSED IN ADULT LIVER, SIGNAL =   1; EXPRESSED IN HEART, SIGNAL =   1; EXPRESSED IN HELA, SIGNAL = 1.2; EXPRESSED IN LUNG, SIGNAL = 0.78; SWISSPROT HIT: Q99985, EVALUE 1.00e-25
SELRETKTSEYFSLSHHPLDYRILLMDEDQDRIYVGSKDHILSLNINNISQEALSVSLSL

SEQ ID NO: 30241 - protein, 67 aa, Homo sapiens
  MAP TO CHR19.1; EXPRESSED IN PLACENTA, SIGNAL = 1.5; EXPRESSED IN LUNG, SIGNAL = 0.72; EXPRESSED IN HELA, SIGNAL = 1.5; EXPRESSED IN BONE MARROW, SIGNAL = 1.3; EXPRESSED IN ADULT LIVER, SIGNAL = 1.5; EXPRESSED IN HEART, SIGNAL = 0.94; EXPRESSED IN FETAL LIVER, SIGNAL = 1.4; SWISSPROT HIT: Q92797, EVALUE 2.00e-31
ANLPPTLAKSQVSSVRKNLKLHLLSVLKHPASLEFQAQITTLLVDLGTPQAEIARNMPSSKDTRKRP

SEQ ID NO: 30242 - protein, 86 aa, Homo sapiens
  MAP TO CHR19.1; EXPRESSED IN BONE MARROW, SIGNAL = 2.1; EXPRESSED IN ADULT LIVER, SIGNAL = 1.5; EXPRESSED IN PLACENTA, SIGNAL = 3.7; EXPRESSED IN FETAL LIVER, SIGNAL = 2.4; EXPRESSED IN HELA, SIGNAL = 4.2; EXPRESSED IN LUNG, SIGNAL = 1.5; SWISSPROT HIT: P27692, EVALUE 5.00e-07
QPLQIKSVVAPEHVKGYIYVEAYKQTHVKQAIEGVGNLRLGYWNQQMVPIKEMTDVLKVVKEVANLKPKSWVRLKRGIYKDDIAQV

SEQ ID NO: 30243 - protein, 62 aa, Homo sapiens
  MAP TO CHR19.1; EXPRESSED IN LUNG, SIGNAL = 2.2; EXPRESSED IN HELA, SIGNAL = 2.6; EXPRESSED IN BONE MARROW, SIGNAL = 2.2; EXPRESSED IN HEART, SIGNAL = 2.4; EXPRESSED IN PLACENTA, SIGNAL = 3.6
QFWNSRQSLEGLSVRSVFFGVFQSFVVLLYILDNETNFVVQVSVFIGVLIDLWKITKVMDVR

SEQ ID NO: 30244 - protein, 83 aa, Homo sapiens
  MAP TO CHR2.1; EXPRESSED IN ADULT LIVER, SIGNAL = 1.1; EXPRESSED IN BONE MARROW, SIGNAL =   2; EXPRESSED IN PLACENTA, SIGNAL = 1.7; EXPRESSED IN FETAL LIVER, SIGNAL = 1.6; EXPRESSED IN LUNG, SIGNAL = 1.5; EXPRESSED IN HELA, SIGNAL = 2.4; SWISSPROT HIT: P10238, EVALUE 5.10e-01
WGLRPLPRALRRRPGARGFGSGWLASPGSPTRAAWRYSELVNGAPSAMMTSRCRLPTSSAGSWASQRPQAGPTVPNMALEQVS

SEQ ID NO: 30245 - protein, 46 aa, Homo sapiens
  MAP TO CHR19.1; EXPRESSED IN ADULT LIVER, SIGNAL = 0.71; EXPRESSED IN LUNG, SIGNAL = 1.3; EXPRESSED IN HELA, SIGNAL = 0.9; EXPRESSED IN HEART, SIGNAL = 1.1
PLEHRYPGANSRAGTGGLGGGARHLLHITLRQRQLPARIPAKLDER

SEQ ID NO: 30246 - protein, 62 aa, Homo sapiens [sequence omitted]

SEQ ID NO: 30247 - protein, 56 aa, Homo sapiens
  MAP TO CHR7.1; EXPRESSED IN LUNG, SIGNAL =   1; EXPRESSED IN HELA, SIGNAL =   1; EXPRESSED IN BONE MARROW, SIGNAL = 0.97; SWISSPROT HIT: P57247, EVALUE 5.60e-01
SLLVFSTAFHEVSVYPKKELPFFILFTAGLCSFTAMLALLTHQFPELMGVFAKAVS

SEQ ID NO: 30248 - protein, 58 aa, Homo sapiens
  MAP TO CHR17.1; EXPRESSED IN ADULT LIVER, SIGNAL = 1.7; EXPRESSED IN PLACENTA, SIGNAL = 2.4; EXPRESSED IN HELA, SIGNAL = 2.3; SWISSPROT HIT: Q57865, EVALUE 8.00e+00
GASFAFPQDHIDDTAEKGQGEGHPGQDVGETVGVIRVEMPLRVPHRVDGRSTHHAQTW

SEQ ID NO: 30249 - protein, 62 aa, Homo sapiens
  MAP TO CHR17.1; EXPRESSED IN HELA, SIGNAL =  22; EXPRESSED IN LUNG, SIGNAL =  53; EXPRESSED IN HEART, SIGNAL =  32; EXPRESSED IN ADULT LIVER, SIGNAL = 1.1e+02; EXPRESSED IN BONE MARROW, SIGNAL =  19; EXPRESSED IN PLACENTA, SIGNAL =  45; SWISSPROT HIT: P42906, EVALUE 1.60e+00
LDVVVRKSAAIFQLLACKDEPLLVGGDAFFILDLGLHIFDGVTGLHLQSDGLAGQGLHEDLH

SEQ ID NO: 30250 - protein, 33 aa, Homo sapiens
  MAP TO CHR7.1; EXPRESSED IN HELA, SIGNAL = 2.3; EXPRESSED IN HEART, SIGNAL = 1.5; EXPRESSED IN ADULT LIVER, SIGNAL = 2.2; EXPRESSED IN BONE MARROW, SIGNAL = 1.5; EXPRESSED IN PLACENTA, SIGNAL = 1.8; EXPRESSED IN LUNG, SIGNAL = 1.8; EXPRESSED IN FETAL LIVER, SIGNAL = 1.9
WLVAKIFASQMSSLEQFFKHTVIASPSSQLPAG

SEQ ID NO: 30251 - protein, 53 aa, Homo sapiens
  MAP TO CHR17.1; EXPRESSED IN ADULT LIVER, SIGNAL = 1.8; EXPRESSED IN LUNG, SIGNAL = 1.6; EXPRESSED IN PLACENTA, SIGNAL = 1.9; EXPRESSED IN FETAL LIVER, SIGNAL = 1.5; EXPRESSED IN HELA, SIGNAL = 2.2; EXPRESSED IN HEART, SIGNAL =   1; SWISSPROT HIT: Q28902, EVALUE 2.80e+00
LTWPKGSRWLFVSFSFWKETSCRIQWAPVAGESGWTYSLPGMAGSAFPATILP

SEQ ID NO: 30252 - protein, 86 aa, Homo sapiens
  MAP TO CHR14.1; EXPRESSED IN HELA, SIGNAL = 0.52; EXPRESSED IN HEART, SIGNAL = 0.6; EXPRESSED IN FETAL LIVER, SIGNAL = 0.84; SWISSPROT HIT: P27448, EVALUE 2.00e-34
FSHLKNELFILAGPAIPSVVAYPKRSQTSTADSDLKEDGISSRKSSGSAVGGKGIAPASPMLGNASNPNKADIPERKKSSTVPSVS

SEQ ID NO: 30253 - protein, 72 aa, Homo sapiens
  MAP TO CHR17.1; EXPRESSED IN ADULT LIVER, SIGNAL =   1; EXPRESSED IN BONE MARROW, SIGNAL = 1.2; EXPRESSED IN LUNG, SIGNAL = 0.89; EXPRESSED IN HELA, SIGNAL = 0.83; EXPRESSED IN HEART, SIGNAL = 0.61; SWISSPROT HIT: Q09499, EVALUE 4.00e-16
SLLVHRDLKPHNILISMPNAHGKIKAMISDFGLCKKLAVGRHSFSRRSGVPGTEGWIAPEMLSEDCKENPVS

SEQ ID NO: 30254 - protein, 19 aa, Homo sapiens
  MAP TO CHR19.1; EXPRESSED IN FETAL LIVER, SIGNAL = 4.3; EXPRESSED IN LUNG, SIGNAL = 2.7; EXPRESSED IN HELA, SIGNAL = 4.6; EXPRESSED IN HEART, SIGNAL = 3.2; EXPRESSED IN ADULT LIVER, SIGNAL = 5.2; EXPRESSED IN PLACENTA, SIGNAL = 3.1
NEHELIDGSVWGHLERGTP

SEQ ID NO: 30255 - protein, 121 aa, Homo sapiens
  MAP TO CHR5.1; EXPRESSED IN ADULT LIVER, SIGNAL = 3.2; EXPRESSED IN PLACENTA, SIGNAL = 2.7; EXPRESSED IN FETAL LIVER, SIGNAL = 2.6; EXPRESSED IN LUNG, SIGNAL = 4.4; EXPRESSED IN HELA, SIGNAL = 2.1; EXPRESSED IN BONE MARROW, SIGNAL = 2.2; EXPRESSED IN HEART, SIGNAL = 3.8; SWISSPROT HIT: P29779, EVALUE 6.20e+00
AQLGQDFGDAVSHGYGERDSGGERGLAMVLDGHHEALLERISVQQGSRRAHLARVQTHREESRLAGLEQAVGQPGVLARVSVHRHHLGHQVATLCGAGRQLHASGTVCGEGGVQDLGRVVI

SEQ ID NO: 30256 - protein, 29 aa, Homo sapiens
  MAP TO CHR7.1; EXPRESSED IN PLACENTA, SIGNAL = 2.4; EXPRESSED IN FETAL LIVER, SIGNAL = 0.99; EXPRESSED IN HELA, SIGNAL = 1.1; EXPRESSED IN HEART, SIGNAL = 1.1; EXPRESSED IN ADULT LIVER, SIGNAL = 1.1; EXPRESSED IN BONE MARROW, SIGNAL = 0.84
PLHWELVKITDCVFLGKKSICFPSALLNQ

SEQ ID NO: 30257 - protein, 73 aa, Homo sapiens
  MAP TO CHR11.1; EXPRESSED IN FETAL LIVER, SIGNAL = 3.9; EXPRESSED IN LUNG, SIGNAL = 3.1; EXPRESSED IN HELA, SIGNAL = 2.6; EXPRESSED IN HEART, SIGNAL =   4; EXPRESSED IN BONE MARROW, SIGNAL = 4.9; SWISSPROT HIT: O28377, EVALUE 1.10e+00
REIEDTEKCSLRTSSSLPSQSARSPHMHVHWAQTRRVGVSSVPKLSQKLGYTTSFTAKFFLLSNLSPAFGLSP

SEQ ID NO: 30258 - protein, 72 aa, Homo sapiens
  MAP TO CHR17.1; EXPRESSED IN FETAL LIVER, SIGNAL = 1.1; EXPRESSED IN LUNG, SIGNAL = 1.4; EXPRESSED IN HELA, SIGNAL = 1.3; EXPRESSED IN BONE MARROW, SIGNAL = 0.96; EXPRESSED IN HEART, SIGNAL = 1.2; SWISSPROT HIT: P35670, EVALUE 2.20e+00
SPGIVNGCAAINIRGARVSPIHYKQLGLQCLSCLGSHVQRCGALLWVEEVGLGTQGEQAQTCLQVACPHARV

SEQ ID NO: 30259 - protein, 89 aa, Homo sapiens
  MAP TO CHR19.1; EXPRESSED IN BONE MARROW, SIGNAL = 0.97; EXPRESSED IN HEART, SIGNAL = 1.3; EXPRESSED IN ADULT LIVER, SIGNAL = 0.55; EXPRESSED IN LUNG, SIGNAL =   3; EXPRESSED IN HELA, SIGNAL = 1.3; SWISSPROT HIT: Q92797, EVALUE 6.00e-39
APATFLTANLPPTLAKSQVSSVRKNLKLHLLSVLKHPASLEFQAQITTLLVDLGTPQAEIARNMPSSKDTRKRPRDDSDSTLKKMKLGE

SEQ ID NO: 30260 - protein, 78 aa, Homo sapiens
  MAP TO CHR20.1; EXPRESSED IN ADULT LIVER, SIGNAL = 2.5e+02; EXPRESSED IN PLACENTA, SIGNAL =  91; EXPRESSED IN HELA, SIGNAL =  21; EXPRESSED IN LUNG, SIGNAL =  67; EXPRESSED IN HEART, SIGNAL =  11; SWISSPROT HIT: P02792, EVALUE 3.00e-25
LFQDIKKPAEDEWGKTPDAMKAAMALEKKLNQALLDLHALDSAHMDPHLCDFLETHFLDEEVKLIKKMGDHLTNLHRL

SEQ ID NO: 30261 - protein, 73 aa, Homo sapiens
  MAP TO CHR17.1; EXPRESSED IN LUNG, SIGNAL = 0.76; EXPRESSED IN HELA, SIGNAL = 0.9; EXPRESSED IN HEART, SIGNAL = 1.1
LYPEALAVLGETDLLQPRLNLGLLPAGHGGQDGPWHLLAQQAQRALGQRRLSAIGRVGNQAFQALDGADVAEH

SEQ ID NO: 30262 - protein, 112 aa, Homo sapiens
  MAP TO CHR1.1; EXPRESSED IN FETAL LIVER, SIGNAL = 0.96; EXPRESSED IN LUNG, SIGNAL = 0.73; EXPRESSED IN HELA, SIGNAL = 0.88; EXPRESSED IN HEART, SIGNAL = 1.1; EXPRESSED IN BONE MARROW, SIGNAL = 0.93; SWISSPROT HIT: O67167, EVALUE 4.30e+00
KEDLNSKENLDADEGDGKSNDLVLSCPYFRNETGGEGDRRIALSRANSSSFSSGESCSFESSLSSHCTNAGVSVLEVPRENQPIHREKVKRYIIEHIDLGAYYYRKFFYGKG

SEQ ID NO: 30263 - protein, 54 aa, Homo sapiens
  MAP TO CHRX.1; EXPRESSED IN FETAL LIVER, SIGNAL = 0.61; EXPRESSED IN HELA, SIGNAL = 0.79; EXPRESSED IN HEART, SIGNAL = 0.62; EXPRESSED IN ADULT LIVER, SIGNAL = 0.91; EXPRESSED IN BONE MARROW, SIGNAL = 0.88
FNCIPSVGEFIVGNGLYTLRGLRCLMGSRQEGQGNEQELVQTNTTFGRTEMTAH

SEQ ID NO: 30264 - protein, 123 aa, Homo sapiens
  MAP TO CHR19.1; EXPRESSED IN FETAL LIVER, SIGNAL = 1.4; EXPRESSED IN LUNG, SIGNAL =   1; EXPRESSED IN HELA, SIGNAL = 1.7; EXPRESSED IN HEART, SIGNAL = 1.3; SWISSPROT HIT: O83222, EVALUE 2.50e+00
PRCGDASSRCCSVRRLERREIHCPGYVLPVKVVAECGCQKCLPPRGLVRGRVVAADSGEPLRFARILLGQEPIGFTAYQGDFTIEVPPSTQRLVVTFVDPSGEFMDAVRVLPFDPRGAGVYHE

SEQ ID NO: 30265 - protein, 62 aa, Homo sapiens
  MAP TO CHR5.1; EXPRESSED IN HELA, SIGNAL = 1.1; EXPRESSED IN BONE MARROW, SIGNAL = 0.94; EXPRESSED IN HEART, SIGNAL = 1.3; EXPRESSED IN LUNG, SIGNAL = 1.1; SWISSPROT HIT: P24339, EVALUE 3.50e+00
LSHCPSIVPEQQIGVGLEVLNSGCVYKPEAEDRWWWGPAEHTHDASREGHGQLPSYSSQAAR

SEQ ID NO: 30266 - protein, 71 aa, Homo sapiens
  MAP TO CHR1.1; EXPRESSED IN ADULT LIVER, SIGNAL = 0.89; EXPRESSED IN BONE MARROW, SIGNAL = 0.99; EXPRESSED IN PLACENTA, SIGNAL = 1.6; EXPRESSED IN FETAL LIVER, SIGNAL = 0.86; EXPRESSED IN HELA, SIGNAL = 1.5; EXPRESSED IN HEART, SIGNAL = 0.91; SWISSPROT HIT: Q03413, EVALUE 7.00e-35
LQVTFTKRKFGLMKKAYELSVLCDCEIALIIFNHSNKLFQYASTDMDKVLLKYTEYNEPHESRTNADIIEV

SEQ ID NO: 30267 - protein, 56 aa, Homo sapiens
  MAP TO CHR12.1; EXPRESSED IN PLACENTA, SIGNAL = 1.4; EXPRESSED IN LUNG, SIGNAL = 0.87; EXPRESSED IN HELA, SIGNAL = 1.6; EXPRESSED IN BONE MARROW, SIGNAL =   1; EXPRESSED IN ADULT LIVER, SIGNAL = 1.3
RRAPPQSHPLSTAIPTMSPIWMCDSSRPHLLKNPPRPLPPWHLLLPVPLLSPWLNF

SEQ ID NO: 30268 - protein, 120 aa, Homo sapiens
  MAP TO CHR2.1; EXPRESSED IN PLACENTA, SIGNAL = 1.2; EXPRESSED IN LUNG, SIGNAL = 0.57; EXPRESSED IN HELA, SIGNAL = 0.88; SWISSPROT HIT: P52583, EVALUE 7.00e-07
GPPSIDLKEFMEVEEGTNVNIVAKIKGVPFPTLTWFKAPPKKPDNKEPVLYDTHVNKLVVDDTCTLVIPQSRRSDTGLYTITAVNNLGTASKEMRLNVLGKDCMVWLKLLVFLFINNIWL

SEQ ID NO: 30269 - protein, 41 aa, Homo sapiens
  MAP TO CHR19.1; EXPRESSED IN BONE MARROW, SIGNAL = 3.6; EXPRESSED IN PLACENTA, SIGNAL = 4.5; EXPRESSED IN HELA, SIGNAL = 6.1; EXPRESSED IN FETAL LIVER, SIGNAL = 5.5; EXPRESSED IN LUNG, SIGNAL = 2.7; EXPRESSED IN HEART, SIGNAL = 5.4; SWISSPROT HIT: P18887, EVALUE 8.00e-14
QAAGPSSPQKPPTPEETKAASPVLQEDIDIEGVQSGQTLRE

SEQ ID NO: 30270 - protein, 71 aa, Homo sapiens
  MAP TO CHRX.1; EXPRESSED IN LUNG, SIGNAL = 0.84; EXPRESSED IN HELA, SIGNAL = 3.5; EXPRESSED IN BONE MARROW, SIGNAL = 0.87; EXPRESSED IN PLACENTA, SIGNAL = 2.2; EXPRESSED IN FETAL LIVER, SIGNAL = 3.1; SWISSPROT HIT: P51805, EVALUE 1.00e-31
SAPESLLRTASSPDSLRSRAPMITPDQETGTKLWHLVKNHDHADHREGDRGSKMVSEIYLTRLLATKVWAC

SEQ ID NO: 30271 - protein, 35 aa, Homo sapiens
  MAP TO CHR12.1; EXPRESSED IN ADULT LIVER, SIGNAL = 1.7; EXPRESSED IN BONE MARROW, SIGNAL = 1.7; EXPRESSED IN LUNG, SIGNAL =   1; EXPRESSED IN HELA, SIGNAL =   1; EXPRESSED IN HEART, SIGNAL = 1.2
LPPPECLAAPGAPGLPAIWAAQRRAHCQGSASIDL

SEQ ID NO: 30272 - protein, 70 aa, Homo sapiens
  MAP TO CHR19.1; EXPRESSED IN LUNG, SIGNAL = 1.6; EXPRESSED IN HELA, SIGNAL = 0.93; EXPRESSED IN HEART, SIGNAL = 1.2; EXPRESSED IN ADULT LIVER, SIGNAL = 0.51; EXPRESSED IN BONE MARROW, SIGNAL = 0.97; SWISSPROT HIT: Q16849, EVALUE 2.30e+00
RPRPRAQGLRVHGGGGRGWGWAGAWHCRVGCGHRTCGQQGSRLPSGEAPAHRLPGPPLPNEGGSGRTWAP

SEQ ID NO: 30273 - protein, 81 aa, Homo sapiens
  MAP TO CHR3.1; EXPRESSED IN HEART, SIGNAL = 1.2; EXPRESSED IN BONE MARROW, SIGNAL = 0.64; EXPRESSED IN LUNG, SIGNAL = 1.3; EXPRESSED IN HELA, SIGNAL = 0.41
LGCCCNLARCACTWGSAEMPAPSHLSPLWTLITNEHGRKAKGALREAQCRPECTPQHKQPGCLDNMINDDRRQTRKGAGPR

SEQ ID NO: 30274 - protein, 76 aa, Homo sapiens
  MAP TO CHR19.1; EXPRESSED IN BONE MARROW, SIGNAL = 1.2; EXPRESSED IN ADULT LIVER, SIGNAL = 1.4; EXPRESSED IN PLACENTA, SIGNAL = 1.8; EXPRESSED IN FETAL LIVER, SIGNAL = 1.7; EXPRESSED IN LUNG, SIGNAL = 1.1; EXPRESSED IN HELA, SIGNAL = 1.7; EXPRESSED IN HEART, SIGNAL = 1.1; SWISSPROT HIT: P30847, EVALUE 3.30e+00
SHRWWVEEEASQLRVGPRVLGPKDGSRRGWARSCSRRALRGTWRGLGSTLGLGLPRGPRGPYGTLRLGLRWAELEL

SEQ ID NO: 30275 - protein, 78 aa, Homo sapiens
  MAP TO CHR12.1; EXPRESSED IN HEART, SIGNAL = 1.8; EXPRESSED IN PLACENTA, SIGNAL = 1.2; EXPRESSED IN FETAL LIVER, SIGNAL = 1.1; EXPRESSED IN LUNG, SIGNAL = 1.8; EXPRESSED IN HELA, SIGNAL = 1.4; SWISSPROT HIT: P34657, EVALUE 2.00e-22
ETMVDHLANTEINSQRIAAVESCFGASGQPLALPGRVLLGEGVLTKECRKKAKPRIFFLFNDILVYGSIVLNKRKYRS

SEQ ID NO: 30276 - protein, 66 aa, Homo sapiens
  MAP TO CHR1.1; EXPRESSED IN BONE MARROW, SIGNAL = 3.1; EXPRESSED IN HEART, SIGNAL = 1.8; EXPRESSED IN ADULT LIVER, SIGNAL = 2.9; EXPRESSED IN PLACENTA, SIGNAL = 3.6; EXPRESSED IN FETAL LIVER, SIGNAL = 2.8; EXPRESSED IN LUNG, SIGNAL = 1.3; EXPRESSED IN HELA, SIGNAL = 4.7; SWISSPROT HIT: P50993, EVALUE 1.00e-32
QVCLTLTAKRMARKNCLVKNLEAVETLGSTSTICSDKTGTLTQNRMTVAHMWFDNQIHEADTTEDQ

SEQ ID NO: 30277 - protein, 49 aa, Homo sapiens
  MAP TO CHR1.1; EXPRESSED IN FETAL LIVER, SIGNAL = 2.5; EXPRESSED IN LUNG, SIGNAL = 1.8; EXPRESSED IN HELA, SIGNAL = 2.3; EXPRESSED IN ADULT LIVER, SIGNAL = 3.6; EXPRESSED IN HEART, SIGNAL = 2.3
QGLPCTAASGSTCSPRTSSRRTATPSRTQSGPGAQSSSQLRRRGPRTVS

SEQ ID NO: 30278 - protein, 96 aa, Homo sapiens
  MAP TO CHR19.1; EXPRESSED IN ADULT LIVER, SIGNAL = 4.4; EXPRESSED IN BONE MARROW, SIGNAL = 4.2; EXPRESSED IN PLACENTA, SIGNAL = 6.1; EXPRESSED IN FETAL LIVER, SIGNAL = 4.6; EXPRESSED IN LUNG, SIGNAL = 3.1; EXPRESSED IN HELA, SIGNAL = 7.9; EXPRESSED IN HEART, SIGNAL = 1.9; SWISSPROT HIT: Q16512, EVALUE 4.00e-08
QSEPRSWSLLEQLGLAGADLAAPGVQQQLELERERLRREIRKELKLKEGAENLRRATTDLGRSLGPVELLLRGSSRRLDLLHQQLQELHAHVVLPD

SEQ ID NO: 30279 - protein, 77 aa, Homo sapiens
  MAP TO AC011435.1; EXPRESSED IN FETAL LIVER, SIGNAL = 0.71; EXPRESSED IN LUNG, SIGNAL = 1.1; EXPRESSED IN HELA, SIGNAL = 1.3; EXPRESSED IN HEART, SIGNAL = 0.8; EXPRESSED IN BONE MARROW, SIGNAL = 0.83; SWISSPROT HIT: O13965, EVALUE 5.10e+00
CVCFIEPFPAFKSWQEDSESGEAQLSPQAGRMNHHPLEEDCPPVLSHRSLDFGQSQRFLHDPEKLDSSSKALSFTRY

SEQ ID NO: 30280 - protein, 54 aa, Homo sapiens
  MAP TO CHR17.1; EXPRESSED IN FETAL LIVER, SIGNAL = 0.94; EXPRESSED IN LUNG, SIGNAL = 1.6; EXPRESSED IN HELA, SIGNAL = 0.94; EXPRESSED IN HEART, SIGNAL = 1.4; SWISSPROT HIT: Q09602, EVALUE 4.70e+00
NLAPICMVLCLVNVQQPSQPEVCNFDMVGTLDQHVPSGQVPVYEPHILQVAHPL

SEQ ID NO: 30281 - protein, 72 aa, Homo sapiens
  MAP TO CHR17.1; EXPRESSED IN HEART, SIGNAL = 0.66; EXPRESSED IN BONE MARROW, SIGNAL = 0.51; EXPRESSED IN HELA, SIGNAL =   1
PLKGDILGVKLSGDDGRGKPAQHLFLSGLSSSQQQLPVLPSQCQSLCVHHPAVVVNLHDHGACVCQTRNSTG

SEQ ID NO: 30282 - protein, 66 aa, Homo sapiens
  MAP TO CHR2.1; EXPRESSED IN PLACENTA, SIGNAL =  56; EXPRESSED IN LUNG, SIGNAL =  19; EXPRESSED IN HELA, SIGNAL =  38; SWISSPROT HIT: Q00994, EVALUE 6.00e+00
TRCVLFSLFIQIIFYNIPGQTGEFGSPIGGGSLQRPTGRWHRRGVPRFTVQLVARVHLAGGSSSTS

SEQ ID NO: 30283 - protein, 104 aa, Homo sapiens
  MAP TO CHR4.1; EXPRESSED IN BONE MARROW, SIGNAL = 4.3; EXPRESSED IN PLACENTA, SIGNAL =   2; EXPRESSED IN LUNG, SIGNAL =   5; EXPRESSED IN HELA, SIGNAL = 9.9; SWISSPROT HIT: P00338, EVALUE 1.00e-41
KSNMAILKDQLIHNLLKEEQTPQNMIIVVEDGAVHMACAISILVKDLADELALVDVMEDKLKGEMMNLQHGSLFLGMPKIVSGKDYNVTANSKLVIITAGAHQQ

SEQ ID NO: 30284 - protein, 85 aa, Homo sapiens
  MAP TO CHR5.1; EXPRESSED IN FETAL LIVER, SIGNAL = 1.1; EXPRESSED IN LUNG, SIGNAL = 1.6; EXPRESSED IN HELA, SIGNAL = 1.2; EXPRESSED IN HEART, SIGNAL = 1.3; EXPRESSED IN BONE MARROW, SIGNAL =   1; SWISSPROT HIT: P49590, EVALUE 1.00e-41
QISFDLSLARGLDYYTGVIYEAVLLQTPTQAGEEPLNVGSVAAGGRYDGLVGMFDPKGHKVPCVGLSIGVERIFYIVEQRMKVGP

SEQ ID NO: 30285 - protein, 49 aa, Homo sapiens
  MAP TO CHR7.1; EXPRESSED IN HELA, SIGNAL = 1.2; EXPRESSED IN LUNG, SIGNAL = 1.2; EXPRESSED IN ADULT LIVER, SIGNAL = 2.1; EXPRESSED IN HEART, SIGNAL = 1.1; EXPRESSED IN BONE MARROW, SIGNAL = 1.9; EXPRESSED IN PLACENTA, SIGNAL = 1.4; SWISSPROT HIT: P20647, EVALUE 6.30e+00
HLLCFPFLFPNPNSLIFLLSPIGVTDSLCILKFEVLAEKGYLLNYLNFT

SEQ ID NO: 30286 - protein, 68 aa, Homo sapiens
  MAP TO CHR20.1; EXPRESSED IN BONE MARROW, SIGNAL = 1.8; EXPRESSED IN HEART, SIGNAL = 1.6; EXPRESSED IN PLACENTA, SIGNAL =   3; EXPRESSED IN FETAL LIVER, SIGNAL = 2.2; EXPRESSED IN LUNG, SIGNAL =   2; EXPRESSED IN HELA, SIGNAL =   7; SWISSPROT HIT: P48553, EVALUE 1.00e-33
SVVDNSSNWAVCGKSCGVISMPVAARATHRVHMEVMPLFAGYLPLPDVRLFKYLPHHSAHSSQLDAGK

SEQ ID NO: 30287 - protein, 47 aa, Homo sapiens
  MAP TO CHR22.1; EXPRESSED IN HEART, SIGNAL = 2.2; EXPRESSED IN BONE MARROW, SIGNAL = 2.8; EXPRESSED IN PLACENTA, SIGNAL = 2.6; EXPRESSED IN FETAL LIVER, SIGNAL = 3.2; EXPRESSED IN HELA, SIGNAL = 3.4; EXPRESSED IN LUNG, SIGNAL = 1.7
HRKDKSSRCRGRNRERPSQWLILRRPCNNTGTKPQLEPVAMANATSE

SEQ ID NO: 30288 - protein, 68 aa, Homo sapiens
  MAP TO CHR12.1; EXPRESSED IN FETAL LIVER, SIGNAL =   6; EXPRESSED IN LUNG, SIGNAL = 3.3; EXPRESSED IN HELA, SIGNAL = 7.4; EXPRESSED IN HEART, SIGNAL = 3.3; EXPRESSED IN BONE MARROW, SIGNAL = 6.1; SWISSPROT HIT: P09104, EVALUE 1.00e-32
ALELVKEAIDKAGYTEKIVIGMDVAASEFYRDGKYDLDFKSPTDPSRYITGDQLGALYQDFVRDYPGE

SEQ ID NO: 30289 - protein, 94 aa, Homo sapiens
  MAP TO CHR12.1; EXPRESSED IN HELA, SIGNAL = 1.5; EXPRESSED IN HEART, SIGNAL = 0.63; EXPRESSED IN ADULT LIVER, SIGNAL = 0.71; EXPRESSED IN BONE MARROW, SIGNAL = 0.97; EXPRESSED IN FETAL LIVER, SIGNAL = 0.83; EXPRESSED IN LUNG, SIGNAL = 0.63; SWISSPROT HIT: P57999, EVALUE 8.60e+00
SSGFPGASIQGSHTLSSYAEPQYFRFEGVWLTETGMALLRNLTMSPLHKRRQRRGRLGLPGEAGLEGSEPSDALGPDDKKDGDLDTDELLKGEG

SEQ ID NO: 30290 - protein, 70 aa, Homo sapiens
  MAP TO CHR1.1; EXPRESSED IN PLACENTA, SIGNAL = 2.1; EXPRESSED IN HELA, SIGNAL = 2.1; EXPRESSED IN HEART, SIGNAL = 0.84; EXPRESSED IN BONE MARROW, SIGNAL =   2; EXPRESSED IN ADULT LIVER, SIGNAL = 1.2; SWISSPROT HIT: P30203, EVALUE 9.20e-01
CHVTLGWAPGQGEPSRAEKALGMSQAITWESPQLTGHGCRHKPSHGCPLHSSEQECLIWQRPAVQGANDI

SEQ ID NO: 30291 - protein, 35 aa, Homo sapiens
  MAP TO CHR22.1; EXPRESSED IN BONE MARROW, SIGNAL = 4.4; EXPRESSED IN ADULT LIVER, SIGNAL = 7.7; EXPRESSED IN PLACENTA, SIGNAL =   5; EXPRESSED IN FETAL LIVER, SIGNAL = 4.4; EXPRESSED IN HELA, SIGNAL = 4.9; EXPRESSED IN LUNG, SIGNAL = 2.1; EXPRESSED IN HEART, SIGNAL = 2.7; SWISSPROT HIT: P54198, EVALUE 2.00e-12
SHRYIGPSTVFGSSGKLANVEQWRCVSILRNHSGG

SEQ ID NO: 30292 - protein, 57 aa, Homo sapiens
  MAP TO CHR17.1; EXPRESSED IN PLACENTA, SIGNAL =  11; EXPRESSED IN FETAL LIVER, SIGNAL =   5; EXPRESSED IN LUNG, SIGNAL =   8; EXPRESSED IN HELA, SIGNAL =  10; EXPRESSED IN HEART, SIGNAL = 4.3; EXPRESSED IN ADULT LIVER, SIGNAL = 2.7; SWISSPROT HIT: P11467, EVALUE 8.00e-03
SHQGHLNTCSFNVIPCPNRCPMKLSRRDLPAHLQHDCPKRRLKCEFCGCDFSGEAYE

SEQ ID NO: 30293 - protein, 55 aa, Homo sapiens
  MAP TO CHR16.1; EXPRESSED IN PLACENTA, SIGNAL = 1.2; EXPRESSED IN FETAL LIVER, SIGNAL = 1.1; EXPRESSED IN LUNG, SIGNAL = 1.7; EXPRESSED IN HELA, SIGNAL = 0.77; EXPRESSED IN HEART, SIGNAL = 1.2; EXPRESSED IN BONE MARROW, SIGNAL = 0.9; EXPRESSED IN ADULT LIVER, SIGNAL = 1.3; SWISSPROT HIT: P77306, EVALUE 8.10e+00
VAPADGFSDLAMQVMTSPSKNYILSVISGSICILFLIGLMCGRITKRVTRELKDR

SEQ ID NO: 30294 - protein, 62 aa, Homo sapiens
  MAP TO CHR19.1; EXPRESSED IN BONE MARROW, SIGNAL = 1.3; EXPRESSED IN ADULT LIVER, SIGNAL = 1.6; EXPRESSED IN PLACENTA, SIGNAL = 2.1; EXPRESSED IN FETAL LIVER, SIGNAL = 1.7; EXPRESSED IN LUNG, SIGNAL = 0.84; EXPRESSED IN HELA, SIGNAL = 3.4; EXPRESSED IN HEART, SIGNAL =   1; SWISSPROT HIT: P02467, EVALUE 1.00e-02
TWEQLSELPDVPRGGRPVRDHPGFSETAAPGLSGKAGCFGSGSPCGRIGPGGRQPRVGCHGG

SEQ ID NO: 30295 - protein, 24 aa, Homo sapiens
  MAP TO CHR5.1; EXPRESSED IN ADULT LIVER, SIGNAL = 2.9; EXPRESSED IN HELA, SIGNAL = 2.1; EXPRESSED IN LUNG, SIGNAL = 1.6; EXPRESSED IN HEART, SIGNAL = 2.2; EXPRESSED IN BONE MARROW, SIGNAL = 1.8
IFWKSVYLTPTLITAEKSENPLFT

SEQ ID NO: 30296 - protein, 59 aa, Homo sapiens
  MAP TO AC021705.4; EXPRESSED IN HELA, SIGNAL = 0.79; EXPRESSED IN FETAL LIVER, SIGNAL = 0.76; EXPRESSED IN LUNG, SIGNAL = 1.1; EXPRESSED IN HEART, SIGNAL = 1.1; SWISSPROT HIT: P17656, EVALUE 1.10e-01
LQETLRGQPGGPAETGLSQREGPGPQPSGLETRMGTHGAHRESSGQGRAIPGGKLQVTA

SEQ ID NO: 30297 - protein, 76 aa, Homo sapiens
  MAP TO CHR17.1; EXPRESSED IN HELA, SIGNAL = 6.9; EXPRESSED IN LUNG, SIGNAL = 2.5; EXPRESSED IN HEART, SIGNAL = 3.2; EXPRESSED IN BONE MARROW, SIGNAL = 5.5; EXPRESSED IN ADULT LIVER, SIGNAL = 7.5; EXPRESSED IN PLACENTA, SIGNAL =   6; EXPRESSED IN FETAL LIVER, SIGNAL = 8.1; SWISSPROT HIT: O15553, EVALUE 4.00e+00
PGSFYSRICGPSGGCGTGCGAFIPQIPSVHPLPDLCGADARGGGRTQCPSLLGGSGPAVGRKLDSAPDSRLRLGCL

SEQ ID NO: 30298 - protein, 56 aa, Homo sapiens
  MAP TO CHR13.1; EXPRESSED IN BONE MARROW, SIGNAL = 0.62; EXPRESSED IN ADULT LIVER, SIGNAL = 0.61; EXPRESSED IN LUNG, SIGNAL =   1; EXPRESSED IN HELA, SIGNAL = 0.5; EXPRESSED IN HEART, SIGNAL = 0.84; SWISSPROT HIT: P40468, EVALUE 8.00e-03
FPAVKKKFMAELKELRHKEQNPYVVQSIISLIMGMKFFRIKMYPVEDFEASLQFMQ

SEQ ID NO: 30299 - protein, 67 aa, Homo sapiens
  MAP TO CHR12.1; EXPRESSED IN HELA, SIGNAL =   1; EXPRESSED IN BONE MARROW, SIGNAL = 0.91; EXPRESSED IN HEART, SIGNAL = 0.73; EXPRESSED IN PLACENTA, SIGNAL = 1.2; EXPRESSED IN FETAL LIVER, SIGNAL =   1; EXPRESSED IN LUNG, SIGNAL = 0.78
LTCFLGESLNHVTWRSTPCTIAGPDFYKILGVWQKVLEPGRVLLAGDLNSVCSFFFVMGSPIPNLQT

SEQ ID NO: 30300 - protein, 61 aa, Homo sapiens
  MAP TO CHR5.1; EXPRESSED IN HELA, SIGNAL = 0.64; EXPRESSED IN ADULT LIVER, SIGNAL = 1.6; EXPRESSED IN LUNG, SIGNAL = 0.88; EXPRESSED IN FETAL LIVER, SIGNAL = 0.74; SWISSPROT HIT: P13015, EVALUE 7.20e-01
LFLQLLGLVGVRKALERVFSPQELLWLDELMPEEERSIPEKGLEPEHSFSGSDSEDVSSRL

SEQ ID NO: 30301 - protein, 113 aa, Homo sapiens
  MAP TO CHR12.1; EXPRESSED IN HELA, SIGNAL = 0.95; EXPRESSED IN BONE MARROW, SIGNAL = 0.88; EXPRESSED IN HEART, SIGNAL = 0.95; EXPRESSED IN ADULT LIVER, SIGNAL = 0.86; EXPRESSED IN FETAL LIVER, SIGNAL = 0.86; EXPRESSED IN LUNG, SIGNAL = 0.92; SWISSPROT HIT: P08120, EVALUE 3.30e+00
SGQVINNYLDANEPVSLEARLSRMHFHDSQRKVDYVLAYHYRKRGVHLAQGFPGHSLAIVSNGETGKEPHAGGPGDIELGPLDALEEERKEQREEFEHNLMEAGLELEKDLEV

SEQ ID NO: 30302 - protein, 52 aa, Homo sapiens
  MAP TO CHR4.1; EXPRESSED IN HELA, SIGNAL = 0.88; EXPRESSED IN LUNG, SIGNAL = 0.76; EXPRESSED IN BONE MARROW, SIGNAL = 0.66; EXPRESSED IN FETAL LIVER, SIGNAL = 0.61; SWISSPROT HIT: P51111, EVALUE 5.00e-11
HSTLLILGVLLTLRYLVPLLQQQVKDTSLKGSFGVTRKEMEVSPSAEQLVQV

SEQ ID NO: 30303 - protein, 67 aa, Homo sapiens
  MAP TO CHR5.1; EXPRESSED IN FETAL LIVER, SIGNAL = 1.1; EXPRESSED IN LUNG, SIGNAL = 1.4; EXPRESSED IN HELA, SIGNAL = 0.8; EXPRESSED IN BONE MARROW, SIGNAL = 0.72; EXPRESSED IN ADULT LIVER, SIGNAL = 0.98; SWISSPROT HIT: Q9Y5E8, EVALUE 3.70e-02
ASHFVGVDGVRAFLQTYSHEVSLTADSRKSHLIFSQPSYADTLISRESCEKSEPLLITQDLLETKGD

SEQ ID NO: 30304 - protein, 167 aa, Homo sapiens
  MAP TO CHR8.1; EXPRESSED IN HELA, SIGNAL = 1.5; EXPRESSED IN LUNG, SIGNAL =   2; EXPRESSED IN HEART, SIGNAL = 1.4; EXPRESSED IN ADULT LIVER, SIGNAL = 1.6; EXPRESSED IN PLACENTA, SIGNAL = 2.5; EXPRESSED IN FETAL LIVER, SIGNAL = 1.2; SWISSPROT HIT: Q99062, EVALUE 1.60e+00
RKDLDKTLKGFAVTLSPVLPQRDLRPFTRVTVHWGKGNNQTFRGLLDTGSELTLIPGDPKKHCGPPVKVGAYGGQVINGVLTDVRLTVGPVGPRTHPVVISPVPECIIGIDILRNWQNSHIGSLNCRVRAIMVGKAKWKPLELPLPKKIVNQKTVSYSWRNCRNYCH

SEQ ID NO: 30305 - protein, 88 aa, Homo sapiens
  MAP TO CHR5.1; EXPRESSED IN HEART, SIGNAL = 1.2; EXPRESSED IN FETAL LIVER, SIGNAL = 1.1; EXPRESSED IN HELA, SIGNAL = 0.95; EXPRESSED IN LUNG, SIGNAL = 0.89; SWISSPROT HIT: Q9Z2V9, EVALUE 2.00e-18
NIKNHGLQFHALVVLSWPHVLELLPQRNPSLHVASLTRQLQHCMAGHQLLQFKGSTLALVIITLELERLMPGWCAPISDLLKKAQVDI

SEQ ID NO: 30306 - protein, 57 aa, Homo sapiens
  MAP TO CHR7.1; EXPRESSED IN HELA, SIGNAL = 0.72; EXPRESSED IN HEART, SIGNAL = 0.5; EXPRESSED IN FETAL LIVER, SIGNAL = 0.56; SWISSPROT HIT: Q14168, EVALUE 5.00e-13
LLFFQAHERLEDSKLEAVSDNNLELVNEILEDITPLINVDENVAELVGILKEPHFQV

SEQ ID NO: 30307 - protein, 70 aa, Homo sapiens
  MAP TO CHR1.1; EXPRESSED IN HELA, SIGNAL =   1; EXPRESSED IN BONE MARROW, SIGNAL =   1; EXPRESSED IN HEART, SIGNAL =   2; EXPRESSED IN FETAL LIVER, SIGNAL = 1.4; EXPRESSED IN LUNG, SIGNAL = 2.7; SWISSPROT HIT: O14896, EVALUE 3.00e-33
PEQVIPVVARMIYEMFSGDFTRSFDSGSVRLQISTPDIKDNIVAQLKQLYRILQTQESWQPMQPTPSMQL

SEQ ID NO: 30308 - protein, 44 aa, Homo sapiens
  MAP TO CHR2.1; EXPRESSED IN FETAL LIVER, SIGNAL = 0.98; EXPRESSED IN HELA, SIGNAL = 0.7; EXPRESSED IN HEART, SIGNAL = 0.84; EXPRESSED IN BONE MARROW, SIGNAL =   1; EXPRESSED IN ADULT LIVER, SIGNAL = 0.93
LIIYNFRKFLLHSNLPGFHLQQPAFDRNMENGLNLKWQTDEEVQ

SEQ ID NO: 30309 - protein, 58 aa, Homo sapiens
  MAP TO CHR17.1; EXPRESSED IN FETAL LIVER, SIGNAL = 1.8; EXPRESSED IN HELA, SIGNAL = 0.48; EXPRESSED IN LUNG, SIGNAL = 8.6; EXPRESSED IN HEART, SIGNAL = 4.1; EXPRESSED IN BONE MARROW, SIGNAL = 1.4; SWISSPROT HIT: Q83207, EVALUE 1.20e+00
GFYPRDLIIVSTSFVVIVPSLSLSNREKASMNSGICSSVSLVCYAASPTGFRDVTTQP

SEQ ID NO: 30310 - protein, 37 aa, Homo sapiens
  MAP TO CHR5.1; EXPRESSED IN PLACENTA, SIGNAL =  15; EXPRESSED IN LUNG, SIGNAL = 9.3; EXPRESSED IN HELA, SIGNAL =   5; SWISSPROT HIT: P09480, EVALUE 8.50e+00
LLEGDEAGGVGGPNARPAVLHGLVGDGELAQVVADHL

SEQ ID NO: 30311 - protein, 87 aa, Homo sapiens
  MAP TO CHR6.1; EXPRESSED IN BONE MARROW, SIGNAL = 1.1; EXPRESSED IN FETAL LIVER, SIGNAL = 1.1; EXPRESSED IN LUNG, SIGNAL = 5.1; EXPRESSED IN HELA, SIGNAL = 2.8; EXPRESSED IN HEART, SIGNAL = 1.6; SWISSPROT HIT: P15311, EVALUE 5.00e-36
PKAKEAQDDLVKTKEELHLVMTAPPPPPPPVYEPVSYHVQESLQDEGAEPTGYSAELSSEGIRDDRNEEKRITEAEKNERVQRQLLV

SEQ ID NO: 30312 - protein, 60 aa, Homo sapiens
  MAP TO CHR11.1; EXPRESSED IN HELA, SIGNAL = 0.8; EXPRESSED IN LUNG, SIGNAL = 0.84; EXPRESSED IN HEART, SIGNAL = 0.93; EXPRESSED IN BONE MARROW, SIGNAL =   1; SWISSPROT HIT: Q03164, EVALUE 5.00e-28
EPKTVEEEESNFSSPLMLWLQQEQKRKESITEKKPKKGLVFEISSDDGFQICAESIEGEW

SEQ ID NO: 30313 - protein, 56 aa, Homo sapiens
  MAP TO CHR5.1; EXPRESSED IN ADULT LIVER, SIGNAL = 0.73; EXPRESSED IN BONE MARROW, SIGNAL = 0.77; EXPRESSED IN HELA, SIGNAL = 0.59; EXPRESSED IN FETAL LIVER, SIGNAL = 0.62
THWALRRSFSRFSNSALALFLSSSSMSSFVSSAFLSSSIFACISIILSGETFFFPI

SEQ ID NO: 30314 - protein, 84 aa, Homo sapiens
  MAP TO CHR22.1; EXPRESSED IN PLACENTA, SIGNAL = 2.4; EXPRESSED IN LUNG, SIGNAL = 1.6; EXPRESSED IN HELA, SIGNAL = 3.5; EXPRESSED IN HEART, SIGNAL = 1.2; EXPRESSED IN ADULT LIVER, SIGNAL = 1.7; EXPRESSED IN BONE MARROW, SIGNAL = 1.9; SWISSPROT HIT: Q15459, EVALUE 2.00e-34
FHLQVTWDGHSGSMARTQQAAQANITLQEQIEAIHKAKGLVPEDDTKEKIGPSKPNEIPQQPPPPSSATNIPSSAPPITSVPRP

SEQ ID NO: 30315 - protein, 85 aa, Homo sapiens
  MAP TO CHR20.1; EXPRESSED IN BONE MARROW, SIGNAL = 1.2; EXPRESSED IN PLACENTA, SIGNAL = 1.4; EXPRESSED IN FETAL LIVER, SIGNAL = 1.2; EXPRESSED IN LUNG, SIGNAL = 0.96; EXPRESSED IN HELA, SIGNAL = 1.4; EXPRESSED IN HEART, SIGNAL = 1.1; SWISSPROT HIT: P17886, EVALUE 1.00e-32
FIFQGTSIGKCPKNKLFKVYIELELQLREFDRCRKLYEKFLEFGPENCTSWIKFAELETILGDIDRARAIYELAISQPRLDMPEV

SEQ ID NO: 30316 - protein, 47 aa, Homo sapiens
  MAP TO CHR3.1; EXPRESSED IN FETAL LIVER, SIGNAL = 0.63; EXPRESSED IN LUNG, SIGNAL = 1.3; EXPRESSED IN HELA, SIGNAL = 0.92; EXPRESSED IN HEART, SIGNAL = 0.97; EXPRESSED IN BONE MARROW, SIGNAL = 0.56; SWISSPROT HIT: Q44427, EVALUE 2.00e-01
SHLEWSWCGCRQGTGAGACRFSPGQTAAALLRRGLQGSTTFGGARAL

SEQ ID NO: 30317 - protein, 55 aa, Homo sapiens
  MAP TO CHR7.1; EXPRESSED IN HELA, SIGNAL = 0.6; EXPRESSED IN ADULT LIVER, SIGNAL = 0.55; EXPRESSED IN BONE MARROW, SIGNAL = 0.84; SWISSPROT HIT: Q07785, EVALUE 3.00e-04
SSLSRGVGCIFVEMIQGVAAFPGMKDIQDQLERIFLVSPLQSISKKNWFLISHLV

SEQ ID NO: 30318 - protein, 84 aa, Homo sapiens
  MAP TO CHR8.1; EXPRESSED IN HEART, SIGNAL = 2.5; EXPRESSED IN BONE MARROW, SIGNAL = 2.4; EXPRESSED IN PLACENTA, SIGNAL = 2.7; EXPRESSED IN FETAL LIVER, SIGNAL = 2.6; EXPRESSED IN HELA, SIGNAL = 2.8; SWISSPROT HIT: P21268, EVALUE 3.60e+00
LPLDFWTCEFWLWEKQYHLLDADSEHTLPSGELCPSPAKYRHLVGVVVVASKGHSTILSIQLLQDDGEDGKISEFHEHEPTATL

SEQ ID NO: 30319 - protein, 40 aa, Homo sapiens
  MAP TO CHR20.1; EXPRESSED IN HELA, SIGNAL = 0.93; EXPRESSED IN BONE MARROW, SIGNAL = 1.1; EXPRESSED IN FETAL LIVER, SIGNAL = 0.75
SSDGQQMKFCLEIKPELLYIEVYYLRLWSSLFWQITVKMV

SEQ ID NO: 30320 - protein, 64 aa, Homo sapiens
  MAP TO CHR19.1; EXPRESSED IN FETAL LIVER, SIGNAL = 1.3; EXPRESSED IN LUNG, SIGNAL = 1.4; EXPRESSED IN HELA, SIGNAL = 0.97; EXPRESSED IN HEART, SIGNAL = 1.4; EXPRESSED IN ADULT LIVER, SIGNAL = 2.5; EXPRESSED IN BONE MARROW, SIGNAL = 0.85; SWISSPROT HIT: P23468, EVALUE 3.00e-29
SSPQRLANSKAHTSRFISANLPCNKFKNRLVNIMPYESTRVCLQPIRGVEGSDYINASFIDGYR

SEQ ID NO: 30321 - protein, 50 aa, Homo sapiens
  MAP TO CHR7.1; EXPRESSED IN BONE MARROW, SIGNAL = 1.1; EXPRESSED IN ADULT LIVER, SIGNAL = 1.4; EXPRESSED IN FETAL LIVER, SIGNAL = 0.98; EXPRESSED IN LUNG, SIGNAL = 0.88; EXPRESSED IN HELA, SIGNAL = 0.45
CLTGNKRKKEMCYCTLVKHSLKEEENGTAAPSPSLPSGLPTRRKAMFTAC

SEQ ID NO: 30322 - protein, 41 aa, Homo sapiens
  MAP TO CHR19.1; EXPRESSED IN HELA, SIGNAL =   1; EXPRESSED IN HEART, SIGNAL = 0.88; EXPRESSED IN BONE MARROW, SIGNAL =   1; EXPRESSED IN ADULT LIVER, SIGNAL = 0.98; EXPRESSED IN FETAL LIVER, SIGNAL = 1.2; EXPRESSED IN LUNG, SIGNAL = 0.59
FLPIQSRFLMVSHITSLYRLFCDGPSKAHSSWVKFTATSSK

SEQ ID NO: 30323 - protein, 71 aa, Homo sapiens
  MAP TO CHR1.1; EXPRESSED IN BONE MARROW, SIGNAL = 2.7; EXPRESSED IN HEART, SIGNAL = 1.6; EXPRESSED IN ADULT LIVER, SIGNAL = 1.7; EXPRESSED IN PLACENTA, SIGNAL = 2.1; EXPRESSED IN FETAL LIVER, SIGNAL =   2; EXPRESSED IN LUNG, SIGNAL = 1.7; EXPRESSED IN HELA, SIGNAL = 1.4; SWISSPROT HIT: Q83262, EVALUE 5.90e+00
DVRYFVCLETALRHLLTSTASNSDSVRKGIFNGCFEITQKTFYTTMKSAFYYVSNIRQDEIRQQSTAQHIP

SEQ ID NO: 30324 - protein, 39 aa, Homo sapiens
  MAP TO CHR12.1; EXPRESSED IN BONE MARROW, SIGNAL = 1.3; EXPRESSED IN LUNG, SIGNAL = 0.91; EXPRESSED IN HELA, SIGNAL = 1.2; EXPRESSED IN ADULT LIVER, SIGNAL = 1.9; EXPRESSED IN HEART, SIGNAL = 0.93
SPGNKANTTGKMINVYFKRMCIQTNSLPYVTGFPPKKTD

SEQ ID NO: 30325 - protein, 56 aa, Homo sapiens
  MAP TO CHR14.1; EXPRESSED IN PLACENTA, SIGNAL =  12; EXPRESSED IN FETAL LIVER, SIGNAL = 8.5; EXPRESSED IN HELA, SIGNAL = 6.9; EXPRESSED IN LUNG, SIGNAL =  22; EXPRESSED IN BONE MARROW, SIGNAL =  27; EXPRESSED IN HEART, SIGNAL = 4.5; EXPRESSED IN ADULT LIVER, SIGNAL = 7.2
THSSPFSGAWQTQCIQELLKVNPEAAQESLRDPPGCTKPHPDSTSCTSHWTPANTE

SEQ ID NO: 30326 - protein, 54 aa, Homo sapiens
  MAP TO CHR19.1; EXPRESSED IN BONE MARROW, SIGNAL =   3; EXPRESSED IN HEART, SIGNAL = 4.3; EXPRESSED IN PLACENTA, SIGNAL = 2.6; EXPRESSED IN LUNG, SIGNAL = 5.9; EXPRESSED IN HELA, SIGNAL = 1.6; SWISSPROT HIT: P30679, EVALUE 2.00e-24
QNRMKESLALFGTILELPWFKSTSVILFLNKTDILEEKIPTSHLATYFPSFQGK

SEQ ID NO: 30327 - protein, 142 aa, Homo sapiens
  MAP TO CHR19.1; EXPRESSED IN LUNG, SIGNAL = 0.94; EXPRESSED IN HELA, SIGNAL = 0.41; EXPRESSED IN BONE MARROW, SIGNAL = 0.46; EXPRESSED IN HEART, SIGNAL = 0.66; SWISSPROT HIT: P38334, EVALUE 5.00e-22
KTMSGSFYFVIVGHHDNPVFEMEFLPAGKAESKDDHRHLNQFIAHAALDLVDENMWLSNNMYLKTVDKFNEWFVSAFVTAGHMRFIMLHDIRQEDGIKNFFTDVYDLYIKFSMNPFYEPNSPIRSSAFDRKVQFLGKKHLLS

SEQ ID NO: 30328 - protein, 40 aa, Homo sapiens
  MAP TO AF322450.1; EXPRESSED IN BONE MARROW, SIGNAL = 1.7; EXPRESSED IN HEART, SIGNAL = 1.6; EXPRESSED IN ADULT LIVER, SIGNAL = 0.9; EXPRESSED IN PLACENTA, SIGNAL = 1.9; EXPRESSED IN FETAL LIVER, SIGNAL = 1.6; EXPRESSED IN LUNG, SIGNAL = 1.7; EXPRESSED IN HELA, SIGNAL =   2
PFRSIHVVTWNVASAAPPLDLSDLLQLNNRNLNLDIYVIG

SEQ ID NO: 30329 - protein, 32 aa, Homo sapiens
  MAP TO CHR6.1; EXPRESSED IN LUNG, SIGNAL = 2.9; EXPRESSED IN HELA, SIGNAL = 1.8; EXPRESSED IN PLACENTA, SIGNAL = 3.2; EXPRESSED IN FETAL LIVER, SIGNAL = 2.2
EILMTITVLVSAAGHVVIAGIDDYLLLPILYF

SEQ ID NO: 30330 - protein, 67 aa, Homo sapiens
  MAP TO CHR19.1; EXPRESSED IN BONE MARROW, SIGNAL = 1.2; EXPRESSED IN HEART, SIGNAL = 1.2; EXPRESSED IN ADULT LIVER, SIGNAL = 2.1; EXPRESSED IN FETAL LIVER, SIGNAL = 1.6; EXPRESSED IN HELA, SIGNAL = 1.9; EXPRESSED IN LUNG, SIGNAL = 1.2; SWISSPROT HIT: P28994, EVALUE 9.20e-01
RGRWYLQVDPLLQHPLLIELAEEARVGHTEGTARHPAPTAGHTTEDVVVQLAQDARAPYKGHCARHL

SEQ ID NO: 30331 - protein, 22 aa, Homo sapiens
  MAP TO CHR7.1; EXPRESSED IN HELA, SIGNAL = 0.56; EXPRESSED IN HEART, SIGNAL = 0.44; EXPRESSED IN BONE MARROW, SIGNAL = 0.74
LQALGSELSALHGSFILASQQA

SEQ ID NO: 30332 - protein, 84 aa, Homo sapiens
  MAP TO CHR7.1; EXPRESSED IN LUNG, SIGNAL = 1.3; EXPRESSED IN HELA, SIGNAL =  46; EXPRESSED IN HEART, SIGNAL =  18; EXPRESSED IN ADULT LIVER, SIGNAL =  45; EXPRESSED IN BONE MARROW, SIGNAL = 3.9; EXPRESSED IN PLACENTA, SIGNAL =  31; EXPRESSED IN FETAL LIVER, SIGNAL =  11; SWISSPROT HIT: Q92830, EVALUE 2.30e-01
LRGLSAPLQASSFLSTPLPSPVAVPGSSPLGSAEEGLAQSRGEEAKAGLRVGGKLPGSRWEEGEAVPIWAKWLTGADEISCQQF

SEQ ID NO: 30333 - protein, 46 aa, Homo sapiens
  MAP TO CHR17.1; EXPRESSED IN PLACENTA, SIGNAL = 1.4; EXPRESSED IN FETAL LIVER, SIGNAL = 1.3; EXPRESSED IN LUNG, SIGNAL = 1.1; EXPRESSED IN HELA, SIGNAL = 1.2; EXPRESSED IN ADULT LIVER, SIGNAL = 0.47; SWISSPROT HIT: P42788, EVALUE 8.30e+00
VSFAKSKLCSRQSRQLSLDAGNDTSQWNGHWQAEGRSSPLRNSSCG

SEQ ID NO: 30334 - protein, 84 aa, Homo sapiens
  MAP TO CHR7.1; EXPRESSED IN HELA, SIGNAL = 1.5; EXPRESSED IN LUNG, SIGNAL =   1; EXPRESSED IN BONE MARROW, SIGNAL = 1.7; EXPRESSED IN HEART, SIGNAL = 1.4; EXPRESSED IN ADULT LIVER, SIGNAL = 1.7; EXPRESSED IN PLACENTA, SIGNAL = 1.2; EXPRESSED IN FETAL LIVER, SIGNAL =   2; SWISSPROT HIT: O14063, EVALUE 2.00e+00
CSRAPSNVSTIIHILYLPEDAKGENVQFQWKQENLRVGEVYEACWALDNILIINSAHRQVVLEDSLDPVDTGNWLFFPGATVKV

SEQ ID NO: 30335 - protein, 99 aa, Homo sapiens
  MAP TO CHR1.1; EXPRESSED IN PLACENTA, SIGNAL = 1.5; EXPRESSED IN LUNG, SIGNAL = 0.94; EXPRESSED IN HELA, SIGNAL = 1.9; EXPRESSED IN HEART, SIGNAL = 1.1; EXPRESSED IN ADULT LIVER, SIGNAL = 1.8; SWISSPROT HIT: Q61116, EVALUE 2.00e-55
HTGEKPYRCDSCGKGFSRSTDLNIHCRVHTGEKPYKCEVCGKGFTQRSHLQAHERIHTGEKPYKCGDCGKRFSCSSNLHTHQRVHTEEKPYKCDECGKC

SEQ ID NO: 30336 - protein, 85 aa, Homo sapiens
  MAP TO CHR17.1; EXPRESSED IN FETAL LIVER, SIGNAL = 2.3; EXPRESSED IN HELA, SIGNAL = 1.3; EXPRESSED IN LUNG, SIGNAL = 3.5; EXPRESSED IN HEART, SIGNAL = 2.9; EXPRESSED IN ADULT LIVER, SIGNAL = 2.5; EXPRESSED IN PLACENTA, SIGNAL = 1.5; SWISSPROT HIT: P47098, EVALUE 4.80e+00
LSHHRQDRLSSGHGHGPHSCPHRFESHGGRRRSSHQCYIQPCRCHRCPAHSQEGESPAQSAEAAHQFVASPSEAALPPGWVKDGR

SEQ ID NO: 30337 - protein, 58 aa, Homo sapiens
  MAP TO CHR7.1; EXPRESSED IN HEART, SIGNAL = 0.89; EXPRESSED IN FETAL LIVER, SIGNAL = 0.49; EXPRESSED IN LUNG, SIGNAL = 0.79; EXPRESSED IN HELA, SIGNAL = 1.9; EXPRESSED IN BONE MARROW, SIGNAL = 0.36
YLADDEELLTLHHLLPELLLNGHPHLILILVHMGTVDVAVPDVNGHLHGLSHLPWRGL

SEQ ID NO: 30338 - protein, 43 aa, Homo sapiens
  MAP TO CHR5.1; EXPRESSED IN ADULT LIVER, SIGNAL = 1.6; EXPRESSED IN PLACENTA, SIGNAL = 1.3; EXPRESSED IN LUNG, SIGNAL = 1.1; EXPRESSED IN FETAL LIVER, SIGNAL =   1; EXPRESSED IN HELA, SIGNAL = 1.4; EXPRESSED IN HEART, SIGNAL = 0.72; SWISSPROT HIT: P43322, EVALUE 4.90e+00
YLEFKDIENRSKSLCVCNGRIVAKTCHNCRFYIISRAIHNLMQ

SEQ ID NO: 30339 - protein, 82 aa, Homo sapiens
  MAP TO AC011430.5; EXPRESSED IN PLACENTA, SIGNAL = 5.3; EXPRESSED IN FETAL LIVER, SIGNAL = 4.1; EXPRESSED IN LUNG, SIGNAL = 4.5; EXPRESSED IN HELA, SIGNAL = 4.8; EXPRESSED IN HEART, SIGNAL = 3.5; EXPRESSED IN BONE MARROW, SIGNAL = 4.8; SWISSPROT HIT: Q60716, EVALUE 1.00e-37
KYQAMLSVDDCFGMGRSAYNEGDYYHTVLWMEQVLKQLDAGEEATTTKSQVLDYLSYAVFQLGDLHRALELTRRLLSLGKEI

SEQ ID NO: 30340 - protein, 60 aa, Homo sapiens
  MAP TO CHR5.1; EXPRESSED IN HELA, SIGNAL = 0.69; EXPRESSED IN HEART, SIGNAL = 0.51; SWISSPROT HIT: O95704, EVALUE 4.00e-31
VPVDDLWGDHSLEVEAGLPPGWRKIHDAAGTYYWHVPSGSTQWQRPTWELGDAEDPGTVG

SEQ ID NO: 30341 - protein, 54 aa, Homo sapiens
  MAP TO CHR16.1; EXPRESSED IN HELA, SIGNAL = 1.7; EXPRESSED IN LUNG, SIGNAL = 0.71; SWISSPROT HIT: P53796, EVALUE 1.00e-12
LSSLAPQIVYFTATFPYVVLVVLLVLGVLLPGALDSIIYYLKPDWSKLGSPQVR

SEQ ID NO: 30342 - protein, 80 aa, Homo sapiens
  MAP TO AC019146.4; EXPRESSED IN FETAL LIVER, SIGNAL = 0.94; EXPRESSED IN HELA, SIGNAL = 0.88; EXPRESSED IN BONE MARROW, SIGNAL = 0.7; EXPRESSED IN HEART, SIGNAL = 0.97; SWISSPROT HIT: Q9P2Q2, EVALUE 1.00e-01
SLQEGSYLLSHAAEDSSLLIYKASDGKVTRTAYNLYKTHCGLPGVPSSLSVPWVPLDPSLLLPYHIHHGRIPCTFPPKSL

SEQ ID NO: 30343 - protein, 60 aa, Homo sapiens
  MAP TO CHR5.1; EXPRESSED IN PLACENTA, SIGNAL =  38; EXPRESSED IN LUNG, SIGNAL = 8.7; EXPRESSED IN HELA, SIGNAL =  75; EXPRESSED IN HEART, SIGNAL =  23; SWISSPROT HIT: Q07954, EVALUE 8.00e+00
MPVSFLFSSGMTLPTALAVPVEAGMMFWRAPRPLCQFPGGAIHNLLGGSDSMDCGHGSFH

SEQ ID NO: 30344 - protein, 48 aa, Homo sapiens
  MAP TO CHR17.1; EXPRESSED IN BONE MARROW, SIGNAL = 1.4; EXPRESSED IN FETAL LIVER, SIGNAL = 1.9; EXPRESSED IN PLACENTA, SIGNAL = 1.7; EXPRESSED IN LUNG, SIGNAL = 1.1; EXPRESSED IN HELA, SIGNAL = 2.6; EXPRESSED IN HEART, SIGNAL = 1.8; EXPRESSED IN ADULT LIVER, SIGNAL = 2.9; SWISSPROT HIT: P34666, EVALUE 6.00e-04
APPFVARETLRAWQEKNHPWLELSDVHRETTENIRVTVIPFYMGMRVC

SEQ ID NO: 30345 - protein, 50 aa, Homo sapiens
  MAP TO CHR12.1; EXPRESSED IN HELA, SIGNAL = 0.85; EXPRESSED IN ADULT LIVER, SIGNAL = 1.4; EXPRESSED IN BONE MARROW, SIGNAL = 1.1; EXPRESSED IN LUNG, SIGNAL = 0.59; SWISSPROT HIT: P43690, EVALUE 8.20e+00
NTGILASFLLHKANFQIISRSTADGLVFSTPEGERMEPVCLCLSLNLERT

SEQ ID NO: 30346 - protein, 57 aa, Homo sapiens
  MAP TO CHR17.1; EXPRESSED IN FETAL LIVER, SIGNAL = 1.3; EXPRESSED IN LUNG, SIGNAL = 2.1; EXPRESSED IN HELA, SIGNAL = 1.1; EXPRESSED IN HEART, SIGNAL = 1.5
LPTLQTVRYGSKAVTRHRRVMHFQRQKLMAVTEYIPPKPAIHPSCLPSPPSPPQEVR

SEQ ID NO: 30347 - protein, 67 aa, Homo sapiens
  MAP TO CHR3.1; EXPRESSED IN HELA, SIGNAL =  23; EXPRESSED IN HEART, SIGNAL =  12; EXPRESSED IN ADULT LIVER, SIGNAL = 2.6; EXPRESSED IN PLACENTA, SIGNAL =  17; EXPRESSED IN FETAL LIVER, SIGNAL = 7.2; EXPRESSED IN LUNG, SIGNAL = 4.9; SWISSPROT HIT: P12866, EVALUE 1.20e+00
HLRLLGMVKDEEGLTGSSPSLTAWSILSLTGVAICQGSLDILLLHSLQVLLLPAPGLQGRGLQGSAI

SEQ ID NO: 30348 - protein, 71 aa, Homo sapiens
  MAP TO CHR7.1; EXPRESSED IN FETAL LIVER, SIGNAL = 0.82; EXPRESSED IN HELA, SIGNAL = 1.1; EXPRESSED IN LUNG, SIGNAL = 0.73; EXPRESSED IN HEART, SIGNAL = 6.2; EXPRESSED IN ADULT LIVER, SIGNAL =   1; SWISSPROT HIT: P21333, EVALUE 5.00e-22
STGISFTPKEVGEHVVSVRKSGKHVTNSPFKILVGPSEIGDASKVRVWGKGLSEGHTFQVAEFIVDTRNAG

SEQ ID NO: 30349 - protein, 46 aa, Homo sapiens
  MAP TO CHR13.1; EXPRESSED IN ADULT LIVER, SIGNAL = 1.4; EXPRESSED IN BONE MARROW, SIGNAL = 1.3; EXPRESSED IN HEART, SIGNAL = 0.89; EXPRESSED IN FETAL LIVER, SIGNAL = 1.4; EXPRESSED IN PLACENTA, SIGNAL = 1.2; EXPRESSED IN HELA, SIGNAL =   1; EXPRESSED IN LUNG, SIGNAL = 0.69; SWISSPROT HIT: P23282, EVALUE 6.30e+00
TITFSVIGKRSKTAQTGLGTMLRSSGSIPYTSTNCQLGCRPNCLRN

SEQ ID NO: 30350 - protein, 81 aa, Homo sapiens
  MAP TO CHR3.1; EXPRESSED IN PLACENTA, SIGNAL = 1.5; EXPRESSED IN HELA, SIGNAL = 1.2; EXPRESSED IN FETAL LIVER, SIGNAL = 2.1; EXPRESSED IN LUNG, SIGNAL = 1.9; EXPRESSED IN ADULT LIVER, SIGNAL =   3; EXPRESSED IN BONE MARROW, SIGNAL = 2.2; EXPRESSED IN HEART, SIGNAL = 2.3; SWISSPROT HIT: O75899, EVALUE 1.00e+01
QGLLLLYGAYLAGLTGHVSSPPVNQSLTIMVGVNLLVLAAGLLFVVTRYLHSWPNLVFGLTSGGIFVCTTTINCFIFIPQV

SEQ ID NO: 30351 - protein, 70 aa, Homo sapiens
  MAP TO CHR7.1; EXPRESSED IN BONE MARROW, SIGNAL = 9.4; EXPRESSED IN ADULT LIVER, SIGNAL =  12; EXPRESSED IN HEART, SIGNAL = 6.3; EXPRESSED IN FETAL LIVER, SIGNAL =  11; EXPRESSED IN PLACENTA, SIGNAL = 9.1; EXPRESSED IN HELA, SIGNAL =   8; EXPRESSED IN LUNG, SIGNAL = 5.8; SWISSPROT HIT: P07942, EVALUE 2.00e-35
DLLKITNLRIKFVKLHTLGDNLLDSRMEIREKYYYAVYDMVVRGNCFCYGHASECAPVDGFNEEVEGMVS

SEQ ID NO: 30352 - protein, 62 aa, Homo sapiens
  MAP TO CHR20.1; EXPRESSED IN FETAL LIVER, SIGNAL = 1.3; EXPRESSED IN HELA, SIGNAL =   2; EXPRESSED IN LUNG, SIGNAL = 1.1; EXPRESSED IN HEART, SIGNAL = 1.3; SWISSPROT HIT: Q9Y493, EVALUE 3.50e+00
ADTHFPLAACLAVILSSSFLPVLRSCLPSMEPVCTAFSGSQKVICEFSVATASSAPSGRKVT

SEQ ID NO: 30353 - protein, 70 aa, Homo sapiens
  MAP TO CHR2.1; EXPRESSED IN HELA, SIGNAL = 1.1e+02; EXPRESSED IN ADULT LIVER, SIGNAL =  17; EXPRESSED IN PLACENTA, SIGNAL =  56; EXPRESSED IN FETAL LIVER, SIGNAL =  27; EXPRESSED IN LUNG, SIGNAL =  35; SWISSPROT HIT: P53473, EVALUE 8.00e-29
PRAVFPSIVGRPRQQGMMGGMHQKESYVGKEAQSKRGILTLKYPMEHGIITNWDDMEKIWHHTFYNELRV

SEQ ID NO: 30354 - protein, 66 aa, Homo sapiens
  MAP TO CHR3.1; EXPRESSED IN HELA, SIGNAL = 3.7; EXPRESSED IN HEART, SIGNAL = 3.4; EXPRESSED IN PLACENTA, SIGNAL =   3; EXPRESSED IN FETAL LIVER, SIGNAL = 2.9; EXPRESSED IN LUNG, SIGNAL = 3.5; SWISSPROT HIT: Q12894, EVALUE 1.00e-13
LLHGLTGKHPTGKGEEQALAAAVLGLLCVQLGPGPKGEELFHSLQPLLVSVLSDSTASPAARLHVS

SEQ ID NO: 30355 - protein, 46 aa, Homo sapiens
  MAP TO CHR7.1; EXPRESSED IN FETAL LIVER, SIGNAL = 3.9; EXPRESSED IN PLACENTA, SIGNAL = 2.7; EXPRESSED IN HELA, SIGNAL = 2.9; EXPRESSED IN LUNG, SIGNAL = 2.7; EXPRESSED IN HEART, SIGNAL = 3.3; EXPRESSED IN ADULT LIVER, SIGNAL = 4.9; EXPRESSED IN BONE MARROW, SIGNAL = 3.6; SWISSPROT HIT: P09225, EVALUE 6.30e+00
RGNAVLSVVKHSVGYQGRLGNLFWRSQKMRKILKVGVIKTQGWQRP

SEQ ID NO: 30356 - protein, 123 aa, Homo sapiens
  MAP TO CHR14.1; EXPRESSED IN HELA, SIGNAL =   7; EXPRESSED IN BONE MARROW, SIGNAL =  16; EXPRESSED IN HEART, SIGNAL = 4.1; EXPRESSED IN ADULT LIVER, SIGNAL = 5.2; EXPRESSED IN PLACENTA, SIGNAL = 6.4; EXPRESSED IN FETAL LIVER, SIGNAL = 5.5; SWISSPROT HIT: P15502, EVALUE 5.20e-01
AGSVAGASCVGHDQGHVVQGGFTGGLVHGPLGDPVGQGLMGHHAGVGLPRVPFLFGHGQDAVGEVPAWGLGLRHWGAGHILLRGQGLPPLHPLHEDVRGREARHQARDGGRLPQVQLLPGWWQ

SEQ ID NO: 30357 - protein, 141 aa, Homo sapiens
  MAP TO CHR12.1; EXPRESSED IN ADULT LIVER, SIGNAL = 0.76; EXPRESSED IN PLACENTA, SIGNAL = 1.7; EXPRESSED IN LUNG, SIGNAL = 1.1; EXPRESSED IN HELA, SIGNAL = 1.9; EXPRESSED IN HEART, SIGNAL = 1.1; EXPRESSED IN BONE MARROW, SIGNAL =   1
VGEPSLKPPVPQPGLPPPHGINSHFGPGPTLGKPQSTNYTVATGNFHPSGSPLGPSSGSTGESYGLSPLRPPSVLPPPAPDGSLPYLSHGASQRSGITSPVEKREDPGTGMGSSLATAELPGTQDPGMSGLSQTELEKQRQ

SEQ ID NO: 30358 - protein, 45 aa, Homo sapiens
  MAP TO CHR22.1; EXPRESSED IN HELA, SIGNAL = 7.1; EXPRESSED IN FETAL LIVER, SIGNAL = 5.4; EXPRESSED IN LUNG, SIGNAL = 3.4; EXPRESSED IN HEART, SIGNAL = 4.4; EXPRESSED IN ADULT LIVER, SIGNAL = 4.8; EXPRESSED IN BONE MARROW, SIGNAL = 6.2; EXPRESSED IN PLACENTA, SIGNAL = 6.4; SWISSPROT HIT: O69557, EVALUE 4.90e+00
PPEELAPLGQRLQPGHTLAAVAIQGGNRSPRLQAPDVYQATLRPV

SEQ ID NO: 30359 - protein, 89 aa, Homo sapiens
  MAP TO CHR19.1; EXPRESSED IN HELA, SIGNAL = 1.1; EXPRESSED IN LUNG, SIGNAL = 1.5; EXPRESSED IN HEART, SIGNAL = 1.5; SWISSPROT HIT: P55459, EVALUE 4.10e-01
VYTAGTQCLHILHWQNDSRRGSGSPEDTPRSSGASSIFDLRNLAADSLLPSLLERAAPEDVDRRNETLRRQHRPPALLTLYPAPDEVGA

SEQ ID NO: 30360 - protein, 46 aa, Homo sapiens
  MAP TO CHR19.1; EXPRESSED IN PLACENTA, SIGNAL = 1.2; EXPRESSED IN FETAL LIVER, SIGNAL = 1.5; EXPRESSED IN LUNG, SIGNAL = 1.4; EXPRESSED IN HELA, SIGNAL = 1.1; EXPRESSED IN HEART, SIGNAL = 1.5; EXPRESSED IN BONE MARROW, SIGNAL = 1.6; SWISSPROT HIT: P17024, EVALUE 5.00e-18
FQDSVVFEDVDVNFTQEEWALLDPSQKNLYRDVMQETFRNLASVGK

SEQ ID NO: 30361 - protein, 94 aa, Homo sapiens
  MAP TO CHR17.1; EXPRESSED IN LUNG, SIGNAL = 1.1; EXPRESSED IN HELA, SIGNAL = 0.75; EXPRESSED IN HEART, SIGNAL = 1.1; EXPRESSED IN ADULT LIVER, SIGNAL = 1.3; EXPRESSED IN BONE MARROW, SIGNAL = 0.84
FPSSVPNRHPSPLRTCLSQSHQCPSTRWPPWGGLAASSSTTASPRPSGTALSSLPPSTLRSPSPTMSVSRVTMTPPSLRDTPLSATSPWKCSSS

SEQ ID NO: 30362 - protein, 36 aa, Homo sapiens
  MAP TO CHR19.1; EXPRESSED IN ADULT LIVER, SIGNAL = 3.2; EXPRESSED IN PLACENTA, SIGNAL = 1.9; EXPRESSED IN FETAL LIVER, SIGNAL = 1.8; EXPRESSED IN LUNG, SIGNAL = 1.4; EXPRESSED IN HELA, SIGNAL = 2.2; EXPRESSED IN HEART, SIGNAL = 1.9; EXPRESSED IN BONE MARROW, SIGNAL = 1.5
RQQGAGQGGQQDHLPNHGLRHHLQRSCTTRVLGGWV

SEQ ID NO: 30363 - protein, 37 aa, Homo sapiens
  MAP TO CHR7.1; EXPRESSED IN HELA, SIGNAL = 0.86; EXPRESSED IN ADULT LIVER, SIGNAL = 0.62; EXPRESSED IN HEART, SIGNAL = 0.63; EXPRESSED IN BONE MARROW, SIGNAL = 0.7; EXPRESSED IN FETAL LIVER, SIGNAL = 0.48; SWISSPROT HIT: P17927, EVALUE 2.90e+00
CNRYANLGLTSPWAQPAADERNLWPWAQCCHRIHPGL

SEQ ID NO: 30364 - protein, 50 aa, Homo sapiens
  MAP TO CHR1.1; EXPRESSED IN BONE MARROW, SIGNAL = 3.9; EXPRESSED IN PLACENTA, SIGNAL = 3.2; EXPRESSED IN FETAL LIVER, SIGNAL = 3.6; EXPRESSED IN LUNG, SIGNAL = 4.4; EXPRESSED IN HELA, SIGNAL = 3.8; EXPRESSED IN ADULT LIVER, SIGNAL = 5.6; SWISSPROT HIT: P11276, EVALUE 8.20e+00
YPPVRWTDKGRLFNWSTSIKGLTNITISFRLLSFTWFGYRNSTRFFYFTK

SEQ ID NO: 30365 - protein, 46 aa, Homo sapiens
  MAP TO CHR17.1; EXPRESSED IN ADULT LIVER, SIGNAL = 0.86; EXPRESSED IN BONE MARROW, SIGNAL = 0.8; EXPRESSED IN FETAL LIVER, SIGNAL = 0.94; EXPRESSED IN HELA, SIGNAL = 0.37; EXPRESSED IN LUNG, SIGNAL = 0.65; SWISSPROT HIT: Q91055, EVALUE 2.20e+00
SSTPKFLLTPLPGICPDACQGGSFCTACSNGDVEHPPPPHICPELA

SEQ ID NO: 30366 - protein, 79 aa, Homo sapiens
  MAP TO CHR7.1; EXPRESSED IN BONE MARROW, SIGNAL = 1.2; EXPRESSED IN FETAL LIVER, SIGNAL = 0.95; EXPRESSED IN HELA, SIGNAL = 1.5
KLLMEQMQALQVMYDAGQAKQELLQQEQGRLLEERKRLQADLQLCLEEMQLLQVQSPSIKMSLESYGKSYGSMVPSNEN

SEQ ID NO: 30367 - protein, 60 aa, Homo sapiens
  MAP TO CHR20.1; EXPRESSED IN FETAL LIVER, SIGNAL = 1.2; EXPRESSED IN HELA, SIGNAL = 0.93; EXPRESSED IN BONE MARROW, SIGNAL = 0.81; EXPRESSED IN HEART, SIGNAL = 1.2; SWISSPROT HIT: Q9Y6D5, EVALUE 2.00e-28
RSPTIRDMAIRCIAQMVNSQAANIRSGWKNIFAVFHQAASDHDGNIVELAFQTTCHIVSK

SEQ ID NO: 30368 - protein, 113 aa, Homo sapiens
  MAP TO CHR5.1; EXPRESSED IN PLACENTA, SIGNAL =  31; EXPRESSED IN HELA, SIGNAL =  15; EXPRESSED IN HEART, SIGNAL =  16; SWISSPROT HIT: P25111, EVALUE 4.00e-48
GKSAKKDKDPVNKSGGKAKKKKWSKGKVRDKLNNLVLFDKATYDKLCKEVPNYKLITPAVVSERLKIRGSLARAALQELLSKGLIKLVSKHRAQVIYTRNTKGGDAPAAGEDA

SEQ ID NO: 30369 - protein, 40 aa, Homo sapiens
  MAP TO CHR22.1; EXPRESSED IN HEART, SIGNAL =   5; EXPRESSED IN ADULT LIVER, SIGNAL = 4.2; EXPRESSED IN PLACENTA, SIGNAL = 8.1; EXPRESSED IN FETAL LIVER, SIGNAL = 4.9; EXPRESSED IN LUNG, SIGNAL = 5.7; EXPRESSED IN HELA, SIGNAL = 8.3
FILTSQSGSSFIASRNKAWLKAYRTNQQKTLAVADLGSGS

SEQ ID NO: 30370 - protein, 60 aa, Homo sapiens
  MAP TO CHR22.1; EXPRESSED IN ADULT LIVER, SIGNAL = 6.4; EXPRESSED IN PLACENTA, SIGNAL = 1.5; EXPRESSED IN FETAL LIVER, SIGNAL = 3.2; EXPRESSED IN LUNG, SIGNAL = 2.1; EXPRESSED IN HELA, SIGNAL = 1.5; EXPRESSED IN BONE MARROW, SIGNAL = 1.7; EXPRESSED IN HEART, SIGNAL = 1.8; SWISSPROT HIT: Q04545, EVALUE 6.10e+00
PVVHGVGGLVRGVDGVLIADLCRTGSLLGQVCAPHQLGPKTPALTASQLHVQGHIVIGIL

SEQ ID NO: 30371 - protein, 86 aa, Homo sapiens
  MAP TO CHR19.1; EXPRESSED IN HELA, SIGNAL = 4.5; EXPRESSED IN BONE MARROW, SIGNAL = 4.3; EXPRESSED IN HEART, SIGNAL = 6.3; EXPRESSED IN ADULT LIVER, SIGNAL = 4.6; EXPRESSED IN PLACENTA, SIGNAL = 3.4; EXPRESSED IN FETAL LIVER, SIGNAL = 3.7; EXPRESSED IN LUNG, SIGNAL =  12; SWISSPROT HIT: O84806, EVALUE 2.50e-01
EPRVREVWPRGLITYVTVTEPSAVLVVRGVRDRLVITYPHEHHALKSSRFYLLLLGVGDPSGPGANGSADSQGLLFFRQDQAHIDL

SEQ ID NO: 30372 - protein, 57 aa, Homo sapiens
  MAP TO CHR5.1; EXPRESSED IN PLACENTA, SIGNAL = 3.9; EXPRESSED IN FETAL LIVER, SIGNAL = 2.9; EXPRESSED IN LUNG, SIGNAL = 1.8; EXPRESSED IN HELA, SIGNAL =   5; EXPRESSED IN HEART, SIGNAL = 1.3; EXPRESSED IN ADULT LIVER, SIGNAL = 2.5; EXPRESSED IN BONE MARROW, SIGNAL = 2.6; SWISSPROT HIT: Q63942, EVALUE 3.60e+00
PRSHSYLVEGYHIVGDLAHAHDDKYTVNISQLMEKICRKLNQSVQPWLRRERSSCQT

SEQ ID NO: 30373 - protein, 29 aa, Homo sapiens
  MAP TO CHR5.1; EXPRESSED IN FETAL LIVER, SIGNAL = 2.7; EXPRESSED IN LUNG, SIGNAL = 3.4; EXPRESSED IN HELA, SIGNAL = 2.9; EXPRESSED IN HEART, SIGNAL = 2.4; EXPRESSED IN ADULT LIVER, SIGNAL = 2.3; EXPRESSED IN BONE MARROW, SIGNAL =   3
GHLTGDVQQAGRNVGVESGRENSNGIFFL

SEQ ID NO: 30374 - protein, 84 aa, Homo sapiens
  MAP TO CHR19.1; EXPRESSED IN HELA, SIGNAL = 3.2; EXPRESSED IN FETAL LIVER, SIGNAL = 4.3; EXPRESSED IN LUNG, SIGNAL =   6; EXPRESSED IN BONE MARROW, SIGNAL = 3.2; EXPRESSED IN HEART, SIGNAL = 5.6; EXPRESSED IN ADULT LIVER, SIGNAL = 3.5; EXPRESSED IN PLACENTA, SIGNAL =   3; SWISSPROT HIT: Q14112, EVALUE 5.00e-09
RCLQGDFSGPLGGGNCSLWVGEGLGLPVALPARWAYARCPDVDECRLGLARCHPRATCLNTPLSYECHCQRGYQGDGISHCNRT

SEQ ID NO: 30375 - protein, 127 aa, Homo sapiens
  MAP TO CHR19.1; EXPRESSED IN LUNG, SIGNAL =  11; EXPRESSED IN HELA, SIGNAL = 0.65; EXPRESSED IN HEART, SIGNAL = 5.3; EXPRESSED IN ADULT LIVER, SIGNAL = 1.2; EXPRESSED IN BONE MARROW, SIGNAL = 3.9; EXPRESSED IN FETAL LIVER, SIGNAL = 3.3; SWISSPROT HIT: Q05481, EVALUE 2.00e-63
TGEKPYKCEECGKAFNHSSKLTIHKIIHTGEKPYKCEECGKAFNQSSNLTKHKIIHTGEKLYKCEECGKAFNRSSNLTTHKRIHTGEKPYKCEECGKAFNRSSNLTKHNIIHTGEKSYKCEECGKAF

SEQ ID NO: 30376 - protein, 136 aa, Homo sapiens
  MAP TO CHR5.1; EXPRESSED IN ADULT LIVER, SIGNAL = 0.82; EXPRESSED IN BONE MARROW, SIGNAL = 0.86; EXPRESSED IN FETAL LIVER, SIGNAL = 0.56; EXPRESSED IN HELA, SIGNAL = 0.74; EXPRESSED IN HEART, SIGNAL = 0.76; SWISSPROT HIT: Q9Y5I4, EVALUE 2.00e-36
TILESAEDPDISMNSLSKYQLSPNEYFSLVEKDNPDGGKYPELVLQKTLDRETQSAHHLVLTALDGGDPPRSGTAQIRILVIDANDNPPVFSQDVYRVSLREDVPPGTSILRVKATDQDEGINSEITYSFFGVADK

SEQ ID NO: 30377 - protein, 72 aa, Homo sapiens
  MAP TO CHR12.1; EXPRESSED IN PLACENTA, SIGNAL = 1.5; EXPRESSED IN FETAL LIVER, SIGNAL = 1.2; EXPRESSED IN LUNG, SIGNAL = 0.97; EXPRESSED IN HELA, SIGNAL = 1.7; EXPRESSED IN ADULT LIVER, SIGNAL = 1.4
CPIWVLGGLSPLSFPGPPASSPLPQRCSLLTSFLPHSWNDSGSQNPWGVWRVMGVWGGSQAQEQVNVTALDK

SEQ ID NO: 30378 - protein, 69 aa, Homo sapiens
  MAP TO CHR22.1; EXPRESSED IN HELA, SIGNAL = 1.1; EXPRESSED IN HEART, SIGNAL = 1.1; EXPRESSED IN ADULT LIVER, SIGNAL = 2.6; EXPRESSED IN FETAL LIVER, SIGNAL = 1.1; EXPRESSED IN LUNG, SIGNAL =   1; SWISSPROT HIT: P07923, EVALUE 3.10e-01
MTGTSPRHSLTASPSRAPWRAPCSLLIAVHSYCHWTPVPLTPSAPRSLAQSLWWLPVPDLQAILSIKTG

SEQ ID NO: 30379 - protein, 58 aa, Homo sapiens
  MAP TO CHR7.1; EXPRESSED IN FETAL LIVER, SIGNAL = 0.9; EXPRESSED IN LUNG, SIGNAL = 0.86; EXPRESSED IN HELA, SIGNAL = 1.2; EXPRESSED IN HEART, SIGNAL = 1.2; EXPRESSED IN ADULT LIVER, SIGNAL = 1.8; SWISSPROT HIT: Q9JLN9, EVALUE 4.70e+00
IHSIHLARKPNLGLKSCDGNQELLNFLRSDLIEVATRLQKGGLGYVEETSEFEARVGI

SEQ ID NO: 30380 - protein, 65 aa, Homo sapiens
  MAP TO CHR14.1; EXPRESSED IN ADULT LIVER, SIGNAL = 0.67; EXPRESSED IN FETAL LIVER, SIGNAL = 3.6; EXPRESSED IN HELA, SIGNAL = 1.1; EXPRESSED IN LUNG, SIGNAL = 7.2; EXPRESSED IN HEART, SIGNAL = 2.5; SWISSPROT HIT: P24049, EVALUE 7.00e-14
KAPKMCHQTSRAHGGINPYMSSPCRIEMILTAKEQIVPKPEDCPQEKDIPEETKTYGTGINSALK

SEQ ID NO: 30381 - protein, 72 aa, Homo sapiens
  MAP TO CHR19.1; EXPRESSED IN BONE MARROW, SIGNAL = 0.93; EXPRESSED IN FETAL LIVER, SIGNAL = 1.2; EXPRESSED IN HELA, SIGNAL = 1.1; EXPRESSED IN LUNG, SIGNAL = 0.71; SWISSPROT HIT: P25341, EVALUE 2.00e-12
CSAVYLVRHRDTRQRFAMKKINKQNLILRNQIQQAFVERDILTFAENPFVVGMFCSFETRRHLCMVMEYVEG

SEQ ID NO: 30382 - protein, 63 aa, Homo sapiens
  MAP TO CHR1.1; EXPRESSED IN PLACENTA, SIGNAL = 1.6; EXPRESSED IN FETAL LIVER, SIGNAL = 0.57; EXPRESSED IN HELA, SIGNAL = 0.96; EXPRESSED IN LUNG, SIGNAL = 0.86; SWISSPROT HIT: Q05513, EVALUE 2.00e-29
DLKPVIDGMDGIKISQGLGLQDFDLIRVIGRGSYAKVLLVRLKKNDQIYAMKVVKKELVHDDE

SEQ ID NO: 30383 - protein, 69 aa, Homo sapiens
  MAP TO CHR8.1; EXPRESSED IN LUNG, SIGNAL = 0.79; EXPRESSED IN HELA, SIGNAL = 0.85; EXPRESSED IN HEART, SIGNAL = 0.81; EXPRESSED IN BONE MARROW, SIGNAL = 0.79; EXPRESSED IN ADULT LIVER, SIGNAL = 0.89; SWISSPROT HIT: Q09457, EVALUE 3.10e+00
LFFSAQVHVGKPDFGFHRKEGCFGSLPQGRPCGSCICGVHCPSLGGNVYFPLASFSQRPAIWASGLVQY

SEQ ID NO: 30384 - protein, 116 aa, Homo sapiens
  MAP TO CHR5.1; EXPRESSED IN BONE MARROW, SIGNAL =   1; EXPRESSED IN PLACENTA, SIGNAL = 3.4; EXPRESSED IN HELA, SIGNAL = 3.1; EXPRESSED IN FETAL LIVER, SIGNAL = 1.1; EXPRESSED IN LUNG, SIGNAL = 1.7; SWISSPROT HIT: Q9Y5E7, EVALUE 2.00e-35
DQNDNAPEILYPALPTDGSTGVELAPRSAEPGYLVTKVVAVDRDSGQNAWLSYRLFKASEPGLFSVGLHTGEVRTARALLDRDALKQSLVVAVQDHGQPPLSATVTLTVAIADSIP

SEQ ID NO: 30385 - protein, 54 aa, Homo sapiens
  MAP TO CHR19.1; EXPRESSED IN HELA, SIGNAL = 1.7; EXPRESSED IN HEART, SIGNAL = 1.2; EXPRESSED IN BONE MARROW, SIGNAL = 1.1; EXPRESSED IN PLACENTA, SIGNAL = 2.4; EXPRESSED IN FETAL LIVER, SIGNAL = 1.1
VQVIPGGIGWLHLVGVPPVRPENEQPVKEWLDVGYHGPALREDLQQAAMHLGAG

SEQ ID NO: 30386 - protein, 61 aa, Homo sapiens
  MAP TO CHR7.1; EXPRESSED IN PLACENTA, SIGNAL = 1.7; EXPRESSED IN FETAL LIVER, SIGNAL = 1.4; EXPRESSED IN LUNG, SIGNAL = 1.3; EXPRESSED IN HELA, SIGNAL = 1.9; EXPRESSED IN ADULT LIVER, SIGNAL = 1.8; SWISSPROT HIT: Q9Y2N3, EVALUE 2.00e-11
NLVFHYRPEQIISSTLSSPSSNAPDPCAKETVLSALKEKKKKRTVEEEDQIFLDGQENKRR

SEQ ID NO: 30387 - protein, 36 aa, Homo sapiens
  MAP TO CHR7.1; EXPRESSED IN HEART, SIGNAL = 1.4; EXPRESSED IN ADULT LIVER, SIGNAL = 2.2; EXPRESSED IN HELA, SIGNAL = 1.3; EXPRESSED IN FETAL LIVER, SIGNAL = 0.97; EXPRESSED IN LUNG, SIGNAL = 1.4
AILVPVVILVLPLVRNGIFQQKPLNLVLNACILIAG

SEQ ID NO: 30388 - protein, 120 aa, Homo sapiens
  MAP TO CHR19.1; EXPRESSED IN HELA, SIGNAL = 0.47; EXPRESSED IN FETAL LIVER, SIGNAL = 0.95; EXPRESSED IN HEART, SIGNAL = 1.1
EGLTTLFTLIRFLSSVSPFMYSNGTGTTKRLTTLFTFIGFLPSVSPFMHSKGTGTTEGFTTLFTFIGFLSSVSPFMHPKGTRKTKGFTTLFTFIGFLSSVNSFMHSKGTGTTEGFTTLFT

SEQ ID NO: 30389 - protein, 54 aa, Homo sapiens
  MAP TO CHR19.1; EXPRESSED IN HELA, SIGNAL = 0.81; EXPRESSED IN FETAL LIVER, SIGNAL = 0.75; EXPRESSED IN LUNG, SIGNAL = 1.4; EXPRESSED IN HEART, SIGNAL = 1.1; SWISSPROT HIT: P30205, EVALUE 8.10e+00
GLELHLAGREGVILHGHHAVAAQHRDAQRLVPGVRLCVPRMHGHRVESGDQGHL

SEQ ID NO: 30390 - protein, 57 aa, Homo sapiens
  MAP TO CHR22.1; EXPRESSED IN HELA, SIGNAL = 0.82; EXPRESSED IN HEART, SIGNAL = 1.2; EXPRESSED IN BONE MARROW, SIGNAL = 0.82; SWISSPROT HIT: P54198, EVALUE 5.00e-27
FTEILATLRGHSGLVKGLTWDPVGKYIASQADDRSLKVWRTLDWQLETSITKPFDEV

SEQ ID NO: 30391 - protein, 116 aa, Homo sapiens
  MAP TO AL355377.5; EXPRESSED IN ADULT LIVER, SIGNAL = 3.2; EXPRESSED IN LUNG, SIGNAL = 2.8; EXPRESSED IN HELA, SIGNAL = 3.7; EXPRESSED IN BONE MARROW, SIGNAL = 2.3; EXPRESSED IN HEART, SIGNAL = 2.4; SWISSPROT HIT: P72154, EVALUE 8.50e+00
EADQGTVEHVGAISAEVCMGLVFEHKDDVSRDVVRCGVAFFGEGDLGAFLPATLDDYVQDLVLGAHSSPIRVEATPCDLHALGGAMVDLLQGHPQLVHHWGVLHLAPRVQWFWGSP

SEQ ID NO: 30392 - protein, 51 aa, Homo sapiens
  MAP TO CHR7.1; EXPRESSED IN HELA, SIGNAL = 0.98; EXPRESSED IN HEART, SIGNAL = 1.7; EXPRESSED IN ADULT LIVER, SIGNAL = 1.1; EXPRESSED IN FETAL LIVER, SIGNAL = 1.4; SWISSPROT HIT: Q64430, EVALUE 5.70e-01
SLTGVVTSYVMMLRHHVMTLCHHNTSSHIDTMSWHNIIKLNSSALPTAWPQ

SEQ ID NO: 30393 - protein, 71 aa, Homo sapiens
  MAP TO CHR7.1; EXPRESSED IN PLACENTA, SIGNAL = 2.7; EXPRESSED IN FETAL LIVER, SIGNAL = 2.9; EXPRESSED IN LUNG, SIGNAL = 1.5; EXPRESSED IN HELA, SIGNAL = 3.4; EXPRESSED IN HEART, SIGNAL = 1.8; SWISSPROT HIT: P10071, EVALUE 5.00e-27
RTSALSSSPTYPDLPFIRISPHRNPTAASESPFSPPHPYINPYMDYIRSLHSSPSLSMISATRGLSPTDGK

SEQ ID NO: 30394 - protein, 42 aa, Homo sapiens
  MAP TO CHR19.1; EXPRESSED IN ADULT LIVER, SIGNAL = 0.88; EXPRESSED IN FETAL LIVER, SIGNAL = 0.92; EXPRESSED IN HELA, SIGNAL = 0.92
TLLTFIRLFSSVSSFVYSKGSRITKGFTTLFTFIWFLSSVNS

SEQ ID NO: 30395 - protein, 40 aa, Homo sapiens
  MAP TO CHR8.1; EXPRESSED IN HEART, SIGNAL =   1; EXPRESSED IN HELA, SIGNAL = 0.73; EXPRESSED IN LUNG, SIGNAL = 0.69; SWISSPROT HIT: P14199, EVALUE 6.50e+00
CQTKQFAICSDCFIALKLCTQLLLRLPTHNESTEKINNVK

SEQ ID NO: 30396 - protein, 147 aa, Homo sapiens
  MAP TO CHR18.1; EXPRESSED IN FETAL LIVER, SIGNAL = 2.5; EXPRESSED IN HELA, SIGNAL = 2.9; EXPRESSED IN LUNG, SIGNAL = 1.1; EXPRESSED IN ADULT LIVER, SIGNAL = 2.3; EXPRESSED IN BONE MARROW, SIGNAL = 2.2; EXPRESSED IN PLACENTA, SIGNAL = 2.1; SWISSPROT HIT: Q01718, EVALUE 1.00e-66
MKHIINSYENINNTARNNSDCPRVVLPEEIFFTISIVGVLENLIVLLAVFKNKNLQAPMYFFICSLAISDMLGSLYKILENILIILRNMGYLKPRGSFETTADDIIDSLFVLSLLGSIFSLSVIAAERYNHHLPCSCGTTASLTMRR

SEQ ID NO: 30397 - protein, 85 aa, Homo sapiens
  MAP TO CHR7.1; EXPRESSED IN BONE MARROW, SIGNAL = 3.8; EXPRESSED IN PLACENTA, SIGNAL =  15; EXPRESSED IN HELA, SIGNAL = 1.2; EXPRESSED IN LUNG, SIGNAL = 2.5; SWISSPROT HIT: P08123, EVALUE 9.00e-35
QGPPGPPGPPGPPGVSGGGYDFGYDGDFYRADQPRSAPSLRPKDYEVDATLKSLNNQIETLLTPEGSRKNPARTCRDLRLSHPEW

SEQ ID NO: 30398 - protein, 82 aa, Homo sapiens
  MAP TO CHR7.1; EXPRESSED IN FETAL LIVER, SIGNAL = 0.81; EXPRESSED IN HELA, SIGNAL = 0.45; SWISSPROT HIT: P10071, EVALUE 6.00e-20
VIRFFFVYITGTRFSSPRLSARPSRKRTLSISPLSDHSFDLQTMIRTSPNSLVTILNNSRSSSSASGSYGHLSASAIRYVFS

SEQ ID NO: 30399 - protein, 109 aa, Homo sapiens
  MAP TO CHR2.1; EXPRESSED IN HELA, SIGNAL =  48; EXPRESSED IN HEART, SIGNAL =  33; EXPRESSED IN PLACENTA, SIGNAL =  99; EXPRESSED IN LUNG, SIGNAL =  34
LVKKTKAHVIIRLLGFFFLCFHFLLLSWSSSSGGGRTSCWCSTSCWSRSTSPYIADEAPNVDVGQGLCKQARPKRFNIYTGCFNEGIDLILRDCHLIVVQNEGRVDAGE

SEQ ID NO: 30400 - protein, 44 aa, Homo sapiens
  MAP TO CHR3.1; EXPRESSED IN PLACENTA, SIGNAL = 5.3; EXPRESSED IN LUNG, SIGNAL = 3.3; EXPRESSED IN HELA, SIGNAL = 2.5; EXPRESSED IN ADULT LIVER, SIGNAL = 3.2; SWISSPROT HIT: P89429, EVALUE 4.90e+00
YQDHPRGWLLRGGMPAVPGGCLQQHHPVHHGHCQSHGQPADRLC

SEQ ID NO: 30401 - protein, 67 aa, Homo sapiens
  MAP TO CHR6.1; EXPRESSED IN PLACENTA, SIGNAL =  24; EXPRESSED IN LUNG, SIGNAL =  13; EXPRESSED IN HELA, SIGNAL =  11; SWISSPROT HIT: P35979, EVALUE 1.00e-31
KHSGNITFDEIVNIAPRMRHRSLARDLTGTIKEILGTAQSVGCNVDGRHPHDIIDDINSGAVECPAS

SEQ ID NO: 30402 - protein, 61 aa, Homo sapiens
  MAP TO CHR5.1; EXPRESSED IN LUNG, SIGNAL = 1.5; EXPRESSED IN HELA, SIGNAL = 1.1; EXPRESSED IN HEART, SIGNAL = 1.1; EXPRESSED IN ADULT LIVER, SIGNAL = 1.8; SWISSPROT HIT: P04723, EVALUE 4.60e+00
FQLFFPEGLSGWSQSVMGNHPMHQQLSDPSTFSQHQPMERDDSGMVAPSNIFHQPMASGFV

SEQ ID NO: 30403 - protein, 38 aa, Homo sapiens
  MAP TO CHR10.1; EXPRESSED IN HELA, SIGNAL = 1.2e+02; EXPRESSED IN LUNG, SIGNAL =  29; EXPRESSED IN BONE MARROW, SIGNAL =  49; EXPRESSED IN PLACENTA, SIGNAL = 1.1e+02; SWISSPROT HIT: P17139, EVALUE 1.70e+00
VCLSGAPGSRGWLEVPGSDSHPGGEEERESQDPLPEEE

SEQ ID NO: 30404 - protein, 70 aa, Homo sapiens
  MAP TO CHR14.1; EXPRESSED IN HELA, SIGNAL = 0.45; EXPRESSED IN HEART, SIGNAL = 0.52; SWISSPROT HIT: P04437, EVALUE 9.00e-07
SFCTGMSRGEDVEQSLFLSVREGDSSVINCTYTDSSSTYLYWYKQEPGAGLQLLTYIFSNMDMKQDQRLT

SEQ ID NO: 30405 - protein, 60 aa, Homo sapiens
  MAP TO AL080313.13; EXPRESSED IN PLACENTA, SIGNAL = 0.66; EXPRESSED IN LUNG, SIGNAL = 0.66; EXPRESSED IN ADULT LIVER, SIGNAL = 0.74; EXPRESSED IN FETAL LIVER, SIGNAL = 0.63; EXPRESSED IN BONE MARROW, SIGNAL = 0.66; SWISSPROT HIT: Q50315, EVALUE 2.70e+00
NGIGCTSGPDPSPAEELPREEQAFLPSPLVSSYRTLKPTQDCVENCFPFEDANKNKIIST

SEQ ID NO: 30406 - protein, 46 aa, Homo sapiens
  MAP TO AL035695.17; EXPRESSED IN LUNG, SIGNAL = 1.3; EXPRESSED IN ADULT LIVER, SIGNAL = 1.1; EXPRESSED IN FETAL LIVER, SIGNAL = 1.1; EXPRESSED IN PLACENTA, SIGNAL = 1.2; EXPRESSED IN BONE MARROW, SIGNAL = 0.97
SNRRWGGGEEGGRGGKGDDSAIVPLTLLVYEAAQKLIRTNSSIRDH

SEQ ID NO: 30407 - protein, 55 aa, Homo sapiens
  MAP TO AL138499.1; EXPRESSED IN FETAL LIVER, SIGNAL = 1.3; EXPRESSED IN BONE MARROW, SIGNAL = 1.2; EXPRESSED IN PLACENTA, SIGNAL = 1.3; EXPRESSED IN LUNG, SIGNAL = 1.7; EXPRESSED IN ADULT LIVER, SIGNAL = 2.2
LQSKFVAKENEVQSLHSKLTDTLVSKQQLEQRLMQLMESEQKRVNKEESLQMQVQ

SEQ ID NO: 30408 - protein, 33 aa, Homo sapiens
  MAP TO AL138499.1; EXPRESSED IN FETAL LIVER, SIGNAL = 1.3; EXPRESSED IN BONE MARROW, SIGNAL = 1.2; EXPRESSED IN PLACENTA, SIGNAL = 1.3; EXPRESSED IN LUNG, SIGNAL = 1.7; EXPRESSED IN ADULT LIVER, SIGNAL = 2.2
IYRVNLWPKKMKYRVCIVSLQIPWYQNNSWSKD

SEQ ID NO: 30409 - protein, 48 aa, Homo sapiens
  MAP TO AL160191.1; EXPRESSED IN FETAL LIVER, SIGNAL = 0.43; EXPRESSED IN PLACENTA, SIGNAL = 0.53; EXPRESSED IN BONE MARROW, SIGNAL = 0.43
LPSWMMTMQASSLLNVILFMSVRVLVLWRSRFCGHQVPGVQSSSPLGQ

SEQ ID NO: 30410 - protein, 37 aa, Homo sapiens
  MAP TO AC025745.1; EXPRESSED IN ADULT LIVER, SIGNAL = 0.58; EXPRESSED IN FETAL LIVER, SIGNAL = 0.51; EXPRESSED IN PLACENTA, SIGNAL = 4.4; EXPRESSED IN LUNG, SIGNAL = 0.64
PSHSHSSSTWPLKTDMAQDTKPLLHHGIRAQGNSTSS

SEQ ID NO: 30411 - protein, 24 aa, Homo sapiens
  MAP TO AC022263.3; EXPRESSED IN BONE MARROW, SIGNAL =  12; EXPRESSED IN PLACENTA, SIGNAL = 6.5; EXPRESSED IN FETAL LIVER, SIGNAL =  13; EXPRESSED IN LUNG, SIGNAL =  17
KKASPRSAEAHLCRQAAGRWRYSF

SEQ ID NO: 30412 - protein, 34 aa, Homo sapiens
  MAP TO AL159176.2; EXPRESSED IN FETAL LIVER, SIGNAL = 1.6; EXPRESSED IN ADULT LIVER, SIGNAL = 2.4; EXPRESSED IN BONE MARROW, SIGNAL = 1.9; EXPRESSED IN HEART, SIGNAL = 2.3; EXPRESSED IN PLACENTA, SIGNAL = 2.3; EXPRESSED IN LUNG, SIGNAL = 2.4
MSPKMGKHYAESETYVSYDTGKRRDSEGGMKGVR

SEQ ID NO: 30413 - protein, 29 aa, Homo sapiens
  MAP TO AL159176.2; EXPRESSED IN FETAL LIVER, SIGNAL = 1.6; EXPRESSED IN ADULT LIVER, SIGNAL = 2.4; EXPRESSED IN BONE MARROW, SIGNAL = 1.9; EXPRESSED IN HEART, SIGNAL = 2.3; EXPRESSED IN PLACENTA, SIGNAL = 2.3; EXPRESSED IN LUNG, SIGNAL = 2.4
CLLKWGNTMQNLKLMCHMTQASAGTAKGE

SEQ ID NO: 30414 - protein, 111 aa, Homo sapiens
  MAP TO CHR22_124.0; EXPRESSED IN BONE MARROW, SIGNAL = 0.58; EXPRESSED IN FETAL LIVER, SIGNAL = 0.52; EXPRESSED IN PLACENTA, SIGNAL = 0.55; EXPRESSED IN LUNG, SIGNAL = 0.54; EXPRESSED IN ADULT LIVER, SIGNAL = 0.96; SWISSPROT HIT: P36340, EVALUE 1.90e+00
DNPMSDVYGANLFHQYLQKATHDGAPELGAGGTRQQQPSASQSCISILVCTGVYNPRNPQSTEPVLGGGEPPFHGHRDLCFSPGLMEASHVVNDVNEAVQLVFRKEGWALE

SEQ ID NO: 30415 - protein, 27 aa, Homo sapiens
  MAP TO CHR22_124.0; EXPRESSED IN BONE MARROW, SIGNAL = 0.58; EXPRESSED IN FETAL LIVER, SIGNAL = 0.52; EXPRESSED IN PLACENTA, SIGNAL = 0.55; EXPRESSED IN LUNG, SIGNAL = 0.54; EXPRESSED IN ADULT LIVER, SIGNAL = 0.96
ITLCLTYTAPTCSTSTCRRQRMMGRQN

SEQ ID NO: 30416 - protein, 62 aa, Homo sapiens
  MAP TO AL159176.2; EXPRESSED IN PLACENTA, SIGNAL = 0.82; EXPRESSED IN FETAL LIVER, SIGNAL = 0.61; EXPRESSED IN ADULT LIVER, SIGNAL = 0.63; EXPRESSED IN LUNG, SIGNAL = 0.72; EXPRESSED IN BONE MARROW, SIGNAL = 0.67; SWISSPROT HIT: P53867, EVALUE 4.00e-05
ETIGKYSDDHEMRNEVYHRKIISWFGDSPLALFGLHQLIEYGKKSGKKAGDWYGPAVVAHIL

SEQ ID NO: 30417 - protein, 56 aa, Homo sapiens
  MAP TO AL035367.1; EXPRESSED IN HEART, SIGNAL = 1.2; EXPRESSED IN LUNG, SIGNAL = 1.4; EXPRESSED IN PLACENTA, SIGNAL = 1.4; EXPRESSED IN ADULT LIVER, SIGNAL = 1.4; EXPRESSED IN FETAL LIVER, SIGNAL =   1; EXPRESSED IN BONE MARROW, SIGNAL = 1.1; SWISSPROT HIT: Q13472, EVALUE 4.00e-26
AAFTRFQTLRLQRIFPEVLAEQLISYGSCQFPTLGFVVERFKAIQAFVPEIFHRIK

SEQ ID NO: 30418 - protein, 57 aa, Homo sapiens
  MAP TO AL035367.1; EXPRESSED IN HEART, SIGNAL = 1.2; EXPRESSED IN LUNG, SIGNAL = 1.4; EXPRESSED IN PLACENTA, SIGNAL = 1.4; EXPRESSED IN ADULT LIVER, SIGNAL = 1.4; EXPRESSED IN FETAL LIVER, SIGNAL =   1; EXPRESSED IN BONE MARROW, SIGNAL = 1.1
ELPLLGSRPCGFRGFFLRCWQSSSSVTAAASSPHWALWWSGSKPFRLLYQKSSTELK

SEQ ID NO: 30419 - protein, 69 aa, Homo sapiens
  MAP TO AC005283.2; EXPRESSED IN FETAL LIVER, SIGNAL = 2.2; EXPRESSED IN BONE MARROW, SIGNAL = 1.9; EXPRESSED IN PLACENTA, SIGNAL =   3; EXPRESSED IN LUNG, SIGNAL = 2.2; EXPRESSED IN HEART, SIGNAL = 2.4; EXPRESSED IN ADULT LIVER, SIGNAL =   2
PKTYTQDDVCLIESGMTQLQSLTVTVPRRKLSKPKLKLKIINQNSVAVLQTPPDIQSEHSRDGDMDDSR

SEQ ID NO: 30420 - protein, 43 aa, Homo sapiens
  MAP TO AL136317.2; EXPRESSED IN HEART, SIGNAL = 5.8; EXPRESSED IN LUNG, SIGNAL = 6.5; EXPRESSED IN BONE MARROW, SIGNAL = 6.3; EXPRESSED IN PLACENTA, SIGNAL = 7.5; EXPRESSED IN ADULT LIVER, SIGNAL = 5.6; EXPRESSED IN FETAL LIVER, SIGNAL = 6.9; SWISSPROT HIT: Q01968, EVALUE 8.40e+00
PCRRPGRSDERPACIPSSGTWRSCHTCRFPAWCHRCAHYSYLA

SEQ ID NO: 30421 - protein, 44 aa, Homo sapiens
  MAP TO CHR22_179.0; EXPRESSED IN PLACENTA, SIGNAL = 0.69; EXPRESSED IN ADULT LIVER, SIGNAL = 0.56; EXPRESSED IN FETAL LIVER, SIGNAL = 0.55; SWISSPROT HIT: Q57824, EVALUE 4.90e+00
AELSELRSTIINLLDPPPEVSALINKLDFAMSTYLLSVYRLEYM

SEQ ID NO: 30422 - protein, 50 aa, Homo sapiens
  MAP TO AC015833.3; EXPRESSED IN BONE MARROW, SIGNAL = 0.41; EXPRESSED IN PLACENTA, SIGNAL = 0.45; EXPRESSED IN LUNG, SIGNAL = 0.52; EXPRESSED IN FETAL LIVER, SIGNAL = 0.39; SWISSPROT HIT: P48380, EVALUE 6.00e-21
VAAVSAFAQTLRRYTSLNHLAQAARAVLQNTSQINQMLSDLNRVDFANVQ

SEQ ID NO: 30423 - protein, 50 aa, Homo sapiens
  MAP TO AC021635.3; EXPRESSED IN BONE MARROW, SIGNAL = 0.74; EXPRESSED IN PLACENTA, SIGNAL = 0.86; EXPRESSED IN ADULT LIVER, SIGNAL = 0.7; EXPRESSED IN LUNG, SIGNAL = 0.73; EXPRESSED IN FETAL LIVER, SIGNAL = 0.62; SWISSPROT HIT: P12042, EVALUE 8.20e+00
IIVPILIRIADVQIKKRLSLMYSITKGYIKSQEDAKLLIKQIAVCESIYQ

SEQ ID NO: 30424 - protein, 62 aa, Homo sapiens
  MAP TO AC015956.3; EXPRESSED IN PLACENTA, SIGNAL = 0.83; EXPRESSED IN LUNG, SIGNAL = 0.79; EXPRESSED IN FETAL LIVER, SIGNAL = 0.6; SWISSPROT HIT: P36970, EVALUE 7.90e+00
DVVPQALLDQYLSMTDPSRAQTVDTEIAKHCAYSLPGVALTLGRQNWHCLRETYETLASDMQ

SEQ ID NO: 30425 - protein, 39 aa, Homo sapiens
  MAP TO CHR22_183_2.0; EXPRESSED IN FETAL LIVER, SIGNAL = 0.56; EXPRESSED IN PLACENTA, SIGNAL = 0.86; EXPRESSED IN LUNG, SIGNAL = 1.2; EXPRESSED IN ADULT LIVER, SIGNAL = 0.87; SWISSPROT HIT: P03354, EVALUE 1.30e+00
DGLLWALLTPENLGPQQWAADDTLGQRLSPKGWGAGCHI

SEQ ID NO: 30426 - protein, 36 aa, Homo sapiens
  MAP TO AC022478.3; EXPRESSED IN FETAL LIVER, SIGNAL = 1.8; EXPRESSED IN LUNG, SIGNAL = 3.6; EXPRESSED IN ADULT LIVER, SIGNAL = 3.1; EXPRESSED IN BONE MARROW, SIGNAL = 1.9
DLLNGFDQNVDNDMDNEIQAEVVSDGDEELAGNWSK

SEQ ID NO: 30427 - protein, 56 aa, Homo sapiens
  MAP TO AC021252.3; EXPRESSED IN FETAL LIVER, SIGNAL = 1.8; EXPRESSED IN LUNG, SIGNAL = 2.5; EXPRESSED IN ADULT LIVER, SIGNAL = 2.6
PLSSSKSQAATCSWWWWTAAASVNLWPPSPWHPLKSGISFCVQVHSLPRKPVRGIS

SEQ ID NO: 30428 - protein, 43 aa, Homo sapiens
  MAP TO AC023123.3; EXPRESSED IN FETAL LIVER, SIGNAL = 0.49; EXPRESSED IN PLACENTA, SIGNAL = 0.65; EXPRESSED IN ADULT LIVER, SIGNAL = 0.67
MRQVIDFLMKRPGSPFFMAFSVHSKSKTIVWQMQLAAAIIFFT

SEQ ID NO: 30429 - protein, 45 aa, Homo sapiens
  MAP TO AL096771.11; EXPRESSED IN LUNG, SIGNAL = 0.93; EXPRESSED IN ADULT LIVER, SIGNAL = 0.62; EXPRESSED IN FETAL LIVER, SIGNAL = 0.55; EXPRESSED IN BONE MARROW, SIGNAL = 0.59; SWISSPROT HIT: Q99715, EVALUE 1.00e-21
PLPRPQDLKLRDVTHSTMNVFWEPVPGKVRKYIVRYKTPEEDVKE

SEQ ID NO: 30430 - protein, 65 aa, Homo sapiens
  MAP TO AJ239319.2; EXPRESSED IN FETAL LIVER, SIGNAL = 1.4; EXPRESSED IN HEART, SIGNAL = 1.2; EXPRESSED IN BONE MARROW, SIGNAL = 0.96; SWISSPROT HIT: Q15233, EVALUE 2.00e-32
EREQPPRFAQPGSFEYEYAMRWKALIEMEKQQQDQVDRNIKEAREKLEMEMEAARHEHQVMLMRQ

SEQ ID NO: 30431 - protein, 61 aa, Homo sapiens
  MAP TO AJ239319.2; EXPRESSED IN FETAL LIVER, SIGNAL = 1.4; EXPRESSED IN HEART, SIGNAL = 1.2; EXPRESSED IN BONE MARROW, SIGNAL = 0.96
NESSHPDLHSLAPLSMNMPCAGRHSLRWRSSSRTKWTATSRRLVRSWRWRWKLHAMSTRSC

SEQ ID NO: 30432 - protein, 26 aa, Homo sapiens
  MAP TO AL136978.3; EXPRESSED IN FETAL LIVER, SIGNAL = 0.74; EXPRESSED IN BONE MARROW, SIGNAL = 0.68; EXPRESSED IN PLACENTA, SIGNAL = 0.83; EXPRESSED IN LUNG, SIGNAL = 0.79; EXPRESSED IN ADULT LIVER, SIGNAL = 0.96
MTSKIVDKPENLRRMTVFYQEQGIFQ

SEQ ID NO: 30433 - protein, 71 aa, Homo sapiens
  MAP TO AC012186.3; EXPRESSED IN PLACENTA, SIGNAL = 0.88; EXPRESSED IN FETAL LIVER, SIGNAL = 0.75; EXPRESSED IN LUNG, SIGNAL = 1.1; EXPRESSED IN ADULT LIVER, SIGNAL = 0.78; EXPRESSED IN BONE MARROW, SIGNAL = 0.84; SWISSPROT HIT: P34110, EVALUE 1.00e-09
EETTGDISDSMDFVLLNFAEMNKLWVRMQHQGHSRDREKRERERQELRILVGTNLVRLSQLEGVNVERYKQ

SEQ ID NO: 30434 - protein, 20 aa, Homo sapiens
  MAP TO AC012186.3; EXPRESSED IN PLACENTA, SIGNAL = 0.88; EXPRESSED IN FETAL LIVER, SIGNAL = 0.75; EXPRESSED IN LUNG, SIGNAL = 1.1; EXPRESSED IN ADULT LIVER, SIGNAL = 0.78; EXPRESSED IN BONE MARROW, SIGNAL = 0.84
KKQLVTSVIPWILYCSTLQK

SEQ ID NO: 30435 - protein, 34 aa, Homo sapiens
  MAP TO AJ239319.2; EXPRESSED IN PLACENTA, SIGNAL = 0.6; EXPRESSED IN LUNG, SIGNAL = 0.6; EXPRESSED IN BONE MARROW, SIGNAL = 0.53; EXPRESSED IN ADULT LIVER, SIGNAL = 0.68; EXPRESSED IN FETAL LIVER, SIGNAL = 0.48
MRQGRGRLGEEDSDVDIEGYDDEEEDGKPKTPAP

SEQ ID NO: 30436 - protein, 28 aa, Homo sapiens
  MAP TO AJ239319.2; EXPRESSED IN PLACENTA, SIGNAL = 0.6; EXPRESSED IN LUNG, SIGNAL = 0.6; EXPRESSED IN BONE MARROW, SIGNAL = 0.53; EXPRESSED IN ADULT LIVER, SIGNAL = 0.68; EXPRESSED IN FETAL LIVER, SIGNAL = 0.48
ARPSMMCYLCSLLRCARAEVGWARKTLM

SEQ ID NO: 30437 - protein, 39 aa, Homo sapiens
  MAP TO CHR22_121.0; EXPRESSED IN FETAL LIVER, SIGNAL = 1.8; EXPRESSED IN BONE MARROW, SIGNAL = 1.2; EXPRESSED IN HEART, SIGNAL = 1.4; EXPRESSED IN LUNG, SIGNAL = 1.7; EXPRESSED IN ADULT LIVER, SIGNAL = 1.8
VPVCGSPRQSLCPHERTPARGQYHQLLLTVHTHAPSPAV

SEQ ID NO: 30438 - protein, 77 aa, Homo sapiens
  MAP TO CHR22_81.0; EXPRESSED IN FETAL LIVER, SIGNAL = 0.67; EXPRESSED IN BONE MARROW, SIGNAL = 0.61; EXPRESSED IN PLACENTA, SIGNAL = 0.95; EXPRESSED IN ADULT LIVER, SIGNAL =   1; EXPRESSED IN LUNG, SIGNAL = 0.75; SWISSPROT HIT: Q11193, EVALUE 7.30e+00
MVESMKYPFRQGMRLEVVDKSQVSRTRMAVVDTVIGGRLRLLYEDGDSDDDFWCHMWSPLIHPVGWSRRVGHGIKMS

SEQ ID NO: 30439 - protein, 34 aa, Homo sapiens
  MAP TO CHR22_196.0; EXPRESSED IN ADULT LIVER, SIGNAL = 0.33; EXPRESSED IN FETAL LIVER, SIGNAL = 1.3; EXPRESSED IN HEART, SIGNAL = 1.3
CKDILCILLCDPGTEILQATFQLCQLLPVASGGW

SEQ ID NO: 30440 - protein, 53 aa, Homo sapiens
  MAP TO AJ239319.2; EXPRESSED IN FETAL LIVER, SIGNAL = 0.45; EXPRESSED IN BONE MARROW, SIGNAL = 0.49; EXPRESSED IN PLACENTA, SIGNAL = 0.44; EXPRESSED IN LUNG, SIGNAL = 0.46; EXPRESSED IN ADULT LIVER, SIGNAL = 0.61; SWISSPROT HIT: P35238, EVALUE 1.00e-11
TKRDLWSNLETVKKLKEQSLVPTTPQQGTSLAKQLGAVKYLEYSALMQDGVHE

SEQ ID NO: 30441 - protein, 149 aa, Homo sapiens
  MAP TO AL133215.16; EXPRESSED IN FETAL LIVER, SIGNAL = 2.3; EXPRESSED IN PLACENTA, SIGNAL = 2.4; EXPRESSED IN LUNG, SIGNAL = 2.4; EXPRESSED IN ADULT LIVER, SIGNAL = 3.2; SWISSPROT HIT: Q28183, EVALUE 1.00e-08
EFVEREVIDFARRNPGVVIYVNSRPCCVPRVVAEYREWGRARAGGRDQGLDPLSSFSLGRTGQLPPTLTPLLPVNGAVREESIHCKSVEEISTLVQKLADQSGLDVIRIRKPFHTDNPSIQGQWHPFTNKPTTFRGLRPREVQDPAPAQ

SEQ ID NO: 30442 - protein, 25 aa, Homo sapiens
  MAP TO CHR22_111.0; EXPRESSED IN FETAL LIVER, SIGNAL = 0.47; EXPRESSED IN LUNG, SIGNAL = 0.54; EXPRESSED IN ADULT LIVER, SIGNAL = 0.49
GAGAEAAGGAARARAGGAAQGAGGE

SEQ ID NO: 30443 - protein, 52 aa, Homo sapiens
  MAP TO AC015478.3; EXPRESSED IN HEART, SIGNAL = 1.5; EXPRESSED IN PLACENTA, SIGNAL = 1.4; EXPRESSED IN LUNG, SIGNAL = 2.1; EXPRESSED IN ADULT LIVER, SIGNAL =   2; EXPRESSED IN FETAL LIVER, SIGNAL = 1.8; EXPRESSED IN BONE MARROW, SIGNAL = 1.7
GNDNNDCEGDGDDDGDDNHDGDGGDDGDDDDGDSDGDGGGDNNGSGDGDDDE

SEQ ID NO: 30444 - protein, 70 aa, Homo sapiens
  MAP TO AC021011.2; EXPRESSED IN FETAL LIVER, SIGNAL = 3.4; EXPRESSED IN BONE MARROW, SIGNAL = 2.8; EXPRESSED IN PLACENTA, SIGNAL = 3.6; EXPRESSED IN LUNG, SIGNAL = 5.1; EXPRESSED IN ADULT LIVER, SIGNAL = 5.6
LDIQPKLQIEPCVKQHMPIYPSIFVRHPVDAGDGSHGSYLHFLRTVKFLTHPHKDVNDMIFWGSGGTTIP

SEQ ID NO: 30445 - protein, 44 aa, Homo sapiens
  MAP TO CHR22_13.0; EXPRESSED IN HEART, SIGNAL = 2.3; EXPRESSED IN ADULT LIVER, SIGNAL = 2.1; EXPRESSED IN FETAL LIVER, SIGNAL = 2.1; EXPRESSED IN BONE MARROW, SIGNAL = 3.1
RWGTGSLLKTWTGRRRRPSSASTVHCRLRTRPSRTADPHGLPTL

SEQ ID NO: 30446 - protein, 91 aa, Homo sapiens
  MAP TO CHR22_124.0; EXPRESSED IN BONE MARROW, SIGNAL = 0.61; EXPRESSED IN LUNG, SIGNAL = 0.8; EXPRESSED IN ADULT LIVER, SIGNAL = 0.93; EXPRESSED IN FETAL LIVER, SIGNAL = 0.66; SWISSPROT HIT: P36151, EVALUE 6.00e-03
SPPTFGFLLDIDGVLVRGHRVIPAALKAFRRLVNSQGQLRVPVVFVTNAGNILQHSKAQELSALLGCEVRRQPEAWKPKDLVPNGAAAPAP

SEQ ID NO: 30447 - protein, 82 aa, Homo sapiens
  MAP TO CHR22_124.0; EXPRESSED IN BONE MARROW, SIGNAL = 0.61; EXPRESSED IN LUNG, SIGNAL = 0.8; EXPRESSED IN ADULT LIVER, SIGNAL = 0.93; EXPRESSED IN FETAL LIVER, SIGNAL = 0.66; SWISSPROT HIT: O02666, EVALUE 4.20e-01
PTHLWVPVGHRWSACAGPQSDPCCSESLPKAGELPGAAAGARGFCYKCWEHLTTQQSPGAVSPAGVRGEKAARGMEAQGPGS

SEQ ID NO: 30448 - protein, 20 aa, Homo sapiens
  MAP TO CHR22_124.0; EXPRESSED IN BONE MARROW, SIGNAL = 0.61; EXPRESSED IN LUNG, SIGNAL = 0.8; EXPRESSED IN ADULT LIVER, SIGNAL = 0.93; EXPRESSED IN FETAL LIVER, SIGNAL = 0.66
AHPPLGSCWTSMECLCGATE

SEQ ID NO: 30449 - protein, 65 aa, Homo sapiens
  MAP TO CHR22_179.0; EXPRESSED IN FETAL LIVER, SIGNAL = 0.82; EXPRESSED IN BONE MARROW, SIGNAL = 0.69; EXPRESSED IN LUNG, SIGNAL = 0.61; EXPRESSED IN ADULT LIVER, SIGNAL = 0.63; SWISSPROT HIT: Q9MZT2, EVALUE 8.90e+00
MNLWLILHLQGLGFPQQITSFLPLFLAHQLTRRLPPIKEAKPRLQKLFRDFWLYSVLMGFAVEGS

SEQ ID NO: 30450 - protein, 58 aa, Homo sapiens
  MAP TO AC016672.4; EXPRESSED IN PLACENTA, SIGNAL = 1.1; EXPRESSED IN ADULT LIVER, SIGNAL = 1.9; EXPRESSED IN FETAL LIVER, SIGNAL = 1.2; EXPRESSED IN BONE MARROW, SIGNAL = 0.83; SWISSPROT HIT: O01975, EVALUE 1.00e-03
DQDFKSQKNFIINMTCRFCWQLPETDYECTNSTSCMTVSCPRQRYPANCTVRDHVHCL

SEQ ID NO: 30451 - protein, 69 aa, Homo sapiens
  MAP TO CHR22_2.0; EXPRESSED IN BONE MARROW, SIGNAL = 1.1; EXPRESSED IN FETAL LIVER, SIGNAL = 1.4; EXPRESSED IN LUNG, SIGNAL = 1.8; EXPRESSED IN ADULT LIVER, SIGNAL = 1.6; EXPRESSED IN PLACENTA, SIGNAL = 1.4; SWISSPROT HIT: Q10187, EVALUE 1.20e+00
DPKQDLAYERQYEQQTYQVIPEVIKNFIQYFHKTVSDLIDQKVYELQASRVSSDVIDQKVYEIQDIYEN

SEQ ID NO: 30452 - protein, 46 aa, Homo sapiens
  MAP TO AL132656.3; EXPRESSED IN BONE MARROW, SIGNAL = 0.57; EXPRESSED IN LUNG, SIGNAL = 0.59; EXPRESSED IN FETAL LIVER, SIGNAL = 0.49
NESEQYCNLDEDVDVDNTPISNALAKLQGIALKALHTLFKNILQPF

SEQ ID NO: 30453 - protein, 79 aa, Homo sapiens
  MAP TO CHR22_11.0; EXPRESSED IN LUNG, SIGNAL = 0.6; EXPRESSED IN ADULT LIVER, SIGNAL = 0.61; EXPRESSED IN PLACENTA, SIGNAL = 0.55; EXPRESSED IN FETAL LIVER, SIGNAL = 0.52; EXPRESSED IN BONE MARROW, SIGNAL = 0.55; SWISSPROT HIT: P34620, EVALUE 1.00e+00
VTPSPCQSPMAPWSREAVLSLYRALLRQGRQLRYTDRDFYFASIRREFRKNQKLEDAEARERQLEKGLVFLNGKLGRII

SEQ ID NO: 30454 - protein, 34 aa, Homo sapiens
  MAP TO CHR22_11.0; EXPRESSED IN LUNG, SIGNAL = 0.6; EXPRESSED IN ADULT LIVER, SIGNAL = 0.61; EXPRESSED IN PLACENTA, SIGNAL = 0.55; EXPRESSED IN FETAL LIVER, SIGNAL = 0.52; EXPRESSED IN BONE MARROW, SIGNAL = 0.55; SWISSPROT HIT: O06069, EVALUE 2.90e+00
DTQPLPVPHGPVEPRGGAESLSGSVAPGPTASLH

SEQ ID NO: 30455 - protein, 27 aa, Homo sapiens
  MAP TO AC011225.5; EXPRESSED IN FETAL LIVER, SIGNAL = 0.89; EXPRESSED IN ADULT LIVER, SIGNAL = 1.2; EXPRESSED IN BONE MARROW, SIGNAL = 0.93
MFKWRCSLYGMVVLELRKKIRLEIFST

SEQ ID NO: 30456 - protein, 66 aa, Homo sapiens
  MAP TO AC004846.2; EXPRESSED IN HEART, SIGNAL = 1.5; EXPRESSED IN PLACENTA, SIGNAL = 1.9; EXPRESSED IN LUNG, SIGNAL = 2.7; EXPRESSED IN ADULT LIVER, SIGNAL =   2; EXPRESSED IN FETAL LIVER, SIGNAL =   2; EXPRESSED IN BONE MARROW, SIGNAL = 1.6; SWISSPROT HIT: P49757, EVALUE 3.00e-32
RLSHAVGCAFAACLERKQKREKECGVTATFDASRTTFTREGSFRVTTATEQAEREEIMKQMQDAKK

SEQ ID NO: 30457 - protein, 30 aa, Homo sapiens
  MAP TO AC004846.2; EXPRESSED IN HEART, SIGNAL = 1.5; EXPRESSED IN PLACENTA, SIGNAL = 1.9; EXPRESSED IN LUNG, SIGNAL = 2.7; EXPRESSED IN ADULT LIVER, SIGNAL =   2; EXPRESSED IN FETAL LIVER, SIGNAL =   2; EXPRESSED IN BONE MARROW, SIGNAL = 1.6; SWISSPROT HIT: P48694, EVALUE 6.60e+00
KVEPCSRLCFCSLFRAQAEAGEGMWSDCYF

SEQ ID NO: 30458 - protein, 27 aa, Homo sapiens
  MAP TO AC012482.3; EXPRESSED IN PLACENTA, SIGNAL = 1.4; EXPRESSED IN LUNG, SIGNAL = 2.1; EXPRESSED IN ADULT LIVER, SIGNAL = 2.7; EXPRESSED IN FETAL LIVER, SIGNAL = 2.1; EXPRESSED IN BONE MARROW, SIGNAL = 1.5
MNTTSLLAPAAEIMATPGSPSQASPTS

SEQ ID NO: 30459 - protein, 136 aa, Homo sapiens
  MAP TO AL136311.2; EXPRESSED IN PLACENTA, SIGNAL = 0.84; EXPRESSED IN LUNG, SIGNAL = 0.87; EXPRESSED IN FETAL LIVER, SIGNAL = 0.73; SWISSPROT HIT: O95816, EVALUE 1.00e-71
EREELNLTANRLMGRTLTVEVSVETIRNPQQQESLKHATRIIDEVVNKFLDDLGNAKSHLMSLYSACSSEVPHGPVDQKFQSIVIGCALEDQKKIKRRLETLLRNIENSDKAIKLLEHSKGAGSKTLQQNAESRFN

SEQ ID NO: 30460 - protein, 59 aa, Homo sapiens
  MAP TO AL133476.4; EXPRESSED IN FETAL LIVER, SIGNAL = 1.2; EXPRESSED IN HEART, SIGNAL = 1.5; EXPRESSED IN PLACENTA, SIGNAL = 1.9; EXPRESSED IN LUNG, SIGNAL = 2.1; EXPRESSED IN ADULT LIVER, SIGNAL = 1.9; EXPRESSED IN BONE MARROW, SIGNAL = 1.5; SWISSPROT HIT: Q05152, EVALUE 2.70e+00
MGSPPDSVLAELRRSREREGPAASPAENEEGASEPSPGGIKWGHLFGSRKAQREARPTN

SEQ ID NO: 30461 - protein, 50 aa, Homo sapiens
  MAP TO AC012661.4; EXPRESSED IN FETAL LIVER, SIGNAL = 0.62; EXPRESSED IN ADULT LIVER, SIGNAL = 0.35; SWISSPROT HIT: Q9VIF0, EVALUE 8.20e+00
IPSGGIAESDRANRRSVMVANHQLETKYLAVLENTKTLRPLTFQNFNSPE

SEQ ID NO: 30462 - protein, 30 aa, Homo sapiens
  MAP TO AC018704.5; EXPRESSED IN FETAL LIVER, SIGNAL = 0.49; EXPRESSED IN BONE MARROW, SIGNAL = 0.53; EXPRESSED IN LUNG, SIGNAL = 0.58; EXPRESSED IN ADULT LIVER, SIGNAL = 0.65
MAVLTLEWSCFAENSEKHIDYQSFLNFSFQ

SEQ ID NO: 30463 - protein, 99 aa, Homo sapiens
  MAP TO AC012186.3; EXPRESSED IN FETAL LIVER, SIGNAL = 0.9; EXPRESSED IN HEART, SIGNAL = 2.2; EXPRESSED IN LUNG, SIGNAL = 1.3; EXPRESSED IN ADULT LIVER, SIGNAL = 0.95; SWISSPROT HIT: P29837, EVALUE 2.30e+00
NKALKIQTSGEPDVAERVDLEELIECATGKMELCARTDPSEQVEGNCEIVNELIAASTQKGQIKKKRLSELGITQADDNLMSQEMFVGIVGNQFKWNGK

SEQ ID NO: 30464 - protein, 20 aa, Homo sapiens
  MAP TO AC012186.3; EXPRESSED IN FETAL LIVER, SIGNAL = 0.9; EXPRESSED IN HEART, SIGNAL = 2.2; EXPRESSED IN LUNG, SIGNAL = 1.3; EXPRESSED IN ADULT LIVER, SIGNAL = 0.95
KIKRLKFRQVESQMWLKEWI

SEQ ID NO: 30465 - protein, 34 aa, Homo sapiens
  MAP TO AL160191.1; EXPRESSED IN PLACENTA, SIGNAL = 0.9; EXPRESSED IN LUNG, SIGNAL = 0.9; EXPRESSED IN ADULT LIVER, SIGNAL = 0.78; EXPRESSED IN FETAL LIVER, SIGNAL = 0.6; EXPRESSED IN BONE MARROW, SIGNAL = 0.6; SWISSPROT HIT: P15823, EVALUE 3.90e+00
GHRTARRVSSCQSGTRRTLPLGTRLPGSLSILWP

SEQ ID NO: 30466 - protein, 83 aa, Homo sapiens
  MAP TO AL138842.2; EXPRESSED IN ADULT LIVER, SIGNAL = 0.81; EXPRESSED IN FETAL LIVER, SIGNAL = 0.4; SWISSPROT HIT: O25136, EVALUE 2.50e+00
MVMFKKIKSFEVVFNDPEKVYGSGEKVAGRVIVEVCEVTRVKAVRILACGVAKVLWMQGSQQCKQTSEYLRYEDTLLLEDQPT

SEQ ID NO: 30467 - protein, 124 aa, Homo sapiens
  MAP TO AL137800.2; EXPRESSED IN FETAL LIVER, SIGNAL = 0.67; EXPRESSED IN BONE MARROW, SIGNAL = 0.6; EXPRESSED IN ADULT LIVER, SIGNAL = 0.87; EXPRESSED IN PLACENTA, SIGNAL = 0.72; SWISSPROT HIT: Q92540, EVALUE 4.00e-71
YQQADASKQLWNPPQVQGPLGKIMPVKQPYYLQTQDPIKLFEPSLQPPVMQQQPLEKKMKPFPMEPYNHNPSEVKVPEFYWDSSYSMADNRSVMAQQANIDRRGKRSPGVFRPEQDPVPRMPFE

SEQ ID NO: 30468 - protein, 68 aa, Homo sapiens
  MAP TO AL137799.2; EXPRESSED IN HEART, SIGNAL = 1.2; EXPRESSED IN BONE MARROW, SIGNAL = 0.82; EXPRESSED IN ADULT LIVER, SIGNAL = 1.9; EXPRESSED IN LUNG, SIGNAL = 1.2; EXPRESSED IN FETAL LIVER, SIGNAL = 0.74; SWISSPROT HIT: O00519, EVALUE 1.00e-18
YDCSNPLFGQTVNPWKSSKSPGGSSGGEGALIGSGGSPLGLGTDIGGSIRFPSSFCGICGLKPTGNRL

SEQ ID NO: 30469 - protein, 111 aa, Homo sapiens
  MAP TO U82695.2; EXPRESSED IN FETAL LIVER, SIGNAL = 0.93; EXPRESSED IN BONE MARROW, SIGNAL = 0.81; EXPRESSED IN LUNG, SIGNAL = 0.77; EXPRESSED IN PLACENTA, SIGNAL = 0.88; EXPRESSED IN ADULT LIVER, SIGNAL = 0.88; SWISSPROT HIT: Q16720, EVALUE 3.00e-35
DSPLKAVQMLWVNLIMDTFASLALATEPPTESLLLRKPYGRDKPLISRTMMKNILGHAVYQLAIIFTLLFVGRLASGTREDFGTLLPPPRAQILSGVSPPVSPHPVRGGTL

SEQ ID NO: 30470 - protein, 97 aa, Homo sapiens
  MAP TO AC004846.2; EXPRESSED IN PLACENTA, SIGNAL = 0.44; EXPRESSED IN ADULT LIVER, SIGNAL = 0.56; EXPRESSED IN FETAL LIVER, SIGNAL = 0.56; SWISSPROT HIT: P49757, EVALUE 7.00e-39
ETDKIVVGSSVAPGNTAPSPSSPTSPTSDATTSLEMNNPHAIPRRHAPIEQLARQGSFRGFPALSQKMSPFKRQLSLRINELPSTMQRKTDFPIKNA

SEQ ID NO: 30471 - protein, 61 aa, Homo sapiens
  MAP TO AL139022.1; EXPRESSED IN PLACENTA, SIGNAL = 1.7; EXPRESSED IN FETAL LIVER, SIGNAL = 1.6; EXPRESSED IN LUNG, SIGNAL = 2.1; EXPRESSED IN ADULT LIVER, SIGNAL = 2.1; EXPRESSED IN BONE MARROW, SIGNAL = 1.7; SWISSPROT HIT: P25912, EVALUE 1.00e-17
RALEKARSSAQLQTNYPSSDNSLYTNAKGSTISAFDGGSDSSSESEPEEPQSRKKLRMEAS

SEQ ID NO: 30472 - protein, 62 aa, Homo sapiens
  MAP TO AL139022.1; EXPRESSED IN PLACENTA, SIGNAL = 1.7; EXPRESSED IN FETAL LIVER, SIGNAL = 1.6; EXPRESSED IN LUNG, SIGNAL = 2.1; EXPRESSED IN ADULT LIVER, SIGNAL = 2.1; EXPRESSED IN BONE MARROW, SIGNAL = 1.7
SVHWRRRGQVPNCRPTTPPQTTASTPTPRAAPSLPSMGARTPARSLSLKSPKAGRSSGWRPA

SEQ ID NO: 30473 - protein, 51 aa, Homo sapiens
  MAP TO AL121993.2; EXPRESSED IN FETAL LIVER, SIGNAL = 1.3; EXPRESSED IN BONE MARROW, SIGNAL = 1.3; EXPRESSED IN HEART, SIGNAL = 1.3; EXPRESSED IN LUNG, SIGNAL = 1.6; EXPRESSED IN ADULT LIVER, SIGNAL = 2.1; EXPRESSED IN PLACENTA, SIGNAL = 1.7; SWISSPROT HIT: Q9UNX4, EVALUE 1.00e-14
DVIGFNMAGLDYLKRECEAKSEVMFFADATSHLEEKKRKRKKREKLILTLT

SEQ ID NO: 30474 - protein, 45 aa, Homo sapiens
  MAP TO AL121993.2; EXPRESSED IN FETAL LIVER, SIGNAL = 1.3; EXPRESSED IN BONE MARROW, SIGNAL = 1.3; EXPRESSED IN HEART, SIGNAL = 1.3; EXPRESSED IN LUNG, SIGNAL = 1.6; EXPRESSED IN ADULT LIVER, SIGNAL = 2.1; EXPRESSED IN PLACENTA, SIGNAL = 1.7
MLSASIWLVLIISRGNARQKVKLCFLLMLLATWKRRRGRGKRGRS

SEQ ID NO: 30475 - protein, 140 aa, Homo sapiens
  MAP TO AL136122.1; EXPRESSED IN FETAL LIVER, SIGNAL = 0.75; EXPRESSED IN PLACENTA, SIGNAL = 0.9; EXPRESSED IN ADULT LIVER, SIGNAL = 0.96; EXPRESSED IN BONE MARROW, SIGNAL = 0.72; SWISSPROT HIT: P31629, EVALUE 4.00e-65
SSSPRDFSPSSHHSSPGYDSSPCRDNSPKRYLIPKGDLSPRRHLSPRRDLSPMRHLSPRKEAALRREMSQRDVSPRRHLSPRRPVSPGKDITARRDLSPRRERRYMTTIRAPSPRRALYHNPPLSMGQYLQAEPIVLGPP

SEQ ID NO: 30476 - protein, 61 aa, Homo sapiens
  MAP TO AJ239319.2; EXPRESSED IN FETAL LIVER, SIGNAL = 0.6; EXPRESSED IN BONE MARROW, SIGNAL = 0.61; EXPRESSED IN PLACENTA, SIGNAL = 0.7; EXPRESSED IN LUNG, SIGNAL = 0.62; EXPRESSED IN ADULT LIVER, SIGNAL = 0.55; SWISSPROT HIT: P14943, EVALUE 3.00e-14
FLSTGDQAAKGNYGLLDQIQALRWVSENIAFFGGDPRRITVFGSGIGASCVSLLTLSHHSE

SEQ ID NO: 30477 - protein, 66 aa, Homo sapiens
  MAP TO AC015938.3; EXPRESSED IN BONE MARROW, SIGNAL = 0.5; EXPRESSED IN PLACENTA, SIGNAL = 0.62; EXPRESSED IN ADULT LIVER, SIGNAL = 0.61; EXPRESSED IN FETAL LIVER, SIGNAL = 0.59; SWISSPROT HIT: Q90643, EVALUE 4.00e-01
GLSWVKGENGCLDGPDTGEWWVPLRLGDQGRQGNTCGYAATPVFQTVQPTPPSDQTPAGIGDAERF

SEQ ID NO: 30478 - protein, 67 aa, Homo sapiens
  MAP TO AC015938.3; EXPRESSED IN BONE MARROW, SIGNAL = 0.5; EXPRESSED IN PLACENTA, SIGNAL = 0.62; EXPRESSED IN ADULT LIVER, SIGNAL = 0.61; EXPRESSED IN FETAL LIVER, SIGNAL = 0.59; SWISSPROT HIT: O35423, EVALUE 1.60e+00
EGCPGSREKMAVLMVPTLGNGGSPCGWVTRAGRETHVVTQPHLCSRPYSQPHPATRLLLASGTLRGS

SEQ ID NO: 30479 - protein, 27 aa, Homo sapiens
  MAP TO CHR22_167.0; EXPRESSED IN BONE MARROW, SIGNAL = 1.2; EXPRESSED IN PLACENTA, SIGNAL = 1.2; EXPRESSED IN LUNG, SIGNAL = 0.92; EXPRESSED IN FETAL LIVER, SIGNAL = 1.1; EXPRESSED IN ADULT LIVER, SIGNAL = 0.77; SWISSPROT HIT: Q13323, EVALUE 9.00e-10
MEVLGMTDSEEDLDPMEDFDSLECMEG

SEQ ID NO: 30480 - protein, 70 aa, Homo sapiens
  MAP TO CHR22_110.0; EXPRESSED IN FETAL LIVER, SIGNAL = 0.69; EXPRESSED IN LUNG, SIGNAL = 0.65; EXPRESSED IN ADULT LIVER, SIGNAL = 0.77; EXPRESSED IN BONE MARROW, SIGNAL = 0.7; SWISSPROT HIT: Q13415, EVALUE 1.40e-01
EPERHVRVKQRTSVLNMLRRLDKIRFRGHKRDDFLDLAESPNASDTECSDEIPLKVPRTSPRDSEELRDP

SEQ ID NO: 30481 - protein, 57 aa, Homo sapiens
  MAP TO AC013718.3; EXPRESSED IN BONE MARROW, SIGNAL = 0.5; EXPRESSED IN ADULT LIVER, SIGNAL = 0.62; EXPRESSED IN FETAL LIVER, SIGNAL = 0.62; SWISSPROT HIT: Q09328, EVALUE 4.00e-30
YKVTCQSSELAKDILVPSFDPKNKHCVFQGDLLLFSCAGAHPRHQRVCPCRDFIKGQ

SEQ ID NO: 30482 - protein, 24 aa, Homo sapiens
  MAP TO AC013718.3; EXPRESSED IN BONE MARROW, SIGNAL = 0.5; EXPRESSED IN ADULT LIVER, SIGNAL = 0.62; EXPRESSED IN FETAL LIVER, SIGNAL = 0.62
PVTRKGSVPSSPTLVPFSSSSGTR

SEQ ID NO: 30483 - protein, 36 aa, Homo sapiens
  MAP TO CHR21_19.0; EXPRESSED IN HEART, SIGNAL = 1.2; EXPRESSED IN PLACENTA, SIGNAL = 1.4; EXPRESSED IN LUNG, SIGNAL = 4.8; EXPRESSED IN ADULT LIVER, SIGNAL = 1.5; EXPRESSED IN FETAL LIVER, SIGNAL = 1.9; EXPRESSED IN BONE MARROW, SIGNAL = 2.5
MSSTSEDSFLSFQSVTICLVLSYRISEGFRYDVVKK

SEQ ID NO: 30484 - protein, 41 aa, Homo sapiens
  MAP TO AL136122.1; EXPRESSED IN FETAL LIVER, SIGNAL = 0.63; EXPRESSED IN BONE MARROW, SIGNAL = 0.46; EXPRESSED IN PLACENTA, SIGNAL = 0.5; EXPRESSED IN LUNG, SIGNAL = 0.54; EXPRESSED IN ADULT LIVER, SIGNAL = 0.81; SWISSPROT HIT: P39120, EVALUE 8.40e+00
VPGLVLIFALQRCSLSSKEEKDQLRAGDNFLIILPGKSVGG

SEQ ID NO: 30485 - protein, 41 aa, Homo sapiens
  MAP TO AL136122.1; EXPRESSED IN FETAL LIVER, SIGNAL = 0.63; EXPRESSED IN BONE MARROW, SIGNAL = 0.46; EXPRESSED IN PLACENTA, SIGNAL = 0.5; EXPRESSED IN LUNG, SIGNAL = 0.54; EXPRESSED IN ADULT LIVER, SIGNAL = 0.81
CQDWCSSLPFNAVASVPRRRRISCVPGTTSSSSSQGSLSEV

SEQ ID NO: 30486 - protein, 59 aa, Homo sapiens
  MAP TO CHR22_28.0; EXPRESSED IN FETAL LIVER, SIGNAL = 6.3; EXPRESSED IN BONE MARROW, SIGNAL = 6.1; EXPRESSED IN PLACENTA, SIGNAL = 6.6; EXPRESSED IN LUNG, SIGNAL = 6.6; EXPRESSED IN ADULT LIVER, SIGNAL =   7; SWISSPROT HIT: P33992, EVALUE 8.00e-29
AGITTTLNSRCSVLAAANSVFGRWDETKGEDNIDFMPTILSRFDMIFIVKDEHNEERDV

SEQ ID NO: 30487 - protein, 24 aa, Homo sapiens
  MAP TO CHR22_28.0; EXPRESSED IN FETAL LIVER, SIGNAL = 6.3; EXPRESSED IN BONE MARROW, SIGNAL = 6.1; EXPRESSED IN PLACENTA, SIGNAL = 6.6; EXPRESSED IN LUNG, SIGNAL = 6.6; EXPRESSED IN ADULT LIVER, SIGNAL =   7
WDHHHPELPLLRPGCCQLSVRPLG

SEQ ID NO: 30488 - protein, 116 aa, Homo sapiens
  MAP TO AL135926.3; EXPRESSED IN BONE MARROW, SIGNAL = 0.76; EXPRESSED IN PLACENTA, SIGNAL = 0.46; EXPRESSED IN FETAL LIVER, SIGNAL = 0.74; SWISSPROT HIT: P08547, EVALUE 9.00e-23
VFNKWWCNNWTSTCKEKMNLDTDLTPFTKIYSKWITDLNVIHKVTKLLEDNRGENIDNLEYGNDFLDTTPKVWSMKEIIGMLDFIKSKNFCSAEDNVNRIRRKATGWEKNSCKRQI

SEQ ID NO: 30489 - protein, 17 aa, Homo sapiens
  MAP TO AL135926.3; EXPRESSED IN BONE MARROW, SIGNAL = 0.76; EXPRESSED IN PLACENTA, SIGNAL = 0.46; EXPRESSED IN FETAL LIVER, SIGNAL = 0.74
FSISGGVITGHPHAKKK

SEQ ID NO: 30490 - protein, 72 aa, Homo sapiens
  MAP TO AL132671.19; EXPRESSED IN FETAL LIVER, SIGNAL = 0.76; EXPRESSED IN LUNG, SIGNAL = 0.56; EXPRESSED IN ADULT LIVER, SIGNAL = 0.42; SWISSPROT HIT: P08922, EVALUE 2.00e-36
VILISDIIELFELGPSAWQNWTYEVKVSTQDPPEVTHIFLNISGTMLNVPELQSAMKYKVSVRASSPKRPGP

SEQ ID NO: 30491 - protein, 101 aa, Homo sapiens
  MAP TO AC011802.4; EXPRESSED IN PLACENTA, SIGNAL = 0.63; EXPRESSED IN BONE MARROW, SIGNAL = 0.69; EXPRESSED IN LUNG, SIGNAL = 0.64; EXPRESSED IN ADULT LIVER, SIGNAL = 0.74; EXPRESSED IN FETAL LIVER, SIGNAL = 0.69
MRPRGPGGGLQGLGAPSVSQGSSGLPVPSSFQEFERARPVGVGLGVPPGQRMWPGGKRRGTWGQWEGQEPSPKQGMQSFCPQLPYEVAKKERLSLRRKKKP

SEQ ID NO: 30492 - protein, 19 aa, Homo sapiens
  MAP TO AC011802.4; EXPRESSED IN PLACENTA, SIGNAL = 0.63; EXPRESSED IN BONE MARROW, SIGNAL = 0.69; EXPRESSED IN LUNG, SIGNAL = 0.64; EXPRESSED IN ADULT LIVER, SIGNAL = 0.74; EXPRESSED IN FETAL LIVER, SIGNAL = 0.69
CKASAPSCPTRWPRKRGSA

SEQ ID NO: 30493 - protein, 80 aa, Homo sapiens
  MAP TO AC025475.2; EXPRESSED IN BONE MARROW, SIGNAL = 0.76; EXPRESSED IN LUNG, SIGNAL = 1.2; EXPRESSED IN ADULT LIVER, SIGNAL = 0.81; EXPRESSED IN FETAL LIVER, SIGNAL = 0.77; SWISSPROT HIT: P07572, EVALUE 5.90e-02
RDLDHFSLPQDFTLVHFINDIMLIGSSEQEVANTLNLLVKHLCARGWEINPTKIQGPSTSVKFLGVQWCGAYWNIPSKVK

SEQ ID NO: 30494 - protein, 22 aa, Homo sapiens
  MAP TO AC025475.2; EXPRESSED IN BONE MARROW, SIGNAL = 0.76; EXPRESSED IN LUNG, SIGNAL = 1.2; EXPRESSED IN ADULT LIVER, SIGNAL = 0.81; EXPRESSED IN FETAL LIVER, SIGNAL = 0.77
ETLITFRSHKISHWSILLMTLC

SEQ ID NO: 30495 - protein, 32 aa, Homo sapiens
  MAP TO AC020721.4; EXPRESSED IN FETAL LIVER, SIGNAL = 0.49; EXPRESSED IN BONE MARROW, SIGNAL = 0.68
ILKQDPTLEAPHLQKATTVCLDFFGKEDEKDQ

SEQ ID NO: 30496 - protein, 100 aa, Homo sapiens
  MAP TO AC015889.3; EXPRESSED IN FETAL LIVER, SIGNAL = 0.4; EXPRESSED IN BONE MARROW, SIGNAL = 0.46; EXPRESSED IN PLACENTA, SIGNAL = 0.45; EXPRESSED IN ADULT LIVER, SIGNAL = 0.38; SWISSPROT HIT: P34708, EVALUE 1.70e+00
HGLETHKTMLPLVVSGMFDCGRSLSFSCPVAQSPCLVSPLLPRPHPAQLLMEMQMLLAHSHSPLIFTIRSGGGDAWLMMVLCERRENKPTVGLHPEVATM

SEQ ID NO: 30497 - protein, 51 aa, Homo sapiens
  MAP TO AC015833.3; EXPRESSED IN FETAL LIVER, SIGNAL = 0.48; EXPRESSED IN PLACENTA, SIGNAL = 0.51; EXPRESSED IN ADULT LIVER, SIGNAL = 0.59; SWISSPROT HIT: P48380, EVALUE 7.00e-25
NLSEIESRLPKAKLITLCKHESILKWMCNCDHGMYQALVEILIPDVLRPIP

SEQ ID NO: 30498 - protein, 42 aa, Homo sapiens
  MAP TO AC011802.4; EXPRESSED IN LUNG, SIGNAL = 2.3; EXPRESSED IN FETAL LIVER, SIGNAL = 1.3; EXPRESSED IN BONE MARROW, SIGNAL = 1.5
GSRNMPGLSAATLASLGGTSSRRGSGDTSISIDTEASIREIK

SEQ ID NO: 30499 - protein, 41 aa, Homo sapiens
  MAP TO AC011802.4; EXPRESSED IN LUNG, SIGNAL = 2.3; EXPRESSED IN FETAL LIVER, SIGNAL = 1.3; EXPRESSED IN BONE MARROW, SIGNAL = 1.5
GLVTCRACLQPRWPLWVGLPLGEAAETPPSPSTPRHPSGKS

SEQ ID NO: 30500 - protein, 51 aa, Homo sapiens
  MAP TO AC017112.5; EXPRESSED IN PLACENTA, SIGNAL = 0.41; EXPRESSED IN FETAL LIVER, SIGNAL = 0.4
NSLLDDAKARLRKYDIGGKYSHLPYNKYSVLLPLVAKEGKLHLLFTVRSEK

SEQ ID NO: 30501 - protein, 34 aa, Homo sapiens
  MAP TO CHR22_182.0; EXPRESSED IN PLACENTA, SIGNAL = 0.78; EXPRESSED IN ADULT LIVER, SIGNAL = 0.75; EXPRESSED IN BONE MARROW, SIGNAL = 0.69; EXPRESSED IN FETAL LIVER, SIGNAL = 0.98; SWISSPROT HIT: P10264, EVALUE 2.00e-03
FQGQQPLQKIPPLQGVSQLQQSNSCPAPQQAAPQ

SEQ ID NO: 30502 - protein, 64 aa, Homo sapiens
  MAP TO AL135920.4; EXPRESSED IN FETAL LIVER, SIGNAL = 1.8; EXPRESSED IN LUNG, SIGNAL = 3.1; EXPRESSED IN ADULT LIVER, SIGNAL = 2.3; EXPRESSED IN BONE MARROW, SIGNAL = 2.1; SWISSPROT HIT: O41033, EVALUE 3.20e-01
VLVPKGRTLPPGDTTIPLNWKLRLPPGHIGLLLPLSQQAKGVTVLAGVIDLDYQDEFSLLLHNR

SEQ ID NO: 30503 - protein, 31 aa, Homo sapiens
  MAP TO AL137062.3; EXPRESSED IN BONE MARROW, SIGNAL = 0.71; EXPRESSED IN PLACENTA, SIGNAL =   1; EXPRESSED IN ADULT LIVER, SIGNAL = 1.1; EXPRESSED IN FETAL LIVER, SIGNAL = 0.8
MSLPREGWRWREKGWRVRMGRRLWSSRPTRQ

SEQ ID NO: 30504 - protein, 41 aa, Homo sapiens
  MAP TO CHR22_145.0; EXPRESSED IN LUNG, SIGNAL = 0.61; EXPRESSED IN FETAL LIVER, SIGNAL = 0.7; EXPRESSED IN PLACENTA, SIGNAL = 0.76; SWISSPROT HIT: P18099, EVALUE 2.20e+00
QARADGHFQQRALPAAFHTWNRLWRWRHQENVLSARATRFH

SEQ ID NO: 30505 - protein, 41 aa, Homo sapiens
  MAP TO AL136445.1; EXPRESSED IN FETAL LIVER, SIGNAL = 7.3; EXPRESSED IN BONE MARROW, SIGNAL = 7.8; EXPRESSED IN HEART, SIGNAL = 5.3; EXPRESSED IN PLACENTA, SIGNAL = 7.9
KIDDPSEEQETVRLYSVQLGALKEGNKTRELIPRGPWREEQ

SEQ ID NO: 30506 - protein, 58 aa, Homo sapiens
  MAP TO AC016729.5; EXPRESSED IN ADULT LIVER, SIGNAL = 9.5; EXPRESSED IN FETAL LIVER, SIGNAL =   7; EXPRESSED IN BONE MARROW, SIGNAL = 7.5; EXPRESSED IN HEART, SIGNAL = 8.4; SWISSPROT HIT: Q9Y7R3, EVALUE 2.70e+00
RALAKTGAESISLLELCRNTNRKQAAAKFYSFLVLKKQQAIELTQEEPYSDIIATPGP

SEQ ID NO: 30507 - protein, 42 aa, Homo sapiens
  MAP TO AC016729.5; EXPRESSED IN ADULT LIVER, SIGNAL = 9.5; EXPRESSED IN FETAL LIVER, SIGNAL =   7; EXPRESSED IN BONE MARROW, SIGNAL = 7.5; EXPRESSED IN HEART, SIGNAL = 8.4
VLLLKLELNLSVCLSYVEIRTENKLPQSSTASWFLKSSKLLS

SEQ ID NO: 30508 - protein, 54 aa, Homo sapiens
  MAP TO AL139144.1; EXPRESSED IN BONE MARROW, SIGNAL = 0.75; EXPRESSED IN PLACENTA, SIGNAL = 0.66; EXPRESSED IN FETAL LIVER, SIGNAL = 0.79; EXPRESSED IN LUNG, SIGNAL = 0.72; EXPRESSED IN ADULT LIVER, SIGNAL = 0.79; SWISSPROT HIT: P11293, EVALUE 2.80e+00
VSNLDLSLPGKPFLTLTLQVWLKSLLSELPRLSIQLIMIFLALEWVAGLPVCPL

SEQ ID NO: 30509 - protein, 30 aa, Homo sapiens
  MAP TO AL138889.2; EXPRESSED IN PLACENTA, SIGNAL = 0.39; EXPRESSED IN ADULT LIVER, SIGNAL = 0.42; EXPRESSED IN FETAL LIVER, SIGNAL = 0.45
DYMPESAMAEGRRGDTEQEDGGRHFAIYQD

SEQ ID NO: 30510 - protein, 19 aa, Homo sapiens
  MAP TO AL138889.2; EXPRESSED IN PLACENTA, SIGNAL = 0.39; EXPRESSED IN ADULT LIVER, SIGNAL = 0.42; EXPRESSED IN FETAL LIVER, SIGNAL = 0.45
LYARECNGRRQKRRYRTRR

SEQ ID NO: 30511 - protein, 31 aa, Homo sapiens
  MAP TO AC022057.2; EXPRESSED IN BONE MARROW, SIGNAL = 0.81; EXPRESSED IN ADULT LIVER, SIGNAL = 0.84; EXPRESSED IN FETAL LIVER, SIGNAL =   1; EXPRESSED IN LUNG, SIGNAL = 0.86
WLLLKTTTTTTRTTKKIMCWQRCGESGNLVY

SEQ ID NO: 30512 - protein, 76 aa, Homo sapiens
  MAP TO AL121954.3; EXPRESSED IN FETAL LIVER, SIGNAL =   2; EXPRESSED IN BONE MARROW, SIGNAL = 1.4; SWISSPROT HIT: P79384, EVALUE 3.20e+00
IRTSNNSQVNKLTLTSDESTLIEDGGARSDGSLEDGDDVHRAVDNERDGVTYSYSFFHFMLFLASLYIMMTLTNWY

SEQ ID NO: 30513 - protein, 80 aa, Homo sapiens
  MAP TO AC012186.3; EXPRESSED IN BONE MARROW, SIGNAL = 1.7; EXPRESSED IN LUNG, SIGNAL = 2.6; EXPRESSED IN PLACENTA, SIGNAL = 1.7; EXPRESSED IN FETAL LIVER, SIGNAL = 1.7; EXPRESSED IN ADULT LIVER, SIGNAL = 2.3; SWISSPROT HIT: P34110, EVALUE 1.00e-10
AFSLYEDEISDSKAQLAAITLIIGTFERMKCFSEENHEPLRTQCALAASKLLKKPDQGRAVSTCAHLFWSGRNTDKNGEE

SEQ ID NO: 30514 - protein, 26 aa, Homo sapiens
  MAP TO AL133328.5; EXPRESSED IN FETAL LIVER, SIGNAL = 4.8; EXPRESSED IN BONE MARROW, SIGNAL = 5.7; EXPRESSED IN LUNG, SIGNAL = 8.5; EXPRESSED IN PLACENTA, SIGNAL = 7.8; EXPRESSED IN ADULT LIVER, SIGNAL = 7.7
WCVQSLFLQMFRCVWSFFLLVGSWSP

SEQ ID NO: 30515 - protein, 71 aa, Homo sapiens
  MAP TO AF235096.1; EXPRESSED IN FETAL LIVER, SIGNAL = 0.78; EXPRESSED IN HEART, SIGNAL = 2.6; EXPRESSED IN LUNG, SIGNAL = 0.77; EXPRESSED IN ADULT LIVER, SIGNAL = 0.76; EXPRESSED IN BONE MARROW, SIGNAL = 0.7; SWISSPROT HIT: P27216, EVALUE 9.00e-12
TNEAAIIEILSGRTSDERQQIKQKYKATYGKVIPGVVSKLAPSHGLSRLGFLMSPGHAEYLYSFIESAQEE

SEQ ID NO: 30516 - protein, 32 aa, Homo sapiens
  MAP TO AF235096.1; EXPRESSED IN FETAL LIVER, SIGNAL = 0.78; EXPRESSED IN HEART, SIGNAL = 2.6; EXPRESSED IN LUNG, SIGNAL = 0.77; EXPRESSED IN ADULT LIVER, SIGNAL = 0.76; EXPRESSED IN BONE MARROW, SIGNAL = 0.7
GPMKQPSLKSYRAGHQMRGNKSSKSTRQRTAR

SEQ ID NO: 30517 - protein, 41 aa, Homo sapiens
  MAP TO AL139152.1; EXPRESSED IN BONE MARROW, SIGNAL = 7.7; EXPRESSED IN FETAL LIVER, SIGNAL =   8
MTSLGSVRATWNRNITPIWKARWRLITFIVRYSLSTSRAKP

SEQ ID NO: 30518 - protein, 79 aa, Homo sapiens
  MAP TO AL132656.3; EXPRESSED IN PLACENTA, SIGNAL = 0.6; EXPRESSED IN LUNG, SIGNAL = 0.63; EXPRESSED IN BONE MARROW, SIGNAL = 0.42; EXPRESSED IN ADULT LIVER, SIGNAL = 0.6; EXPRESSED IN FETAL LIVER, SIGNAL = 0.58
ASLPSSSSTGSSLSSSTTASWASRTAATGTAASRSWTRRGCRSSATSRRSTSPTCRRRRPGGKQDLDPQRLQIICNFTE

SEQ ID NO: 30519 - protein, 146 aa, Homo sapiens
  MAP TO AL138478.1; EXPRESSED IN FETAL LIVER, SIGNAL = 2.1; EXPRESSED IN HEART, SIGNAL = 1.7; EXPRESSED IN PLACENTA, SIGNAL = 2.4; EXPRESSED IN LUNG, SIGNAL = 2.9; EXPRESSED IN BONE MARROW, SIGNAL = 2.3
MASPAAGCGLRVSHLVAPQWSAETPRRITTTAVPSPPTPGAPRPPATPSPPPPPQPTTTMSLPPRGARRAARAARGASGATRAPATRKRTTGSTARRSPRILWGTAGTHPSTRSASTSPRPGRSPATHCPSKRDAPKSPPRAMMRR

SEQ ID NO: 30520 - protein, 55 aa, Homo sapiens
  MAP TO AC020582.3; EXPRESSED IN PLACENTA, SIGNAL = 0.7; EXPRESSED IN FETAL LIVER, SIGNAL = 0.53; EXPRESSED IN LUNG, SIGNAL = 0.53; EXPRESSED IN ADULT LIVER, SIGNAL = 0.57
KKKCKFKALKSFFVKKKEKEAEDTQEEEMLELSLSSSNINISSLQPVRENQPTKA

SEQ ID NO: 30521 - protein, 30 aa, Homo sapiens
  MAP TO AC020582.3; EXPRESSED IN PLACENTA, SIGNAL = 0.7; EXPRESSED IN FETAL LIVER, SIGNAL = 0.53; EXPRESSED IN LUNG, SIGNAL = 0.53; EXPRESSED IN ADULT LIVER, SIGNAL = 0.57
ERRNANLKPLRAFLLRRRKKKPKIPRKKKC

SEQ ID NO: 30522 - protein, 25 aa, Homo sapiens
  MAP TO AC021009.3; EXPRESSED IN BONE MARROW, SIGNAL = 0.54; EXPRESSED IN FETAL LIVER, SIGNAL = 0.46; EXPRESSED IN PLACENTA, SIGNAL = 0.49; EXPRESSED IN LUNG, SIGNAL = 0.54; EXPRESSED IN ADULT LIVER, SIGNAL = 0.6
IKYRHPKTQARKMPGPGKSSGGMAT

SEQ ID NO: 30523 - protein, 52 aa, Homo sapiens
  MAP TO CHR22_170.0; EXPRESSED IN BONE MARROW, SIGNAL = 0.97; EXPRESSED IN FETAL LIVER, SIGNAL = 1.3; EXPRESSED IN PLACENTA, SIGNAL = 1.3; EXPRESSED IN LUNG, SIGNAL = 0.97; EXPRESSED IN ADULT LIVER, SIGNAL = 0.94; SWISSPROT HIT: O15547, EVALUE 2.80e+00
EHGGARDRSLHHRCKDNGLGFHGFRTSCPRPTKAAGISQLQVSGFPGPKTHL

SEQ ID NO: 30524 - protein, 25 aa, Homo sapiens
  MAP TO AC011580.4; EXPRESSED IN FETAL LIVER, SIGNAL = 0.41
CLDNYNFQDKIAREFVSDNCYKSFE

SEQ ID NO: 30525 - protein, 25 aa, Homo sapiens
  MAP TO AC011580.4; EXPRESSED IN FETAL LIVER, SIGNAL = 0.41
VWITTIFKIKLPENLFLTTVINLLK

SEQ ID NO: 30526 - protein, 32 aa, Homo sapiens
  MAP TO AL136103.2; EXPRESSED IN BONE MARROW, SIGNAL = 0.68; EXPRESSED IN PLACENTA, SIGNAL = 0.68; EXPRESSED IN LUNG, SIGNAL = 0.64; EXPRESSED IN ADULT LIVER, SIGNAL = 0.82; EXPRESSED IN FETAL LIVER, SIGNAL = 0.64
WKMAKRESYLAVLNTCPSFFPSHPPNPTRLLL

SEQ ID NO: 30527 - protein, 31 aa, Homo sapiens
  MAP TO AL133268.4; EXPRESSED IN BONE MARROW, SIGNAL = 0.8; EXPRESSED IN LUNG, SIGNAL = 1.1; EXPRESSED IN ADULT LIVER, SIGNAL = 0.85; EXPRESSED IN FETAL LIVER, SIGNAL = 0.77
YPLHLLVEKPGLRFPCTAVHVLETAYACGAK

SEQ ID NO: 30528 - protein, 66 aa, Homo sapiens
  MAP TO CHR22_166.0; EXPRESSED IN FETAL LIVER, SIGNAL = 0.53; EXPRESSED IN BONE MARROW, SIGNAL = 1.3; EXPRESSED IN PLACENTA, SIGNAL = 0.71; EXPRESSED IN LUNG, SIGNAL = 0.58; SWISSPROT HIT: P97369, EVALUE 1.00e-10
DECWLHNISLLCTLPHTRWAHKTHQGDKQDLFSPPSHSDFEQLPDDVAISANIADIEEKRGFTSHF

SEQ ID NO: 30529 - protein, 138 aa, Homo sapiens
  MAP TO CHR22_175.0; EXPRESSED IN BONE MARROW, SIGNAL = 0.52; EXPRESSED IN PLACENTA, SIGNAL = 0.63; EXPRESSED IN FETAL LIVER, SIGNAL = 0.62; EXPRESSED IN ADULT LIVER, SIGNAL = 0.89; EXPRESSED IN LUNG, SIGNAL = 0.61; SWISSPROT HIT: Q07869, EVALUE 7.00e-75
MAEKTLVAKLVANGIQNKEAEVRIFHCCQCTSVETVTELTEFAKAIPGFANLDLNDQVTLLKYGVYEAIFAMLSSVMNKDGMLVAYGNGFITREFLKSLRKPFCDIMEPKFDFAMKFNALELDDSDISLFVAAIICCG

SEQ ID NO: 30530 - protein, 64 aa, Homo sapiens
  MAP TO CHR22_175.0; EXPRESSED IN BONE MARROW, SIGNAL = 0.52; EXPRESSED IN PLACENTA, SIGNAL = 0.63; EXPRESSED IN FETAL LIVER, SIGNAL = 0.62; EXPRESSED IN ADULT LIVER, SIGNAL = 0.89; EXPRESSED IN LUNG, SIGNAL = 0.61
LLSYMIWRHCVWLRRRWWPSWWPMASRTRRRRSASFTAASARQWRPSRSSRNSPRPSQASQTWT

SEQ ID NO: 30531 - protein, 149 aa, Homo sapiens
  MAP TO AC013614.4; EXPRESSED IN ADULT LIVER, SIGNAL = 0.46; EXPRESSED IN FETAL LIVER, SIGNAL = 0.41; SWISSPROT HIT: P29128, EVALUE 1.60e-01
AVKGGPRCAAPHAHSSNTAPAATFVPTAEGRAGSFKASLPSCALNAGFGLRRKAWAPSLKGEMTSPKREGQIPGIPVSEALVLARLPPTQRAKFRTANKFLRTTGPWDGLFRTPRSKDSEGKVTSVGSSFCTRSCPSILQPEVGRTFTA

SEQ ID NO: 30532 - protein, 56 aa, Homo sapiens
  MAP TO AC011165.3; EXPRESSED IN BONE MARROW, SIGNAL = 1.3; EXPRESSED IN HEART, SIGNAL = 1.2; EXPRESSED IN FETAL LIVER, SIGNAL = 1.3
NRIIPTSASVITSPSLTLTFLPPSSEDPWDFIQPTHIIQANLISAFLTHLCKVLFA

SEQ ID NO: 30533 - protein, 27 aa, Homo sapiens
  MAP TO AC011950.4; EXPRESSED IN FETAL LIVER, SIGNAL = 0.54; EXPRESSED IN BONE MARROW, SIGNAL = 0.49; EXPRESSED IN PLACENTA, SIGNAL = 0.46; EXPRESSED IN ADULT LIVER, SIGNAL = 0.55
TLMLAFRTINTVLKTMSLLFFIALIIA

SEQ ID NO: 30534 - protein, 114 aa, Homo sapiens
  MAP TO AC021975.3; EXPRESSED IN FETAL LIVER, SIGNAL =  13; EXPRESSED IN BONE MARROW, SIGNAL = 9.1; SWISSPROT HIT: P20172, EVALUE 3.80e-01
FGMEGNKENMELEGNKENMEPKGNESTKIIEYCKQMGWRGALLNYRRNGLVVKVKHKSNLLELSTVSNGDILAGLDIPGPKALHGVHNIHAFFHLAKTTCLPSNHSVLAVQMKN

SEQ ID NO: 30535 - protein, 29 aa, Homo sapiens
  MAP TO AC021975.3; EXPRESSED IN FETAL LIVER, SIGNAL =  13; EXPRESSED IN BONE MARROW, SIGNAL = 9.1
LAWKGIRKTWNWKEIRKTWNPKGMRAQRL

SEQ ID NO: 30536 - protein, 31 aa, Homo sapiens
  MAP TO AC021009.3; EXPRESSED IN FETAL LIVER, SIGNAL = 0.43; EXPRESSED IN ADULT LIVER, SIGNAL = 0.46
MYIVQVYLVKFISRFIRKCPGHSIPPPIAEK

SEQ ID NO: 30537 - protein, 90 aa, Homo sapiens
  MAP TO AL096771.11; EXPRESSED IN PLACENTA, SIGNAL = 0.59; EXPRESSED IN BONE MARROW, SIGNAL = 0.46; EXPRESSED IN LUNG, SIGNAL = 0.59; EXPRESSED IN FETAL LIVER, SIGNAL = 0.6; SWISSPROT HIT: Q99715, EVALUE 4.00e-48
RGSPQDLVTKDITDTSIGAYWTSAPGMVRGYRVSWKSLYDDVDTGEKNLPEDAIHTMIENLQPETKYRISVFATYSSGEGEPLTGDATTE

SEQ ID NO: 30538 - protein, 39 aa, Homo sapiens
  MAP TO CHR22_49.0; EXPRESSED IN LUNG, SIGNAL = 0.59; EXPRESSED IN FETAL LIVER, SIGNAL = 0.5; EXPRESSED IN PLACENTA, SIGNAL = 0.66; EXPRESSED IN ADULT LIVER, SIGNAL = 0.7; SWISSPROT HIT: O42661, EVALUE 2.20e+00
TYCVPDAVPSDQQTLPNSSLPQPNKGTEGQRRGPARGRQ

SEQ ID NO: 30539 - protein, 41 aa, Homo sapiens
  MAP TO AL136379.2; EXPRESSED IN FETAL LIVER, SIGNAL = 1.8; EXPRESSED IN BONE MARROW, SIGNAL = 1.4; EXPRESSED IN PLACENTA, SIGNAL = 1.7; EXPRESSED IN LUNG, SIGNAL = 5.4; EXPRESSED IN ADULT LIVER, SIGNAL = 4.9; SWISSPROT HIT: P51643, EVALUE 5.00e-16
LIFVVDSNDRERVNEAREELMRMLAEDELRDAVLLVFANKQ

SEQ ID NO: 30540 - protein, 125 aa, Homo sapiens
  MAP TO AC012360.2; EXPRESSED IN FETAL LIVER, SIGNAL = 0.65; EXPRESSED IN PLACENTA, SIGNAL = 0.89; EXPRESSED IN BONE MARROW, SIGNAL = 0.54; SWISSPROT HIT: Q24432, EVALUE 5.50e-01
SSTVDGLRKRPLIVFDGSSTSTSIKVKKTENGDNDRLKPPPQASFTSNAFRKLSNSSSSVSPLILSSNLPVNNKTEHNNNDAKQNHDLTHRKSPSGPVKSPPLSPVGTTPVKLKRAAPKEEAEAM

SEQ ID NO: 30541 - protein, 60 aa, Homo sapiens
  MAP TO AC020550.2; EXPRESSED IN FETAL LIVER, SIGNAL = 0.5; SWISSPROT HIT: Q14699, EVALUE 1.10e-01
SSNPEVIKINSILDIVTKVENYYLKGYIVGAIHPVIQPVGQRKHLPASYLYRVVLLRLKL

SEQ ID NO: 30542 - protein, 44 aa, Homo sapiens
  MAP TO CHR21_44.0; EXPRESSED IN LUNG, SIGNAL = 0.48; EXPRESSED IN FETAL LIVER, SIGNAL = 0.41; SWISSPROT HIT: Q99743, EVALUE 2.20e+00
LDHEKRVRDHENINGLTHLYLVFHYWNTKPVGVIYILLLKVITK

SEQ ID NO: 30543 - protein, 55 aa, Homo sapiens
  MAP TO CHR21_53.0; EXPRESSED IN FETAL LIVER, SIGNAL = 0.45; SWISSPROT HIT: Q14149, EVALUE 4.00e-26
INAELLFRPTALSTPSFSSPKESVPRRHLSEGTNSYATRLLNNHQVPPQSEPESN

SEQ ID NO: 30544 - protein, 35 aa, Homo sapiens
  MAP TO AC021619.3; EXPRESSED IN FETAL LIVER, SIGNAL = 0.4; EXPRESSED IN PLACENTA, SIGNAL = 0.49
RVQPWTQLPLGTFFTMMSQLLGKFLIPCLLLSLLL

SEQ ID NO: 30545 - protein, 71 aa, Homo sapiens
  MAP TO AL137798.1; EXPRESSED IN LUNG, SIGNAL = 3.3; EXPRESSED IN ADULT LIVER, SIGNAL =   5; EXPRESSED IN FETAL LIVER, SIGNAL = 1.2; SWISSPROT HIT: P13654, EVALUE 2.20e-02
QYKVLVHSQERELTQLREKLREGRDASRSLNQHLQALLTPDKPDKSQGQDLQEQLAEGCRLAQQLFQKLSP

SEQ ID NO: 30546 - protein, 26 aa, Homo sapiens
  MAP TO AL121836.9; EXPRESSED IN BONE MARROW, SIGNAL = 0.47; EXPRESSED IN FETAL LIVER, SIGNAL = 0.46
VDTLIMMYKTHCQCILDNAINGNFEE

SEQ ID NO: 30547 - protein, 47 aa, Homo sapiens
  MAP TO AC004845.2; EXPRESSED IN LUNG, SIGNAL = 0.49; EXPRESSED IN ADULT LIVER, SIGNAL = 0.51; EXPRESSED IN FETAL LIVER, SIGNAL = 0.59; SWISSPROT HIT: P50117, EVALUE 6.30e+00
NPRGLSGSGPGWERLHLQAGAGHGHALFGVHAKRGGAGHHHAALGHG

SEQ ID NO: 30548 - protein, 69 aa, Homo sapiens
  MAP TO AC004845.2; EXPRESSED IN LUNG, SIGNAL = 0.49; EXPRESSED IN ADULT LIVER, SIGNAL = 0.51; EXPRESSED IN FETAL LIVER, SIGNAL = 0.59; SWISSPROT HIT: Q12809, EVALUE 1.70e+00
SERPFGFWTGMGTASSPSRSWAWPCALWGTCQARWSWPSSCSAWTWTVRPGQAASPLRHAPVSSVRPSV

SEQ ID NO: 30549 - protein, 52 aa, Homo sapiens
  MAP TO AL133553.2; EXPRESSED IN LUNG, SIGNAL = 0.66; EXPRESSED IN PLACENTA, SIGNAL = 0.57; EXPRESSED IN FETAL LIVER, SIGNAL = 0.78; SWISSPROT HIT: P29788, EVALUE 4.00e-06
DSQYWRFTNDIKDAGYPKPIFKGFGGLTGQIVAALSTAKYKNWPESVYFFKR

SEQ ID NO: 30550 - protein, 28 aa, Homo sapiens
  MAP TO AL132656.3; EXPRESSED IN FETAL LIVER, SIGNAL = 0.53; EXPRESSED IN PLACENTA, SIGNAL = 0.56; SWISSPROT HIT: Q91637, EVALUE 8.70e+00
WKPSTPWRRWRRCGTANVSPATTSSATA

SEQ ID NO: 30551 - protein, 26 aa, Homo sapiens
  MAP TO AC011803.4; EXPRESSED IN FETAL LIVER, SIGNAL = 0.5
VIPDLDNQGKALSVDDHVTKSGMRIL

SEQ ID NO: 30552 - protein, 25 aa, Homo sapiens
  MAP TO AC011980.3; EXPRESSED IN FETAL LIVER, SIGNAL = 0.48; EXPRESSED IN BONE MARROW, SIGNAL = 0.55
MEHEHILSPSLSFLFWKIEITIANI

SEQ ID NO: 30553 - protein, 17 aa, Homo sapiens
  MAP TO AC011980.3; EXPRESSED IN FETAL LIVER, SIGNAL = 0.48; EXPRESSED IN BONE MARROW, SIGNAL = 0.55
WSMNTFSPRASVFSSGR

SEQ ID NO: 30554 - protein, 50 aa, Homo sapiens
  MAP TO AC020582.3; EXPRESSED IN LUNG, SIGNAL = 9.1; EXPRESSED IN ADULT LIVER, SIGNAL = 7.5; EXPRESSED IN BONE MARROW, SIGNAL =   5
MTRWTERSPAQELPAREVSVHHHDTGVNNNNNNSSSSSSSSSSSSSSSKL

SEQ ID NO: 30555 - protein, 20 aa, Homo sapiens
  MAP TO AC020582.3; EXPRESSED IN LUNG, SIGNAL = 9.1; EXPRESSED IN ADULT LIVER, SIGNAL = 7.5; EXPRESSED IN BONE MARROW, SIGNAL =   5
DLPETPSIMVWLRDMLLKCA

SEQ ID NO: 30556 - protein, 53 aa, Homo sapiens
  MAP TO CHR21_23.0; EXPRESSED IN LUNG, SIGNAL = 3.2; EXPRESSED IN ADULT LIVER, SIGNAL = 1.8; EXPRESSED IN BONE MARROW, SIGNAL = 1.6; SWISSPROT HIT: O15394, EVALUE 6.00e-25
NGKLIEENEKYILKGSNTELTVRNIINSDGGPYVCRATNKAGEDEKQAFLQVF

SEQ ID NO: 30557 - protein, 82 aa, Homo sapiens
  MAP TO CHR22_11.0; EXPRESSED IN LUNG, SIGNAL = 0.78; EXPRESSED IN HEART, SIGNAL = 1.9; EXPRESSED IN PLACENTA, SIGNAL = 0.93; EXPRESSED IN BONE MARROW, SIGNAL = 2.1; EXPRESSED IN ADULT LIVER, SIGNAL = 0.73; SWISSPROT HIT: P32580, EVALUE 4.50e-01
AVVHEDQDGGVFCHLRMSRAPLRAWHTVGLAIPGERFKPCLKRHLLWGAGPSTGGSTFSPFPNLPSADLGTFPLAEFRSFWA

SEQ ID NO: 30558 - protein, 48 aa, Homo sapiens
  MAP TO AL035633.18; EXPRESSED IN BONE MARROW, SIGNAL = 0.41; EXPRESSED IN PLACENTA, SIGNAL = 0.5
LCILIIHAIVLIHISMSNYKFADFFLLFPSLCAFNSLKNKKNITLPQK

SEQ ID NO: 30559 - protein, 36 aa, Homo sapiens
  MAP TO CHR22_120.0; EXPRESSED IN BONE MARROW, SIGNAL = 0.68; EXPRESSED IN LUNG, SIGNAL = 0.64; EXPRESSED IN PLACENTA, SIGNAL = 0.6
DHPRSPGTRGPCLDPHGARRGPRFCHRKSAHPRGRL

SEQ ID NO: 30560 - protein, 27 aa, Homo sapiens
  MAP TO CHR22_52.0; EXPRESSED IN LUNG, SIGNAL =  10; EXPRESSED IN PLACENTA, SIGNAL = 4.5; EXPRESSED IN BONE MARROW, SIGNAL = 7.6; SWISSPROT HIT: P16579, EVALUE 3.90e+00
MDGCGVGWQAQSPGADEGNHGDTGYPH

SEQ ID NO: 30561 - protein, 61 aa, Homo sapiens
  MAP TO CHR22_84.0; EXPRESSED IN BONE MARROW, SIGNAL = 0.6; SWISSPROT HIT: Q01844, EVALUE 5.00e-02
YTTPTAPQAYSQPVQGYGTGAYDTTTATVTTTQASYAAQSAYGTQPAYPAYGQQPAATAPT

SEQ ID NO: 30562 - protein, 22 aa, Homo sapiens
  MAP TO CHR22_84.0; EXPRESSED IN BONE MARROW, SIGNAL = 0.6
LYYSNCPPGIQPACPGVWHWCL

SEQ ID NO: 30563 - protein, 30 aa, Homo sapiens
  MAP TO AL096868.6; EXPRESSED IN PLACENTA, SIGNAL = 0.63; EXPRESSED IN LUNG, SIGNAL = 1.3; EXPRESSED IN ADULT LIVER, SIGNAL = 0.69; EXPRESSED IN BONE MARROW, SIGNAL = 0.69
MTELVLAETCKGAKRQLEGEKNCTPRILYP

SEQ ID NO: 30564 - protein, 149 aa, Homo sapiens
  MAP TO AC018432.4; EXPRESSED IN ADULT LIVER, SIGNAL = 0.58; EXPRESSED IN BONE MARROW, SIGNAL = 0.55; EXPRESSED IN PLACENTA, SIGNAL = 0.48; EXPRESSED IN LUNG, SIGNAL = 0.61; SWISSPROT HIT: P14922, EVALUE 1.20e+00
DQVRLLEENVRNQIPSKPKTKLGSRTTYQCSRSQESLNQNQPSVGMVISVQAQDSFPGQNAFQNQGLYEVQFTSQAQYINHNQESIKSQPESKASNFAQPEDVMKKPFSSSTQDSFQSQDLDRNQHFVEVPSIVEAKYSVKGLESDEHL

SEQ ID NO: 30565 - protein, 25 aa, Homo sapiens
  MAP TO AL139149.1; EXPRESSED IN LUNG, SIGNAL = 0.57; EXPRESSED IN BONE MARROW, SIGNAL = 0.4; EXPRESSED IN PLACENTA, SIGNAL = 0.55
FVFVVALFTRTINTHFFKNDFLYSH

SEQ ID NO: 30566 - protein, 69 aa, Homo sapiens
  MAP TO CHR21_51.0; EXPRESSED IN BONE MARROW, SIGNAL = 0.42
GQREEEEDVGDGWKEEQAKFLCTSGHACAPVLIFYTLQFSELGAPKRLLNLASVLWFSALVAAETLKQK

SEQ ID NO: 30567 - protein, 32 aa, Homo sapiens
  MAP TO CHR21_51.0; EXPRESSED IN BONE MARROW, SIGNAL = 0.42
VGRGRRRKTWEMAGKKNKPNSYVLLGMLVLLF

SEQ ID NO: 30568 - protein, 46 aa, Homo sapiens
  MAP TO AC016672.4; EXPRESSED IN BONE MARROW, SIGNAL = 0.43; EXPRESSED IN LUNG, SIGNAL = 0.48; SWISSPROT HIT: P26639, EVALUE 6.00e-16
IEEEIKGCLQFLQSVYSTFGFSFQLNLSTRPENFLGEIEMWNEAEK

SEQ ID NO: 30569 - protein, 58 aa, Homo sapiens
  MAP TO CHR22_151.0; EXPRESSED IN BONE MARROW, SIGNAL = 0.91; EXPRESSED IN LUNG, SIGNAL = 1.2; EXPRESSED IN ADULT LIVER, SIGNAL = 1.4
SSDCGWPRGKAASSYESDIYEAVAAATSESTTVEPGKLDVGATEGQDLQHISNQKMPT

SEQ ID NO: 30570 - protein, 130 aa, Homo sapiens
  MAP TO AJ239319.2; EXPRESSED IN BONE MARROW, SIGNAL = 1.3; EXPRESSED IN PLACENTA, SIGNAL = 1.3; EXPRESSED IN LUNG, SIGNAL = 3.5; EXPRESSED IN ADULT LIVER, SIGNAL = 2.9; SWISSPROT HIT: P03356, EVALUE 2.00e-14
IPTCPVPLLGRGILTKLPASLTIPRLQPHFIAALFPSSKPPSHPPLVSPHLNPQVWNTSTPSLVTYHAPLTIPLKPNHPYPTQCQYPIPQHALKGLKPVIIRLLQHGLLKPINSPYNSPILPVQKPDKSY

SEQ ID NO: 30571 - protein, 31 aa, Homo sapiens
  MAP TO AC011803.4; EXPRESSED IN PLACENTA, SIGNAL = 0.52; EXPRESSED IN ADULT LIVER, SIGNAL = 0.36; EXPRESSED IN BONE MARROW, SIGNAL = 0.43
MGLSEGKMSRKLTLLRAYIVLGTTLITLLII

SEQ ID NO: 30572 - protein, 132 aa, Homo sapiens
  MAP TO AC005629.2; EXPRESSED IN BONE MARROW, SIGNAL = 0.63; EXPRESSED IN PLACENTA, SIGNAL = 0.5; EXPRESSED IN ADULT LIVER, SIGNAL = 0.56; EXPRESSED IN LUNG, SIGNAL = 0.5; SWISSPROT HIT: P38604, EVALUE 4.00e-01
LMGAAGLAGIRIYRTDEKSLDESKNPPRKLDSDLLVGTASGSWLISWGSILAILCAEDHPHYTWYNLPYSIVVIVEKYIQNLFIFESIHREPKKLSEDIQTLRMVTVCNGNTMPLASSCLKSGGVAGDVAPW

SEQ ID NO: 30573 - protein, 45 aa, Homo sapiens
  MAP TO AL159176.2; EXPRESSED IN LUNG, SIGNAL = 0.61; EXPRESSED IN BONE MARROW, SIGNAL = 0.53; EXPRESSED IN PLACENTA, SIGNAL = 0.59; EXPRESSED IN ADULT LIVER, SIGNAL = 0.65; SWISSPROT HIT: P33218, EVALUE 3.70e+00
YNSDVIDKQSASMTSDNADDKAVIILVPVRLGGERTNTDYLEFVK

SEQ ID NO: 30574 - protein, 33 aa, Homo sapiens
  MAP TO AC011799.5; EXPRESSED IN ADULT LIVER, SIGNAL = 0.37; EXPRESSED IN BONE MARROW, SIGNAL = 0.4
MSPRHSRKNEFLCYQFYIVIKKDDTTACLKVSK

SEQ ID NO: 30575 - protein, 28 aa, Homo sapiens
  MAP TO AC011799.5; EXPRESSED IN ADULT LIVER, SIGNAL = 0.37; EXPRESSED IN BONE MARROW, SIGNAL = 0.4
CHPDTPGKTSSCVISSTLSSKKMTPLLA

SEQ ID NO: 30576 - protein, 22 aa, Homo sapiens
  MAP TO AL160231.1; EXPRESSED IN BONE MARROW, SIGNAL = 4.6; EXPRESSED IN LUNG, SIGNAL =  17; EXPRESSED IN ADULT LIVER, SIGNAL =  16
CWSPGLKEPKLHLMASRVMYLK

SEQ ID NO: 30577 - protein, 58 aa, Homo sapiens
  MAP TO AL137798.1; EXPRESSED IN BONE MARROW, SIGNAL = 1.1; EXPRESSED IN HEART, SIGNAL = 2.7; EXPRESSED IN ADULT LIVER, SIGNAL = 2.8; SWISSPROT HIT: O02626, EVALUE 3.60e+00
AAAVAATRKEVRDAARSPPPPCPRIKVKEVKIDAGVRMRMNLKKENWYSKRMVRSMLR

SEQ ID NO: 30578 - protein, 42 aa, Homo sapiens
  MAP TO AC019325.3; EXPRESSED IN BONE MARROW, SIGNAL = 0.5; EXPRESSED IN ADULT LIVER, SIGNAL = 0.4; SWISSPROT HIT: O00623, EVALUE 2.00e-17
MAEHGAHFTAASVADDQPSIFEVVAQDSLMTAVRPALQHVVK

SEQ ID NO: 30579 - protein, 23 aa, Homo sapiens
  MAP TO AC019325.3; EXPRESSED IN BONE MARROW, SIGNAL = 0.5; EXPRESSED IN ADULT LIVER, SIGNAL = 0.4
WLSTGLTSQLLLWPMTSHPSLRW

SEQ ID NO: 30580 - protein, 71 aa, Homo sapiens
  MAP TO CHR22_175.0; EXPRESSED IN BONE MARROW, SIGNAL = 0.46; EXPRESSED IN ADULT LIVER, SIGNAL = 1.2; SWISSPROT HIT: P14519, EVALUE 4.60e-01
VSVGQRWQDVLPVARKHSRDHILLFNDAHFLMASLGAHDPQTTQELLTTLRDASEYAEGPSRGGGPHPAER

SEQ ID NO: 30581 - protein, 26 aa, Homo sapiens
  MAP TO CHR22_175.0; EXPRESSED IN BONE MARROW, SIGNAL = 0.46; EXPRESSED IN ADULT LIVER, SIGNAL = 1.2; SWISSPROT HIT: P47880, EVALUE 3.90e+00
SVCGPAVAGCPACGPEAQPRPHPAVQ

SEQ ID NO: 30582 - protein, 31 aa, Homo sapiens
  MAP TO CHR22_175.0; EXPRESSED IN BONE MARROW, SIGNAL = 0.46; EXPRESSED IN ADULT LIVER, SIGNAL = 1.2; SWISSPROT HIT: P27713, EVALUE 8.70e+00
ECLWASGGRMSCLWPGSTAETTSCCSMTHTS

SEQ ID NO: 30583 - protein, 24 aa, Homo sapiens
  MAP TO AL136081.1; EXPRESSED IN LUNG, SIGNAL =  17; EXPRESSED IN BONE MARROW, SIGNAL = 9.7
STVASTFLDIFSAMPHPTGTNLLY

SEQ ID NO: 30584 - protein, 49 aa, Homo sapiens
  MAP TO CHR22_172.0; EXPRESSED IN BONE MARROW, SIGNAL = 0.54; EXPRESSED IN PLACENTA, SIGNAL = 0.55; EXPRESSED IN LUNG, SIGNAL = 0.59
GGHSRSGRAAAHPLSHPGTAAAGAGARGGGPGIQAFPCRAAGQQGELAA

SEQ ID NO: 30585 - protein, 58 aa, Homo sapiens
  MAP TO CHR22_172.0; EXPRESSED IN BONE MARROW, SIGNAL = 0.54; EXPRESSED IN PLACENTA, SIGNAL = 0.55; EXPRESSED IN LUNG, SIGNAL = 0.59; SWISSPROT HIT: P53814, EVALUE 5.00e-04
MTCLSHPLQLEVTADLAERRRIRSAIRELQRQELEREEEALASKRFRAERQDNKENWL

SEQ ID NO: 30586 - protein, 40 aa, Homo sapiens
  MAP TO AL138843.2; EXPRESSED IN BONE MARROW, SIGNAL = 0.51; EXPRESSED IN PLACENTA, SIGNAL = 0.57; SWISSPROT HIT: O77503, EVALUE 7.00e-10
EVVDSMVQHFKVTIFGDRRPVYDGKRSLYTANPLPVATTG

SEQ ID NO: 30587 - protein, 57 aa, Homo sapiens; identical to SEQ ID NO: 30114
  MAP TO AL138842.2; EXPRESSED IN PLACENTA, SIGNAL = 3.5; EXPRESSED IN LUNG, SIGNAL =  11; EXPRESSED IN ADULT LIVER, SIGNAL =  12; EXPRESSED IN BONE MARROW, SIGNAL = 3.4; SWISSPROT HIT: P75870, EVALUE 4.70e+00

SEQ ID NO: 30588 - protein, 33 aa, Homo sapiens; identical to SEQ ID NO: 30115
  MAP TO AL138842.2; EXPRESSED IN PLACENTA, SIGNAL = 3.5; EXPRESSED IN LUNG, SIGNAL =  11; EXPRESSED IN ADULT LIVER, SIGNAL =  12; EXPRESSED IN BONE MARROW, SIGNAL = 3.4

SEQ ID NO: 30589 - protein, 17 aa, Homo sapiens
  MAP TO AL137006.2; EXPRESSED IN ADULT LIVER, SIGNAL = 0.59; EXPRESSED IN BONE MARROW, SIGNAL = 0.48
FNLLSFKIIVTETKSEN

SEQ ID NO: 30590 - protein, 62 aa, Homo sapiens
  MAP TO AL137859.2; EXPRESSED IN LUNG, SIGNAL = 0.52; EXPRESSED IN ADULT LIVER, SIGNAL = 0.59; EXPRESSED IN BONE MARROW, SIGNAL = 0.58; SWISSPROT HIT: P07956, EVALUE 1.20e+00
RRLQPKANERKGNKGFKVSGWGSQLEILSNRRTLAGKKEQPLCSDSIDDDTVSNIIKLLICI

SEQ ID NO: 30591 - protein, 59 aa, Homo sapiens
  MAP TO AL137859.2; EXPRESSED IN LUNG, SIGNAL = 0.52; EXPRESSED IN ADULT LIVER, SIGNAL = 0.59; EXPRESSED IN BONE MARROW, SIGNAL = 0.58
KGDFSQRPMREKEIKASRSLVGVHSWKYYPTEELWLERRNSLFAQIALMMILLVILSSS

SEQ ID NO: 30592 - protein, 46 aa, Homo sapiens
  MAP TO CHR19.1; EXPRESSED IN HEART, SIGNAL = 2.5; EXPRESSED IN BONE MARROW, SIGNAL = 1.9; EXPRESSED IN ADULT LIVER, SIGNAL = 0.96; EXPRESSED IN PLACENTA, SIGNAL =   5; EXPRESSED IN FETAL LIVER, SIGNAL = 1.4; EXPRESSED IN LUNG, SIGNAL =   6; SWISSPROT HIT: P02561, EVALUE 4.00e-07
QAEGDVAALNRRIQLVEEELDRAQERLATALQKLEEAEKAADESER

SEQ ID NO: 30593 - protein, 72 aa, Homo sapiens
  MAP TO CHR7.1; EXPRESSED IN PLACENTA, SIGNAL = 1.9; EXPRESSED IN LUNG, SIGNAL = 1.4; EXPRESSED IN BONE MARROW, SIGNAL = 0.84; SWISSPROT HIT: P03224, EVALUE 4.50e+00
LDVALVTQNVTAMNIPSLVTLTWLFTWPRGTSAEACVMTVSTTPWGATVSSASRFTTSTQRGTSEILISVNV

SEQ ID NO: 30594 - protein, 35 aa, Homo sapiens
  MAP TO CHR5.1; EXPRESSED IN HEART, SIGNAL = 1.1; EXPRESSED IN BONE MARROW, SIGNAL = 3.6; EXPRESSED IN ADULT LIVER, SIGNAL = 1.8; EXPRESSED IN FETAL LIVER, SIGNAL = 4.2; EXPRESSED IN LUNG, SIGNAL = 4.5
CASRVQLLVLYRRQLRPNWLAFLKTPTCVLSMPNV

SEQ ID NO: 30595 - protein, 81 aa, Homo sapiens
  MAP TO CHR3.1; EXPRESSED IN BONE MARROW, SIGNAL =   9; EXPRESSED IN HEART, SIGNAL =   4; EXPRESSED IN ADULT LIVER, SIGNAL =  10; EXPRESSED IN PLACENTA, SIGNAL =  23; EXPRESSED IN FETAL LIVER, SIGNAL =  16; EXPRESSED IN LUNG, SIGNAL =  19; SWISSPROT HIT: O54070, EVALUE 5.20e-01
GFTRALIASARALMALALLACIFFRPFLLCFLAKCMFLRNLGSTPLRDSYLCDRGFLIPFLCHFRDWLCVVWFLDFAMSTP

SEQ ID NO: 30596 - protein, 79 aa, Homo sapiens
  MAP TO CHR17.1; EXPRESSED IN HEART, SIGNAL = 0.98; EXPRESSED IN BONE MARROW, SIGNAL = 0.84; EXPRESSED IN ADULT LIVER, SIGNAL = 0.92; EXPRESSED IN FETAL LIVER, SIGNAL = 1.3; EXPRESSED IN LUNG, SIGNAL = 0.79; SWISSPROT HIT: O43791, EVALUE 2.00e-29
LVTKAWLVFPCLSQVSVVQDSVNISGQNTMNMVKVPECRLADELGGLWENSRFTDCCLCVAGQEFQAHKAILAGWYLFM

SEQ ID NO: 30597 - protein, 77 aa, Homo sapiens
  MAP TO CHR16.1; EXPRESSED IN FETAL LIVER, SIGNAL = 1.6; EXPRESSED IN LUNG, SIGNAL = 0.84; EXPRESSED IN HEART, SIGNAL = 1.2; EXPRESSED IN BONE MARROW, SIGNAL = 0.93; EXPRESSED IN ADULT LIVER, SIGNAL = 1.3
LPATMPTCVSTSGRSTFCVRKAAAARSSSPTPSAPRSTSRPTGRPATVAAAPRHARTATSTCSSATRHGTRAGTRVS

SEQ ID NO: 30598 - protein, 63 aa, Homo sapiens
  MAP TO CHR9.1; EXPRESSED IN BONE MARROW, SIGNAL = 1.2; EXPRESSED IN PLACENTA, SIGNAL = 1.2; EXPRESSED IN FETAL LIVER, SIGNAL = 1.4; EXPRESSED IN LUNG, SIGNAL = 1.1; EXPRESSED IN HEART, SIGNAL = 1.4
EPEVIPQVSLVPTLALLLGLPIPFGNIGEVMAELFSGGEDSQPHSSALAQASALHLNAQQVGE

SEQ ID NO: 30599 - protein, 56 aa, Homo sapiens
  MAP TO CHR22.1; EXPRESSED IN BONE MARROW, SIGNAL = 1.1; EXPRESSED IN ADULT LIVER, SIGNAL = 1.5; EXPRESSED IN FETAL LIVER, SIGNAL = 1.9; EXPRESSED IN LUNG, SIGNAL = 1.7; EXPRESSED IN HEART, SIGNAL = 1.4; SWISSPROT HIT: Q14166, EVALUE 8.00e-27
QTAEEKMPVWYIMDEFGSRIQHADVPSFATAPFFYMPQQVAYTLLWPLRDLDTGGK

SEQ ID NO: 30600 - protein, 137 aa, Homo sapiens
  MAP TO CHR5.1; EXPRESSED IN BONE MARROW, SIGNAL = 0.75; EXPRESSED IN FETAL LIVER, SIGNAL = 0.7; EXPRESSED IN LUNG, SIGNAL = 0.61; EXPRESSED IN HEART, SIGNAL = 0.86; SWISSPROT HIT: Q9Y5H8, EVALUE 5.00e-73
VTARDGGSPSLWATASVSVEVADVNDNAPAFSQSEYTVFVKENNPPGCHIFTVSARDADAQENALVSYSLVERRVGERALSSYVSVHAESGKVYALQPLDHEELELLQFQVSARDAGVPPLGSNVTLQVFVLDENDN

SEQ ID NO: 30601 - protein, 52 aa, Homo sapiens
  MAP TO CHR5.1; EXPRESSED IN LUNG, SIGNAL = 0.66; EXPRESSED IN HEART, SIGNAL = 0.99; EXPRESSED IN BONE MARROW, SIGNAL = 0.65; EXPRESSED IN ADULT LIVER, SIGNAL = 0.75
NWHWKIYLVISIAASTEVMSSPQFVDISKCISFFLPNSSCCHLQKLSSIFSP

SEQ ID NO: 30602 - protein, 145 aa, Homo sapiens
  MAP TO CHR19.1; EXPRESSED IN BONE MARROW, SIGNAL = 1.1; EXPRESSED IN HEART, SIGNAL = 0.92; EXPRESSED IN PLACENTA, SIGNAL = 1.6; EXPRESSED IN FETAL LIVER, SIGNAL = 0.84; EXPRESSED IN LUNG, SIGNAL = 0.74; SWISSPROT HIT: O75298, EVALUE 7.00e-52
TAGGNDDSDFRELHTAREFSEEDEEETTSQDWGTPRELTFSYIAFDGVVGSGGRRDSTARRPRPQGRSVSEPRDQHPQPSLGDSLESIPSLSQSPEPGRRGDPDTAPPSERPLEDLRLRLDHLGWVARGTGSGEDSSTSSSTPLE

SEQ ID NO: 30603 - protein, 67 aa, Homo sapiens
  MAP TO CHR11.1; EXPRESSED IN HEART, SIGNAL = 1.1; EXPRESSED IN BONE MARROW, SIGNAL = 0.56; EXPRESSED IN ADULT LIVER, SIGNAL = 1.3
WFGEDDPPLPTAGGILVEGGHAVSGGSQALGAQEGQGGGLIALLADLGHIFQAVLGPALGVCHVVGD

SEQ ID NO: 30604 - protein, 61 aa, Homo sapiens
  MAP TO CHR12.1; EXPRESSED IN LUNG, SIGNAL = 0.74; EXPRESSED IN BONE MARROW, SIGNAL = 0.51; EXPRESSED IN FETAL LIVER, SIGNAL = 0.63; SWISSPROT HIT: Q9Y2J0, EVALUE 8.00e-24
PTLPFPPMQQVERVGDIEERGKILVSLMYSTQQGGLIVGIIRCVHLAAMDANGYSDPFVKL

SEQ ID NO: 30605 - protein, 52 aa, Homo sapiens
  MAP TO CHR12.1; EXPRESSED IN BONE MARROW, SIGNAL = 1.9; EXPRESSED IN HEART, SIGNAL = 1.5; EXPRESSED IN ADULT LIVER, SIGNAL = 2.7; EXPRESSED IN PLACENTA, SIGNAL = 2.3; EXPRESSED IN FETAL LIVER, SIGNAL = 2.6; EXPRESSED IN LUNG, SIGNAL = 1.2; SWISSPROT HIT: Q10107, EVALUE 1.00e-14
QSLLMLMDSPLNRAGLLQVYIHTQKNVLIEVNPQTRIPRTFDRFCGLMGKKP

SEQ ID NO: 30606 - protein, 66 aa, Homo sapiens
  MAP TO CHR12.1; EXPRESSED IN BONE MARROW, SIGNAL = 0.53; SWISSPROT HIT: O89091, EVALUE 2.70e+00
PSPVLGRTHGPNYPRSAWLIRGNSQPHPNTKAPSVTKLLNGINPVPTMCSLVRLPSNTCSIIAFRP

SEQ ID NO: 30607 - protein, 33 aa, Homo sapiens
  MAP TO CHR19.1; EXPRESSED IN BONE MARROW, SIGNAL = 0.5; EXPRESSED IN FETAL LIVER, SIGNAL = 0.4; EXPRESSED IN LUNG, SIGNAL = 0.56
IFTFIVPAVLLLIDTTYLFINKCIHSKNVDNQT

SEQ ID NO: 30608 - protein, 68 aa, Homo sapiens
  MAP TO CHR7.1; EXPRESSED IN BONE MARROW, SIGNAL = 0.69; EXPRESSED IN FETAL LIVER, SIGNAL = 0.59; EXPRESSED IN LUNG, SIGNAL = 0.85; SWISSPROT HIT: O84252, EVALUE 1.20e+00
LLVIFTPTISPWGLSLTPKWMVPLVREFIQADANRKTSLLNFILMSTSVAVSVFVRALNSCIGSMRLS

SEQ ID NO: 30609 - protein, 37 aa, Homo sapiens
  MAP TO CHR17.1; EXPRESSED IN HEART, SIGNAL = 1.2; EXPRESSED IN BONE MARROW, SIGNAL = 0.64; EXPRESSED IN LUNG, SIGNAL = 1.2; EXPRESSED IN FETAL LIVER, SIGNAL = 1.2
YFPQGLGTAEVRMEAASDPLEGSVRQKAATVSPVGER

SEQ ID NO: 30610 - protein, 87 aa, Homo sapiens
  MAP TO CHR22.1; EXPRESSED IN HEART, SIGNAL = 0.86; EXPRESSED IN BONE MARROW, SIGNAL = 0.55; EXPRESSED IN FETAL LIVER, SIGNAL = 0.8; EXPRESSED IN LUNG, SIGNAL = 0.74
SIHPHPSSPHWSQPTLRHLRTPRDSRNGLNSVGRSPGIRHEVTSRPLSGLPALPSAGLLSACQTGSSVGPRSLWQDGGTPGYSLPCP

SEQ ID NO: 30611 - protein, 74 aa, Homo sapiens
  MAP TO CHR9.1; EXPRESSED IN ADULT LIVER, SIGNAL = 0.71; EXPRESSED IN BONE MARROW, SIGNAL = 0.73; SWISSPROT HIT: P10451, EVALUE 2.80e+00
SYLLGSSIFSQLFMLHEEIFPVSEGFSDLVPFVDSLDFEGGDVLYGCDGQGTVLQHELDHFMALTKQSIIKGCV

SEQ ID NO: 30612 - protein, 59 aa, Homo sapiens
  MAP TO CHR15.1; EXPRESSED IN BONE MARROW, SIGNAL = 0.85; EXPRESSED IN FETAL LIVER, SIGNAL = 0.79; EXPRESSED IN HEART, SIGNAL = 0.97
VLVCLCNCMGQTLHLKSLPKVEVIHFLLHTHHTQTQRLFNPSENAFHKICKELGQRDPW

SEQ ID NO: 30613 - protein, 42 aa, Homo sapiens
  MAP TO CHR17.1; EXPRESSED IN HEART, SIGNAL = 0.6; EXPRESSED IN ADULT LIVER, SIGNAL = 0.47; EXPRESSED IN BONE MARROW, SIGNAL = 0.5; SWISSPROT HIT: Q06805, EVALUE 8.40e+00
HSWKILKLPSSLQSESFPLLVWKKPRGVKTEHLDRISSGQAF

SEQ ID NO: 30614 - protein, 112 aa, Homo sapiens
  MAP TO CHR2.1; EXPRESSED IN HEART, SIGNAL = 1.3; EXPRESSED IN BONE MARROW, SIGNAL = 0.72; EXPRESSED IN FETAL LIVER, SIGNAL = 0.58; SWISSPROT HIT: Q02173, EVALUE 7.00e-11
LSDIHSYLFCLLTAPPKAELDARLHGDLVTIRAGSDLVLDAAVGGKPEPKIIWTKGDKELDLCEKVSLQYTGKRATAVIKFCDRSDSGKYTLTVKNASGTKAVSVMVKVLGK

SEQ ID NO: 30615 - protein, 56 aa, Homo sapiens
  MAP TO CHR8.1; EXPRESSED IN BONE MARROW, SIGNAL = 0.54; EXPRESSED IN ADULT LIVER, SIGNAL = 0.42; EXPRESSED IN LUNG, SIGNAL = 0.63; EXPRESSED IN FETAL LIVER, SIGNAL = 0.52; EXPRESSED IN HEART, SIGNAL = 0.64; SWISSPROT HIT: P32945, EVALUE 3.60e+00
VYLSPCYTNSREYSFIHDTLNQCRLDVNCDLQSLWQFGDTKLVHNEELEKNFTAKR

SEQ ID NO: 30616 - protein, 35 aa, Homo sapiens
  MAP TO CHR15.1; EXPRESSED IN LUNG, SIGNAL = 0.92; EXPRESSED IN PLACENTA, SIGNAL = 1.8; EXPRESSED IN HEART, SIGNAL = 1.5; EXPRESSED IN BONE MARROW, SIGNAL = 0.66; SWISSPROT HIT: P35670, EVALUE 5.00e+00
VLFQIGVQVNDEIPYSNVPFIPTVVCLNRVCIHSF

SEQ ID NO: 30617 - protein, 71 aa, Homo sapiens
  MAP TO CHRX.1; EXPRESSED IN BONE MARROW, SIGNAL = 0.56; EXPRESSED IN HEART, SIGNAL = 0.68; SWISSPROT HIT: O14627, EVALUE 1.00e-33
VFQVKIWFQNRRAKERKMIKKKISQFENSGGSVQSDSDSISPGELPNTFFTTPSAVRGFQPIEIQQVIVSE

SEQ ID NO: 30618 - protein, 84 aa, Homo sapiens
  MAP TO CHR5.1; EXPRESSED IN HEART, SIGNAL =   1; EXPRESSED IN BONE MARROW, SIGNAL = 0.67; EXPRESSED IN FETAL LIVER, SIGNAL = 0.8; EXPRESSED IN LUNG, SIGNAL = 1.3; SWISSPROT HIT: P08542, EVALUE 3.50e+00
NEISIQVGEYFDVLVLLQFSCFRKYVGLDLVQSGSLGFLFLMDLIYSSVKSLILGLGQRGHIQQNSCLFPILVHGSLQGLGVVV

SEQ ID NO: 30619 - protein, 86 aa, Homo sapiens
  MAP TO CHR5.1; EXPRESSED IN FETAL LIVER, SIGNAL = 1.3; EXPRESSED IN LUNG, SIGNAL = 1.3; EXPRESSED IN BONE MARROW, SIGNAL = 0.95; SWISSPROT HIT: O96008, EVALUE 4.00e-29
HKPSDQLQVDVEFEASTRMQDTNVSFGYQLDLPKANLLFKGSVDSNWIVGATLEKKLPPLPLTLALGAFLNHRKNKLRSGFGLTIS

SEQ ID NO: 30620 - protein, 30 aa, Homo sapiens
  MAP TO CHR5.1; EXPRESSED IN BONE MARROW, SIGNAL = 0.4
HGFHHYSKYDQKAIQIFNAVQLLHVKSSSH

SEQ ID NO: 30621 - protein, 97 aa, Homo sapiens
  MAP TO CHR5.1; EXPRESSED IN FETAL LIVER, SIGNAL = 0.72; EXPRESSED IN HEART, SIGNAL = 0.69; EXPRESSED IN BONE MARROW, SIGNAL = 0.68; SWISSPROT HIT: Q9UN72, EVALUE 7.00e-51
LAAWEAGRGQLHYSVPEEAKHGNFVGRIAQDLGLELAELVPRLFRAVCKFRGDLLEVNLQNGILFVNSRIDREELCGRSAECSIHLEVIVERPLQVF

SEQ ID NO: 30622 - protein, 60 aa, Homo sapiens
  MAP TO CHR12.1; EXPRESSED IN FETAL LIVER, SIGNAL = 1.1; EXPRESSED IN LUNG, SIGNAL = 1.7; EXPRESSED IN BONE MARROW, SIGNAL =   1
LAATLFLLVYPVGHSFERPLRVGHHVLDCLQLLLCWINGRMLCHHMAVIIHKNSHWTLGM

SEQ ID NO: 30623 - protein, 52 aa, Homo sapiens
  MAP TO CHR12.1; EXPRESSED IN BONE MARROW, SIGNAL =  11; EXPRESSED IN FETAL LIVER, SIGNAL =  12
LPKLGVGNVGKSIELVADTLWDLGLNLLGLYEGLDSLGTCTHGLGIVGLHLL

SEQ ID NO: 30624 - protein, 60 aa, Homo sapiens
  MAP TO AC023171.2; EXPRESSED IN ADULT LIVER, SIGNAL = 2.3; EXPRESSED IN PLACENTA, SIGNAL = 1.7; EXPRESSED IN FETAL LIVER, SIGNAL =   2; EXPRESSED IN LUNG, SIGNAL = 1.3; EXPRESSED IN BONE MARROW, SIGNAL =   2; EXPRESSED IN HEART, SIGNAL = 1.6; SWISSPROT HIT: Q60716, EVALUE 3.00e-21
FLWFHSWANKMEALTSKSAADAEGYLAHPVNAYKLVKRLNTDWPALEDLVLQDSAAGEGR

SEQ ID NO: 30625 - protein, 63 aa, Homo sapiens
  MAP TO CHR17.1; EXPRESSED IN HEART, SIGNAL = 0.55; EXPRESSED IN BONE MARROW, SIGNAL = 0.39
SPCLKHACLPDEEEEEENLDDQDEQGNLKGFINDDDDEDEGEEDEGSDSGDSEDDVGHKKRKR

SEQ ID NO: 30626 - protein, 87 aa, Homo sapiens
  MAP TO CHR5.1; EXPRESSED IN FETAL LIVER, SIGNAL = 0.79; EXPRESSED IN LUNG, SIGNAL = 0.62; EXPRESSED IN HEART, SIGNAL = 0.72; EXPRESSED IN BONE MARROW, SIGNAL = 0.95; EXPRESSED IN ADULT LIVER, SIGNAL =   1; SWISSPROT HIT: P33485, EVALUE 2.20e+00
ASVFIAQRKKKEVSKLWQTHWAFSSCSGSCRGWAEHALCQGQGGRHSLQSQAAKMRWRGSGPLSKMGVHRKRPLLSAQAGSQLAMSH

SEQ ID NO: 30627 - protein, 39 aa, Homo sapiens
  MAP TO CHR7.1; EXPRESSED IN ADULT LIVER, SIGNAL = 0.93; EXPRESSED IN BONE MARROW, SIGNAL = 0.43; EXPRESSED IN HEART, SIGNAL = 0.92; EXPRESSED IN LUNG, SIGNAL = 0.62; SWISSPROT HIT: P07942, EVALUE 1.00e-19
CACNPLGTIPGGNPCDSETGHCYCKRLVTGQHCDQCLVS

SEQ ID NO: 30628 - protein, 143 aa, Homo sapiens
  MAP TO CHR19.1; EXPRESSED IN ADULT LIVER, SIGNAL = 1.1; EXPRESSED IN FETAL LIVER, SIGNAL = 2.1; EXPRESSED IN LUNG, SIGNAL = 3.3; EXPRESSED IN HEART, SIGNAL = 3.1; EXPRESSED IN BONE MARROW, SIGNAL = 1.3; SWISSPROT HIT: Q9Y6R0, EVALUE 1.00e-61
APVGPFDAAPAQVAVFLPPPHMQPPFVPAYPGLGYPPMPRVPVVGITPSQMVANAFCSAAQLQPQPATLLGKAGAFPPPAIPSAPGSQARPRPNGAPWPPEPAPAPAPELDPFEAQWAALEGKATVEKPSNPFSGDLQKTFET

SEQ ID NO: 30629 - protein, 69 aa, Homo sapiens
  MAP TO CHR5.1; EXPRESSED IN FETAL LIVER, SIGNAL = 1.9; EXPRESSED IN PLACENTA, SIGNAL = 1.4; EXPRESSED IN LUNG, SIGNAL = 1.3; EXPRESSED IN ADULT LIVER, SIGNAL = 2.6; EXPRESSED IN HEART, SIGNAL = 1.5; EXPRESSED IN BONE MARROW, SIGNAL = 1.5; SWISSPROT HIT: Q52523, EVALUE 3.30e+00
THHTGSLHSFRESPCMGLAPEGCALEALTAQVSDEAKGVWVAANTNKCHKAHRALPQWLLLCTGLCLPT

SEQ ID NO: 30630 - protein, 53 aa, Homo sapiens
  MAP TO CHR2.1; EXPRESSED IN LUNG, SIGNAL = 0.98; EXPRESSED IN HEART, SIGNAL = 1.2; EXPRESSED IN BONE MARROW, SIGNAL =   1; SWISSPROT HIT: O15142, EVALUE 1.00e-12
AGLLTGVVVDSGDGVTHICPVYEGFSLPHLTRRLDIAGRDITRYLIKVSERKI

SEQ ID NO: 30631 - protein, 83 aa, Homo sapiens
  MAP TO CHR19.1; EXPRESSED IN FETAL LIVER, SIGNAL = 2.3; EXPRESSED IN LUNG, SIGNAL = 1.1; EXPRESSED IN HEART, SIGNAL = 1.3; EXPRESSED IN BONE MARROW, SIGNAL = 1.5; EXPRESSED IN ADULT LIVER, SIGNAL = 2.6; EXPRESSED IN PLACENTA, SIGNAL = 2.8; SWISSPROT HIT: P19747, EVALUE 4.60e+00
DVKFDAVSGDYYPIIYFNDYWNLQKDYYPINESLASLPLRVSFCPLSLWRWQLYAAQSTKSPWNFLGDELYEQSDEEQDSVKV

SEQ ID NO: 30632 - protein, 86 aa, Homo sapiens
  MAP TO CHR17.1; EXPRESSED IN PLACENTA, SIGNAL = 3.5; EXPRESSED IN LUNG, SIGNAL = 1.5; EXPRESSED IN ADULT LIVER, SIGNAL = 9.1; EXPRESSED IN BONE MARROW, SIGNAL = 2.7; SWISSPROT HIT: Q9Y252, EVALUE 7.20e-02
HSRCVDPWLTQTRKTCPICKQPVHRGPGDEDQEEETQGQEEGDEGEPRDHPASERTPLLGSSPTLPTSFGSLAPAPLVFPGPSTDP

SEQ ID NO: 30633 - protein, 43 aa, Homo sapiens
  MAP TO CHR6.1; EXPRESSED IN BONE MARROW, SIGNAL = 2.4; EXPRESSED IN HEART, SIGNAL = 2.2; EXPRESSED IN ADULT LIVER, SIGNAL = 2.2; EXPRESSED IN PLACENTA, SIGNAL = 2.8; EXPRESSED IN FETAL LIVER, SIGNAL = 2.6; EXPRESSED IN LUNG, SIGNAL = 3.3; SWISSPROT HIT: P39932, EVALUE 2.90e+00
SSGGRGAGTPSSAIRIWQKTMVSSRKRSLLAGFGSSTGSWRRT

SEQ ID NO: 30634 - protein, 63 aa, Homo sapiens
  MAP TO CHR17.1; EXPRESSED IN HEART, SIGNAL = 1.8; EXPRESSED IN BONE MARROW, SIGNAL = 1.6; EXPRESSED IN ADULT LIVER, SIGNAL = 2.1; EXPRESSED IN PLACENTA, SIGNAL = 1.7; EXPRESSED IN LUNG, SIGNAL = 1.6; EXPRESSED IN FETAL LIVER, SIGNAL = 1.3; SWISSPROT HIT: Q9P286, EVALUE 1.30e-02
CLQRSQFPVLHMEVIVHLLLQISDALRYLHFQGFIHRSLSSYAVHIISPGEARLTNLEYMLER

SEQ ID NO: 30635 - protein, 105 aa, Homo sapiens
  MAP TO CHR17.1; EXPRESSED IN FETAL LIVER, SIGNAL = 0.63; EXPRESSED IN LUNG, SIGNAL = 1.4; EXPRESSED IN BONE MARROW, SIGNAL = 0.7; EXPRESSED IN ADULT LIVER, SIGNAL = 1.2; SWISSPROT HIT: Q9UKX3, EVALUE 1.00e-50
GSLEHEESKILRVQLELSQVKSELDRKVIEKDEEIEQLKRNSQRAAEALQSVLDAEIRSRNDALRLKKKMEGDLNEMEIQLGHSNRQMAETQKHLRTVQGQLKVS

SEQ ID NO: 30636 - protein, 48 aa, Homo sapiens
  MAP TO CHR11.1; EXPRESSED IN HEART, SIGNAL = 0.66; EXPRESSED IN ADULT LIVER, SIGNAL = 0.67; EXPRESSED IN BONE MARROW, SIGNAL = 0.89; EXPRESSED IN FETAL LIVER, SIGNAL = 1.1; SWISSPROT HIT: Q99733, EVALUE 2.00e-21
SLPKAVKRRINALKQLQVRCAHIEAKFYEEVHDLERKYAALYQPLFDK

SEQ ID NO: 30637 - protein, 80 aa, Homo sapiens
  MAP TO CHR14.1; EXPRESSED IN HEART, SIGNAL = 0.87; EXPRESSED IN BONE MARROW, SIGNAL = 0.67; EXPRESSED IN FETAL LIVER, SIGNAL = 0.59; EXPRESSED IN LUNG, SIGNAL = 0.89; SWISSPROT HIT: P79802, EVALUE 1.00e-36
FREVFKTYNVAVDYITVALLIWNFGVVGMISIHWKGPLRLQQAYLIMISALMALVFIKYLPEWTAWLILAVISVYGKTQD

SEQ ID NO: 30638 - protein, 64 aa, Homo sapiens
  MAP TO CHR22.1; EXPRESSED IN HEART, SIGNAL = 0.56; EXPRESSED IN ADULT LIVER, SIGNAL =   1; EXPRESSED IN BONE MARROW, SIGNAL = 0.77; EXPRESSED IN LUNG, SIGNAL = 0.61
ELPSSSEKPMSAQGRNGAWKVSRPKKLTLTRGLRRLHTYTSMAMRAWPRKNRLPRSPSSWARVK

SEQ ID NO: 30639 - protein, 55 aa, Homo sapiens
  MAP TO CHR14.1; EXPRESSED IN BONE MARROW, SIGNAL = 0.68; EXPRESSED IN LUNG, SIGNAL = 0.76; EXPRESSED IN FETAL LIVER, SIGNAL = 0.52; EXPRESSED IN HEART, SIGNAL = 0.76; SWISSPROT HIT: P04436, EVALUE 1.00e-07
QMILVIRQEAYKQQNATENRFSVNFQKAAKSFSLKISDSQLGDAAMYFCAYRSAQ

SEQ ID NO: 30640 - protein, 39 aa, Homo sapiens
  MAP TO CHR7.1; EXPRESSED IN BONE MARROW, SIGNAL = 0.46; EXPRESSED IN LUNG, SIGNAL = 0.57
ILIFGLRFLLRKDAVSLLLKKSQHLTWLLSLSTGILQFM

SEQ ID NO: 30641 - protein, 66 aa, Homo sapiens
  MAP TO CHR18.1; EXPRESSED IN HEART, SIGNAL = 1.6; EXPRESSED IN BONE MARROW, SIGNAL = 1.8; EXPRESSED IN ADULT LIVER, SIGNAL = 1.9; EXPRESSED IN FETAL LIVER, SIGNAL = 1.8; EXPRESSED IN LUNG, SIGNAL = 1.1; SWISSPROT HIT: Q04952, EVALUE 4.10e-01
PASLFLDFTLGSTSTSSVSRGKLSGRIKYRMLFPRILSVSSCTGSLFFRVIFTALRCVFMLTSTPK

SEQ ID NO: 30642 - protein, 46 aa, Homo sapiens
  MAP TO CHR12.1; EXPRESSED IN PLACENTA, SIGNAL = 1.8; EXPRESSED IN FETAL LIVER, SIGNAL = 1.5; EXPRESSED IN LUNG, SIGNAL = 0.89; EXPRESSED IN HEART, SIGNAL =   1; EXPRESSED IN ADULT LIVER, SIGNAL = 1.7; EXPRESSED IN BONE MARROW, SIGNAL = 1.7
CLQDQKCHGRVLAEKRLKWRTGAFLIRYDANLTFTLSWRPRPPRLL

SEQ ID NO: 30643 - protein, 77 aa, Homo sapiens
  MAP TO CHR1.1; EXPRESSED IN LUNG, SIGNAL = 9.3; EXPRESSED IN HEART, SIGNAL = 4.8; EXPRESSED IN BONE MARROW, SIGNAL = 3.5; EXPRESSED IN ADULT LIVER, SIGNAL = 1.8; SWISSPROT HIT: P41182, EVALUE 1.20e-01
VTVQTWPSPRTTPHTTGPEYGTEIASRNPNHKDTNLLRGGPQVPEEHALCQEAQQEGPKEDAGQQCQGHECTCKGYQ

SEQ ID NO: 30644 - protein, 73 aa, Homo sapiens
  MAP TO CHR17.1; EXPRESSED IN HEART, SIGNAL = 1.1; EXPRESSED IN BONE MARROW, SIGNAL = 1.5; SWISSPROT HIT: O51155, EVALUE 3.50e-01
CSRTEATQIKMVSGIFLALATIHMFVQEKKVGARRHERLLLKKSLFVPATVARLFGESILKVQLPQQHGQGQC

SEQ ID NO: 30645 - protein, 109 aa, Homo sapiens
  MAP TO CHR20.1; EXPRESSED IN LUNG, SIGNAL = 0.79; EXPRESSED IN HEART, SIGNAL = 0.53; EXPRESSED IN BONE MARROW, SIGNAL = 0.61; SWISSPROT HIT: P52741, EVALUE 2.00e-09
SCVPLRERQIKCPKCDKLFLRTNHLKKHLNSHEGKRDYVCEKCTKAYLTKYHLTRHLKTCKGPTSSSSAPEEEEEDDSEEEDLADSVGTEDCRINSAVYSADESLSAHK

SEQ ID NO: 30646 - protein, 43 aa, Homo sapiens
  MAP TO CHR5.1; EXPRESSED IN ADULT LIVER, SIGNAL = 1.4; EXPRESSED IN BONE MARROW, SIGNAL = 1.1; EXPRESSED IN FETAL LIVER, SIGNAL = 0.72; EXPRESSED IN HEART, SIGNAL = 0.57
AIFSCMRHKDYIIIIKMSAGPSLSQAPAGMIHLTNDTVSAYGD

SEQ ID NO: 30647 - protein, 44 aa, Homo sapiens
  MAP TO CHR19.1; EXPRESSED IN HEART, SIGNAL = 2.1; EXPRESSED IN BONE MARROW, SIGNAL = 2.8; EXPRESSED IN ADULT LIVER, SIGNAL = 2.9
PPNLLLPPFLVLFQAPDLLQEAAPLLPQPHDLLIGISIILFPSP

SEQ ID NO: 30648 - protein, 99 aa, Homo sapiens
  MAP TO CHR8.1; EXPRESSED IN ADULT LIVER, SIGNAL = 1.2; EXPRESSED IN BONE MARROW, SIGNAL = 0.83; EXPRESSED IN FETAL LIVER, SIGNAL = 0.73; EXPRESSED IN LUNG, SIGNAL = 0.66; EXPRESSED IN HEART, SIGNAL = 0.88; SWISSPROT HIT: Q90922, EVALUE 5.00e+00
TVFQARVLGHHHQAQETRYEVRIQLVYKNRSPLRAREYVWAPGHCPCPMLAPHRDYLMAVQRLVSPDGTQDQLLLPHAGYARPWSPAEDSRIRLTARRC

SEQ ID NO: 30649 - protein, 70 aa, Homo sapiens
  MAP TO CHR2.1; EXPRESSED IN BONE MARROW, SIGNAL = 0.64; EXPRESSED IN FETAL LIVER, SIGNAL = 0.6; SWISSPROT HIT: P19447, EVALUE 3.00e-35
EMIEELQKRCIHLEYPLLAEYDFRNDSVNPDINIDLKPTAVLRPYQEKSLRKMFGNGRARSGVIVLPCGK

SEQ ID NO: 30650 - protein, 101 aa, Homo sapiens
  MAP TO CHR1.1; EXPRESSED IN PLACENTA, SIGNAL = 3.1; EXPRESSED IN FETAL LIVER, SIGNAL = 0.87; EXPRESSED IN LUNG, SIGNAL = 1.4; EXPRESSED IN HEART, SIGNAL = 1.4; EXPRESSED IN BONE MARROW, SIGNAL = 0.89
PRLEAGWPANKVEVQVVQLQVNEHLLAGSFHQALLMVRSPQLAGDEELLTLHHLLPELLPNGHPHVILILVHVGTVDVAVPNINGHLHSLSYLAWRGIPGA

SEQ ID NO: 30651 - protein, 56 aa, Homo sapiens
  MAP TO CHR15.1; EXPRESSED IN FETAL LIVER, SIGNAL = 1.5; EXPRESSED IN ADULT LIVER, SIGNAL = 1.6; EXPRESSED IN BONE MARROW, SIGNAL =   1; SWISSPROT HIT: P51448, EVALUE 2.00e-26
LQLICKVSTLRALCGRHTEKLMAFKAIYPDIVRLHFPPLYKELFTSEFEPAMQIDG

SEQ ID NO: 30652 - protein, 40 aa, Homo sapiens
  MAP TO CHR20.1; EXPRESSED IN BONE MARROW, SIGNAL = 0.63; EXPRESSED IN FETAL LIVER, SIGNAL = 0.69; EXPRESSED IN PLACENTA, SIGNAL = 3.7
LAGDARAVIDRAAGVRQRGDQAALLWAGHGARAQFGQCHV

SEQ ID NO: 30653 - protein, 90 aa, Homo sapiens
  MAP TO CHR7.1; EXPRESSED IN HEART, SIGNAL = 4.9; EXPRESSED IN BONE MARROW, SIGNAL = 3.7; EXPRESSED IN ADULT LIVER, SIGNAL = 1.3; EXPRESSED IN FETAL LIVER, SIGNAL = 4.3; EXPRESSED IN LUNG, SIGNAL = 6.9; SWISSPROT HIT: P21333, EVALUE 2.00e-41
SADSKAIVDGNLKLILGLIWTLILHYSISMPMWEDEDDEDARKQTPKQRLLGWIQNKVPQLPITNFNRDWQDGKALGALVDNCAPGEWAS

SEQ ID NO: 30654 - protein, 59 aa, Homo sapiens
  MAP TO CHR6.1; EXPRESSED IN PLACENTA, SIGNAL = 1.5; EXPRESSED IN FETAL LIVER, SIGNAL = 1.3; EXPRESSED IN LUNG, SIGNAL = 4.8; EXPRESSED IN BONE MARROW, SIGNAL = 0.69; EXPRESSED IN HEART, SIGNAL = 1.1; SWISSPROT HIT: P35114, EVALUE 2.10e+00
KSVIVIITQNTQMTNMASTKVTALEITNMATKALITRFTEKNSVFSLLFSFSENQAIFK

SEQ ID NO: 30655 - protein, 51 aa, Homo sapiens
  MAP TO CHR14.1; EXPRESSED IN LUNG, SIGNAL = 1.1; EXPRESSED IN BONE MARROW, SIGNAL =   1; EXPRESSED IN HEART, SIGNAL = 1.1; EXPRESSED IN ADULT LIVER, SIGNAL = 1.6; SWISSPROT HIT: P10220, EVALUE 8.20e+00
RRALLLLLTVHRAGATHMPGAGSARLLRAEHPGGAATGLQRAHCQPATARP

SEQ ID NO: 30656 - protein, 78 aa, Homo sapiens
  MAP TO CHR11.1; EXPRESSED IN PLACENTA, SIGNAL =  23; EXPRESSED IN LUNG, SIGNAL =  23; EXPRESSED IN BONE MARROW, SIGNAL = 5.6; EXPRESSED IN HEART, SIGNAL = 3.2; SWISSPROT HIT: P46405, EVALUE 2.00e-39
NCDEPMYVKLVEALCAEHQINLIKVDANKKLGEWVGLCKIDREGKPHKVVGYSCVVVKDYGKESQAKDVIEEYFKCKK

SEQ ID NO: 30657 - protein, 90 aa, Homo sapiens
  MAP TO CHR6.1; EXPRESSED IN HEART, SIGNAL = 1.5; EXPRESSED IN BONE MARROW, SIGNAL = 1.1; EXPRESSED IN ADULT LIVER, SIGNAL = 1.9; EXPRESSED IN PLACENTA, SIGNAL = 3.3; EXPRESSED IN FETAL LIVER, SIGNAL = 1.5; EXPRESSED IN LUNG, SIGNAL = 2.3; SWISSPROT HIT: O35984, EVALUE 2.00e-31
ACMLGLSIRSSQEEEPVDPQLMRLDNMLLAEGVAGPEKGGGSAAAAAAAAASGGGVSPDNSIEHSDYRSKLAQIRHIYHSELEKYEQVRR

SEQ ID NO: 30658 - protein, 66 aa, Homo sapiens
  MAP TO CHR17.1; EXPRESSED IN HEART, SIGNAL = 1.4; EXPRESSED IN BONE MARROW, SIGNAL = 0.73; EXPRESSED IN FETAL LIVER, SIGNAL = 1.2; EXPRESSED IN LUNG, SIGNAL = 0.96
LLVNEASLLELEVEELLQGAGTAAVLAVRGVVLATVGDDPLQVGHKELPGHVVAASQPLSHGLQVW

SEQ ID NO: 30659 - protein, 62 aa, Homo sapiens
  MAP TO CHR6.1; EXPRESSED IN FETAL LIVER, SIGNAL = 1.9; EXPRESSED IN LUNG, SIGNAL = 2.5; EXPRESSED IN BONE MARROW, SIGNAL = 1.4; EXPRESSED IN HEART, SIGNAL = 1.3
REGTFTSLPRLGAPACSAPLPLASAPGPPAPSPAGRSPAPALPPAGPAPPPAPAPAAPQSAA

SEQ ID NO: 30660 - protein, 81 aa, Homo sapiens
  MAP TO CHR19.1; EXPRESSED IN ADULT LIVER, SIGNAL = 1.9; EXPRESSED IN BONE MARROW, SIGNAL = 1.2; EXPRESSED IN FETAL LIVER, SIGNAL = 1.9; EXPRESSED IN LUNG, SIGNAL = 1.1
LTLYSKSANSRPPRPPLNPPRNPRGAVKVPPLPPPRPLPPRKPRPPLPLYPPRPRFGRSGIPNVSAFNLLSSAQVGLRSLL

SEQ ID NO: 30661 - protein, 116 aa, Homo sapiens
  MAP TO CHR17.1; EXPRESSED IN LUNG, SIGNAL = 0.61; EXPRESSED IN HEART, SIGNAL = 0.76; EXPRESSED IN ADULT LIVER, SIGNAL = 0.71; EXPRESSED IN BONE MARROW, SIGNAL = 0.55; EXPRESSED IN FETAL LIVER, SIGNAL = 0.49; SWISSPROT HIT: Q09415, EVALUE 4.00e-04
PLKGRCLVATKDILPGELLVQEDAFVSVLNPGELPPPHHGLDSKWDTRVTNGDLYCHRCLKHTLATVPCDGCSYAKYCSQECLQQAWELYHRTECPLGGLLLTLGVFCHIALRLTL

SEQ ID NO: 30662 - protein, 86 aa, Homo sapiens
  MAP TO CHR10.1; EXPRESSED IN BONE MARROW, SIGNAL = 0.78; EXPRESSED IN ADULT LIVER, SIGNAL = 1.6; EXPRESSED IN FETAL LIVER, SIGNAL = 0.85; EXPRESSED IN LUNG, SIGNAL = 0.77; SWISSPROT HIT: O08586, EVALUE 7.00e-44
YLFTTVAQYPFEDHNPPQLELIKPFCEDLDQWLSEDDNHVAAIHCKAGKGRTGVMICAYLLHRGKFLKAQEALDFYGEVRTRDKKV

SEQ ID NO: 30663 - protein, 82 aa, Homo sapiens
  MAP TO CHR19.1; EXPRESSED IN FETAL LIVER, SIGNAL = 2.1; EXPRESSED IN LUNG, SIGNAL = 0.67; EXPRESSED IN HEART, SIGNAL = 0.52; EXPRESSED IN BONE MARROW, SIGNAL = 1.2; EXPRESSED IN ADULT LIVER, SIGNAL = 0.91; SWISSPROT HIT: O95782, EVALUE 3.00e-37
HSPPVQFSLLHSKFHLCSVATRALLLSTYIKFINLFPETKATIQGVLRAGSQLRNADVELQQRAVEYLTLSSVASTDVLVRA

SEQ ID NO: 30664 - protein, 41 aa, Homo sapiens
  MAP TO CHR16.1; EXPRESSED IN FETAL LIVER, SIGNAL = 0.51; EXPRESSED IN LUNG, SIGNAL = 0.88; EXPRESSED IN HEART, SIGNAL = 0.76; EXPRESSED IN BONE MARROW, SIGNAL = 0.41; EXPRESSED IN ADULT LIVER, SIGNAL = 0.63; SWISSPROT HIT: P25611, EVALUE 3.80e+00
SLVFCGSVIGIPSEIISPKKVAELHHLLNVHDLVGAMHVPE

SEQ ID NO: 30665 - protein, 69 aa, Homo sapiens
  MAP TO CHR22.1; EXPRESSED IN PLACENTA, SIGNAL = 1.7; EXPRESSED IN FETAL LIVER, SIGNAL =   2; EXPRESSED IN LUNG, SIGNAL = 1.3; EXPRESSED IN HEART, SIGNAL = 1.9; EXPRESSED IN BONE MARROW, SIGNAL = 1.4
CSWRQILDGCQGAGVEGGHGVKWVPLNVLKSSSCGRYLAPLALQFCVPGAVLPFYSRGSQRPTQHQESH

SEQ ID NO: 30666 - protein, 44 aa, Homo sapiens
  MAP TO CHRX.1; EXPRESSED IN FETAL LIVER, SIGNAL = 0.64; EXPRESSED IN BONE MARROW, SIGNAL = 0.95; EXPRESSED IN ADULT LIVER, SIGNAL =   1; EXPRESSED IN LUNG, SIGNAL = 0.6
NRISCDSLWVLLLGGSLYLIQFYALRSESQQRETFAILLINTSM

SEQ ID NO: 30667 - protein, 77 aa, Homo sapiens
  MAP TO CHR14.1; EXPRESSED IN ADULT LIVER, SIGNAL = 1.4; EXPRESSED IN BONE MARROW, SIGNAL = 0.94; EXPRESSED IN LUNG, SIGNAL = 0.88; EXPRESSED IN FETAL LIVER, SIGNAL =   1; EXPRESSED IN HEART, SIGNAL = 0.67; SWISSPROT HIT: Q9HFR4, EVALUE 8.00e-04
QGITDTAQTIYETAAREHESRGVTGAVGEVLRQIPPAVVKPLIVATEATSNVLGGMRNQIRPDVRQDESQKWRHGDD

SEQ ID NO: 30668 - protein, 86 aa, Homo sapiens
  MAP TO CHR7.1; EXPRESSED IN HEART, SIGNAL = 0.89; EXPRESSED IN BONE MARROW, SIGNAL = 0.91; EXPRESSED IN FETAL LIVER, SIGNAL = 1.2; EXPRESSED IN LUNG, SIGNAL = 0.84; SWISSPROT HIT: Q9BZS1, EVALUE 1.60e+00
TLLRSPGSPVRSRALGGGAVPTAFNPTLRPSPPQQETVPEFPCTFLPPTPAPTPPRPPPGPATLAPSRPLLVPKAERLSPPAPSGK

SEQ ID NO: 30669 - protein, 72 aa, Homo sapiens
  MAP TO CHR3.1; EXPRESSED IN BONE MARROW, SIGNAL = 0.98; EXPRESSED IN ADULT LIVER, SIGNAL = 1.1; EXPRESSED IN FETAL LIVER, SIGNAL = 0.98; EXPRESSED IN LUNG, SIGNAL = 1.3; EXPRESSED IN HEART, SIGNAL = 1.5
FLTCATCRGQTAGAGGGGQSTGPGGRLDAGRAPLGGSASSLSSGTETGGQGQRSGTGSRWGSPAGRAAPAPP

SEQ ID NO: 30670 - protein, 87 aa, Homo sapiens
  MAP TO CHR5.1; EXPRESSED IN HEART, SIGNAL = 0.47; EXPRESSED IN BONE MARROW, SIGNAL = 1.2; EXPRESSED IN ADULT LIVER, SIGNAL = 0.92
WALPRRPEARAAEGRAVLQRKCLRAAGVSSSVISCGTWQTLDRLVDKDLVTQGAAWPSCPVPSQRHCTSLVSSGGPVWKYLLSSWCQ

SEQ ID NO: 30671 - protein, 48 aa, Homo sapiens
  MAP TO CHRX.1; EXPRESSED IN LUNG, SIGNAL = 3.3; EXPRESSED IN HEART, SIGNAL = 2.5; EXPRESSED IN BONE MARROW, SIGNAL = 1.7; SWISSPROT HIT: P42770, EVALUE 6.30e+00
MQLCAGRAPSLQHARVGGGEVGASPKATTVGVRAVGAEVTFSSTSSQT

SEQ ID NO: 30672 - protein, 72 aa, Homo sapiens
  MAP TO CHR7.1; EXPRESSED IN HEART, SIGNAL = 0.61; EXPRESSED IN BONE MARROW, SIGNAL = 0.51; EXPRESSED IN LUNG, SIGNAL = 0.63; SWISSPROT HIT: P80269, EVALUE 6.70e+00
ARTSNCYHVFPPTKLWRKKLPPLKSRQAAYKEHHVKGKNGHSTQYAYFDMKGWSVVSTSQSVALTNRSKLGK

SEQ ID NO: 30673 - protein, 41 aa, Homo sapiens
  MAP TO CHR11.1; EXPRESSED IN HEART, SIGNAL = 0.96; EXPRESSED IN BONE MARROW, SIGNAL = 0.73
ISERAAVDASYIDEIDELFKEANAIENFLIQKREFLRQRFT

SEQ ID NO: 30674 - protein, 75 aa, Homo sapiens
  MAP TO CHR19.1; EXPRESSED IN LUNG, SIGNAL = 0.84; EXPRESSED IN HEART, SIGNAL = 0.76; EXPRESSED IN BONE MARROW, SIGNAL = 0.38; SWISSPROT HIT: Q14585, EVALUE 1.00e-31
IHTGEKPFECKECGKAFGLLTQLAQHQIIHTGEKPFKCKECGKAFNRGSNLVQPQSIHTGEKPYECKECGKAFRL

SEQ ID NO: 30675 - protein, 53 aa, Homo sapiens
  MAP TO CHRX.1; EXPRESSED IN FETAL LIVER, SIGNAL = 0.47; EXPRESSED IN BONE MARROW, SIGNAL = 0.47; EXPRESSED IN HEART, SIGNAL = 0.62; SWISSPROT HIT: P37769, EVALUE 9.60e-01
LHSHVGLVVLPNLLDTHVIFGIDEGLGSGIRLGQCHDTCDVLEVMLVVNLDLW

SEQ ID NO: 30676 - protein, 66 aa, Homo sapiens
  MAP TO CHR22.1; EXPRESSED IN BONE MARROW, SIGNAL = 0.58; EXPRESSED IN PLACENTA, SIGNAL = 1.3; EXPRESSED IN FETAL LIVER, SIGNAL = 0.68; EXPRESSED IN LUNG, SIGNAL =   1; EXPRESSED IN HEART, SIGNAL = 0.92
WEGSPSSGGRRNCPPAPPQAVHQAQSCGGRGRRSWPAVGAPRHQTGGGPRSRGARGSRAPRRSTAP

SEQ ID NO: 30677 - protein, 60 aa, Homo sapiens
  MAP TO CHRX.1; EXPRESSED IN BONE MARROW, SIGNAL = 4.2; EXPRESSED IN HEART, SIGNAL = 3.8; EXPRESSED IN FETAL LIVER, SIGNAL = 3.8; EXPRESSED IN PLACENTA, SIGNAL = 6.5; EXPRESSED IN LUNG, SIGNAL = 2.5
LTWPVGTGFLRVQFGPQGSPWLQLGLGELGQVGHDRVLVHVGVHNLLGGDHLSQAENRSH

SEQ ID NO: 30678 - protein, 46 aa, Homo sapiens
  MAP TO CHR7.1; EXPRESSED IN ADULT LIVER, SIGNAL = 0.52; EXPRESSED IN BONE MARROW, SIGNAL = 0.36
LPLYKLFSSKECFPGLPPEEALLGIHLFIQQIFTQSLRPNWHKIVH

SEQ ID NO: 30679 - protein, 48 aa, Homo sapiens
  MAP TO CHR3.1; EXPRESSED IN FETAL LIVER, SIGNAL = 0.49; EXPRESSED IN HEART, SIGNAL = 0.46; EXPRESSED IN ADULT LIVER, SIGNAL = 0.85; EXPRESSED IN BONE MARROW, SIGNAL = 0.55; SWISSPROT HIT: O26543, EVALUE 9.70e-01
GQALCGHTCPLAGGSALKPEWKTCLFQGLKRRTCSEGSHRDTLDPEGP

SEQ ID NO: 30680 - protein, 31 aa, Homo sapiens
  MAP TO CHR11.1; EXPRESSED IN BONE MARROW, SIGNAL = 0.51; EXPRESSED IN HEART, SIGNAL = 0.45; EXPRESSED IN FETAL LIVER, SIGNAL = 0.46; EXPRESSED IN LUNG, SIGNAL = 0.59
DFLINPCPGSTEVRSFSHPSRRDAQALTDCH

SEQ ID NO: 30681 - protein, 70 aa, Homo sapiens
  MAP TO CHR15.1; EXPRESSED IN FETAL LIVER, SIGNAL = 0.78; EXPRESSED IN HEART, SIGNAL = 0.83; EXPRESSED IN ADULT LIVER, SIGNAL = 1.1; EXPRESSED IN BONE MARROW, SIGNAL = 0.9; SWISSPROT HIT: Q9UPM8, EVALUE 4.00e-32
YYFYLQVTEQPGCCLPVMEAESTKSFQYSVQIEKPFTEGNLTGFISYHMMDTHSAQLEFSVNLSLLDFIR

SEQ ID NO: 30682 - protein, 72 aa, Homo sapiens
  MAP TO CHR5.1; EXPRESSED IN FETAL LIVER, SIGNAL = 0.64; EXPRESSED IN LUNG, SIGNAL = 0.71; EXPRESSED IN BONE MARROW, SIGNAL = 0.83; EXPRESSED IN ADULT LIVER, SIGNAL = 0.74; SWISSPROT HIT: Q13591, EVALUE 4.00e-36
EFNMFHMIAVGLSSSILGCLLTLLVYTYCQRYQQQSHDATVIHPVSPAPLNTSITNHINKLDKYDSVEAIKV

SEQ ID NO: 30683 - protein, 65 aa, Homo sapiens
  MAP TO CHRX.1; EXPRESSED IN ADULT LIVER, SIGNAL = 1.1; EXPRESSED IN FETAL LIVER, SIGNAL = 1.3; EXPRESSED IN LUNG, SIGNAL = 2.7; EXPRESSED IN HEART, SIGNAL = 0.74; EXPRESSED IN BONE MARROW, SIGNAL = 1.2; SWISSPROT HIT: O97555, EVALUE 3.00e-28
LLVPSQVARCKQLICDPSYIPDRVRKAGQVIRIICILSHPIKNTNDANSCQIIIPQNQVNRKSGR

SEQ ID NO: 30684 - protein, 85 aa, Homo sapiens
  MAP TO CHR2.1; EXPRESSED IN BONE MARROW, SIGNAL = 0.45; EXPRESSED IN HEART, SIGNAL = 0.93; EXPRESSED IN FETAL LIVER, SIGNAL = 0.51; EXPRESSED IN LUNG, SIGNAL = 0.82; SWISSPROT HIT: P75176, EVALUE 4.60e+00
FIIEKMARHTKGPEFYFENISLSWEEVEDKLRAILEDSEVPSEVKEACTWGSLALGVRFAHRQGQLQNRRVQWLQGFAKLHRSAA

SEQ ID NO: 30685 - protein, 116 aa, Homo sapiens
  MAP TO CHR14.1; EXPRESSED IN BONE MARROW, SIGNAL = 1.6; EXPRESSED IN HEART, SIGNAL = 2.3; EXPRESSED IN ADULT LIVER, SIGNAL = 2.6; EXPRESSED IN FETAL LIVER, SIGNAL =   2; EXPRESSED IN LUNG, SIGNAL = 1.7; SWISSPROT HIT: Q9ER30, EVALUE 1.00e-09
RYMYSDEIDLEADTVLATLYAAKKYIVPALAKACVNFLETSLEAKNACVLLSQSRLFEEPELTQRCWEVIDAQAEMALRSEGFCEIDRQTLEIIVTREALNTKEAVVFEAVLNWAE

SEQ ID NO: 30686 - protein, 83 aa, Homo sapiens
  MAP TO CHR7.1; EXPRESSED IN HEART, SIGNAL = 0.56; EXPRESSED IN BONE MARROW, SIGNAL = 0.65; EXPRESSED IN FETAL LIVER, SIGNAL = 0.75; EXPRESSED IN LUNG, SIGNAL = 0.58; SWISSPROT HIT: P25562, EVALUE 1.80e+00
HWETYLYPSSHPHTKFFRYGVQILFPLIITPPVFRLGILPPFLCLHLSNICRLLSCHPLSHRLAELYKFSTFYLPFKGRSPRP

SEQ ID NO: 30687 - protein, 74 aa, Homo sapiens
  MAP TO CHR3.1; EXPRESSED IN LUNG, SIGNAL = 2.2; EXPRESSED IN HEART, SIGNAL = 1.8; EXPRESSED IN ADULT LIVER, SIGNAL = 2.3; EXPRESSED IN BONE MARROW, SIGNAL = 2.8; SWISSPROT HIT: P46976, EVALUE 4.00e-29
SGFYFDRKVLETVFDEVIMVDVLDSGDSAHLTLMKRPELGVTLTKLHCWSLTQYSKCVFMDADTLVSVALRVEK

SEQ ID NO: 30688 - protein, 58 aa, Homo sapiens
  MAP TO CHR1.1; EXPRESSED IN HEART, SIGNAL = 1.3; EXPRESSED IN BONE MARROW, SIGNAL = 0.55; SWISSPROT HIT: Q9RWH3, EVALUE 2.70e+00
SGRLDISNKTYETVASLGAATPQGESEDCPPPLPVKNSSRTLVQGCARHASGGTVGCP

SEQ ID NO: 30689 - protein, 83 aa, Homo sapiens
  MAP TO CHR17.1; EXPRESSED IN LUNG, SIGNAL = 1.6; EXPRESSED IN HEART, SIGNAL = 2.3; EXPRESSED IN ADULT LIVER, SIGNAL = 9.3; EXPRESSED IN BONE MARROW, SIGNAL =   3; EXPRESSED IN PLACENTA, SIGNAL = 4.4; EXPRESSED IN FETAL LIVER, SIGNAL = 4.9; SWISSPROT HIT: P17473, EVALUE 2.30e-01
KSLEPEPESDPVLQPLESPNHLRLPKMDFLPGFLSPTLKPMRSRAFSSSSCCCMFRSDLVSSFPRTSEPVADFSLSFSLITWQ

SEQ ID NO: 30690 - protein, 82 aa, Homo sapiens
  MAP TO CHR19.1; EXPRESSED IN PLACENTA, SIGNAL =   2; EXPRESSED IN FETAL LIVER, SIGNAL = 1.3; EXPRESSED IN LUNG, SIGNAL = 0.86; EXPRESSED IN HEART, SIGNAL = 0.64; EXPRESSED IN BONE MARROW, SIGNAL = 2.1; SWISSPROT HIT: P90747, EVALUE 1.00e-09
LGCLFGAKPLRTRTYLFPDEKVFPRSIKTQGLKIHQRFHFASALKRMSVLASYEKLGSTDLCYIAAVKGAPETLHSMVSWPQ

SEQ ID NO: 30691 - protein, 77 aa, Homo sapiens
  MAP TO CHR6.1; EXPRESSED IN LUNG, SIGNAL = 1.9; EXPRESSED IN ADULT LIVER, SIGNAL =  13; EXPRESSED IN BONE MARROW, SIGNAL = 1.9; SWISSPROT HIT: Q19084, EVALUE 8.70e+00
LVLQNVFPNLLPFCLPTQVVLVGNAAQDGLALGDLVSPINQVGQIGKVQAQLEFFIQPLASVIVRSVPHHVLLFLIA

SEQ ID NO: 30692 - protein, 55 aa, Homo sapiens
  MAP TO CHR6.1; EXPRESSED IN PLACENTA, SIGNAL = 1.5; EXPRESSED IN FETAL LIVER, SIGNAL = 1.2; EXPRESSED IN LUNG, SIGNAL = 2.1; EXPRESSED IN HEART, SIGNAL = 3.2; EXPRESSED IN ADULT LIVER, SIGNAL = 3.5; EXPRESSED IN BONE MARROW, SIGNAL = 1.1; SWISSPROT HIT: P34318, EVALUE 2.80e+00
GESASTVPHYHKLCSRVSHIWENRRGQHIRSAMDKPRPGKTTFVIMVSPLPGKYA

SEQ ID NO: 30693 - protein, 85 aa, Homo sapiens
  MAP TO CHR19.1; EXPRESSED IN HEART, SIGNAL = 0.83; EXPRESSED IN BONE MARROW, SIGNAL = 0.46; EXPRESSED IN FETAL LIVER, SIGNAL = 0.47; EXPRESSED IN LUNG, SIGNAL = 0.68
TLVEVTVHTQAVGHGGVQHLDLVGVLGREADLQPIVDVQAPGGGRLAQLLEAAQAAVGHAHAERLAVRLVAHLPVMLPAVDQRVP

SEQ ID NO: 30694 - protein, 67 aa, Homo sapiens
  MAP TO CHR5.1; EXPRESSED IN HEART, SIGNAL =  18; EXPRESSED IN ADULT LIVER, SIGNAL =  68; EXPRESSED IN PLACENTA, SIGNAL =  47; EXPRESSED IN LUNG, SIGNAL =  19; EXPRESSED IN BONE MARROW, SIGNAL = 6.4; SWISSPROT HIT: P45634, EVALUE 8.00e-32
GKPQGTLARVHTGQVIMSIRTKLQNKEHVIEALGRAKFKFPGRQKIHISKKWGFTKFNADEFEDMVA

SEQ ID NO: 30695 - protein, 35 aa, Homo sapiens
  MAP TO CHR14.1; EXPRESSED IN HEART, SIGNAL = 0.75; EXPRESSED IN BONE MARROW, SIGNAL = 0.82
SILPISSLKVSSNLICSGVDPPINSVLNSRSVKAK

SEQ ID NO: 30696 - protein, 154 aa, Homo sapiens
  MAP TO CHR12.1; EXPRESSED IN LUNG, SIGNAL = 1.2; EXPRESSED IN HEART, SIGNAL = 1.2; EXPRESSED IN BONE MARROW, SIGNAL = 0.8; SWISSPROT HIT: P77627, EVALUE 7.40e+00
SNQHNVINVMDQYDILWKGKTIKISANQIMTQSQRVDIPLRQDSEGILLALPAEGKLLLVGLMDRNGDKGTCQINGCIPGTKRRVNLFKQWNHIWYRYSSCNWSHHLVKLTVIHCHSPRSICLLHRPNRRVKWGCGGNHHPRIFQVLVGGTNLC

SEQ ID NO: 30697 - protein, 44 aa, Homo sapiens
  MAP TO CHR19.1; EXPRESSED IN BONE MARROW, SIGNAL = 1.1; EXPRESSED IN LUNG, SIGNAL = 0.67; EXPRESSED IN HEART, SIGNAL = 0.79
LLLEELVQLTAEVWMESGPTPRGQDHVLFNFKGGKLPTGAGQGL

SEQ ID NO: 30698 - protein, 52 aa, Homo sapiens
  MAP TO CHR19.1; EXPRESSED IN BONE MARROW, SIGNAL =   4; EXPRESSED IN HEART, SIGNAL = 3.9; SWISSPROT HIT: P31414, EVALUE 2.80e+00
MGLSVGFLVASAGTRASKLFGLAATRVSYQQGPVILDEDVFDLLLGSLIHIW

SEQ ID NO: 30699 - protein, 47 aa, Homo sapiens
  MAP TO CHR16.1; EXPRESSED IN FETAL LIVER, SIGNAL = 0.41; EXPRESSED IN HEART, SIGNAL = 0.45; EXPRESSED IN ADULT LIVER, SIGNAL = 0.59; EXPRESSED IN BONE MARROW, SIGNAL = 0.54; EXPRESSED IN LUNG, SIGNAL = 0.63
YYLHHSPWWFHRFETLSNHFIELLVPFFLFLGRRACIIHGVLQILFQ

SEQ ID NO: 30700 - protein, 34 aa, Homo sapiens
  MAP TO CHR13.1; EXPRESSED IN BONE MARROW, SIGNAL = 1.7; EXPRESSED IN PLACENTA, SIGNAL = 4.5; EXPRESSED IN LUNG, SIGNAL = 7.1
ASFGSTYTKTETIQRRLAWPLCKDDMQIREAFHI

SEQ ID NO: 30701 - protein, 134 aa, Homo sapiens
  MAP TO CHR15.1; EXPRESSED IN HEART, SIGNAL = 0.66; EXPRESSED IN ADULT LIVER, SIGNAL = 0.92; EXPRESSED IN BONE MARROW, SIGNAL = 0.46; SWISSPROT HIT: P35398, EVALUE 6.00e-63
PAVKFGRMSKKQRDSLYAEVQKHRMQQQQRDHQQQPGEAEPLTPTYNISANGLTELHDDLSNYIDGHTPEGSKADSAVSSFYLDIQPSPDQSGLDINGIKPEPICDYTPASGFFPYCSFTNGETSPTVSMAELG

SEQ ID NO: 30702 - protein, 73 aa, Homo sapiens
  MAP TO CHR6.1; EXPRESSED IN ADULT LIVER, SIGNAL = 1.9; EXPRESSED IN BONE MARROW, SIGNAL = 1.6; EXPRESSED IN HEART, SIGNAL = 1.4; EXPRESSED IN FETAL LIVER, SIGNAL = 1.7; EXPRESSED IN LUNG, SIGNAL = 1.1; SWISSPROT HIT: Q9ZRI7, EVALUE 1.00e-04
FLFKIPVLQTNNGPSLTGLTTIAAHLVKQANKEYLLGSTAEEKAIVQQWLEYRVTQVDGHSSKNDIHTLLKVS

SEQ ID NO: 30703 - protein, 76 aa, Homo sapiens
  MAP TO AC055811.4; EXPRESSED IN FETAL LIVER, SIGNAL = 0.74; EXPRESSED IN LUNG, SIGNAL = 1.1; EXPRESSED IN HEART, SIGNAL = 0.88; EXPRESSED IN BONE MARROW, SIGNAL = 0.58; SWISSPROT HIT: P50495, EVALUE 3.20e+00
QGSRSGTIKTQATCITSLPSWTRGCSSLARSTGPRKPSRTTGRMFSSRRTTSTCGFFWKNLSASGNSLTLQSIPFS

SEQ ID NO: 30704 - protein, 67 aa, Homo sapiens
  MAP TO CHR19.1; EXPRESSED IN BONE MARROW, SIGNAL = 0.75; EXPRESSED IN HEART, SIGNAL = 0.9; EXPRESSED IN PLACENTA, SIGNAL = 1.4; EXPRESSED IN FETAL LIVER, SIGNAL = 0.76
VNFAPPGRGGGAGWGPLPTHRALAQAADLAAALVHRVHVHQVVVGAHGQVRPVWGRGRGAMRRHPGS

SEQ ID NO: 30705 - protein, 91 aa, Homo sapiens
  MAP TO CHR6.1; EXPRESSED IN PLACENTA, SIGNAL = 4.1; EXPRESSED IN FETAL LIVER, SIGNAL = 3.4; EXPRESSED IN LUNG, SIGNAL = 9.6; EXPRESSED IN HEART, SIGNAL =   4; EXPRESSED IN ADULT LIVER, SIGNAL = 3.9; EXPRESSED IN BONE MARROW, SIGNAL = 3.3
SPSHLLGRRTQSFSSAPAWLGPSSGAGSSSSSSSSKGRSRRQRDAGSGIESMARPGPDPKGPGGSSSRGARGAVSPRRFRDCTRASEQPRQ

SEQ ID NO: 30706 - protein, 56 aa, Homo sapiens
  MAP TO CHR19.1; EXPRESSED IN ADULT LIVER, SIGNAL = 0.82; EXPRESSED IN BONE MARROW, SIGNAL = 0.95; EXPRESSED IN LUNG, SIGNAL = 1.2; SWISSPROT HIT: P90747, EVALUE 2.00e-14
RLAGPVSTGTKDPSRNRYKLFLECTLILTSVVPPELPIELSLAVNTSLIALAKLCE

SEQ ID NO: 30707 - protein, 105 aa, Homo sapiens
  MAP TO CHR19.1; EXPRESSED IN HEART, SIGNAL =   1; EXPRESSED IN BONE MARROW, SIGNAL = 0.56; EXPRESSED IN ADULT LIVER, SIGNAL = 0.53; EXPRESSED IN LUNG, SIGNAL = 0.66
QVMRWDGSMFRLLQQLPSRGAHVFQPLLIARDQLAILGSDFAFSQVLRLEPDKGLLEPLQELGPPALVAPRAFAHITMAGRRFLFAACFKGPTQIYQHHEIDLSA

SEQ ID NO: 30708 - protein, 94 aa, Homo sapiens
  MAP TO CHR12.1; EXPRESSED IN LUNG, SIGNAL = 0.78; EXPRESSED IN HEART, SIGNAL = 0.81; EXPRESSED IN BONE MARROW, SIGNAL = 0.78; SWISSPROT HIT: P31367, EVALUE 4.00e-21
KSCLLLQVLTQENLATVLTGVMVPAGAVTQPLLIPISIAGQVAGQQGLAVWTIPTATVAALPGLTAASPTGGVFKPPLAGLQGNGNSSQDCTRP

SEQ ID NO: 30709 - protein, 48 aa, Homo sapiens
  MAP TO CHR9.1; EXPRESSED IN BONE MARROW, SIGNAL = 0.57; EXPRESSED IN ADULT LIVER, SIGNAL = 0.65; EXPRESSED IN HEART, SIGNAL = 0.51
SSSLPPITSILLPTAGENVSIRLVSESLVKAKHSKSCLQITFLFNKSD

SEQ ID NO: 30710 - protein, 90 aa, Homo sapiens
  MAP TO CHR19.1; EXPRESSED IN LUNG, SIGNAL = 0.86; EXPRESSED IN HEART, SIGNAL = 1.1; EXPRESSED IN BONE MARROW, SIGNAL = 1.1; EXPRESSED IN PLACENTA, SIGNAL = 1.2; EXPRESSED IN FETAL LIVER, SIGNAL = 1.2; SWISSPROT HIT: Q12967, EVALUE 7.90e+00
LCRELRSELASQALGVRPSPAGPPLAPALGGKRRSSWRSTAWRSRMYTQGSRIWFQEARRTARNSGRCREVELQPPTASATNTCGGSRCE

SEQ ID NO: 30711 - protein, 20 aa, Homo sapiens
  MAP TO CHR7.1; EXPRESSED IN BONE MARROW, SIGNAL = 0.56; EXPRESSED IN FETAL LIVER, SIGNAL = 0.37
KKGKVHLAVQHVVHFEVNYR

SEQ ID NO: 30712 - protein, 79 aa, Homo sapiens
  MAP TO CHR14.1; EXPRESSED IN LUNG, SIGNAL = 1.1; EXPRESSED IN HEART, SIGNAL = 1.2; EXPRESSED IN BONE MARROW, SIGNAL = 0.76; EXPRESSED IN ADULT LIVER, SIGNAL = 0.91; SWISSPROT HIT: P10569, EVALUE 7.50e-02
AVQQQHSSAAAAAQQGGYEIPRAAADAPQPGDPVRLAGALRGSCAPLQAGPGGPGEDFRTRPPGRGHHAQHPGLGVQAS

SEQ ID NO: 30713 - protein, 90 aa, Homo sapiens
  MAP TO CHR7.1; EXPRESSED IN FETAL LIVER, SIGNAL = 0.36; EXPRESSED IN HEART, SIGNAL = 0.57; EXPRESSED IN BONE MARROW, SIGNAL = 0.53; SWISSPROT HIT: P30427, EVALUE 1.00e-03
LREEISLLEHEKESELKEIEQELHLAQAEIQSLRQAAEDSATEHESDIASLQEDLCRMQNELEDMERIRGDYEMEIASLRAEMEMKSSEP

SEQ ID NO: 30714 - protein, 39 aa, Homo sapiens
  MAP TO CHR19.1; EXPRESSED IN HEART, SIGNAL = 0.87; EXPRESSED IN BONE MARROW, SIGNAL = 0.86; EXPRESSED IN ADULT LIVER, SIGNAL = 0.77; EXPRESSED IN FETAL LIVER, SIGNAL = 0.68; EXPRESSED IN LUNG, SIGNAL = 0.79
QTQCAKQRGNNRLELEVIYFISWDYKFNLQTRGQNFSLT

SEQ ID NO: 30715 - protein, 65 aa, Homo sapiens
  MAP TO CHR7.1; EXPRESSED IN HEART, SIGNAL = 0.72; EXPRESSED IN ADULT LIVER, SIGNAL = 1.2; EXPRESSED IN BONE MARROW, SIGNAL = 0.7; SWISSPROT HIT: P21300, EVALUE 2.00e-21
AFQSPLGKVKEAVKVAIDAGYRHIDCAYVYQNEHEVGEAIQEKIQEKAVKREDLFIVSKVQWCIW

SEQ ID NO: 30716 - protein, 82 aa, Homo sapiens
  MAP TO CHR17.1; EXPRESSED IN LUNG, SIGNAL = 1.5; EXPRESSED IN HEART, SIGNAL = 4.6; EXPRESSED IN BONE MARROW, SIGNAL = 1.7; EXPRESSED IN ADULT LIVER, SIGNAL = 4.5; EXPRESSED IN FETAL LIVER, SIGNAL = 2.4; SWISSPROT HIT: P00906, EVALUE 7.40e+00
PGCSALTLIVLQDVGCEATFITHIGGILPILGLDDPLEVVVDLGANAHGFLEGAGSHRQNHELLHGQLVSSMGAPVDHIEGL

SEQ ID NO: 30717 - protein, 120 aa, Homo sapiens
  MAP TO CHR6.1; EXPRESSED IN LUNG, SIGNAL = 0.59; EXPRESSED IN HEART, SIGNAL = 0.54; EXPRESSED IN BONE MARROW, SIGNAL = 0.36; SWISSPROT HIT: Q06430, EVALUE 1.00e-55
IHKDFGTFERLFRAIYMPQNVYCVHLDQKATDAFKGAVKQLLSCFPNAFLASKKESVVYGGISRLQADLNCLEDLVASEVPWKYVINTCGQDFPLKTNREIVQYLKGFKGKNITPGVLPP

SEQ ID NO: 30718 - protein, 96 aa, Homo sapiens
  MAP TO CHR6.1; EXPRESSED IN BONE MARROW, SIGNAL =   6; EXPRESSED IN PLACENTA, SIGNAL =  12; SWISSPROT HIT: P30511, EVALUE 2.00e-52
SDPPKAHVAHHPISDHEATLRCWALGFYPAEITLTWQRDGEEQTQDTELVETRPAGDGTFQKWAAVVVPPGEEQRYTCHVQHEGLPQPLILRWGKE

SEQ ID NO: 30719 - protein, 42 aa, Homo sapiens
  MAP TO CHR19.1; EXPRESSED IN LUNG, SIGNAL = 0.61; EXPRESSED IN HEART, SIGNAL = 0.58; EXPRESSED IN BONE MARROW, SIGNAL = 0.69
GFPTLLTFKGFLSSMNTLMLNKICTTTKVFPTFLTFIRFMCI

SEQ ID NO: 30720 - protein, 83 aa, Homo sapiens
  MAP TO CHR19.1; EXPRESSED IN HEART, SIGNAL = 3.3; EXPRESSED IN BONE MARROW, SIGNAL = 3.3; EXPRESSED IN ADULT LIVER, SIGNAL =   5; EXPRESSED IN LUNG, SIGNAL = 3.8; SWISSPROT HIT: P20908, EVALUE 5.00e-18
QFSYVDADGSPVNVVQLNFLKLLSATARQNFTYSCQNAAAWLDEATGDYSHSARFLGTNGEELSFNQTTAATVSVPQDGCRVR

SEQ ID NO: 30721 - protein, 47 aa, Homo sapiens
  MAP TO CHR19.1; EXPRESSED IN LUNG, SIGNAL = 5.8; EXPRESSED IN BONE MARROW, SIGNAL = 3.1; SWISSPROT HIT: Q03923, EVALUE 3.00e-24
IIHTGEKPYKCEECGKAFNQSSKLTKHKKIHTGEKPYTCEECGKAFN

SEQ ID NO: 30722 - protein, 67 aa, Homo sapiens
  MAP TO CHR11.1; EXPRESSED IN LUNG, SIGNAL = 1.2; EXPRESSED IN HEART, SIGNAL = 1.7; EXPRESSED IN BONE MARROW, SIGNAL =   2; EXPRESSED IN PLACENTA, SIGNAL = 3.5; EXPRESSED IN FETAL LIVER, SIGNAL = 2.3; SWISSPROT HIT: Q10496, EVALUE 9.20e-01
QAQLVEDFRALHQAAEDMKLFDASPTFFAFLLGHILAMEVLAWLLIYLLGPGWVPSALAAFILAISQ

SEQ ID NO: 30723 - protein, 56 aa, Homo sapiens
  MAP TO CHR5.1; EXPRESSED IN PLACENTA, SIGNAL = 1.1; EXPRESSED IN LUNG, SIGNAL = 1.3; EXPRESSED IN BONE MARROW, SIGNAL = 0.84
TYNFVWLCKERRARWEGVFALLNFLIPPFPFFHTQHIPVFTVHVAMKRNTIFVSQK

SEQ ID NO: 30724 - protein, 76 aa, Homo sapiens
  MAP TO CHR12.1; EXPRESSED IN BONE MARROW, SIGNAL = 0.55; EXPRESSED IN LUNG, SIGNAL = 2.3
LGNHFSEAPPKKPLPLASAALSSVLPPTFHPQCAGCPGFLDIFVLWVHPTPHSAALQHLSLALRLQQMRTYARAHV

SEQ ID NO: 30725 - protein, 43 aa, Homo sapiens
  MAP TO CHR16.1; EXPRESSED IN LUNG, SIGNAL = 0.67; EXPRESSED IN HEART, SIGNAL = 0.71; EXPRESSED IN BONE MARROW, SIGNAL = 0.67
SLLELEQHQTLLVEGQERKLLVLQLMAVLCERMSEQIFTNVTQ

SEQ ID NO: 30726 - protein, 70 aa, Homo sapiens
  MAP TO CHR5.1; EXPRESSED IN BONE MARROW, SIGNAL = 0.45; EXPRESSED IN ADULT LIVER, SIGNAL = 0.51; EXPRESSED IN FETAL LIVER, SIGNAL = 0.32; SWISSPROT HIT: P12753, EVALUE 3.00e-14
LIFIFCRHGEKVSLSSKCAEIDREMISSLGVSKAVLNNVIFCHQEDSNWPLSEGKALKQKFDEIFSATRF

SEQ ID NO: 30727 - protein, 87 aa, Homo sapiens
  MAP TO CHR22.1; EXPRESSED IN LUNG, SIGNAL = 2.3; EXPRESSED IN BONE MARROW, SIGNAL = 3.1; EXPRESSED IN PLACENTA, SIGNAL = 4.6
YLSIFPGPPRPPLLPPICSIKGPGGPPGPPRLPPPKPPRSMPRPPRKPPLSPPRPPLNIPPGPPRSMRPPLPPRMPPGPPLPRSPPK

SEQ ID NO: 30728 - protein, 69 aa, Homo sapiens
  MAP TO CHR20.1; EXPRESSED IN BONE MARROW, SIGNAL = 0.89; EXPRESSED IN LUNG, SIGNAL = 1.8; EXPRESSED IN HEART, SIGNAL = 1.5
CRAALSLAALAARPLPPGRGAGQRPTTWSSTASPTCASSAGMAASQVPTSSAASGAACWRSWWRKVGLC

SEQ ID NO: 30729 - protein, 95 aa, Homo sapiens
  MAP TO CHR22.1; EXPRESSED IN LUNG, SIGNAL = 0.87; EXPRESSED IN ADULT LIVER, SIGNAL = 1.1; EXPRESSED IN BONE MARROW, SIGNAL = 0.72; EXPRESSED IN FETAL LIVER, SIGNAL = 0.85
RWKARVSVTAGVPGTQPQVHGLQPAGAREPGGAHARGGGGEPRPPQAAQPGPGPSPIPSPRQPLQDLLHGGGHWRQREPSGWHRGRQQLRVWAAA

SEQ ID NO: 30730 - protein, 90 aa, Homo sapiens
  MAP TO CHR22.1; EXPRESSED IN BONE MARROW, SIGNAL = 0.72; EXPRESSED IN HEART, SIGNAL = 0.84; EXPRESSED IN ADULT LIVER, SIGNAL = 0.81; EXPRESSED IN PLACENTA, SIGNAL = 1.7; SWISSPROT HIT: Q11057, EVALUE 2.60e+00
RGERWVLPELPPWLLRKDVSPKTSPPRPTCMVWRKSPSGWLIMSAVSRLFPCELDTQPTGESLPRLMVAAPLPPWGPGISSGCSQLLVHA

SEQ ID NO: 30731 - protein, 67 aa, Homo sapiens
  MAP TO CHR7.1; EXPRESSED IN LUNG, SIGNAL = 0.72; EXPRESSED IN ADULT LIVER, SIGNAL = 0.43; EXPRESSED IN BONE MARROW, SIGNAL = 1.3; SWISSPROT HIT: Q62230, EVALUE 4.60e+00
PSGVSGEGAVVLPTIHDHINYNTYKPAHGAHWTENSLGNSLHPTVTTISEPYIIQTHTKDKVQETQI

SEQ ID NO: 30732 - protein, 160 aa, Homo sapiens
  MAP TO CHR2.1; EXPRESSED IN LUNG, SIGNAL = 1.5; EXPRESSED IN BONE MARROW, SIGNAL = 0.65; EXPRESSED IN HEART, SIGNAL = 1.3; SWISSPROT HIT: P28811, EVALUE 3.30e+00
HDREAGGVVAAHVAAVLSVGEACLAQGHHRGVEVVVQELAPLHQHVGELLVGCDGLRPDQGGGHQARHGKGVPVVQSVGVDAPRGVEAILVHGFQQALEGGQRGAPHGVLQVVTGAVVRPVLLVEAHVRAVVHAPVGGTARQVCDEVQVLWRHQVVVVVT

SEQ ID NO: 30733 - protein, 103 aa, Homo sapiens
  MAP TO CHR2.1; EXPRESSED IN FETAL LIVER, SIGNAL = 0.41; EXPRESSED IN BONE MARROW, SIGNAL = 0.5; SWISSPROT HIT: Q90688, EVALUE 3.00e-14
IPSPPGIPEEVGTGKEHIIIQWTKPESDGGNEISNYLVDKREKKSLRWTRVNKDYVVYDTRLKVTSLMEGCDYQFRVTAVNAAGNSEPSEASNFISCREPSCE

SEQ ID NO: 30734 - protein, 63 aa, Homo sapiens
  MAP TO CHR5.1; EXPRESSED IN BONE MARROW, SIGNAL = 0.33; EXPRESSED IN FETAL LIVER, SIGNAL = 0.55; SWISSPROT HIT: O95486, EVALUE 1.00e-27
FSLLGLSIHTFHGNFFVRSTDLLSLPNVNPDAGYAVQMSVEESLTDTQLVSFQSALLYTSSKG

SEQ ID NO: 30735 - protein, 81 aa, Homo sapiens
  MAP TO CHR13.1; EXPRESSED IN FETAL LIVER, SIGNAL = 0.7; EXPRESSED IN LUNG, SIGNAL = 0.61; EXPRESSED IN HEART, SIGNAL = 0.75; EXPRESSED IN BONE MARROW, SIGNAL = 0.62; EXPRESSED IN ADULT LIVER, SIGNAL = 0.59; SWISSPROT HIT: P07271, EVALUE 2.20e-01
LFFRYILKDNSQKHIEVWDPSPEEIISNEVHNLNPVSAKSLPNENFQSLYNKELPVHICNVISPEKIYVQWLLTENLLNRY

SEQ ID NO: 30736 - protein, 54 aa, Homo sapiens
  MAP TO CHR7.1; EXPRESSED IN BONE MARROW, SIGNAL =  18; EXPRESSED IN PLACENTA, SIGNAL =  21; EXPRESSED IN LUNG, SIGNAL = 9.8; SWISSPROT HIT: Q9Z972, EVALUE 3.60e+00
RQNEVQSLCDFQPKQEPQKAFQCTFPHLQEDYVFPSFQRAETEVQRVIHAHPKG

SEQ ID NO: 30737 - protein, 80 aa, Homo sapiens
  MAP TO CHR7.1; EXPRESSED IN BONE MARROW, SIGNAL =  12; EXPRESSED IN PLACENTA, SIGNAL =  24; EXPRESSED IN LUNG, SIGNAL = 9.3; SWISSPROT HIT: Q02878, EVALUE 6.00e-39
QKFVIATSTKIDISNVKIPKHLTDAYFKKKKLRKPRHQEGEIFDTEKEKYEITEQCKIEQKAVDSQILPKIKAIPQLQGY

SEQ ID NO: 30738 - protein, 79 aa, Homo sapiens
  MAP TO CHR15.1; EXPRESSED IN PLACENTA, SIGNAL =  22; EXPRESSED IN LUNG, SIGNAL =  11; EXPRESSED IN BONE MARROW, SIGNAL =  21; SWISSPROT HIT: P05072, EVALUE 1.90e+00
SLVCTCGPAYAARCLAVQGLGELVNRRRHFQPLIEYSSLPLQPDIVGPFHKAGEVSFGLDVLSNAKILRPLLKRDSPLS

SEQ ID NO: 30739 - protein, 59 aa, Homo sapiens
  MAP TO CHR7.1; EXPRESSED IN ADULT LIVER, SIGNAL =   1; EXPRESSED IN BONE MARROW, SIGNAL = 0.96; EXPRESSED IN FETAL LIVER, SIGNAL = 0.96; SWISSPROT HIT: Q99996, EVALUE 1.00e-22
LQEFEAAIKQRDGIITQLTANLQQARREKDETMREFLELTEQSQKLQIQFQQVSITNAT

SEQ ID NO: 30740 - protein, 76 aa, Homo sapiens
  MAP TO CHR22.1; EXPRESSED IN HEART, SIGNAL = 0.55; EXPRESSED IN BONE MARROW, SIGNAL = 0.57; SWISSPROT HIT: O73955, EVALUE 5.50e+00
FYINVFLCLGPWSRPQTFHSYLEDIINYRWELEEGKPNPLREASFQDLPLRTRVEILHRLCDYRLDADDVFDLLKV

SEQ ID NO: 30741 - protein, 72 aa, Homo sapiens
  MAP TO CHR7.1; EXPRESSED IN BONE MARROW, SIGNAL = 0.38; EXPRESSED IN HEART, SIGNAL = 0.57; SWISSPROT HIT: P45457, EVALUE 4.80e-01
GITLVSKTVASLNFILPASIWFGSAGLKLKKYLPIPKRFNELCCKCWCHLAHHRDCGTAKRTLSTTDFICPR

SEQ ID NO: 30742 - protein, 75 aa, Homo sapiens
  MAP TO CHR5.1; EXPRESSED IN HEART, SIGNAL = 0.56; EXPRESSED IN BONE MARROW, SIGNAL = 0.36; SWISSPROT HIT: O76082, EVALUE 3.00e-31
LFQLSSALCFRMTISVGYFGLSLDTPNLHGDIFVNCFLSAMVEVPAYVLAWLLLQYLPRRYSMATALFLGGSVLL

SEQ ID NO: 30743 - protein, 84 aa, Homo sapiens
  MAP TO CHR10.1; EXPRESSED IN LUNG, SIGNAL = 0.87; EXPRESSED IN BONE MARROW, SIGNAL = 1.2; EXPRESSED IN HEART, SIGNAL = 1.1; SWISSPROT HIT: P13674, EVALUE 3.00e-33
GVKHKSFLTAEDCFELGKVAYTEADYYHTELWMEQALRQLDEGEISTIDKVSVLDYLSYAVYQQGDLDKALLLTKKLLELGMLS

SEQ ID NO: 30744 - protein, 64 aa, Homo sapiens
  MAP TO CHR7.1; EXPRESSED IN BONE MARROW, SIGNAL = 0.63; SWISSPROT HIT: P22270, EVALUE 9.30e+00
YVQRSKSLKTLALGAMFIPCQCLPYEICSAYNIYHSWSLEKNLFHICPLYLAYFVLCFPQVIRL

SEQ ID NO: 30745 - protein, 151 aa, Homo sapiens
  MAP TO CHR5.1; EXPRESSED IN FETAL LIVER, SIGNAL = 0.53; EXPRESSED IN BONE MARROW, SIGNAL = 0.44; SWISSPROT HIT: Q9UN67, EVALUE 3.00e-83
LAGSGFGRYSVTEETEKGSFVVNLAKDLGLAEGELAARGTRVVSDDNKQYLLLDSHTGNLLTNEKLDREKLCGPKEPCMLYFQILMDDPFQIYRAELRVRDINDHAPVFQDKETVLKISENTAEGTAFRLERAQDPDGGLNGIQNYTISPN

SEQ ID NO: 30746 - protein, 40 aa, Homo sapiens
  MAP TO CHR22.1; EXPRESSED IN FETAL LIVER, SIGNAL = 0.43; EXPRESSED IN BONE MARROW, SIGNAL = 0.53
GFREEWRERVQEEGVGLGDRGGVTGEEGAGGDLFICSAVL

SEQ ID NO: 30747 - protein, 109 aa, Homo sapiens
  MAP TO CHR13.1; EXPRESSED IN BONE MARROW, SIGNAL = 0.34; SWISSPROT HIT: P51587, EVALUE 3.00e-55
EIDRSRRSAIKKIMERDDTAAKTLVLCVSDIISLSANISETSSNKTSSADTQKVAIIELTDGWYAVKAQLDPPLLAVLKNGRLTVGQKIILHGAELVGSPDACTPLEAP

SEQ ID NO: 30748 - protein, 54 aa, Homo sapiens
  MAP TO CHR7.1; EXPRESSED IN PLACENTA, SIGNAL = 1.6; EXPRESSED IN FETAL LIVER, SIGNAL = 1.9; EXPRESSED IN LUNG, SIGNAL = 0.59; EXPRESSED IN HEART, SIGNAL = 2.4; SWISSPROT HIT: Q14563, EVALUE 8.00e-29
QQQLYIGSTAGVAQLPLHRCDIYGKACAECCLARDPYCAWDGSACSRYFPTAKR

SEQ ID NO: 30749 - protein, 50 aa, Homo sapiens
  MAP TO CHR1.1; EXPRESSED IN FETAL LIVER, SIGNAL = 3.1; EXPRESSED IN LUNG, SIGNAL =  29; EXPRESSED IN ADULT LIVER, SIGNAL = 1.2; EXPRESSED IN PLACENTA, SIGNAL =  14; SWISSPROT HIT: P06703, EVALUE 3.00e-11
SAMACPLDQAIGLLVAIFHKYSGREGDKHTLSKKELKELIQKELTIGSVS

SEQ ID NO: 30750 - protein, 104 aa, Homo sapiens
  MAP TO CHR12.1; EXPRESSED IN ADULT LIVER, SIGNAL = 4.7; EXPRESSED IN PLACENTA, SIGNAL = 1.7; EXPRESSED IN FETAL LIVER, SIGNAL = 2.5; EXPRESSED IN LUNG, SIGNAL = 1.6; EXPRESSED IN HEART, SIGNAL = 1.8; SWISSPROT HIT: P78560, EVALUE 8.00e-54
FSSSGDRLTGIPSHILNSSPSDRQINQLAQRLGPEWEPMVLSLGLSQTDIYRCKANHPHNVQSQVVEAFIRWRQRFGKQATFQSLHNGLRAVEVDPSLLLHMLE

SEQ ID NO: 30751 - protein, 67 aa, Homo sapiens
  MAP TO CHR8.1; EXPRESSED IN HEART, SIGNAL = 4.9; EXPRESSED IN PLACENTA, SIGNAL =  31; EXPRESSED IN FETAL LIVER, SIGNAL =  20; EXPRESSED IN LUNG, SIGNAL =  14
LCCSHSWSLGPLHVDSGVGLDKVVSEFLIGRLGEYSLLPEVGGQVAVGLGDGIKGGLGEVAQGGIAA

SEQ ID NO: 30752 - protein, 78 aa, Homo sapiens
  MAP TO CHR6.1; EXPRESSED IN HEART, SIGNAL = 8.7; EXPRESSED IN PLACENTA, SIGNAL =  48; EXPRESSED IN FETAL LIVER, SIGNAL =  11; EXPRESSED IN LUNG, SIGNAL =  57; SWISSPROT HIT: P30507, EVALUE 7.00e-24
HPEVLGPGLLPCGDHTDLAAGWGGPDPHTELVETRPAGDGTFQKWAAVVVPSGEEQRYTCHVQHEGLPEPLTLRWGKE

SEQ ID NO: 30753 - protein, 137 aa, Homo sapiens
  MAP TO CHR9.1; EXPRESSED IN PLACENTA, SIGNAL =   2; EXPRESSED IN LUNG, SIGNAL = 1.4; EXPRESSED IN ADULT LIVER, SIGNAL = 2.5; EXPRESSED IN HEART, SIGNAL = 1.8; SWISSPROT HIT: Q64686, EVALUE 4.00e-25
CHQCVIVSSSSHLLGTKLGPEIERAECTIRMNDAPTTGYSADVGNKTTYRVVAHSSVFRVLRRPQEFVNRTPETVFIFWGPPSKMQKPQGSLVRVIQRAGLVFPNMEAYAVSPGRMRQFDDLFRGETGKDRYQPPAC

SEQ ID NO: 30754 - protein, 57 aa, Homo sapiens
  MAP TO CHR5.1; EXPRESSED IN HEART, SIGNAL = 0.75; EXPRESSED IN ADULT LIVER, SIGNAL =   1; EXPRESSED IN PLACENTA, SIGNAL = 1.3; EXPRESSED IN LUNG, SIGNAL = 1.5; SWISSPROT HIT: Q13123, EVALUE 1.00e-26
GRNVYRMLFKSKAYERNELFLPGRMAYVVDLDDEYADTDIPTTLIRSKADCPTMEVS

SEQ ID NO: 30755 - protein, 76 aa, Homo sapiens
  MAP TO CHR8.1; EXPRESSED IN ADULT LIVER, SIGNAL =   2; EXPRESSED IN PLACENTA, SIGNAL = 2.7; EXPRESSED IN FETAL LIVER, SIGNAL = 1.2; EXPRESSED IN LUNG, SIGNAL = 1.1; SWISSPROT HIT: Q14596, EVALUE 1.00e-07
KFKVSPLLPQRITSSSCLSALIPAAPWGILCTALRSHSQAWSEVLKASLGLRLGRNQLRLGKTPWRGEPATGAQHK

SEQ ID NO: 30756 - protein, 55 aa, Homo sapiens
  MAP TO CHR22.1; EXPRESSED IN PLACENTA, SIGNAL =  16; EXPRESSED IN FETAL LIVER, SIGNAL =  21; EXPRESSED IN LUNG, SIGNAL =  14; EXPRESSED IN HEART, SIGNAL = 2.7; SWISSPROT HIT: P39023, EVALUE 9.00e-28
PGVTSRWHTKKLPRKTHRGLRKVACIGAWHPARVAFSVARAGQKGYHHRTEINKK

SEQ ID NO: 30757 - protein, 62 aa, Homo sapiens
  MAP TO CHR19.1; EXPRESSED IN FETAL LIVER, SIGNAL = 3.5; EXPRESSED IN PLACENTA, SIGNAL = 3.7; EXPRESSED IN LUNG, SIGNAL = 2.3; EXPRESSED IN ADULT LIVER, SIGNAL = 4.4; EXPRESSED IN HEART, SIGNAL = 2.7
RHLDEGVASPVVRDGEPECILRLEHLHLLALPLHVGEDEVLQPDLAPQELVHVHFVGVQGAE

SEQ ID NO: 30758 - protein, 53 aa, Homo sapiens
  MAP TO CHR5.1; EXPRESSED IN PLACENTA, SIGNAL =  10; EXPRESSED IN FETAL LIVER, SIGNAL = 4.4; EXPRESSED IN LUNG, SIGNAL =  11; SWISSPROT HIT: P39028, EVALUE 2.00e-26
GKCRGLRTARKLRSHRRDQKWHDKQYKKAHLGTALKANPFGGASHAKGIVLEK

SEQ ID NO: 30759 - protein, 71 aa, Homo sapiens
  MAP TO CHR19.1; EXPRESSED IN PLACENTA, SIGNAL = 1.7; EXPRESSED IN FETAL LIVER, SIGNAL =   1; EXPRESSED IN LUNG, SIGNAL =   1; EXPRESSED IN HEART, SIGNAL = 1.8; EXPRESSED IN ADULT LIVER, SIGNAL =   1; SWISSPROT HIT: P13629, EVALUE 9.10e-01
DKTSHPLPQFPPSLNSYLESLFPKVLGPQHSESSYADEAGAMAQNRGLSFTVSYQGHHLTIYADGHTVPPA

SEQ ID NO: 30760 - protein, 51 aa, Homo sapiens
  MAP TO CHR6.1; EXPRESSED IN HEART, SIGNAL =  16; EXPRESSED IN PLACENTA, SIGNAL =  25; EXPRESSED IN LUNG, SIGNAL =  11; SWISSPROT HIT: P38939, EVALUE 6.30e+00
GGPGVLLLGGHVGHEVHHPVVVAKFIVIPGNELDKVVVEGSASPSIEGGRV

SEQ ID NO: 30761 - protein, 64 aa, Homo sapiens
  MAP TO CHR2.1; EXPRESSED IN PLACENTA, SIGNAL =   5; EXPRESSED IN FETAL LIVER, SIGNAL = 5.8; EXPRESSED IN LUNG, SIGNAL = 2.8; EXPRESSED IN HEART, SIGNAL = 3.6; EXPRESSED IN ADULT LIVER, SIGNAL = 6.1; SWISSPROT HIT: Q9Y7R3, EVALUE 5.40e-01
DPMFQKTAASFDECSTAGVFLSTLHCQDYRSELLFPSDVQTLSTGEPLELPELGCVEMTDLKGK

SEQ ID NO: 30762 - protein, 57 aa, Homo sapiens
  MAP TO CHR10.1; EXPRESSED IN HEART, SIGNAL = 1.2; EXPRESSED IN ADULT LIVER, SIGNAL = 1.2; EXPRESSED IN FETAL LIVER, SIGNAL = 1.8; EXPRESSED IN PLACENTA, SIGNAL = 1.7; EXPRESSED IN LUNG, SIGNAL = 1.6; SWISSPROT HIT: Q06730, EVALUE 3.00e-31
KPYECYECGKTFCLKSDLTIHQRTHTGEKPFACPECGKFFSHKSTLSQHYRTHTGEK

SEQ ID NO: 30763 - protein, 101 aa, Homo sapiens
  MAP TO CHR1.1; EXPRESSED IN PLACENTA, SIGNAL =  18; EXPRESSED IN HEART, SIGNAL = 2.8; SWISSPROT HIT: P24049, EVALUE 2.00e-54
QAKQWGWTQGRWPKKSAEFLLHMLKNTESNAELKGLDVDSLVIEHIQVNKAPKMRRRTYRAHGRINPYMSSPCHIEMILTEKEQIVPKPEEEVAQKKKISQ

SEQ ID NO: 30764 - protein, 24 aa, Homo sapiens
  MAP TO AL022312.7; EXPRESSED IN HELA, SIGNAL = 7.5; EXPRESSED IN ADULT LIVER, SIGNAL = 8.2; SWISSPROT HIT: P18848, EVALUE 3.00e-07
DKAKAGSSEWLAVDGLVSPSNNSK

SEQ ID NO: 30765 - protein, 127 aa, Homo sapiens
  MAP TO AL022312.7; EXPRESSED IN HELA, SIGNAL = 7.5; EXPRESSED IN ADULT LIVER, SIGNAL = 8.2; SWISSPROT HIT: P18848, EVALUE 9.00e-56
DAFSGTDWMLEKMDLKEFDLDALLGIDDLETMPDDLLTTLDDTCDLFAPLVQETNKQPPQTVNPIGHLPESLTKPDQVAPFTFLQPLPLSPGVLSSTPDHSFSLELGSEVDITEGDRKPDYTAYVAM

SEQ ID NO: 30766 - protein, 30 aa, Homo sapiens
  MAP TO AL022312.7; EXPRESSED IN HELA, SIGNAL = 7.5; EXPRESSED IN ADULT LIVER, SIGNAL = 8.2; SWISSPROT HIT: P48809, EVALUE 6.60e+00
PPNGWLWMGWSVPPTTARVSGPPPHRPGGI

SEQ ID NO: 30767 - protein, 172 aa, Homo sapiens
  MAP TO AL022312.7; EXPRESSED IN LUNG, SIGNAL = 0.98; EXPRESSED IN HELA, SIGNAL = 1.6; EXPRESSED IN ADULT LIVER, SIGNAL = 1.2; EXPRESSED IN BRAIN, SIGNAL = 1.1; EXPRESSED IN BONE MARROW, SIGNAL = 1.2; SWISSPROT HIT: P29324, EVALUE 2.80e+00
ENKILETVRNVMELSGEHETATYPGKRKSQLCLFCDSVKTHNLFIEMGNENMRKLEVLWFGSAEDITPSPPRLSPPAWIRFCVNTRPALHSRAHGRLPLQWFPDLSAIFAGGVFLGHCGYLKAMSKQTLLSLPENPWQELPFSPSLSFVSSCPFLPAAASSLNPTELLPGRG

SEQ ID NO: 30768 - protein, 153 aa, Homo sapiens
  MAP TO AL035682.16; EXPRESSED IN FETAL LIVER, SIGNAL = 1.6; EXPRESSED IN LUNG, SIGNAL = 1.1; EXPRESSED IN ADULT LIVER, SIGNAL = 1.3; EXPRESSED IN HELA, SIGNAL = 1.8; EXPRESSED IN PLACENTA, SIGNAL = 2.6; EXPRESSED IN BRAIN, SIGNAL = 1.1; SWISSPROT HIT: O43896, EVALUE 1.00e-01
TVEASLWPSRPCTTWLLPSFLPLQALFLPLSLMSAHYMPGITLSTSYTWACLICTAPIGGRSPHPILQGRTPGTERQEHRPRSHSQTLWGSRIGTQAAWPQSQHSLCSFRSLCLAAPPSSSSPLSSSHSNQPFLGTPQSEAVSRHIPQPPQSL

SEQ ID NO: 30769 - protein, 28 aa, Homo sapiens
  MAP TO AC010202.6; EXPRESSED IN BONE MARROW, SIGNAL = 0.96; EXPRESSED IN ADULT LIVER, SIGNAL = 1.9; EXPRESSED IN PLACENTA, SIGNAL = 1.3
TSPQGMAPAVGGRLRQASWMSAASGAVI

SEQ ID NO: 30770 - protein, 44 aa, Homo sapiens
  MAP TO AL022343.6; EXPRESSED IN PLACENTA, SIGNAL = 1.4; EXPRESSED IN BONE MARROW, SIGNAL = 1.1; EXPRESSED IN HEART, SIGNAL = 2.2; EXPRESSED IN ADULT LIVER, SIGNAL = 0.95; EXPRESSED IN LUNG, SIGNAL = 2.1; EXPRESSED IN BRAIN, SIGNAL = 1.4
LVDSEVVMLSAHWEKKKTSLVELQEQLQQLPALIADLESMTANL

SEQ ID NO: 30771 - protein, 32 aa, Homo sapiens
  MAP TO AL022343.6; EXPRESSED IN PLACENTA, SIGNAL = 1.4; EXPRESSED IN BONE MARROW, SIGNAL = 1.1; EXPRESSED IN HEART, SIGNAL = 2.2; EXPRESSED IN ADULT LIVER, SIGNAL = 0.95; EXPRESSED IN LUNG, SIGNAL = 2.1; EXPRESSED IN BRAIN, SIGNAL = 1.4
WWIARWSCFLRTGRRKRQASWSCKSSSSSSQL

SEQ ID NO: 30772 - protein, 48 aa, Homo sapiens
  MAP TO AL109839.11; EXPRESSED IN BRAIN, SIGNAL = 0.43; EXPRESSED IN BONE MARROW, SIGNAL = 0.53; EXPRESSED IN ADULT LIVER, SIGNAL = 0.57; SWISSPROT HIT: P53043, EVALUE 6.00e-04
PSAGDVEKARVLKEEGNELVKKGNHKKAIEKYSESLLCSNLESATYSN

SEQ ID NO: 30773 - protein, 49 aa, Homo sapiens
  MAP TO AL109981.1; EXPRESSED IN ADULT LIVER, SIGNAL = 3.4; EXPRESSED IN HEART, SIGNAL = 3.4; EXPRESSED IN HELA, SIGNAL = 2.5; EXPRESSED IN BRAIN, SIGNAL = 3.6; EXPRESSED IN BONE MARROW, SIGNAL = 3.8; EXPRESSED IN FETAL LIVER, SIGNAL = 3.5
AYFRQGVALQYLGRHADALAAFASGLAQDPKSLQLLVGMVEAAMKSPMR

SEQ ID NO: 30774 - protein, 43 aa, Homo sapiens
  MAP TO AL109981.1; EXPRESSED IN ADULT LIVER, SIGNAL = 3.4; EXPRESSED IN HEART, SIGNAL = 3.4; EXPRESSED IN HELA, SIGNAL = 2.5; EXPRESSED IN BRAIN, SIGNAL = 3.6; EXPRESSED IN BONE MARROW, SIGNAL = 3.8; EXPRESSED IN FETAL LIVER, SIGNAL = 3.5; SWISSPROT HIT: P21552, EVALUE 5.80e-01
HTSDRVLPSSTLDVMPMPWQPLHLDWLKTPRVSSFWWGWWKPP

SEQ ID NO: 30775 - protein, 55 aa, Homo sapiens
  MAP TO AC010205.5; EXPRESSED IN BONE MARROW, SIGNAL = 1.1; EXPRESSED IN PLACENTA, SIGNAL =   3; EXPRESSED IN ADULT LIVER, SIGNAL =   2; EXPRESSED IN HEART, SIGNAL = 2.8; SWISSPROT HIT: P55631, EVALUE 4.70e+00
KFVCLNDNIDHNHKDAQTVKAVLRDFYESMFPIPSQFELPREYRNRFLHMHELQE

SEQ ID NO: 30776 - protein, 49 aa, Homo sapiens
  MAP TO AF067846.1; EXPRESSED IN FETAL LIVER, SIGNAL = 1.3; EXPRESSED IN HELA, SIGNAL = 1.2; EXPRESSED IN PLACENTA, SIGNAL = 5.5; EXPRESSED IN ADULT LIVER, SIGNAL = 1.1; EXPRESSED IN HEART, SIGNAL = 1.8
LRQFLLEVFQKKALLSQEMTAPCVLLPLKTSQWDKMWRRKTVILMILTS

SEQ ID NO: 30777 - protein, 34 aa, Homo sapiens
  MAP TO AF067846.1; EXPRESSED IN FETAL LIVER, SIGNAL = 1.3; EXPRESSED IN HELA, SIGNAL = 1.2; EXPRESSED IN PLACENTA, SIGNAL = 5.5; EXPRESSED IN ADULT LIVER, SIGNAL = 1.1; EXPRESSED IN HEART, SIGNAL = 1.8
YTFSTYKKIQVKCKTVSGSSFWRYSRRRHCYHRR

SEQ ID NO: 30778 - protein, 65 aa, Homo sapiens
  MAP TO AL117187.3; EXPRESSED IN ADULT LIVER, SIGNAL = 5.1; EXPRESSED IN HEART, SIGNAL = 5.1; EXPRESSED IN LUNG, SIGNAL = 5.9; EXPRESSED IN FETAL LIVER, SIGNAL = 6.4; EXPRESSED IN BONE MARROW, SIGNAL = 4.9; EXPRESSED IN PLACENTA, SIGNAL = 5.3
SQESPNLENIANPLEENVTKESISSKKKEKRKHVDHVESSLFVAPGSVQSSDDLEEDSSDYSIPS

SEQ ID NO: 30779 - protein, 43 aa, Homo sapiens
  MAP TO AJ132410.1; EXPRESSED IN ADULT LIVER, SIGNAL = 0.71; EXPRESSED IN PLACENTA, SIGNAL = 1.9; EXPRESSED IN LUNG, SIGNAL = 1.7; EXPRESSED IN BRAIN, SIGNAL = 0.89
SSPTAPLTGLSYVFLLFSGPRAQMRPSVSCPWTETTTWSVTTA

SEQ ID NO: 30780 - protein, 23 aa, Homo sapiens
  MAP TO AJ132410.1; EXPRESSED IN ADULT LIVER, SIGNAL = 0.71; EXPRESSED IN PLACENTA, SIGNAL = 1.9; EXPRESSED IN LUNG, SIGNAL = 1.7; EXPRESSED IN BRAIN, SIGNAL = 0.89; SWISSPROT HIT: Q62523, EVALUE 1.00e-03
GSDETIRVVSMDRDYHVECYHCE

SEQ ID NO: 30781 - protein, 46 aa, Homo sapiens
  MAP TO AC007565.1; EXPRESSED IN PLACENTA, SIGNAL = 1.2; EXPRESSED IN ADULT LIVER, SIGNAL = 1.6
CQKKTRPPWMITQAPLPPPATPGPGRGPLPRPPRLRPPNSALSGPA

SEQ ID NO: 30782 - protein, 37 aa, Homo sapiens
  MAP TO AF196972.1; EXPRESSED IN LUNG, SIGNAL = 1.3; EXPRESSED IN PLACENTA, SIGNAL = 0.87; EXPRESSED IN ADULT LIVER, SIGNAL = 0.78; EXPRESSED IN HEART, SIGNAL = 0.94
GLGVRALNLLFGALAIFHLAYLGSLFDVDVDDTTEEQ

SEQ ID NO: 30783 - protein, 40 aa, Homo sapiens
  MAP TO AF036938.1; EXPRESSED IN ADULT LIVER, SIGNAL = 1.3; EXPRESSED IN HEART, SIGNAL = 0.99; EXPRESSED IN HELA, SIGNAL = 1.3; EXPRESSED IN FETAL LIVER, SIGNAL = 1.2; EXPRESSED IN BRAIN, SIGNAL = 0.96; SWISSPROT HIT: P34903, EVALUE 7.00e-18
LSPKHAPDIPDDSTDNITIFTRILDRLLDGYDNRLRPGLG

SEQ ID NO: 30784 - protein, 40 aa, Homo sapiens
  MAP TO AF036938.1; EXPRESSED IN ADULT LIVER, SIGNAL = 1.3; EXPRESSED IN HEART, SIGNAL = 0.99; EXPRESSED IN HELA, SIGNAL = 1.3; EXPRESSED IN FETAL LIVER, SIGNAL = 1.2; EXPRESSED IN BRAIN, SIGNAL = 0.96; SWISSPROT HIT: P48691, EVALUE 3.80e+00
CLLSMPQIFLMTALTTSLSSPESWIVFWTAMTTGCDLGLE

SEQ ID NO: 30785 - protein, 27 aa, Homo sapiens
  MAP TO AC012315.4; EXPRESSED IN ADULT LIVER, SIGNAL = 1.3; EXPRESSED IN HEART, SIGNAL = 1.2; EXPRESSED IN BRAIN, SIGNAL = 1.4; EXPRESSED IN FETAL LIVER, SIGNAL = 0.96; EXPRESSED IN LUNG, SIGNAL =   1; EXPRESSED IN HELA, SIGNAL = 1.4; EXPRESSED IN PLACENTA, SIGNAL = 1.3
VPHFAKVDVCTVPVRGVVINEHIHPAI

SEQ ID NO: 30786 - protein, 36 aa, Homo sapiens
  MAP TO AC006993.2; EXPRESSED IN ADULT LIVER, SIGNAL = 2.6; EXPRESSED IN HELA, SIGNAL = 2.4; EXPRESSED IN BRAIN, SIGNAL = 2.6; EXPRESSED IN FETAL LIVER, SIGNAL = 2.6; EXPRESSED IN BONE MARROW, SIGNAL = 1.3; EXPRESSED IN PLACENTA, SIGNAL = 3.3
WENSSRAFHLSPSTTISFIPWFRKPIWTFCKLQRIS

SEQ ID NO: 30787 - protein, 29 aa, Homo sapiens
  MAP TO AC012331.9; EXPRESSED IN PLACENTA, SIGNAL = 1.3; EXPRESSED IN HEART, SIGNAL = 1.2; EXPRESSED IN ADULT LIVER, SIGNAL = 1.3
PVMPISRVRGCCWRSFVVSRRTQPQGTQR

SEQ ID NO: 30788 - protein, 51 aa, Homo sapiens
  MAP TO AL121768.2; EXPRESSED IN HEART, SIGNAL = 2.7; EXPRESSED IN ADULT LIVER, SIGNAL = 1.7; EXPRESSED IN FETAL LIVER, SIGNAL =   2; EXPRESSED IN BRAIN, SIGNAL = 1.7; EXPRESSED IN BONE MARROW, SIGNAL = 1.7; EXPRESSED IN PLACENTA, SIGNAL = 1.7
WTIRSTLRWSQMEKRNLLGTGVKINLTMQRDWQHFAPALEICGTLNLREMI

SEQ ID NO: 30789 - protein, 43 aa, Homo sapiens
  MAP TO AF006501.4; EXPRESSED IN PLACENTA, SIGNAL = 2.5; EXPRESSED IN ADULT LIVER, SIGNAL = 2.4; EXPRESSED IN FETAL LIVER, SIGNAL = 2.5; EXPRESSED IN HELA, SIGNAL = 2.8; EXPRESSED IN BRAIN, SIGNAL = 1.6; SWISSPROT HIT: O88828, EVALUE 2.00e-18
EGQENVEILPSGERPQANQKRITTPYMTKYERARVLGTRALQI

SEQ ID NO: 30790 - protein, 26 aa, Homo sapiens
  MAP TO AF006501.4; EXPRESSED IN PLACENTA, SIGNAL = 2.5; EXPRESSED IN ADULT LIVER, SIGNAL = 2.4; EXPRESSED IN FETAL LIVER, SIGNAL = 2.5; EXPRESSED IN HELA, SIGNAL = 2.8; EXPRESSED IN BRAIN, SIGNAL = 1.6
KARRMSRSSPLGSDRRPTRSESPHHT

SEQ ID NO: 30791 - protein, 68 aa, Homo sapiens
  MAP TO AC016396.5; EXPRESSED IN PLACENTA, SIGNAL = 0.54; EXPRESSED IN ADULT LIVER, SIGNAL = 0.75; EXPRESSED IN FETAL LIVER, SIGNAL = 0.61; SWISSPROT HIT: P36161, EVALUE 3.40e+00
EWIAAVTIAAGTAAIGYLAYKRFYVKDHRNKAMINLHIQKDNPKIVHAFDMEDLGDKAVYCRCWRSKK

SEQ ID NO: 30792 - protein, 18 aa, Homo sapiens
  MAP TO AC016396.5; EXPRESSED IN PLACENTA, SIGNAL = 0.54; EXPRESSED IN ADULT LIVER, SIGNAL = 0.75; EXPRESSED IN FETAL LIVER, SIGNAL = 0.61
LNGSQQLPLLLGQLQLVI

SEQ ID NO: 30793 - protein, 52 aa, Homo sapiens
  MAP TO AC005933.1; EXPRESSED IN ADULT LIVER, SIGNAL = 3.7; EXPRESSED IN HEART, SIGNAL = 3.2; EXPRESSED IN FETAL LIVER, SIGNAL = 2.4; EXPRESSED IN HELA, SIGNAL = 2.4; EXPRESSED IN BRAIN, SIGNAL = 3.1; EXPRESSED IN BONE MARROW, SIGNAL = 2.9; EXPRESSED IN PLACENTA, SIGNAL = 3.1; SWISSPROT HIT: P16960, EVALUE 6.00e-14
CYLFHMYVGVRAGGGIGDEIEDPAGDEYELYRVVFDITFFFFVIVILLAIIQ

SEQ ID NO: 30794 - protein, 52 aa, Homo sapiens
  MAP TO AC005933.1; EXPRESSED IN ADULT LIVER, SIGNAL = 3.7; EXPRESSED IN HEART, SIGNAL = 3.2; EXPRESSED IN FETAL LIVER, SIGNAL = 2.4; EXPRESSED IN HELA, SIGNAL = 2.4; EXPRESSED IN BRAIN, SIGNAL = 3.1; EXPRESSED IN BONE MARROW, SIGNAL = 2.9; EXPRESSED IN PLACENTA, SIGNAL = 3.1
VTCFTCTWVSGLAEALGTRSRTPRVTNTSSTGWSSTSPSSSSSSSSCWPSSR

SEQ ID NO: 30795 - protein, 95 aa, Homo sapiens
  MAP TO AC008747.4; EXPRESSED IN HELA, SIGNAL = 0.8; EXPRESSED IN FETAL LIVER, SIGNAL = 0.35; EXPRESSED IN PLACENTA, SIGNAL = 0.73; EXPRESSED IN ADULT LIVER, SIGNAL = 0.66; SWISSPROT HIT: P47172, EVALUE 4.10e-01
WESRWENKELSTKKDIYKEDSLQTVTIEKVLKQSYEFSNSTKNLEHIEKLEGKPGIHVEHFRPATLTSRESPTGDSYKYDTFRITFHSKSTLSEP

SEQ ID NO: 30796 - protein, 25 aa, Homo sapiens
  MAP TO AC008747.4; EXPRESSED IN HELA, SIGNAL = 0.8; EXPRESSED IN FETAL LIVER, SIGNAL = 0.35; EXPRESSED IN PLACENTA, SIGNAL = 0.73; EXPRESSED IN ADULT LIVER, SIGNAL = 0.66
VGNQDGKTRNYQQRRIFIRKIHSKQ

SEQ ID NO: 30797 - protein, 21 aa, Homo sapiens
  MAP TO AF020801.1; EXPRESSED IN ADULT LIVER, SIGNAL = 0.9; EXPRESSED IN HEART, SIGNAL = 1.2; EXPRESSED IN BRAIN, SIGNAL = 0.79; EXPRESSED IN FETAL LIVER, SIGNAL = 0.84
VGSWIQKLQQPQVQPPGLADC

SEQ ID NO: 30798 - protein, 22 aa, Homo sapiens
  MAP TO AF241733.1; EXPRESSED IN HEART, SIGNAL = 1.3; EXPRESSED IN ADULT LIVER, SIGNAL = 1.1; EXPRESSED IN LUNG, SIGNAL = 1.5; EXPRESSED IN BRAIN, SIGNAL = 1.6; EXPRESSED IN PLACENTA, SIGNAL = 1.3
SPWKPVREEGSRIDKGEKPSKG

SEQ ID NO: 30799 - protein, 51 aa, Homo sapiens
  MAP TO AC000953.1; EXPRESSED IN ADULT LIVER, SIGNAL = 0.67; EXPRESSED IN BRAIN, SIGNAL = 0.88; EXPRESSED IN BONE MARROW, SIGNAL = 0.5; EXPRESSED IN PLACENTA, SIGNAL = 0.86; SWISSPROT HIT: Q9Z4P0, EVALUE 5.70e-01
VWQEERSLRNHGCTDWLQLPADFLHQLGDVHCVICHRGHGPDLQLCGSLHT

SEQ ID NO: 30800 - protein, 42 aa, Homo sapiens
  MAP TO AL021366.1; EXPRESSED IN LUNG, SIGNAL =  62; EXPRESSED IN FETAL LIVER, SIGNAL =  41; EXPRESSED IN HELA, SIGNAL =  76; EXPRESSED IN BRAIN, SIGNAL = 8.5; EXPRESSED IN ADULT LIVER, SIGNAL =  24
WAFHSTTVDVIYDVMRVVAINITAHRLGSPRNLFNGSREFSG

SEQ ID NO: 30801 - protein, 31 aa, Homo sapiens
  MAP TO AC008554.6; EXPRESSED IN ADULT LIVER, SIGNAL = 5.9; EXPRESSED IN BRAIN, SIGNAL = 5.2; EXPRESSED IN PLACENTA, SIGNAL = 7.3; SWISSPROT HIT: Q03924, EVALUE 2.00e-04
IVVSNPDLITWLQQGKETLTMKRQVMIAKHT

SEQ ID NO: 30802 - protein, 83 aa, Homo sapiens
  MAP TO AC016398.5; EXPRESSED IN FETAL LIVER, SIGNAL = 1.9; EXPRESSED IN BONE MARROW, SIGNAL = 0.76; EXPRESSED IN ADULT LIVER, SIGNAL = 1.4; EXPRESSED IN LUNG, SIGNAL = 1.2; EXPRESSED IN BRAIN, SIGNAL = 1.1; SWISSPROT HIT: Q9XBF9, EVALUE 6.20e+00
LRQQWWKWQDLLLVRCRLLEPSTNPCIAKEAADIDTGQGFCKEARPKGLDSYSSCFNEVIEFILRDGHLIALQNEGPVDADNL

SEQ ID NO: 30803 - protein, 65 aa, Homo sapiens
  MAP TO AC007162.1; EXPRESSED IN BRAIN, SIGNAL = 6.7; EXPRESSED IN BONE MARROW, SIGNAL =   3; EXPRESSED IN PLACENTA, SIGNAL = 6.1; EXPRESSED IN ADULT LIVER, SIGNAL = 6.2; SWISSPROT HIT: Q99758, EVALUE 2.00e-31
VYEQRVPLLAVDRLSLAVQKGECFGLLGFNGAGKTTTFKMLTGEESLTSGDAFVGGHRISSDVGK

SEQ ID NO: 30804 - protein, 40 aa, Homo sapiens
  MAP TO AC007162.1; EXPRESSED IN BRAIN, SIGNAL = 6.7; EXPRESSED IN BONE MARROW, SIGNAL =   3; EXPRESSED IN PLACENTA, SIGNAL = 6.1; EXPRESSED IN ADULT LIVER, SIGNAL = 6.2
CTSSGCPSWPWTGSPSRCRKGSASACWASMEPGRPRLSKC

SEQ ID NO: 30805 - protein, 104 aa, Homo sapiens [sequence omitted]

SEQ ID NO: 30806 - protein, 70 aa, Homo sapiens
  MAP TO AL109802.6; EXPRESSED IN ADULT LIVER, SIGNAL = 0.81; EXPRESSED IN FETAL LIVER, SIGNAL = 0.67; EXPRESSED IN BONE MARROW, SIGNAL = 1.3; EXPRESSED IN PLACENTA, SIGNAL = 0.83; SWISSPROT HIT: P38925, EVALUE 2.70e+00
RWLSDSIMSLCSRYTSVTGSRPGSGGRACTLTMPRWRNWPGRWPCGAPLLTGNTVSFQILRLSIASARTA

SEQ ID NO: 30807 - protein, 27 aa, Homo sapiens
  MAP TO AC008427.5; EXPRESSED IN ADULT LIVER, SIGNAL = 6.9; EXPRESSED IN HEART, SIGNAL = 8.4; EXPRESSED IN LUNG, SIGNAL = 5.6; EXPRESSED IN FETAL LIVER, SIGNAL = 8.6; EXPRESSED IN BRAIN, SIGNAL = 6.1; EXPRESSED IN BONE MARROW, SIGNAL = 6.4; EXPRESSED IN PLACENTA, SIGNAL = 8.1; SWISSPROT HIT: P16499, EVALUE 5.00e-09
MNGKDVVAIIMAVNKVDGSHFTKRDEE

SEQ ID NO: 30808 - protein, 23 aa, Homo sapiens
  MAP TO AC008427.5; EXPRESSED IN ADULT LIVER, SIGNAL = 6.9; EXPRESSED IN HEART, SIGNAL = 8.4; EXPRESSED IN LUNG, SIGNAL = 5.6; EXPRESSED IN FETAL LIVER, SIGNAL = 8.6; EXPRESSED IN BRAIN, SIGNAL = 6.1; EXPRESSED IN BONE MARROW, SIGNAL = 6.4; EXPRESSED IN PLACENTA, SIGNAL = 8.1
MSISVTLWTSSQSTRPRTSWLPP

SEQ ID NO: 30809 - protein, 55 aa, Homo sapiens
  MAP TO AC005597.1; EXPRESSED IN ADULT LIVER, SIGNAL = 0.55; EXPRESSED IN HELA, SIGNAL = 0.63; SWISSPROT HIT: P46127, EVALUE 8.10e+00
HTVRLHFLPPGSEARPPDLLWPKKVNIMASEWKYLVTGTRLPNALPATVTVMVQK

SEQ ID NO: 30810 - protein, 40 aa, Homo sapiens
  MAP TO AC005952.1; EXPRESSED IN BONE MARROW, SIGNAL = 2.8; EXPRESSED IN PLACENTA, SIGNAL = 3.4; EXPRESSED IN ADULT LIVER, SIGNAL =   3; EXPRESSED IN HELA, SIGNAL = 3.4; EXPRESSED IN BRAIN, SIGNAL = 3.4; EXPRESSED IN FETAL LIVER, SIGNAL = 2.3; SWISSPROT HIT: P97737, EVALUE 3.80e+00
GVAFPGRCSGCGRTKRGPWCFSVPGQSSGIQTSQVSPGGA

SEQ ID NO: 30811 - protein, 19 aa, Homo sapiens
  MAP TO AF172277.1; EXPRESSED IN HELA, SIGNAL = 1.6; EXPRESSED IN FETAL LIVER, SIGNAL = 1.5; EXPRESSED IN PLACENTA, SIGNAL = 1.5; EXPRESSED IN ADULT LIVER, SIGNAL = 1.1
FPGPVMGLILTSIKTLWSP

SEQ ID NO: 30812 - protein, 65 aa, Homo sapiens
  MAP TO AF172277.1; EXPRESSED IN HELA, SIGNAL = 1.6; EXPRESSED IN FETAL LIVER, SIGNAL = 1.5; EXPRESSED IN PLACENTA, SIGNAL = 1.5; EXPRESSED IN ADULT LIVER, SIGNAL = 1.1; SWISSPROT HIT: P35331, EVALUE 4.00e-27
FSWTRNGTHFDIDKDPLVTMKPGTGTLIINIMSEGKAETYEGVYQCTARNERGAAVSNNIVVRPS

SEQ ID NO: 30813 - protein, 97 aa, Homo sapiens
  MAP TO AC006293.1; EXPRESSED IN BRAIN, SIGNAL =   3; EXPRESSED IN FETAL LIVER, SIGNAL = 1.7; EXPRESSED IN BONE MARROW, SIGNAL = 3.6; EXPRESSED IN PLACENTA, SIGNAL = 2.4; EXPRESSED IN ADULT LIVER, SIGNAL = 2.9; EXPRESSED IN HEART, SIGNAL = 2.4; SWISSPROT HIT: P43632, EVALUE 5.00e-39
LYGKPSLSAQPGPTVQAGENVTLSCSSRSLFDIYHLSREAEAGELRLTAVLRVNGTFQANFPLGPVTHGGNYRCFGSFRALPHAWSDPSDPLPVSVT

SEQ ID NO: 30814 - protein, 41 aa, Homo sapiens
  MAP TO AL121915.8; EXPRESSED IN BRAIN, SIGNAL = 0.92; EXPRESSED IN BONE MARROW, SIGNAL = 1.4; EXPRESSED IN PLACENTA, SIGNAL =   1; EXPRESSED IN ADULT LIVER, SIGNAL = 1.2
PGTGKAATNKTRFPLSWRQPTSQPMNRPFHVMVSAKETLTQ

SEQ ID NO: 30815 - protein, 25 aa, Homo sapiens
  MAP TO AL121915.8; EXPRESSED IN BRAIN, SIGNAL = 0.92; EXPRESSED IN BONE MARROW, SIGNAL = 1.4; EXPRESSED IN PLACENTA, SIGNAL =   1; EXPRESSED IN ADULT LIVER, SIGNAL = 1.2
CLALERQQRTRQGFHSHGDNQQANQ

SEQ ID NO: 30816 - protein, 45 aa, Homo sapiens
  MAP TO AC010219.4; EXPRESSED IN BONE MARROW, SIGNAL = 0.85; EXPRESSED IN PLACENTA, SIGNAL = 1.3; EXPRESSED IN HEART, SIGNAL = 1.3; EXPRESSED IN LUNG, SIGNAL = 1.2; EXPRESSED IN ADULT LIVER, SIGNAL = 1.1; EXPRESSED IN BRAIN, SIGNAL =   1; EXPRESSED IN HELA, SIGNAL = 0.85
KTVLLGTKLLIQGHNQQVTKLPPKTSRHGLKGCFIPLSCATSLKD

SEQ ID NO: 30817 - protein, 31 aa, Homo sapiens
  MAP TO AL022325.1; EXPRESSED IN LUNG, SIGNAL = 3.3; EXPRESSED IN BONE MARROW, SIGNAL = 1.1; EXPRESSED IN PLACENTA, SIGNAL = 0.75; EXPRESSED IN ADULT LIVER, SIGNAL = 1.1
REDGSPQGILGNLAEKEGLVFKAVSCLEEFY

SEQ ID NO: 30818 - protein, 95 aa, Homo sapiens
  MAP TO AL118558.2; EXPRESSED IN BRAIN, SIGNAL = 7.2; EXPRESSED IN BONE MARROW, SIGNAL = 9.1; EXPRESSED IN PLACENTA, SIGNAL = 6.4; EXPRESSED IN ADULT LIVER, SIGNAL = 7.9; EXPRESSED IN HEART, SIGNAL = 6.8; EXPRESSED IN LUNG, SIGNAL =  11; SWISSPROT HIT: Q14990, EVALUE 3.60e+00
MPHFHLKVDSPARRLHILHRYSRRCFRRLDARPLRSLSLILKLEETWCLVTSYSTRVREDSLTEACCDFSPAACCCYFGVARSIKAKLYWLRVSF

SEQ ID NO: 30819 - protein, 38 aa, Homo sapiens
  MAP TO AC012082.6; EXPRESSED IN BRAIN, SIGNAL =   1; EXPRESSED IN BONE MARROW, SIGNAL =   1; EXPRESSED IN PLACENTA, SIGNAL = 1.2; EXPRESSED IN ADULT LIVER, SIGNAL = 1.3
SLNITPYTYVVQNPHNHMQQLCFMALKLAVLCFWYYSP

SEQ ID NO: 30820 - protein, 36 aa, Homo sapiens
  MAP TO AC010345.4; EXPRESSED IN BONE MARROW, SIGNAL = 1.3; EXPRESSED IN PLACENTA, SIGNAL = 1.3; EXPRESSED IN HEART, SIGNAL = 1.1; EXPRESSED IN ADULT LIVER, SIGNAL = 2.1; EXPRESSED IN BRAIN, SIGNAL = 1.6; EXPRESSED IN FETAL LIVER, SIGNAL = 1.1
MASLGSSWRLGGLTRLFLLLLLLLYFMLLPKSVLAL

SEQ ID NO: 30821 - protein, 57 aa, Homo sapiens
  MAP TO AL049849.1; EXPRESSED IN BONE MARROW, SIGNAL = 1.5; EXPRESSED IN PLACENTA, SIGNAL = 1.3; EXPRESSED IN ADULT LIVER, SIGNAL = 1.2; EXPRESSED IN LUNG, SIGNAL = 1.9; EXPRESSED IN HELA, SIGNAL = 1.7; EXPRESSED IN FETAL LIVER, SIGNAL = 1.5
LAAAATIAPTPKESALLSPSMHLPTLQGSYHLASMGTLLLLLLSCRLHHRGCHNRRR

SEQ ID NO: 30822 - protein, 114 aa, Homo sapiens
  MAP TO AL049849.1; EXPRESSED IN BONE MARROW, SIGNAL = 1.5; EXPRESSED IN PLACENTA, SIGNAL = 1.3; EXPRESSED IN ADULT LIVER, SIGNAL = 1.2; EXPRESSED IN LUNG, SIGNAL = 1.9; EXPRESSED IN HELA, SIGNAL = 1.7; EXPRESSED IN FETAL LIVER, SIGNAL = 1.5; SWISSPROT HIT: O60883, EVALUE 1.90e-01
TCCCCHHCADTKGISAAVTFHAPAHPPRILPLGLHGYPPIAPVELPSPSPWLPQPQKMNHRAVPSSGSNLQLTTGDSSFISLAWSSWADNARKTYNRMQKVAVLEPHPVMLPTG

SEQ ID NO: 30823 - protein, 78 aa, Homo sapiens
  MAP TO AL096806.1; EXPRESSED IN ADULT LIVER, SIGNAL = 3.8; EXPRESSED IN HEART, SIGNAL = 3.9; EXPRESSED IN LUNG, SIGNAL =   7; EXPRESSED IN BONE MARROW, SIGNAL = 5.1; EXPRESSED IN BRAIN, SIGNAL = 4.4; EXPRESSED IN PLACENTA, SIGNAL = 3.3; SWISSPROT HIT: Q9R001, EVALUE 5.70e+00
FSARTRETWEDPTLAVMCNLGRRRLAPQRRRDQCCSLLPPVDTCESHADPSGPQGALGLCGCLQCVPGDCQKPTDDKN

SEQ ID NO: 30824 - protein, 42 aa, Homo sapiens
  MAP TO AC006522.5; EXPRESSED IN BRAIN, SIGNAL = 1.7; EXPRESSED IN FETAL LIVER, SIGNAL = 1.8; EXPRESSED IN BONE MARROW, SIGNAL = 1.8; EXPRESSED IN PLACENTA, SIGNAL = 2.3; EXPRESSED IN ADULT LIVER, SIGNAL = 1.3; SWISSPROT HIT: Q9ZLD9, EVALUE 8.40e+00
VHLDLIVLGNGTTSSEVVEQIQEYKREKTMEDRNLARDILCS

SEQ ID NO: 30825 - protein, 60 aa, Homo sapiens
  MAP TO AL096853.12; EXPRESSED IN BONE MARROW, SIGNAL = 3.4; EXPRESSED IN PLACENTA, SIGNAL =   2; EXPRESSED IN ADULT LIVER, SIGNAL = 2.8; EXPRESSED IN LUNG, SIGNAL = 2.3; EXPRESSED IN FETAL LIVER, SIGNAL = 2.7; EXPRESSED IN BRAIN, SIGNAL = 2.7; EXPRESSED IN HELA, SIGNAL = 2.4; SWISSPROT HIT: P54737, EVALUE 1.60e+00
VNIENFASSGRGTVYPGLDSRSAFRTAVACLSLSSCSEGRLLIESTDSTSIDLVSWLFRK

SEQ ID NO: 30826 - protein, 51 aa, Homo sapiens
  MAP TO AC007229.1; EXPRESSED IN BRAIN, SIGNAL = 1.6; EXPRESSED IN PLACENTA, SIGNAL = 2.3; EXPRESSED IN ADULT LIVER, SIGNAL =   2; EXPRESSED IN HEART, SIGNAL = 2.5; EXPRESSED IN FETAL LIVER, SIGNAL = 1.7
QKTRMGPRRTPSPWTPNWSGRWRPFATWWTHTWPSSTSPSATSCQRPSCTS

SEQ ID NO: 30827 - protein, 55 aa, Homo sapiens
  MAP TO AC007229.1; EXPRESSED IN BRAIN, SIGNAL = 1.6; EXPRESSED IN PLACENTA, SIGNAL = 2.3; EXPRESSED IN ADULT LIVER, SIGNAL =   2; EXPRESSED IN HEART, SIGNAL = 2.5; EXPRESSED IN FETAL LIVER, SIGNAL = 1.7; SWISSPROT HIT: P50570, EVALUE 2.00e-25
AENEDGAQENTFSMDPQLERQVETIRNLVDSYVAIINKSIRDLMPKTIMHLMINN

SEQ ID NO: 30828 - protein, 49 aa, Homo sapiens
  MAP TO AL109865.36; EXPRESSED IN PLACENTA, SIGNAL = 4.4; EXPRESSED IN ADULT LIVER, SIGNAL = 3.9; EXPRESSED IN LUNG, SIGNAL = 4.8
CSEARNNRLKMVVEQKIMVTVHTAVMHPHIAIRKQALVTNGPKHLMILG

SEQ ID NO: 30829 - protein, 90 aa, Homo sapiens
  MAP TO AL109865.36; EXPRESSED IN PLACENTA, SIGNAL = 4.4; EXPRESSED IN ADULT LIVER, SIGNAL = 3.9; EXPRESSED IN LUNG, SIGNAL = 4.8; SWISSPROT HIT: Q06587, EVALUE 4.10e-02
LQRGKKQQIENGSGAEDNGDSSHCSNASTHSNQEAGPSNKRTKTSDDSGLELDNNNAAMAIDPVMDGASEIELVFRPHPTLMEKDDSAQT

SEQ ID NO: 30830 - protein, 35 aa, Homo sapiens
  MAP TO AC005547.1; EXPRESSED IN BRAIN, SIGNAL = 1.4; EXPRESSED IN BONE MARROW, SIGNAL =   1; EXPRESSED IN HEART, SIGNAL = 2.9; EXPRESSED IN ADULT LIVER, SIGNAL = 1.2; SWISSPROT HIT: P48123, EVALUE 5.00e+00
ATVADHPSIRVNKSFTEKDLMPRTISPQLGGLAQA

SEQ ID NO: 30831 - protein, 19 aa, Homo sapiens
  MAP TO AC005547.1; EXPRESSED IN BRAIN, SIGNAL = 1.4; EXPRESSED IN BONE MARROW, SIGNAL =   1; EXPRESSED IN HEART, SIGNAL = 2.9; EXPRESSED IN ADULT LIVER, SIGNAL = 1.2
PPWLTTQASESISLSLRKT

SEQ ID NO: 30832 - protein, 30 aa, Homo sapiens
  MAP TO AC002102.1; EXPRESSED IN BONE MARROW, SIGNAL = 0.52; EXPRESSED IN PLACENTA, SIGNAL = 0.58; EXPRESSED IN ADULT LIVER, SIGNAL = 0.52; EXPRESSED IN BRAIN, SIGNAL = 0.52
LRFMSFLEPQNATFFGNRITADVMSDDEVT

SEQ ID NO: 30833 - protein, 83 aa, Homo sapiens
  MAP TO AF274858.1; EXPRESSED IN LUNG, SIGNAL = 2.5; EXPRESSED IN BRAIN, SIGNAL = 2.6; EXPRESSED IN BONE MARROW, SIGNAL = 1.9; EXPRESSED IN ADULT LIVER, SIGNAL = 1.7; EXPRESSED IN FETAL LIVER, SIGNAL = 1.5; SWISSPROT HIT: Q16720, EVALUE 3.00e-34
IRVVKAFRSSLYEGLEKPESKTSIHNFMATPEFLINDYTHNIPLIDDTDVDENEERLRAPPPPSPNQNNNAIDSGIYLTTHVT

SEQ ID NO: 30834 - protein, 75 aa, Homo sapiens
  MAP TO AC004699.1; EXPRESSED IN FETAL LIVER, SIGNAL = 0.39; EXPRESSED IN LUNG, SIGNAL = 0.7; EXPRESSED IN ADULT LIVER, SIGNAL = 0.59; SWISSPROT HIT: P31944, EVALUE 3.00e-38
QFQEELEKFQQAIDSREDPVSCAFVVLMAHGREGFLKGEDGEMVKLENLFEALNNKNCQALRAKPKVYIIQACRG

SEQ ID NO: 30835 - protein, 52 aa, Homo sapiens
  MAP TO AC004699.1; EXPRESSED IN FETAL LIVER, SIGNAL = 0.39; EXPRESSED IN LUNG, SIGNAL = 0.7; EXPRESSED IN ADULT LIVER, SIGNAL = 0.59; SWISSPROT HIT: P08502, EVALUE 4.80e+00
NSRKSWKNSSRPSIPGKIPSVVPSWYSWLTGGKASSREKMGRWSSWRISSRP

SEQ ID NO: 30836 - protein, 62 aa, Homo sapiens
  MAP TO AC004699.1; EXPRESSED IN FETAL LIVER, SIGNAL = 0.39; EXPRESSED IN LUNG, SIGNAL = 0.7; EXPRESSED IN ADULT LIVER, SIGNAL = 0.59; SWISSPROT HIT: P10388, EVALUE 2.10e+00
IPGRAGKIPAGHRFPGRSRQLCLRGTHGSREGRLPQGRRWGDGQAGESLRGPEQQELPGPAS

SEQ ID NO: 30837 - protein, 37 aa, Homo sapiens
  MAP TO AC012152.12; EXPRESSED IN BRAIN, SIGNAL = 1.1; EXPRESSED IN HELA, SIGNAL =   1; EXPRESSED IN FETAL LIVER, SIGNAL = 1.1; EXPRESSED IN BONE MARROW, SIGNAL = 0.85; EXPRESSED IN PLACENTA, SIGNAL = 1.2; EXPRESSED IN ADULT LIVER, SIGNAL = 1.3; EXPRESSED IN LUNG, SIGNAL = 0.99; SWISSPROT HIT: P16713, EVALUE 2.20e+00
LPALYSPIDDLTAQNEIYHSQDIFTFVQPGETKRGGV

SEQ ID NO: 30838 - protein, 71 aa, Homo sapiens
  MAP TO AC010422.6; EXPRESSED IN ADULT LIVER, SIGNAL = 0.36; EXPRESSED IN FETAL LIVER, SIGNAL = 0.55; EXPRESSED IN BRAIN, SIGNAL = 0.73; EXPRESSED IN LUNG, SIGNAL = 0.65; EXPRESSED IN BONE MARROW, SIGNAL = 0.4; SWISSPROT HIT: P49366, EVALUE 7.00e-25
AHGRFPGTGGASGGALAAVLKHSSTLPPESTQVRGYDFNRGVNYRALLEAFGTTGFQATNFGRAVQQVNAM

SEQ ID NO: 30839 - protein, 86 aa, Homo sapiens
  MAP TO AC004144.1; EXPRESSED IN ADULT LIVER, SIGNAL = 0.64; EXPRESSED IN BRAIN, SIGNAL = 0.6
LVSSGQVDTGQQQARTELVSTFLWIHSQLEAECLVGTSVAPAQALPSPGPPSPPTLYPLASPDLQALLEHYSELLVQAVRRKARGH

SEQ ID NO: 30840 - protein, 33 aa, Homo sapiens
  MAP TO AC004144.1; EXPRESSED IN ADULT LIVER, SIGNAL = 0.64; EXPRESSED IN BRAIN, SIGNAL = 0.6; SWISSPROT HIT: Q15526, EVALUE 5.00e+00
WSPVARWTPGSSRHGLSWSPPSCGSTASWRLNA

SEQ ID NO: 30841 - protein, 69 aa, Homo sapiens
  MAP TO AC010300.5; EXPRESSED IN BRAIN, SIGNAL = 1.4; EXPRESSED IN BONE MARROW, SIGNAL = 1.3; EXPRESSED IN ADULT LIVER, SIGNAL = 1.3; EXPRESSED IN PLACENTA, SIGNAL = 1.2; EXPRESSED IN HEART, SIGNAL = 2.9; SWISSPROT HIT: P53420, EVALUE 6.60e+00
LRTPGFGEVAAWIGDQRPEGRAGKRSSPAGSFSGNEILCTLEGRLAPLVPLPTCWPHVDGRIWPLRWAG

SEQ ID NO: 30842 - protein, 34 aa, Homo sapiens
  MAP TO AC010300.5; EXPRESSED IN BRAIN, SIGNAL = 1.4; EXPRESSED IN BONE MARROW, SIGNAL = 1.3; EXPRESSED IN ADULT LIVER, SIGNAL = 1.3; EXPRESSED IN PLACENTA, SIGNAL = 1.2; EXPRESSED IN HEART, SIGNAL = 2.9; SWISSPROT HIT: P25711, EVALUE 8.60e+00
QDSWLWRSRCMDRGPEARGPGWEEELSGWQLLRK

SEQ ID NO: 30843 - protein, 129 aa, Homo sapiens
  MAP TO AL096870.3; EXPRESSED IN ADULT LIVER, SIGNAL = 3.2; EXPRESSED IN HEART, SIGNAL = 2.3; EXPRESSED IN FETAL LIVER, SIGNAL = 3.2; EXPRESSED IN BONE MARROW, SIGNAL = 4.2; EXPRESSED IN PLACENTA, SIGNAL = 3.2; SWISSPROT HIT: O15321, EVALUE 3.00e-66
STALRMTVVGNPRSWSCQWLPILILLLGTGHGPGVEGVTHYKAGDPVILYVNKVGPYHNPQETYHYYQLPVCCPEKIRHKSLSLGEVLDGDRMAESLYEIRFRENVEKRILCHMQLSSAQVSLSTLAIT

SEQ ID NO: 30844 - protein, 89 aa, Homo sapiens
  MAP TO AC009509.7; EXPRESSED IN HELA, SIGNAL = 2.9; EXPRESSED IN BONE MARROW, SIGNAL = 1.1; EXPRESSED IN BRAIN, SIGNAL = 1.4; EXPRESSED IN PLACENTA, SIGNAL = 1.4; EXPRESSED IN ADULT LIVER, SIGNAL = 1.4; SWISSPROT HIT: P08552, EVALUE 5.00e-03
NTEEWEKSKTEADMEEYIWENSSSERNILETLLQMKAAEKNMEINKEELLGTKEIEEYKKSVVSLKNEEENENSISQYKESVKRLLNVT

SEQ ID NO: 30845 - protein, 34 aa, Homo sapiens
  MAP TO AC009509.7; EXPRESSED IN HELA, SIGNAL = 2.9; EXPRESSED IN BONE MARROW, SIGNAL = 1.1; EXPRESSED IN BRAIN, SIGNAL = 1.4; EXPRESSED IN PLACENTA, SIGNAL = 1.4; EXPRESSED IN ADULT LIVER, SIGNAL = 1.4; SWISSPROT HIT: P13877, EVALUE 5.00e+00
ILKNGKKVRLKQTWKSIYGKIAHQKEISWKRFSR

SEQ ID NO: 30846 - protein, 21 aa, Homo sapiens
  MAP TO AC009145.4; EXPRESSED IN BONE MARROW, SIGNAL = 0.44; EXPRESSED IN ADULT LIVER, SIGNAL = 0.76; EXPRESSED IN HEART, SIGNAL = 1.1; EXPRESSED IN LUNG, SIGNAL = 0.89; EXPRESSED IN BRAIN, SIGNAL = 0.64
RWHKEQWTGVTFRGAGSRSLR

SEQ ID NO: 30847 - protein, 92 aa, Homo sapiens
  MAP TO AC009145.4; EXPRESSED IN BONE MARROW, SIGNAL = 0.44; EXPRESSED IN ADULT LIVER, SIGNAL = 0.76; EXPRESSED IN HEART, SIGNAL = 1.1; EXPRESSED IN LUNG, SIGNAL = 0.89; EXPRESSED IN BRAIN, SIGNAL = 0.64; SWISSPROT HIT: P25123, EVALUE 2.90e+00
KDGTRNNGQELLSEVPGQEAYGRKAKPSPVLASGNSDNGHLDHGHSHGQKDSAWDPTVSNQPLRWANASPLVLHSCAQEEAAPPVPGLGCSV

SEQ ID NO: 30848 - protein, 31 aa, Homo sapiens
  MAP TO AC008580.5; EXPRESSED IN BRAIN, SIGNAL = 1.9; EXPRESSED IN PLACENTA, SIGNAL = 2.4; EXPRESSED IN BONE MARROW, SIGNAL = 1.3; EXPRESSED IN ADULT LIVER, SIGNAL = 1.8; EXPRESSED IN HELA, SIGNAL = 2.4
IWTIRSRVRWSQMKKMRNLLGTGAKVVLFMF

SEQ ID NO: 30849 - protein, 142 aa, Homo sapiens [sequence omitted]

SEQ ID NO: 30850 - protein, 63 aa, Homo sapiens
  MAP TO AF107045.1; EXPRESSED IN FETAL LIVER, SIGNAL = 2.2; EXPRESSED IN BRAIN, SIGNAL =   1; EXPRESSED IN PLACENTA, SIGNAL = 1.5; EXPRESSED IN BONE MARROW, SIGNAL = 1.9; EXPRESSED IN ADULT LIVER, SIGNAL = 1.4; SWISSPROT HIT: P07742, EVALUE 8.00e-32
SIPEIPDDLKQLYKTVWEISQKTVLKMAAERGAFIDQSQSLNIHIAEPNYGKLTSMHFYGWKQ

SEQ ID NO: 30851 - protein, 107 aa, Homo sapiens
  MAP TO AC008456.4; EXPRESSED IN PLACENTA, SIGNAL = 2.1; EXPRESSED IN HEART, SIGNAL = 2.1; EXPRESSED IN ADULT LIVER, SIGNAL = 1.7; EXPRESSED IN BRAIN, SIGNAL = 1.8; EXPRESSED IN HELA, SIGNAL = 1.8; SWISSPROT HIT: O94823, EVALUE 2.00e-55
ETCESILNCALEELKQFRELQKPDRKLFGFRLPSKTPSITSEAVVPEAGLVIDGKTLNAIFQGKLEKKFLELTQYCRSVLCCRSTPLQKSMIVKLVRDKLRVMTLSI

SEQ ID NO: 30852 - protein, 46 aa, Homo sapiens
  MAP TO AL035444.9; EXPRESSED IN LUNG, SIGNAL = 2.4; EXPRESSED IN BONE MARROW, SIGNAL = 2.5; EXPRESSED IN PLACENTA, SIGNAL = 2.8; EXPRESSED IN ADULT LIVER, SIGNAL = 2.6; EXPRESSED IN HEART, SIGNAL = 2.5; EXPRESSED IN BRAIN, SIGNAL = 2.7; EXPRESSED IN FETAL LIVER, SIGNAL = 2.9; SWISSPROT HIT: P45004, EVALUE 8.30e+00
KIVTVHWRNMTNTILNQMMKVNITSDIMQASYTPRYDATRRAPELV

SEQ ID NO: 30853 - protein, 105 aa, Homo sapiens
  MAP TO AL096870.3; EXPRESSED IN ADULT LIVER, SIGNAL = 0.38; EXPRESSED IN FETAL LIVER, SIGNAL = 0.36; EXPRESSED IN BONE MARROW, SIGNAL = 0.46; EXPRESSED IN PLACENTA, SIGNAL = 0.41; SWISSPROT HIT: P22735, EVALUE 1.00e-18
MDGPRSDVGRWGGNPLQPPTTPSPEPEPEPDGRSRRGGGRSFWARCCGCCSCRNAADDDWGPEPSDSRGRGSSSGTRRPGSRGSDSRRPVSRGSGVNAAGDGTIR

SEQ ID NO: 30854 - protein, 47 aa, Homo sapiens
  MAP TO AC010168.6; EXPRESSED IN ADULT LIVER, SIGNAL = 5.7; EXPRESSED IN HEART, SIGNAL =   3; EXPRESSED IN LUNG, SIGNAL = 6.5; EXPRESSED IN FETAL LIVER, SIGNAL = 3.1; EXPRESSED IN BONE MARROW, SIGNAL = 6.5; EXPRESSED IN PLACENTA, SIGNAL = 4.6; SWISSPROT HIT: P25092, EVALUE 7.00e-21
VSQNCHNGSYEISVLMMGNSAFAEPLKNLEDAVNEGLEIVRGRLQNA

SEQ ID NO: 30855 - protein, 80 aa, Homo sapiens
  MAP TO AL031721.1; EXPRESSED IN LUNG, SIGNAL = 4.4; EXPRESSED IN BRAIN, SIGNAL = 3.5; EXPRESSED IN BONE MARROW, SIGNAL = 5.4; EXPRESSED IN PLACENTA, SIGNAL =   4; EXPRESSED IN ADULT LIVER, SIGNAL = 3.2; SWISSPROT HIT: Q9YEK4, EVALUE 4.10e-01
WLRSPPALGGAGTANRAARWTQRMASVAMVLWAGSRGWRQVQSRPATWDLAGADQSAKGVPPGLCPNICHGRQPWKTDPA

SEQ ID NO: 30856 - protein, 99 aa, Homo sapiens
  MAP TO AL031721.1; EXPRESSED IN LUNG, SIGNAL = 4.4; EXPRESSED IN BRAIN, SIGNAL = 3.5; EXPRESSED IN BONE MARROW, SIGNAL = 5.4; EXPRESSED IN PLACENTA, SIGNAL =   4; EXPRESSED IN ADULT LIVER, SIGNAL = 3.2
GALGREPGMATGAEPASDLGPGGGGPVSEGSTARPLPKHLPWAAAVEDGPCRWWWWGYGGWEYRGQASHHHLCVWSHSAPGGHVQHSWASHGLKGIPTR

SEQ ID NO: 30857 - protein, 20 aa, Homo sapiens
  MAP TO AC008599.5; EXPRESSED IN ADULT LIVER, SIGNAL = 0.63; EXPRESSED IN HEART, SIGNAL = 1.3; EXPRESSED IN FETAL LIVER, SIGNAL = 1.7; SWISSPROT HIT: O76082, EVALUE 2.00e-04
DWRMLLLALTVPGVLCVPLW

SEQ ID NO: 30858 - protein, 57 aa, Homo sapiens
  MAP TO AC008599.5; EXPRESSED IN ADULT LIVER, SIGNAL = 0.63; EXPRESSED IN HEART, SIGNAL = 1.3; EXPRESSED IN FETAL LIVER, SIGNAL = 1.7
NRNSWQVSSYYILYIRSVHIFCSWLYAAATVCLLHQRLADAAAGADGAGSAVCPAVV

SEQ ID NO: 30859 - protein, 106 aa, Homo sapiens
  MAP TO AC016620.5; EXPRESSED IN BRAIN, SIGNAL = 2.1; EXPRESSED IN BONE MARROW, SIGNAL = 1.9; EXPRESSED IN PLACENTA, SIGNAL = 1.5; EXPRESSED IN HEART, SIGNAL = 1.9; EXPRESSED IN ADULT LIVER, SIGNAL = 1.9
AERDEEAAEEKCEASRGWFMRFKERSHLHNIKMQGEAASTEAEASTSYPEDLAKILEGGYDKQQIFNVDRTALYWKKMPSRTLIVREKLMPGSKASKGQVDSLDKD

SEQ ID NO: 30860 - protein, 99 aa, Homo sapiens
  MAP TO AC010327.5; EXPRESSED IN BRAIN, SIGNAL = 1.1; EXPRESSED IN PLACENTA, SIGNAL = 1.2; EXPRESSED IN ADULT LIVER, SIGNAL = 1.2; EXPRESSED IN HEART, SIGNAL = 1.5; SWISSPROT HIT: Q61772, EVALUE 6.00e-03
PNEVTDLQNETQTKNSVMLWWKAPGDPHSQLYVYWVQWASKGHPRRGQDPQANWVNQTSRTNETWYKVEALEPGTLYNFTVWAERNDVASSTQSLCAST

SEQ ID NO: 30861 - protein, 33 aa, Homo sapiens
  MAP TO AC008822.5; EXPRESSED IN HELA, SIGNAL = 1.6; EXPRESSED IN PLACENTA, SIGNAL = 1.6; EXPRESSED IN HEART, SIGNAL =   2; EXPRESSED IN ADULT LIVER, SIGNAL = 1.2; EXPRESSED IN BRAIN, SIGNAL = 1.3
EYPEFLLNVFKNSSIPLPAFRNQAYLHAGKKGQ

SEQ ID NO: 30862 - protein, 40 aa, Homo sapiens
  MAP TO AC010328.4; EXPRESSED IN HEART, SIGNAL = 1.7; EXPRESSED IN BRAIN, SIGNAL = 2.1; EXPRESSED IN HELA, SIGNAL = 1.6; EXPRESSED IN BONE MARROW, SIGNAL = 2.4; EXPRESSED IN PLACENTA, SIGNAL = 1.5; EXPRESSED IN ADULT LIVER, SIGNAL = 1.9
YTLTPTSGPYYLLCMLLLILSASTVWILMTPRSQGENRVR

SEQ ID NO: 30863 - protein, 17 aa, Homo sapiens
  MAP TO AC010328.4; EXPRESSED IN HEART, SIGNAL = 1.7; EXPRESSED IN BRAIN, SIGNAL = 2.1; EXPRESSED IN HELA, SIGNAL = 1.6; EXPRESSED IN BONE MARROW, SIGNAL = 2.4; EXPRESSED IN PLACENTA, SIGNAL = 1.5; EXPRESSED IN ADULT LIVER, SIGNAL = 1.9
TPSPPPLVHITSSACFS

SEQ ID NO: 30864 - protein, 26 aa, Homo sapiens
  MAP TO AL049198.2; EXPRESSED IN BONE MARROW, SIGNAL = 1.7; EXPRESSED IN PLACENTA, SIGNAL = 1.4; EXPRESSED IN ADULT LIVER, SIGNAL = 1.4; EXPRESSED IN HEART, SIGNAL = 0.95; EXPRESSED IN FETAL LIVER, SIGNAL = 1.1
RFQAADEVKSNSTGPVVGVASVIHPE

SEQ ID NO: 30865 - protein, 48 aa, Homo sapiens
  MAP TO AC008620.5; EXPRESSED IN BRAIN, SIGNAL = 0.91; EXPRESSED IN BONE MARROW, SIGNAL =   1; EXPRESSED IN PLACENTA, SIGNAL = 0.96; EXPRESSED IN ADULT LIVER, SIGNAL = 0.92; SWISSPROT HIT: Q07092, EVALUE 2.00e-01
AASLFPSSRAPPGPLLTSSFPRLHSTGGLENISGRQPQPPLRGAPAMT

SEQ ID NO: 30866 - protein, 36 aa, Homo sapiens
  MAP TO AF129108.1; EXPRESSED IN FETAL LIVER, SIGNAL = 0.35; EXPRESSED IN BONE MARROW, SIGNAL = 0.9; EXPRESSED IN PLACENTA, SIGNAL = 0.74; EXPRESSED IN ADULT LIVER, SIGNAL = 0.73; EXPRESSED IN HEART, SIGNAL = 0.98; SWISSPROT HIT: P48190, EVALUE 2.20e+00
HFLLLITEYLKQFIKKRNLFFAVIEVEKSKVKGPHL

SEQ ID NO: 30867 - protein, 19 aa, Homo sapiens
  MAP TO AC008448.5; EXPRESSED IN PLACENTA, SIGNAL =   7; EXPRESSED IN ADULT LIVER, SIGNAL =   2; EXPRESSED IN FETAL LIVER, SIGNAL =   4; EXPRESSED IN LUNG, SIGNAL = 4.3
APSLLFLLSLHLDFRIVLT

SEQ ID NO: 30868 - protein, 44 aa, Homo sapiens
  MAP TO AC011524.4; EXPRESSED IN BONE MARROW, SIGNAL = 0.51; EXPRESSED IN ADULT LIVER, SIGNAL = 0.66; EXPRESSED IN LUNG, SIGNAL = 0.55; SWISSPROT HIT: Q90421, EVALUE 6.40e+00
GVCCQRWARMGVSHWRAVPGREPDHSLALASPVSTGERPHPTLK

SEQ ID NO: 30869 - protein, 54 aa, Homo sapiens
  MAP TO AC011524.4; EXPRESSED IN BONE MARROW, SIGNAL = 0.51; EXPRESSED IN ADULT LIVER, SIGNAL = 0.66; EXPRESSED IN LUNG, SIGNAL = 0.55; SWISSPROT HIT: Q61037, EVALUE 7.30e-01
CLLSEMGKDGCQPLESCSREGARPLSGLSQPSQHWRKTSSNAEIDGASVCITIA

SEQ ID NO: 30870 - protein, 70 aa, Homo sapiens
  MAP TO AC005515.1; EXPRESSED IN HEART, SIGNAL =   8; EXPRESSED IN ADULT LIVER, SIGNAL = 4.8; EXPRESSED IN LUNG, SIGNAL =   6; EXPRESSED IN BRAIN, SIGNAL = 5.5; EXPRESSED IN HELA, SIGNAL = 5.3; EXPRESSED IN BONE MARROW, SIGNAL = 4.7; EXPRESSED IN PLACENTA, SIGNAL = 6.2; SWISSPROT HIT: P97400, EVALUE 1.00e-32
MDPQLQVDFHTEMKEDSDIAFHFRVYFGHWVVMNSRVNGAWQYEVTCHNMPFQDGKPFNLCISVLADEYQ

SEQ ID NO: 30871 - protein, 38 aa, Homo sapiens
  MAP TO AC005515.1; EXPRESSED IN HEART, SIGNAL =   8; EXPRESSED IN ADULT LIVER, SIGNAL = 4.8; EXPRESSED IN LUNG, SIGNAL =   6; EXPRESSED IN BRAIN, SIGNAL = 5.5; EXPRESSED IN HELA, SIGNAL = 5.3; EXPRESSED IN BONE MARROW, SIGNAL = 4.7; EXPRESSED IN PLACENTA, SIGNAL = 6.2
AGGFPYRDEGRLRHRLPFPSVLWSLGGHEQPREWGLAV

SEQ ID NO: 30872 - protein, 37 aa, Homo sapiens
  MAP TO AL031300.1; EXPRESSED IN BRAIN, SIGNAL = 1.4; EXPRESSED IN FETAL LIVER, SIGNAL = 1.3; EXPRESSED IN BONE MARROW, SIGNAL =   2; EXPRESSED IN PLACENTA, SIGNAL = 1.3; EXPRESSED IN ADULT LIVER, SIGNAL = 1.3; EXPRESSED IN HEART, SIGNAL = 1.2; SWISSPROT HIT: P37701, EVALUE 6.50e+00
WSSHLALWSCLGDKIWCPSSRNSSLKSSWDTWGPCLS

SEQ ID NO: 30873 - protein, 29 aa, Homo sapiens
  MAP TO AC020553.4; EXPRESSED IN PLACENTA, SIGNAL = 3.4; EXPRESSED IN ADULT LIVER, SIGNAL =   3; EXPRESSED IN FETAL LIVER, SIGNAL = 3.7; EXPRESSED IN BRAIN, SIGNAL = 2.9; EXPRESSED IN HELA, SIGNAL = 2.6
ENASTTSRMQKMLSKSLSNPEAWIFTLQE

SEQ ID NO: 30874 - protein, 43 aa, Homo sapiens
  MAP TO AC011904.3; EXPRESSED IN ADULT LIVER, SIGNAL = 1.1; EXPRESSED IN BRAIN, SIGNAL = 1.3; EXPRESSED IN HELA, SIGNAL = 0.79; EXPRESSED IN FETAL LIVER, SIGNAL = 0.89; EXPRESSED IN BONE MARROW, SIGNAL =   2; EXPRESSED IN PLACENTA, SIGNAL =   1; SWISSPROT HIT: Q07215, EVALUE 2.90e+00
GKLPVPNKSGCLQMSLPLQLRNFFLASDWLLSAKHELAKGKLL

SEQ ID NO: 30875 - protein, 41 aa, Homo sapiens
  MAP TO AC008509.5; EXPRESSED IN HEART, SIGNAL =   1; EXPRESSED IN ADULT LIVER, SIGNAL = 0.5; EXPRESSED IN FETAL LIVER, SIGNAL = 0.48; EXPRESSED IN BRAIN, SIGNAL = 0.58; SWISSPROT HIT: P13393, EVALUE 2.20e+00
SRREEPSLLLVLKWGGELTPAGRVQAEELGRAFRCMYPGGQ

SEQ ID NO: 30876 - protein, 46 aa, Homo sapiens
  MAP TO AF187320.1; EXPRESSED IN PLACENTA, SIGNAL = 2.9; EXPRESSED IN HEART, SIGNAL = 1.7; EXPRESSED IN ADULT LIVER, SIGNAL = 1.1; EXPRESSED IN BRAIN, SIGNAL = 1.7; SWISSPROT HIT: P02786, EVALUE 6.00e-22
AHLGTGDPYTPGFPSFNHTQFPPSRSSGLPNIPVQTISRAAAEKLF

SEQ ID NO: 30877 - protein, 46 aa, Homo sapiens
  MAP TO AF187320.1; EXPRESSED IN PLACENTA, SIGNAL = 2.9; EXPRESSED IN HEART, SIGNAL = 1.7; EXPRESSED IN ADULT LIVER, SIGNAL = 1.1; EXPRESSED IN BRAIN, SIGNAL = 1.7
LIWGQVTLTHLDSLPSITLSFHHLGHQDCLIYLSRQSPELLQKSCL

SEQ ID NO: 30878 - protein, 56 aa, Homo sapiens
  MAP TO AL109839.11; EXPRESSED IN FETAL LIVER, SIGNAL = 0.85; EXPRESSED IN BONE MARROW, SIGNAL = 0.74; EXPRESSED IN ADULT LIVER, SIGNAL =   1; EXPRESSED IN BRAIN, SIGNAL = 0.92
MTRALMDSLGPEWRLKLPSIPLVPVSAQKRWNSLPSENHKEMAKSKSKETTATKNR

SEQ ID NO: 30879 - protein, 33 aa, Homo sapiens
  MAP TO AC006479.2; EXPRESSED IN BONE MARROW, SIGNAL = 9.4; EXPRESSED IN PLACENTA, SIGNAL =  10; EXPRESSED IN ADULT LIVER, SIGNAL =  11; EXPRESSED IN BRAIN, SIGNAL =  11; EXPRESSED IN LUNG, SIGNAL = 7.3
VENVRIIGKTKLKKEFGVPKEFCATCRPAIPFA

SEQ ID NO: 30880 - protein, 18 aa, Homo sapiens
  MAP TO AC016613.5; EXPRESSED IN BRAIN, SIGNAL = 0.8; EXPRESSED IN BONE MARROW, SIGNAL = 0.69; EXPRESSED IN ADULT LIVER, SIGNAL = 0.59
SRSTARTNQQSQEAPQTL

SEQ ID NO: 30881 - protein, 37 aa, Homo sapiens
  MAP TO AC009509.7; EXPRESSED IN FETAL LIVER, SIGNAL = 1.4; EXPRESSED IN HELA, SIGNAL = 1.8; EXPRESSED IN BRAIN, SIGNAL = 1.4; EXPRESSED IN BONE MARROW, SIGNAL = 0.58; EXPRESSED IN PLACENTA, SIGNAL = 1.6; EXPRESSED IN ADULT LIVER, SIGNAL = 2.1
VLRLWNIPMGFLIANLPPLHSWEVCELCTLWKTCVDC

SEQ ID NO: 30882 - protein, 68 aa, Homo sapiens
  MAP TO AC009509.7; EXPRESSED IN FETAL LIVER, SIGNAL = 1.4; EXPRESSED IN HELA, SIGNAL = 1.8; EXPRESSED IN BRAIN, SIGNAL = 1.4; EXPRESSED IN BONE MARROW, SIGNAL = 0.58; EXPRESSED IN PLACENTA, SIGNAL = 1.6; EXPRESSED IN ADULT LIVER, SIGNAL = 2.1; SWISSPROT HIT: P52085, EVALUE 2.00e+00
SKALEYSNGIFDCQSPTSPFMGSLRALHLVEDLRGLLEMMETDEKEGLRCQIPDSTAETLVEWLQSQM

SEQ ID NO: 30883 - protein, 33 aa, Homo sapiens
  MAP TO AL049824.4; EXPRESSED IN ADULT LIVER, SIGNAL = 1.3; EXPRESSED IN BONE MARROW, SIGNAL = 1.7; SWISSPROT HIT: Q9UNP9, EVALUE 2.00e-07
WSDDDWLKKFSGKTLEENKEEEGSEPPKAETQE

SEQ ID NO: 30884 - protein, 18 aa, Homo sapiens
  MAP TO AC010345.4; EXPRESSED IN PLACENTA, SIGNAL =  12; EXPRESSED IN ADULT LIVER, SIGNAL =  14; EXPRESSED IN HEART, SIGNAL =  11; EXPRESSED IN FETAL LIVER, SIGNAL = 8.7
FLKECHVVWLSQMAGFAT

SEQ ID NO: 30885 - protein, 79 aa, Homo sapiens
  MAP TO AC002096.1; EXPRESSED IN HEART, SIGNAL = 1.1; EXPRESSED IN ADULT LIVER, SIGNAL =   1; EXPRESSED IN LUNG, SIGNAL = 0.42; EXPRESSED IN FETAL LIVER, SIGNAL = 0.8; SWISSPROT HIT: P57783, EVALUE 4.20e-02
YPHDVVNHLSCDEARNHYGGVVSLIPLILDLMKEWIAHSEKLPRKVLQHVSEPQAHQESTRGAARPAQAIGTQPRATKH

SEQ ID NO: 30886 - protein, 50 aa, Homo sapiens
  MAP TO AC016572.4; EXPRESSED IN LUNG, SIGNAL = 1.8; EXPRESSED IN FETAL LIVER, SIGNAL =   1; EXPRESSED IN ADULT LIVER, SIGNAL = 0.93
ALAIKHEQEARKSAQRLLVVCSLEGVGGVLCLTLLTDVTRLLDSCCVLKT

SEQ ID NO: 30887 - protein, 37 aa, Homo sapiens
  MAP TO AC008990.5; EXPRESSED IN ADULT LIVER, SIGNAL = 0.65; EXPRESSED IN LUNG, SIGNAL = 1.1; EXPRESSED IN BRAIN, SIGNAL = 0.5; EXPRESSED IN PLACENTA, SIGNAL = 0.67; SWISSPROT HIT: Q60337, EVALUE 8.50e+00
SPLCQRYPITLQLKKLGLARKQENILKVDGGCSLTGG

SEQ ID NO: 30888 - protein, 112 aa, Homo sapiens
  MAP TO AC008990.5; EXPRESSED IN ADULT LIVER, SIGNAL = 0.65; EXPRESSED IN LUNG, SIGNAL = 1.1; EXPRESSED IN BRAIN, SIGNAL = 0.5; EXPRESSED IN PLACENTA, SIGNAL = 0.67; SWISSPROT HIT: P03360, EVALUE 1.00e-10
PPLPEVPNYSSIEKAWFGQETGKYIKGGWWLFSDGRLAVPETIAPRFVKQIHQGTHAGSTALETLIGQHFYVPRLSAITRAVCEQCLSCEQYLIQNKDLLDPQKFRKWELCL

SEQ ID NO: 30889 - protein, 31 aa, Homo sapiens
  MAP TO AC011311.11; EXPRESSED IN LUNG, SIGNAL = 0.69; EXPRESSED IN FETAL LIVER, SIGNAL = 0.57; EXPRESSED IN PLACENTA, SIGNAL = 0.76; EXPRESSED IN ADULT LIVER, SIGNAL = 0.77; EXPRESSED IN HEART, SIGNAL = 1.1
WRVGRCIAPCPLLLRFVTCEKLNHYHWRRLK

SEQ ID NO: 30890 - protein, 45 aa, Homo sapiens
  MAP TO AJ007973.1; EXPRESSED IN ADULT LIVER, SIGNAL = 0.66; EXPRESSED IN LUNG, SIGNAL = 1.2; EXPRESSED IN HELA, SIGNAL = 0.53; EXPRESSED IN BRAIN, SIGNAL = 0.69; EXPRESSED IN BONE MARROW, SIGNAL = 0.86; SWISSPROT HIT: Q23868, EVALUE 2.20e+00
DMKELEEPLYRDSSTTDVELWGSSTGDQTDDTGNINKNINHGKLY

SEQ ID NO: 30891 - protein, 65 aa, Homo sapiens
  MAP TO AC006138.1; EXPRESSED IN BRAIN, SIGNAL = 0.82; EXPRESSED IN PLACENTA, SIGNAL = 0.64; EXPRESSED IN ADULT LIVER, SIGNAL = 0.93; EXPRESSED IN FETAL LIVER, SIGNAL = 0.41
ECSMDETPYVETLEPGGSGGSPDGAGGSKLPPVLANLMGSMGAGKGPQGPGGGGINVQEILTSIM

SEQ ID NO: 30892 - protein, 64 aa, Homo sapiens
  MAP TO AC006138.1; EXPRESSED IN BRAIN, SIGNAL = 0.82; EXPRESSED IN PLACENTA, SIGNAL = 0.64; EXPRESSED IN ADULT LIVER, SIGNAL = 0.93; EXPRESSED IN FETAL LIVER, SIGNAL = 0.41; SWISSPROT HIT: Q62130, EVALUE 4.60e+00
SVPWMRLRMLRLWNLGGQVAHLMGQEAPSCLQFWPILWEAWVLERAPKALEEEALMSKRSSPPS

SEQ ID NO: 30893 - protein, 32 aa, Homo sapiens
  MAP TO AC008719.5; EXPRESSED IN PLACENTA, SIGNAL = 0.7; EXPRESSED IN ADULT LIVER, SIGNAL = 0.71; EXPRESSED IN FETAL LIVER, SIGNAL = 0.51; SWISSPROT HIT: Q9Y2W7, EVALUE 5.00e-08
MVCHRPEGLEQLEAQTNFTKRELQVLYRGFKN

SEQ ID NO: 30894 - protein, 45 aa, Homo sapiens
  MAP TO AC008536.5; EXPRESSED IN PLACENTA, SIGNAL = 0.78; EXPRESSED IN HEART, SIGNAL = 1.3; EXPRESSED IN ADULT LIVER, SIGNAL = 0.7; EXPRESSED IN FETAL LIVER, SIGNAL = 0.6; EXPRESSED IN LUNG, SIGNAL = 0.44
PPPQRKHWPTSSWPLAVCQPQPESECPPQRRCICSHGRGTPARCG

SEQ ID NO: 30895 - protein, 51 aa, Homo sapiens
  MAP TO AC008536.5; EXPRESSED IN PLACENTA, SIGNAL = 0.78; EXPRESSED IN HEART, SIGNAL = 1.3; EXPRESSED IN ADULT LIVER, SIGNAL = 0.7; EXPRESSED IN FETAL LIVER, SIGNAL = 0.6; EXPRESSED IN LUNG, SIGNAL = 0.44; SWISSPROT HIT: Q17865, EVALUE 8.20e+00
TSSSEKALANQFLAPGRVPTTARERVPATKTVHLQSRARYTSEMRSELLGT

SEQ ID NO: 30896 - protein, 48 aa, Homo sapiens
  MAP TO AC000051.2; EXPRESSED IN ADULT LIVER, SIGNAL = 2.6; EXPRESSED IN LUNG, SIGNAL = 2.6; EXPRESSED IN BRAIN, SIGNAL = 0.6; EXPRESSED IN FETAL LIVER, SIGNAL = 2.5; EXPRESSED IN BONE MARROW, SIGNAL = 0.74; SWISSPROT HIT: P19440, EVALUE 2.00e-21
AVTAALETRHHHTQIASTFIAVVQAIVRTAGGWAAASDSRKGGEPAGY

SEQ ID NO: 30897 - protein, 70 aa, Homo sapiens
  MAP TO AC005793.1; EXPRESSED IN HEART, SIGNAL = 1.1; EXPRESSED IN ADULT LIVER, SIGNAL = 1.2; EXPRESSED IN FETAL LIVER, SIGNAL = 0.75; EXPRESSED IN BRAIN, SIGNAL = 1.1; EXPRESSED IN LUNG, SIGNAL = 2.2; EXPRESSED IN BONE MARROW, SIGNAL = 1.6; SWISSPROT HIT: P07342, EVALUE 7.70e+00
ATAQMEGRLQEFLTAYAPGARLALADGVLGFIHHQIVELARDCLAKSGENLVTSRYFLEMQEKLERLLQD

SEQ ID NO: 30898 - protein, 81 aa, Homo sapiens
  MAP TO AC007774.1; EXPRESSED IN PLACENTA, SIGNAL = 1.8; EXPRESSED IN HEART, SIGNAL = 1.2; EXPRESSED IN ADULT LIVER, SIGNAL = 1.8; EXPRESSED IN FETAL LIVER, SIGNAL = 1.1; EXPRESSED IN BRAIN, SIGNAL = 1.7; EXPRESSED IN HELA, SIGNAL = 1.3; EXPRESSED IN BONE MARROW, SIGNAL = 1.5; SWISSPROT HIT: P19622, EVALUE 3.10e+00
SQTRTPKPRRSLALNKPEKLVAPSPDQKGSGTGGTTTPPRCPDSCGHPRPASSSPPGDRKGGQSQLTLLDLAEDTIHCDIS

SEQ ID NO: 30899 - protein, 41 aa, Homo sapiens
  MAP TO AC005258.1; EXPRESSED IN ADULT LIVER, SIGNAL = 1.4; EXPRESSED IN LUNG, SIGNAL = 2.3; EXPRESSED IN FETAL LIVER, SIGNAL = 1.4; EXPRESSED IN BRAIN, SIGNAL = 1.6; EXPRESSED IN BONE MARROW, SIGNAL = 1.6
LSCSCATGRPPCSAPQPTSPPVASATRSRWWRGGTAPSMRK

SEQ ID NO: 30900 - protein, 66 aa, Homo sapiens
  MAP TO AC002101.1; EXPRESSED IN HEART, SIGNAL = 1.7; EXPRESSED IN ADULT LIVER, SIGNAL = 0.81; EXPRESSED IN FETAL LIVER, SIGNAL = 0.57; EXPRESSED IN LUNG, SIGNAL = 0.62; EXPRESSED IN PLACENTA, SIGNAL =   1; SWISSPROT HIT: P35955, EVALUE 4.60e+00
VAYPTCRDLDVAIGGHPSVCHTTRQKLREIPGREADSHVLRDPPGPEPCLLDPVMSVGAAAPEMDA

SEQ ID NO: 30901 - protein, 81 aa, Homo sapiens
  MAP TO AC008999.5; EXPRESSED IN HEART, SIGNAL = 1.1; EXPRESSED IN ADULT LIVER, SIGNAL = 0.85; EXPRESSED IN LUNG, SIGNAL = 2.6; EXPRESSED IN FETAL LIVER, SIGNAL = 1.3; SWISSPROT HIT: P06731, EVALUE 7.00e-43
HLFGYSWYKGERVDGNRQIIGYVIGTQQATPGPAYSGREIIYPNASLLIQNIIQNDTGFYTLHVIKSDLVNEEATGQFRVY

SEQ ID NO: 30902 - protein, 30 aa, Homo sapiens
  MAP TO AC005265.1; EXPRESSED IN BONE MARROW, SIGNAL =   3; EXPRESSED IN PLACENTA, SIGNAL = 3.4; EXPRESSED IN HEART, SIGNAL = 4.5; EXPRESSED IN ADULT LIVER, SIGNAL = 2.8; EXPRESSED IN BRAIN, SIGNAL = 3.1
YHLDTGSSPRATSHVCIARTGEAAAASVSK

SEQ ID NO: 30903 - protein, 36 aa, Homo sapiens
  MAP TO AC005265.1; EXPRESSED IN BONE MARROW, SIGNAL =   3; EXPRESSED IN PLACENTA, SIGNAL = 3.4; EXPRESSED IN HEART, SIGNAL = 4.5; EXPRESSED IN ADULT LIVER, SIGNAL = 2.8; EXPRESSED IN BRAIN, SIGNAL = 3.1
SSGHWVLPKGHITRLHCQDRRSSSSFCFQVKMTSVD

SEQ ID NO: 30904 - protein, 47 aa, Homo sapiens
  MAP TO AF196970.1; EXPRESSED IN ADULT LIVER, SIGNAL = 1.3; EXPRESSED IN BRAIN, SIGNAL = 1.3; EXPRESSED IN LUNG, SIGNAL = 1.3; EXPRESSED IN PLACENTA, SIGNAL = 1.5; SWISSPROT HIT: P97863, EVALUE 4.80e+00
RTLSCPFSGQQPHTTQRCENQQPEPQKHGFPGARALDWHPLRMLQSG

SEQ ID NO: 30905 - protein, 49 aa, Homo sapiens
  MAP TO AC011400.4; EXPRESSED IN BONE MARROW, SIGNAL = 8.9; EXPRESSED IN PLACENTA, SIGNAL = 7.7; EXPRESSED IN ADULT LIVER, SIGNAL = 8.4; EXPRESSED IN HEART, SIGNAL = 8.8
ERRRKRRGEGGRGRGGGGRGRGGRGRRRRRRRRRRRRRRRRRRRRRRHL

SEQ ID NO: 30906 - protein, 131 aa, Homo sapiens
  MAP TO AC006163.1; EXPRESSED IN BONE MARROW, SIGNAL =   1; EXPRESSED IN PLACENTA, SIGNAL = 2.9; EXPRESSED IN ADULT LIVER, SIGNAL = 2.4; EXPRESSED IN FETAL LIVER, SIGNAL = 2.3; EXPRESSED IN BRAIN, SIGNAL = 1.9; SWISSPROT HIT: P24639, EVALUE 3.00e-03
LFARSIGVVEEKVSQNLGTNLPQLGQPSSTGPSNSEHPQPALDPRSNDLARVPLKLSVPPSDGFPPAGGSAVQRWPPSWGLPAMDSWPPEDPWQMMAAAAEDRLGEALPEELSYLSSAAALAPGSGPLPGE

SEQ ID NO: 30907 - protein, 33 aa, Homo sapiens
  MAP TO AC006163.1; EXPRESSED IN BONE MARROW, SIGNAL =   1; EXPRESSED IN PLACENTA, SIGNAL = 2.9; EXPRESSED IN ADULT LIVER, SIGNAL = 2.4; EXPRESSED IN FETAL LIVER, SIGNAL = 2.3; EXPRESSED IN BRAIN, SIGNAL = 1.9
PLCPEHRCCGGESFPKLGDQLASARTTFLHWPL

SEQ ID NO: 30908 - protein, 52 aa, Homo sapiens
  MAP TO AF002993.1; EXPRESSED IN PLACENTA, SIGNAL = 1.5; EXPRESSED IN ADULT LIVER, SIGNAL = 1.5; EXPRESSED IN BRAIN, SIGNAL = 1.2; EXPRESSED IN LUNG, SIGNAL = 1.7; SWISSPROT HIT: Q60436, EVALUE 1.00e-15
GPEFVRKHIFNKHAEKIEEVKKEVAFFNNFLTDAKRPALPEIKPAQPPGPAQ

SEQ ID NO: 30909 - protein, 18 aa, Homo sapiens
  MAP TO AF002993.1; EXPRESSED IN PLACENTA, SIGNAL = 1.5; EXPRESSED IN ADULT LIVER, SIGNAL = 1.5; EXPRESSED IN BRAIN, SIGNAL = 1.2; EXPRESSED IN LUNG, SIGNAL = 1.7
VLSLCANISSTSMQRKLR

SEQ ID NO: 30910 - protein, 53 aa, Homo sapiens
  MAP TO AC000109.1; EXPRESSED IN HELA, SIGNAL = 2.1; EXPRESSED IN BRAIN, SIGNAL = 0.6; EXPRESSED IN ADULT LIVER, SIGNAL = 0.56; SWISSPROT HIT: P35200, EVALUE 9.60e-01
HHPDIAQAAGTVKIWTSEHVFDHSWETVTTAAMQKYPNPMNQLWLELMCWTDM

SEQ ID NO: 30911 - protein, 143 aa, Homo sapiens [sequence omitted]

SEQ ID NO: 30912 - protein, 90 aa, Homo sapiens
  MAP TO AC010407.4; EXPRESSED IN ADULT LIVER, SIGNAL = 1.1; EXPRESSED IN HEART, SIGNAL = 1.3; EXPRESSED IN BRAIN, SIGNAL = 1.1; EXPRESSED IN PLACENTA, SIGNAL =   1; SWISSPROT HIT: P17277, EVALUE 3.80e-01
LLGQCRRKMWGWSPYRVPNRALPSGPVKRGPPPSRPKNGRSTNSLYHVPGKAAGTQCQPVKAAGRGTVPCKVIEAELHKVVRAHILHRCD

SEQ ID NO: 30913 - protein, 34 aa, Homo sapiens
  MAP TO AC008537.4; EXPRESSED IN PLACENTA, SIGNAL = 0.68; EXPRESSED IN HEART, SIGNAL =   1; EXPRESSED IN ADULT LIVER, SIGNAL = 1.2; EXPRESSED IN FETAL LIVER, SIGNAL = 0.7; EXPRESSED IN BRAIN, SIGNAL = 0.91; EXPRESSED IN HELA, SIGNAL = 0.6
EPSWTPPSSSIPLPPTSSAPSSLENASTTKIKSS

SEQ ID NO: 30914 - protein, 64 aa, Homo sapiens
  MAP TO AC008537.4; EXPRESSED IN PLACENTA, SIGNAL = 0.68; EXPRESSED IN HEART, SIGNAL =   1; EXPRESSED IN ADULT LIVER, SIGNAL = 1.2; EXPRESSED IN FETAL LIVER, SIGNAL = 0.7; EXPRESSED IN BRAIN, SIGNAL = 0.91; EXPRESSED IN HELA, SIGNAL = 0.6; SWISSPROT HIT: P20813, EVALUE 9.00e-15
ALVDPTFLFHSITANIICSIIFGKRFHYQDQEFLKTLNLFCQSFLLISSISSQVQEREKEREGG

SEQ ID NO: 30915 - protein, 71 aa, Homo sapiens
  MAP TO AC008599.5; EXPRESSED IN BRAIN, SIGNAL = 0.69; EXPRESSED IN HELA, SIGNAL = 0.79; EXPRESSED IN BONE MARROW, SIGNAL = 0.8; EXPRESSED IN ADULT LIVER, SIGNAL =   1; SWISSPROT HIT: O76082, EVALUE 2.00e-24
MLTSVGYFALSLDAPNLHGDAYLNCFLSALIEIPAYITAWLLLRTLPRRYIIAAVLFWGGGVLLFIQLVPV

SEQ ID NO: 30916 - protein, 58 aa, Homo sapiens
  MAP TO AL022332.2; EXPRESSED IN BONE MARROW, SIGNAL = 0.77; EXPRESSED IN PLACENTA, SIGNAL = 0.83; EXPRESSED IN ADULT LIVER, SIGNAL = 0.74; EXPRESSED IN BRAIN, SIGNAL = 0.81; EXPRESSED IN HELA, SIGNAL = 0.54; SWISSPROT HIT: P87132, EVALUE 4.70e+00
MGSTQTSATHWSLSPLLQDPSTTRRREKVYDPPPCNSPMISMDTQRYTLQHPAKTWYL

SEQ ID NO: 30917 - protein, 29 aa, Homo sapiens
  MAP TO AL022332.2; EXPRESSED IN BONE MARROW, SIGNAL = 0.77; EXPRESSED IN PLACENTA, SIGNAL = 0.83; EXPRESSED IN ADULT LIVER, SIGNAL = 0.74; EXPRESSED IN BRAIN, SIGNAL = 0.81; EXPRESSED IN HELA, SIGNAL = 0.54
WAYVWGPRGVRAAKNRQWAPRRPLQHTGA

SEQ ID NO: 30918 - protein, 31 aa, Homo sapiens
  MAP TO AC018514.6; EXPRESSED IN FETAL LIVER, SIGNAL = 5.5; EXPRESSED IN PLACENTA, SIGNAL = 3.6; EXPRESSED IN ADULT LIVER, SIGNAL = 2.1
ISLMKVVILVSVIASTNSKITLHGSPWLAIE

SEQ ID NO: 30919 - protein, 46 aa, Homo sapiens
  MAP TO AB022537.1; EXPRESSED IN ADULT LIVER, SIGNAL = 0.71; EXPRESSED IN BRAIN, SIGNAL = 1.1; EXPRESSED IN FETAL LIVER, SIGNAL = 3.5
LTQLIQLYHRFHRVLSQPQLRALPARAELINIHHLMVELKKHKPNF

SEQ ID NO: 30920 - protein, 28 aa, Homo sapiens
  MAP TO AB022537.1; EXPRESSED IN ADULT LIVER, SIGNAL = 0.71; EXPRESSED IN BRAIN, SIGNAL = 1.1; EXPRESSED IN FETAL LIVER, SIGNAL = 3.5
SADPADPALSSLPPGAVPAAAPSPPCPG

SEQ ID NO: 30921 - protein, 38 aa, Homo sapiens
  MAP TO AC011471.5; EXPRESSED IN PLACENTA, SIGNAL = 1.3; EXPRESSED IN ADULT LIVER, SIGNAL =   1; EXPRESSED IN BRAIN, SIGNAL = 0.98; EXPRESSED IN LUNG, SIGNAL = 0.68; SWISSPROT HIT: P16818, EVALUE 2.90e+00
GQEDASVGSRPTSWSVGLGRGAGQGAWVVTEVSGGSVR

SEQ ID NO: 30922 - protein, 82 aa, Homo sapiens
  MAP TO AC011471.5; EXPRESSED IN PLACENTA, SIGNAL = 1.3; EXPRESSED IN ADULT LIVER, SIGNAL =   1; EXPRESSED IN BRAIN, SIGNAL = 0.98; EXPRESSED IN LUNG, SIGNAL = 0.68; SWISSPROT HIT: P46598, EVALUE 4.50e-01
CEMNQMSGEPLDKLNFEAINFCRGLGSQASTVTEIVKQQDPLVYKAIQQGINAVNQEAMNNAQRIEKWVILEKDFSIYGGEL

SEQ ID NO: 30923 - protein, 49 aa, Homo sapiens
  MAP TO AC010423.5; EXPRESSED IN BRAIN, SIGNAL = 0.87; EXPRESSED IN PLACENTA, SIGNAL = 0.76; EXPRESSED IN ADULT LIVER, SIGNAL =   1; SWISSPROT HIT: P18098, EVALUE 3.70e+00
CKISGSGLFPCSCHCSPKLSKISVGKLKRNKARRRRESPSKPSNAAPIT

SEQ ID NO: 30924 - protein, 45 aa, Homo sapiens
  MAP TO AL031730.1; EXPRESSED IN BONE MARROW, SIGNAL = 1.2; EXPRESSED IN PLACENTA, SIGNAL = 1.4; EXPRESSED IN ADULT LIVER, SIGNAL = 1.2; EXPRESSED IN BRAIN, SIGNAL = 1.5; SWISSPROT HIT: P43564, EVALUE 2.00e-04
IVAALTWPASLLSVANVIDNPWGVCLHRSAEVGKHLAHILLSRQQ

SEQ ID NO: 30925 - protein, 39 aa, Homo sapiens
  MAP TO AC010524.5; EXPRESSED IN HELA, SIGNAL = 1.9; EXPRESSED IN BONE MARROW, SIGNAL = 0.86; EXPRESSED IN BRAIN, SIGNAL = 0.85; EXPRESSED IN ADULT LIVER, SIGNAL = 0.92
EFVVDLPDVHTLERRRSGAGAVLADVHEQVPLVLRRVGR

SEQ ID NO: 30926 - protein, 42 aa, Homo sapiens
  MAP TO AC026736.3; EXPRESSED IN BRAIN, SIGNAL = 3.3; EXPRESSED IN PLACENTA, SIGNAL = 4.4; EXPRESSED IN HEART, SIGNAL = 4.2; EXPRESSED IN ADULT LIVER, SIGNAL = 5.5; EXPRESSED IN FETAL LIVER, SIGNAL = 5.9; SWISSPROT HIT: O51067, EVALUE 4.90e+00
CEELQEVEGPRQELTIRNFQAYEYDSAKCRVCFSSVVLVPLR

SEQ ID NO: 30927 - protein, 39 aa, Homo sapiens
  MAP TO AF015726.1; EXPRESSED IN HEART, SIGNAL = 1.2; EXPRESSED IN ADULT LIVER, SIGNAL = 1.3; EXPRESSED IN FETAL LIVER, SIGNAL = 1.3; EXPRESSED IN PLACENTA, SIGNAL = 1.1
WRQRLEPCGQELRTACCPQLLAEARNEFSPGSFRKRQLC

SEQ ID NO: 30928 - protein, 58 aa, Homo sapiens
  MAP TO AF015726.1; EXPRESSED IN HEART, SIGNAL = 1.2; EXPRESSED IN ADULT LIVER, SIGNAL = 1.3; EXPRESSED IN FETAL LIVER, SIGNAL = 1.3; EXPRESSED IN PLACENTA, SIGNAL = 1.1; SWISSPROT HIT: Q02362, EVALUE 8.00e+00
MEAEIGAMWPGAQDCLLPSVAGRSKERILPWIFQKEAALLTSQCELPETYIGLLISRT

SEQ ID NO: 30929 - protein, 23 aa, Homo sapiens
  MAP TO AC012313.5; EXPRESSED IN BONE MARROW, SIGNAL = 1.3; EXPRESSED IN PLACENTA, SIGNAL = 1.2; EXPRESSED IN ADULT LIVER, SIGNAL = 1.3; EXPRESSED IN HEART, SIGNAL = 1.8; EXPRESSED IN LUNG, SIGNAL = 2.5; EXPRESSED IN BRAIN, SIGNAL = 1.4
MAAQMSEASALAPQVFPSPLELM

SEQ ID NO: 30930 - protein, 35 aa, Homo sapiens
  MAP TO AC000358.1; EXPRESSED IN PLACENTA, SIGNAL = 0.8; EXPRESSED IN ADULT LIVER, SIGNAL = 0.5
LGFRSNSAMIRLLQAQVLTGTLTGLSAGRVVCCLF

SEQ ID NO: 30931 - protein, 64 aa, Homo sapiens
  MAP TO AC025182.2; EXPRESSED IN FETAL LIVER, SIGNAL = 1.9; EXPRESSED IN ADULT LIVER, SIGNAL = 1.3; SWISSPROT HIT: Q9PLJ6, EVALUE 1.20e+00
CLVGLFGFWRQHICHLGVLFWPIYQVTQRLPVLSGVQNRRRLCNRSRLLCKLLCHLGHLTRQIQ

SEQ ID NO: 30932 - protein, 53 aa, Homo sapiens
  MAP TO AC008795.5; EXPRESSED IN ADULT LIVER, SIGNAL = 0.87; EXPRESSED IN FETAL LIVER, SIGNAL = 0.93; SWISSPROT HIT: P49140, EVALUE 6.20e+00
MAATKRKRRGGFAVQAKKPKRNEIDAEPPAKRHATAEEVEEEERDRIPGPVCK

SEQ ID NO: 30933 - protein, 23 aa, Homo sapiens
  MAP TO AC008795.5; EXPRESSED IN ADULT LIVER, SIGNAL = 0.87; EXPRESSED IN FETAL LIVER, SIGNAL = 0.93
WRQPRGNGVEALQFRRRSQKETK

SEQ ID NO: 30934 - protein, 93 aa, Homo sapiens
  MAP TO AC011522.6; EXPRESSED IN PLACENTA, SIGNAL = 0.85; EXPRESSED IN ADULT LIVER, SIGNAL = 0.94; EXPRESSED IN LUNG, SIGNAL =   1; SWISSPROT HIT: P14732, EVALUE 2.00e-10
LKLSPSPSSRVTVSRATSSSSGSLSATGRLGRSKRKRLEVEEPLGSGPSVLGTGTGGSGGFHLAQQASASGSVSIEEIDLEGKFVQLKNNSDK

SEQ ID NO: 30935 - protein, 18 aa, Homo sapiens
  MAP TO AC000075.2; EXPRESSED IN BONE MARROW, SIGNAL = 1.5; EXPRESSED IN PLACENTA, SIGNAL = 0.72; EXPRESSED IN ADULT LIVER, SIGNAL = 0.5
SCQTRPSRTRVGSTCSPC

SEQ ID NO: 30936 - protein, 86 aa, Homo sapiens
  MAP TO AC000075.2; EXPRESSED IN BONE MARROW, SIGNAL = 1.5; EXPRESSED IN PLACENTA, SIGNAL = 0.72; EXPRESSED IN ADULT LIVER, SIGNAL = 0.5; SWISSPROT HIT: P54797, EVALUE 4.00e-10
QLPDPAIEDQGGEYVQPMLSKYAAVCVRCPGYGTRYCSTVGAPPPIPCPTSHARGPAKKPSAHSQSQASSSPEWIPELLPCPDAAA

SEQ ID NO: 30937 - protein, 58 aa, Homo sapiens
  MAP TO AC010203.13; EXPRESSED IN ADULT LIVER, SIGNAL = 2.1; EXPRESSED IN BRAIN, SIGNAL = 2.2; EXPRESSED IN HELA, SIGNAL = 3.6; EXPRESSED IN PLACENTA, SIGNAL = 1.9; SWISSPROT HIT: P28279, EVALUE 3.60e+00
SRRRGCWSWSRWPSSCGSRQSHAGKSWRPCRTNAPPSATCSPRTTSSKSSCLRCRTDS

SEQ ID NO: 30938 - protein, 60 aa, Homo sapiens
  MAP TO AF022794.1; EXPRESSED IN ADULT LIVER, SIGNAL = 1.1; EXPRESSED IN FETAL LIVER, SIGNAL = 0.97; EXPRESSED IN LUNG, SIGNAL = 0.7; EXPRESSED IN BONE MARROW, SIGNAL = 0.66; EXPRESSED IN PLACENTA, SIGNAL = 0.93; SWISSPROT HIT: Q9WZZ1, EVALUE 1.60e+00
KALKSRHRGDERQEDVKRKGLGFSPSEMIRKGALEVQSPALERVIASIMGSSLWKISPLP

SEQ ID NO: 30939 - protein, 66 aa, Homo sapiens
  MAP TO AC005952.1; EXPRESSED IN ADULT LIVER, SIGNAL = 3.9; EXPRESSED IN HEART, SIGNAL = 3.9; EXPRESSED IN LUNG, SIGNAL = 5.5; EXPRESSED IN BRAIN, SIGNAL = 4.5; EXPRESSED IN BONE MARROW, SIGNAL = 5.6; EXPRESSED IN PLACENTA, SIGNAL =   3; SWISSPROT HIT: P40600, EVALUE 1.60e+00
LPPGSPVCASAAQCPLAVWSHPHPGLSGVRLPARCHGCAHTTHERPDPAACGGACDQRPLAAGCHL

SEQ ID NO: 30940 - protein, 55 aa, Homo sapiens
  MAP TO AC005952.1; EXPRESSED IN ADULT LIVER, SIGNAL = 3.9; EXPRESSED IN HEART, SIGNAL = 3.9; EXPRESSED IN LUNG, SIGNAL = 5.5; EXPRESSED IN BRAIN, SIGNAL = 4.5; EXPRESSED IN BONE MARROW, SIGNAL = 5.6; EXPRESSED IN PLACENTA, SIGNAL =   3; SWISSPROT HIT: P47973, EVALUE 8.60e-02
SPARVPSLCLCSSVPTGSVEPPSPRSQWSTATGPVPRLCPHHSRTSRSCCLWGSL

SEQ ID NO: 30941 - protein, 56 aa, Homo sapiens
  MAP TO AF274857.1; EXPRESSED IN BRAIN, SIGNAL = 1.1; EXPRESSED IN BONE MARROW, SIGNAL = 1.5; EXPRESSED IN PLACENTA, SIGNAL = 1.8; EXPRESSED IN ADULT LIVER, SIGNAL = 1.1; EXPRESSED IN HEART, SIGNAL = 1.2
CQLLLQNLSVHRGQMLRLLWWLLMHHGCLSMCYGVYFCYIAVCFWTKAICSCALCF

SEQ ID NO: 30942 - protein, 44 aa, Homo sapiens
  MAP TO AC012331.9; EXPRESSED IN ADULT LIVER, SIGNAL = 2.4; EXPRESSED IN LUNG, SIGNAL = 7.9; EXPRESSED IN BRAIN, SIGNAL = 3.1; EXPRESSED IN HELA, SIGNAL = 3.3; EXPRESSED IN FETAL LIVER, SIGNAL = 6.9; EXPRESSED IN BONE MARROW, SIGNAL = 5.2
SWGTGSLLKTWTGRRRRHSSASTVHCRLRTRPSRTADPHGLPTL

SEQ ID NO: 30943 - protein, 156 aa, Homo sapiens
  MAP TO AC004004.1; EXPRESSED IN ADULT LIVER, SIGNAL = 0.85; EXPRESSED IN HELA, SIGNAL = 0.92; EXPRESSED IN PLACENTA, SIGNAL = 0.76; SWISSPROT HIT: Q03923, EVALUE 1.00e-59
MKNVDIKKFLLKEGYKSVDECKVHKEGYNELNQCFPTTQSKIFQCDKYVKVFHKFSHLKAYKIRHADKKPFKCKECGKSFCMLLHLIQHKRIHATVKFYKCKECGKVYNRSSTFTTHKRIHTGEKPYKCEECGKAFNQSTNLTRHKRIHTAEKPYK

SEQ ID NO: 30944 - protein, 143 aa, Homo sapiens
  MAP TO AC016601.5; EXPRESSED IN PLACENTA, SIGNAL = 0.72; EXPRESSED IN ADULT LIVER, SIGNAL = 0.75; EXPRESSED IN FETAL LIVER, SIGNAL = 0.8; EXPRESSED IN LUNG, SIGNAL = 0.54; EXPRESSED IN HELA, SIGNAL = 0.64; EXPRESSED IN BONE MARROW, SIGNAL = 0.61; SWISSPROT HIT: Q9UPN3, EVALUE 1.60e-01
LKETIDALKDIRRMIHEQIENINKETEIIKRNQIENLELTYEQIETINKEIEITERNQTENLELKTTMTQIKSSLEGFNSRCGQAEKITSEHEDRSTAIIQSEEQKEKRMKKNDQSLKDQLDTITVYQLTHNGKPRREEKEKK

SEQ ID NO: 30945 - protein, 54 aa, Homo sapiens
  MAP TO AC009003.7; EXPRESSED IN BONE MARROW, SIGNAL = 1.4; EXPRESSED IN PLACENTA, SIGNAL = 1.2; EXPRESSED IN ADULT LIVER, SIGNAL = 1.2; EXPRESSED IN BRAIN, SIGNAL = 1.4
EIQPLRLFPSPGLPTRTSPVRGSKRMVSTSATDEPRETPGRPPDPTGAPLPGPT

SEQ ID NO: 30946 - protein, 53 aa, Homo sapiens
  MAP TO AC009003.7; EXPRESSED IN BONE MARROW, SIGNAL = 1.4; EXPRESSED IN PLACENTA, SIGNAL = 1.2; EXPRESSED IN ADULT LIVER, SIGNAL = 1.2; EXPRESSED IN BRAIN, SIGNAL = 1.4
DPAPASVPQPRPPNSHQPCAGLQENGQHLSYRRAQGDPRAATRSHRGPAAWTY

SEQ ID NO: 30947 - protein, 47 aa, Homo sapiens
  MAP TO AC010617.5; EXPRESSED IN ADULT LIVER, SIGNAL = 0.92; EXPRESSED IN BRAIN, SIGNAL = 0.77; EXPRESSED IN HELA, SIGNAL = 0.51; EXPRESSED IN PLACENTA, SIGNAL = 0.44; SWISSPROT HIT: P38134, EVALUE 8.30e+00
LHFLLRPLQTLSLGLEEELLQRGIRARLREHGISLAAYGTIVSAELT

SEQ ID NO: 30948 - protein, 21 aa, Homo sapiens
  MAP TO AC010617.5; EXPRESSED IN ADULT LIVER, SIGNAL = 0.92; EXPRESSED IN BRAIN, SIGNAL = 0.77; EXPRESSED IN HELA, SIGNAL = 0.51; EXPRESSED IN PLACENTA, SIGNAL = 0.44
MGTPVSSYISSCTFCCDPSRR

SEQ ID NO: 30949 - protein, 33 aa, Homo sapiens
  MAP TO AC016951.9; EXPRESSED IN HEART, SIGNAL = 1.5; EXPRESSED IN BRAIN, SIGNAL = 0.85; EXPRESSED IN FETAL LIVER, SIGNAL = 1.3; EXPRESSED IN LUNG, SIGNAL = 0.4; EXPRESSED IN ADULT LIVER, SIGNAL = 0.78
EAHLCVDAMGPPPVDEGGEQPIVLVGLEDIAHL

SEQ ID NO: 30950 - protein, 60 aa, Homo sapiens
  MAP TO AC008537.4; EXPRESSED IN ADULT LIVER, SIGNAL = 0.78; EXPRESSED IN HELA, SIGNAL = 0.72; SWISSPROT HIT: P24461, EVALUE 4.00e-15
MELGGAVTIFLALRLSCLLILIAWKRMDKAGKLPPGPTPILFLGHLLQVRTDATFQSFMK

SEQ ID NO: 30951 - protein, 58 aa, Homo sapiens
  MAP TO AC008537.4; EXPRESSED IN ADULT LIVER, SIGNAL = 0.78; EXPRESSED IN HELA, SIGNAL = 0.72
WSWEGLSPSFWHSACLACSSSLPGNEWIRQESCPQVLHQFFSWGTCCKFELMLRFSLS

SEQ ID NO: 30952 - protein, 51 aa, Homo sapiens
  MAP TO AC010247.6; EXPRESSED IN BRAIN, SIGNAL = 1.6; EXPRESSED IN FETAL LIVER, SIGNAL = 1.1; EXPRESSED IN PLACENTA, SIGNAL = 1.4; EXPRESSED IN ADULT LIVER, SIGNAL = 1.3
  unsure 4
  unsure 14
  unsure 20
  unsure 31
  unsure 33
  unsure 34
  unsure 36
  unsure 42
PFPXNFDSLTPFPXMRDCLXTSIYGTTALLXPXXPXPHANRXHQQYSRRRF

SEQ ID NO: 30953 - protein, 88 aa, Homo sapiens
  MAP TO AC005789.1; EXPRESSED IN PLACENTA, SIGNAL = 5.1; EXPRESSED IN ADULT LIVER, SIGNAL = 5.2; EXPRESSED IN BRAIN, SIGNAL = 4.2; SWISSPROT HIT: Q04854, EVALUE 9.10e-01
VSASVFVGLVIFYIAFCLLWPLVVKGCTMIRWKINNLIASESYYTYASISGISSMPSLRHSRMGSMFSSRMTEDRAEPKEAVERQLMT

SEQ ID NO: 30954 - protein, 36 aa, Homo sapiens
  MAP TO AC006147.2; EXPRESSED IN LUNG, SIGNAL = 0.57; EXPRESSED IN BRAIN, SIGNAL = 0.81; EXPRESSED IN PLACENTA, SIGNAL =   1; EXPRESSED IN ADULT LIVER, SIGNAL = 0.88
WTKRNSSVAVATNSESLRTVSSSSGSSLSHWCNYRS

SEQ ID NO: 30955 - protein, 50 aa, Homo sapiens
  MAP TO AC006147.2; EXPRESSED IN LUNG, SIGNAL = 0.57; EXPRESSED IN BRAIN, SIGNAL = 0.81; EXPRESSED IN PLACENTA, SIGNAL =   1; EXPRESSED IN ADULT LIVER, SIGNAL = 0.88; SWISSPROT HIT: Q91574, EVALUE 2.50e-01
MDKEKLVSGSGHELRKPEDSQQLLWLFTFTLVQLQELKNIFQLVPYPDVL

SEQ ID NO: 30956 - protein, 23 aa, Homo sapiens
  MAP TO AF107045.1; EXPRESSED IN PLACENTA, SIGNAL = 1.6; EXPRESSED IN ADULT LIVER, SIGNAL = 1.4; EXPRESSED IN FETAL LIVER, SIGNAL =   2; EXPRESSED IN BRAIN, SIGNAL = 1.3; EXPRESSED IN LUNG, SIGNAL = 1.8
HAYQINAIAPLELGYKVWQMLLS

SEQ ID NO: 30957 - protein, 74 aa, Homo sapiens
  MAP TO AF107045.1; EXPRESSED IN PLACENTA, SIGNAL = 1.6; EXPRESSED IN ADULT LIVER, SIGNAL = 1.4; EXPRESSED IN FETAL LIVER, SIGNAL =   2; EXPRESSED IN BRAIN, SIGNAL = 1.3; EXPRESSED IN LUNG, SIGNAL = 1.8; SWISSPROT HIT: P23921, EVALUE 7.00e-38
ACLSNKRHRPIGIGVQGLADAFILMRYPFESAEAQLLNKQIFETIYYGALEASCDLAKEQGPYETYEGSPVSKG

SEQ ID NO: 30958 - protein, 31 aa, Homo sapiens
  MAP TO AL118559.4; EXPRESSED IN BONE MARROW, SIGNAL = 4.1; EXPRESSED IN PLACENTA, SIGNAL = 6.9; EXPRESSED IN HEART, SIGNAL = 3.8; EXPRESSED IN ADULT LIVER, SIGNAL = 5.4; EXPRESSED IN BRAIN, SIGNAL =   6; SWISSPROT HIT: Q01955, EVALUE 8.70e+00
SPGPPGPSLVREAQGSRQCGHGVCSLEGRDE

SEQ ID NO: 30959 - protein, 74 aa, Homo sapiens
  MAP TO AL117187.3; EXPRESSED IN BONE MARROW, SIGNAL = 1.1; EXPRESSED IN ADULT LIVER, SIGNAL = 0.78; EXPRESSED IN BRAIN, SIGNAL = 0.78; SWISSPROT HIT: P56945, EVALUE 8.80e+00
ALVTSCCVLGGPPRGVFDSGAQPRTGLHFPMSVAWHFTPGGADPLVCLVMPSSPNLEERQCASVQGELAVMVFL

SEQ ID NO: 30960 - protein, 30 aa, Homo sapiens
  MAP TO AL117187.3; EXPRESSED IN BONE MARROW, SIGNAL = 1.1; EXPRESSED IN ADULT LIVER, SIGNAL = 0.78; EXPRESSED IN BRAIN, SIGNAL = 0.78
PWSPAAVSLVGLHGESLILEPSQEQASTSP

SEQ ID NO: 30961 - protein, 32 aa, Homo sapiens
  MAP TO AL117187.3; EXPRESSED IN BONE MARROW, SIGNAL = 1.1; EXPRESSED IN ADULT LIVER, SIGNAL = 0.78; EXPRESSED IN BRAIN, SIGNAL = 0.78
PCLCSQHRGSPLYCQSPGHQLLCPWWASTGSL

SEQ ID NO: 30962 - protein, 48 aa, Homo sapiens
  MAP TO AC000069.2; EXPRESSED IN BRAIN, SIGNAL = 1.6; EXPRESSED IN ADULT LIVER, SIGNAL = 1.2; EXPRESSED IN BONE MARROW, SIGNAL =   1; EXPRESSED IN PLACENTA, SIGNAL = 1.4
FLLSTSLTSSTSREPESHGSTPFMKHSPGSWSPPSPSQPTSSNHLKKK

SEQ ID NO: 30963 - protein, 51 aa, Homo sapiens
  MAP TO AC000069.2; EXPRESSED IN BRAIN, SIGNAL = 1.6; EXPRESSED IN ADULT LIVER, SIGNAL = 1.2; EXPRESSED IN BONE MARROW, SIGNAL =   1; EXPRESSED IN PLACENTA, SIGNAL = 1.4
LAVDIFDKFNFTGARVPWFDAIHEAFPRELESSISFPANFFKPPEEKGRTA

SEQ ID NO: 30964 - protein, 39 aa, Homo sapiens; identical to SEQ ID NO: 30927
  MAP TO AF015722.1; EXPRESSED IN PLACENTA, SIGNAL = 1.4; EXPRESSED IN HEART, SIGNAL = 1.3; EXPRESSED IN ADULT LIVER, SIGNAL = 1.3; EXPRESSED IN FETAL LIVER, SIGNAL = 1.3; EXPRESSED IN BRAIN, SIGNAL =   2; EXPRESSED IN HELA, SIGNAL = 1.2; EXPRESSED IN BONE MARROW, SIGNAL =   2

SEQ ID NO: 30965 - protein, 50 aa, Homo sapiens
  MAP TO AF131215.1; EXPRESSED IN PLACENTA, SIGNAL = 0.99; EXPRESSED IN ADULT LIVER, SIGNAL = 1.3; EXPRESSED IN BRAIN, SIGNAL = 0.75; EXPRESSED IN HELA, SIGNAL = 0.64; EXPRESSED IN FETAL LIVER, SIGNAL = 1.1
LLNRMYLCSKKEIRVYVQLMKSLRAEHRIDSNTGSCQLLPKYYFPASSEG

SEQ ID NO: 30966 - protein, 18 aa, Homo sapiens
  MAP TO AF131215.1; EXPRESSED IN PLACENTA, SIGNAL = 0.99; EXPRESSED IN ADULT LIVER, SIGNAL = 1.3; EXPRESSED IN BRAIN, SIGNAL = 0.75; EXPRESSED IN HELA, SIGNAL = 0.64; EXPRESSED IN FETAL LIVER, SIGNAL = 1.1
CSTECTCAARRKSECMSS

SEQ ID NO: 30967 - protein, 47 aa, Homo sapiens
  MAP TO AC010300.5; EXPRESSED IN BONE MARROW, SIGNAL = 1.4; EXPRESSED IN PLACENTA, SIGNAL = 1.5; EXPRESSED IN ADULT LIVER, SIGNAL = 1.5; EXPRESSED IN BRAIN, SIGNAL = 1.3
MSKVKLMALAGVKVDHMALIGSTIVQAQQRDTIMIQCSNDLRGLIRK

SEQ ID NO: 30968 - protein, 23 aa, Homo sapiens
  MAP TO AL050302.2; EXPRESSED IN BRAIN, SIGNAL = 0.94; EXPRESSED IN BONE MARROW, SIGNAL = 0.82; EXPRESSED IN PLACENTA, SIGNAL = 1.2; EXPRESSED IN ADULT LIVER, SIGNAL = 1.3
GKLYKNPQRYLYHMRRCYKTSQL

SEQ ID NO: 30969 - protein, 60 aa, Homo sapiens
  MAP TO AL050302.2; EXPRESSED IN BRAIN, SIGNAL = 0.94; EXPRESSED IN BONE MARROW, SIGNAL = 0.82; EXPRESSED IN PLACENTA, SIGNAL = 1.2; EXPRESSED IN ADULT LIVER, SIGNAL = 1.3; SWISSPROT HIT: P40890, EVALUE 6.10e+00
KALQKPTEVPVPYEKMLQDQSALIVQGLPEGVAFKHPENYDLATLKWILENTAGISFIIN

SEQ ID NO: 30970 - protein, 39 aa, Homo sapiens
  MAP TO AL117191.4; EXPRESSED IN ADULT LIVER, SIGNAL =  19; EXPRESSED IN BRAIN, SIGNAL =  19; EXPRESSED IN BONE MARROW, SIGNAL =  19; EXPRESSED IN PLACENTA, SIGNAL =  22
AMEKRRQSVQGNEEKEQDYFQITHGTTRNVFQQKDWLIL

SEQ ID NO: 30971 - protein, 36 aa, Homo sapiens
  MAP TO AL117191.4; EXPRESSED IN ADULT LIVER, SIGNAL =  19; EXPRESSED IN BRAIN, SIGNAL =  19; EXPRESSED IN BONE MARROW, SIGNAL =  19; EXPRESSED IN PLACENTA, SIGNAL =  22; SWISSPROT HIT: P30537, EVALUE 6.50e+00
PWRRGDRVCKGMKKRNKTIFKSPMALLEMYFSKRTG

SEQ ID NO: 30972 - protein, 26 aa, Homo sapiens
  MAP TO AC020944.3; EXPRESSED IN BONE MARROW, SIGNAL = 2.5; EXPRESSED IN PLACENTA, SIGNAL =   2; EXPRESSED IN ADULT LIVER, SIGNAL = 1.8; EXPRESSED IN BRAIN, SIGNAL =   2; EXPRESSED IN FETAL LIVER, SIGNAL = 1.7
WCVRSSFLQMFRCIWSFFHLVGLWSR

SEQ ID NO: 30973 - protein, 66 aa, Homo sapiens
  MAP TO AC004237.1; EXPRESSED IN BONE MARROW, SIGNAL = 1.2; EXPRESSED IN ADULT LIVER, SIGNAL =   1; EXPRESSED IN PLACENTA, SIGNAL = 1.6; EXPRESSED IN HEART, SIGNAL = 2.1; EXPRESSED IN HELA, SIGNAL = 1.5; EXPRESSED IN BRAIN, SIGNAL = 1.3; SWISSPROT HIT: Q9Y496, EVALUE 9.00e-31
GSERQAKTGATGQRLKEATKINLSLSTLGNVISALVDGKSTHVPYRNSKLTRLLQDSLGGNSKTMM

SEQ ID NO: 30974 - protein, 36 aa, Homo sapiens
  MAP TO AF025422.1; EXPRESSED IN ADULT LIVER, SIGNAL = 1.8; EXPRESSED IN FETAL LIVER, SIGNAL = 1.8; EXPRESSED IN BRAIN, SIGNAL = 4.3; EXPRESSED IN PLACENTA, SIGNAL = 1.9; SWISSPROT HIT: P04929, EVALUE 6.50e+00
TCYCHTFAGRRGPSDGRHHHLGYHHPSAVQWDPPAC

SEQ ID NO: 30975 - protein, 42 aa, Homo sapiens
  MAP TO AC016943.7; EXPRESSED IN ADULT LIVER, SIGNAL = 0.55; EXPRESSED IN HELA, SIGNAL = 0.47; EXPRESSED IN PLACENTA, SIGNAL = 0.67; SWISSPROT HIT: O36041, EVALUE 4.90e+00
CLYIITHLVSTLPQPRNSTGPWPRFSTTLRGVNRCHRQHSKQ

SEQ ID NO: 30976 - protein, 66 aa, Homo sapiens
  MAP TO AC016943.7; EXPRESSED IN ADULT LIVER, SIGNAL = 0.55; EXPRESSED IN HELA, SIGNAL = 0.47; EXPRESSED IN PLACENTA, SIGNAL = 0.67; SWISSPROT HIT: Q61187, EVALUE 9.60e+00
MPVYYYPSGQYPTSTTQQYRPMAPVQYNAQRSQQMPQAAQQAGTWNLFPICFSTQLFLLVNLVLFG

SEQ ID NO: 30977 - protein, 53 aa, Homo sapiens
  MAP TO AL121919.19; EXPRESSED IN BONE MARROW, SIGNAL = 0.71; EXPRESSED IN ADULT LIVER, SIGNAL = 0.57; EXPRESSED IN BRAIN, SIGNAL = 0.64; EXPRESSED IN FETAL LIVER, SIGNAL = 0.86; SWISSPROT HIT: Q10357, EVALUE 9.60e-01
LNLQEEPSCATSESPPCCGKEEKKEGDCRQTLGTLSLGTSSRIVREMDKRTVK

SEQ ID NO: 30978 - protein, 25 aa, Homo sapiens
  MAP TO AC002248.1; EXPRESSED IN PLACENTA, SIGNAL = 0.76; EXPRESSED IN ADULT LIVER, SIGNAL = 0.64; EXPRESSED IN BRAIN, SIGNAL = 1.2
MFSGLLEQQEFLELAASIPETLREN

SEQ ID NO: 30979 - protein, 21 aa, Homo sapiens
  MAP TO AC002248.1; EXPRESSED IN PLACENTA, SIGNAL = 0.76; EXPRESSED IN ADULT LIVER, SIGNAL = 0.64; EXPRESSED IN BRAIN, SIGNAL = 1.2
CSVASWSSRSSLSLLPASQRH

SEQ ID NO: 30980 - protein, 64 aa, Homo sapiens
  MAP TO AC018766.2; EXPRESSED IN HEART, SIGNAL = 1.3; EXPRESSED IN ADULT LIVER, SIGNAL = 0.95; EXPRESSED IN LUNG, SIGNAL = 1.6; EXPRESSED IN FETAL LIVER, SIGNAL = 1.5; EXPRESSED IN PLACENTA, SIGNAL = 1.4
SPITPLQQAAPGVGPPFSQAPAPQLPPGPPGAPKPPPASQPSLVSTVAPGSGLAPTAQPGAPSM

SEQ ID NO: 30981 - protein, 24 aa, Homo sapiens
  MAP TO AC020663.1; EXPRESSED IN HEART, SIGNAL = 1.1; EXPRESSED IN BRAIN, SIGNAL = 1.1; EXPRESSED IN LUNG, SIGNAL = 1.3; EXPRESSED IN ADULT LIVER, SIGNAL = 0.98
PKPLSPAMKETQRQSPSALPHKNL

SEQ ID NO: 30982 - protein, 123 aa, Homo sapiens
  MAP TO AC020663.1; EXPRESSED IN HEART, SIGNAL = 1.1; EXPRESSED IN BRAIN, SIGNAL = 1.1; EXPRESSED IN LUNG, SIGNAL = 1.3; EXPRESSED IN ADULT LIVER, SIGNAL = 0.98; SWISSPROT HIT: Q10044, EVALUE 2.10e+00
MAEEPPRWLEGDLGSLSFNTKGSQGPPWDPQAEATLSCHEGDPKAEPLSTASQESVNRRALRQERRKMIETDILQKVTRDACGPTSSDKGGVKEAPCHAAESAPRSKMPLVEPPEGPPVLSLQ

SEQ ID NO: 30983 - protein, 49 aa, Homo sapiens
  MAP TO AL079302.4; EXPRESSED IN BONE MARROW, SIGNAL = 1.4; EXPRESSED IN PLACENTA, SIGNAL = 1.5; EXPRESSED IN ADULT LIVER, SIGNAL = 1.3; EXPRESSED IN BRAIN, SIGNAL = 1.6; SWISSPROT HIT: Q05647, EVALUE 2.80e+00
LLKVFNDQSASDHIVQFLRLLTSAFIRNRADFFRHFIDEEMDIKDFCTH

SEQ ID NO: 30984 - protein, 59 aa, Homo sapiens
  MAP TO AL079302.4; EXPRESSED IN BONE MARROW, SIGNAL = 1.4; EXPRESSED IN PLACENTA, SIGNAL = 1.5; EXPRESSED IN ADULT LIVER, SIGNAL = 1.3; EXPRESSED IN BRAIN, SIGNAL = 1.6; SWISSPROT HIT: P21292, EVALUE 1.70e-02
EGRAGAVLQCGGTGREGWLSVQPAEGVQRPECLGPHRAVPAPAHVGLHQEPSRLLPALH

SEQ ID NO: 30985 - protein, 63 aa, Homo sapiens
  MAP TO AC006275.1; EXPRESSED IN BRAIN, SIGNAL = 1.1; EXPRESSED IN BONE MARROW, SIGNAL = 0.99; EXPRESSED IN PLACENTA, SIGNAL = 0.86; EXPRESSED IN ADULT LIVER, SIGNAL = 0.98; SWISSPROT HIT: P06300, EVALUE 3.50e+00
STDRRSPTTRHGGFLGSSPPRTAIRSGDSDTGQQQRFPPGRQPDAHTHADHTIQKVHLRPETQ

SEQ ID NO: 30986 - protein, 175 aa, Homo sapiens [sequence omitted]

SEQ ID NO: 30987 - protein, 83 aa, Homo sapiens
  MAP TO AC007619.22; EXPRESSED IN ADULT LIVER, SIGNAL = 1.2; EXPRESSED IN BRAIN, SIGNAL = 1.1; EXPRESSED IN HELA, SIGNAL = 0.52; SWISSPROT HIT: P52398, EVALUE 2.40e+00
EIEISGSQQGTNNAHSQNIEPGTVPSQFSSKGGSGTTVDKAVSLKGFLALGASCKTCQLPLDLRDCVPHRLDTRPCGEDLIKQ

SEQ ID NO: 30988 - protein, 76 aa, Homo sapiens [sequence omitted]

SEQ ID NO: 30989 - protein, 58 aa, Homo sapiens
  MAP TO AC022336.12; EXPRESSED IN BONE MARROW, SIGNAL = 2.2; EXPRESSED IN PLACENTA, SIGNAL =   2; EXPRESSED IN HEART, SIGNAL =   2; EXPRESSED IN ADULT LIVER, SIGNAL = 1.8; EXPRESSED IN BRAIN, SIGNAL = 1.7; EXPRESSED IN LUNG, SIGNAL = 1.9; SWISSPROT HIT: P11172, EVALUE 2.00e-27
GIFKIASWADLVNAHVVPGSGVVKGLQEVGLPLHRGCLLIAEMSSTGSLATGDYTRAA

SEQ ID NO: 30990 - protein, 51 aa, Homo sapiens
  MAP TO AC000095.3; EXPRESSED IN HELA, SIGNAL = 0.98; EXPRESSED IN PLACENTA, SIGNAL = 0.73; EXPRESSED IN ADULT LIVER, SIGNAL = 0.53
TKSSDDLLAGMARGVTVTNGVKGKESSCPSAAPSASAPAMTTVENKSKIST

SEQ ID NO: 30991 - protein, 44 aa, Homo sapiens
  MAP TO AC018452.11; EXPRESSED IN BRAIN, SIGNAL = 2.3; EXPRESSED IN HELA, SIGNAL = 5.1; EXPRESSED IN FETAL LIVER, SIGNAL = 3.2; EXPRESSED IN BONE MARROW, SIGNAL = 2.1; EXPRESSED IN HEART, SIGNAL =   5; EXPRESSED IN ADULT LIVER, SIGNAL = 1.9
QPKCLDPSTSCEAASLRTLLSLLVKDADTDHQDYVTHQDPEQLI

SEQ ID NO: 30992 - protein, 23 aa, Homo sapiens
  MAP TO AC018452.11; EXPRESSED IN BRAIN, SIGNAL = 2.3; EXPRESSED IN HELA, SIGNAL = 5.1; EXPRESSED IN FETAL LIVER, SIGNAL = 3.2; EXPRESSED IN BONE MARROW, SIGNAL = 2.1; EXPRESSED IN HEART, SIGNAL =   5; EXPRESSED IN ADULT LIVER, SIGNAL = 1.9
SLNAWTHLHPVKQRHCELSFHCL

SEQ ID NO: 30993 - protein, 48 aa, Homo sapiens
  MAP TO AC017019.3; EXPRESSED IN BRAIN, SIGNAL = 4.9; EXPRESSED IN BONE MARROW, SIGNAL = 3.1; EXPRESSED IN PLACENTA, SIGNAL = 3.1; EXPRESSED IN ADULT LIVER, SIGNAL = 3.5; EXPRESSED IN HEART, SIGNAL = 3.1
LLTARNFRQQRRLQRDWLSSRLWVMVALLGVKIFAVCRRILSPLTRII

SEQ ID NO: 30994 - protein, 43 aa, Homo sapiens
  MAP TO AF196968.1; EXPRESSED IN HEART, SIGNAL = 1.3; EXPRESSED IN BRAIN, SIGNAL = 1.1; EXPRESSED IN LUNG, SIGNAL = 0.89; EXPRESSED IN BONE MARROW, SIGNAL = 1.2; EXPRESSED IN PLACENTA, SIGNAL = 1.8; EXPRESSED IN ADULT LIVER, SIGNAL = 1.4
GLAPMMRLGNCPSCEVTILIQIVEVIRRKAGKRAMKWSPVPIP

SEQ ID NO: 30995 - protein, 31 aa, Homo sapiens
  MAP TO AC003076.1; EXPRESSED IN PLACENTA, SIGNAL = 0.85; EXPRESSED IN ADULT LIVER, SIGNAL = 0.45; EXPRESSED IN BRAIN, SIGNAL = 0.59
KMAKATKSSFTGPSTWVMKGLRARWSPVAGN

SEQ ID NO: 30996 - protein, 63 aa, Homo sapiens
  MAP TO AC018427.3; EXPRESSED IN PLACENTA, SIGNAL = 0.71; EXPRESSED IN ADULT LIVER, SIGNAL = 0.78; SWISSPROT HIT: P09705, EVALUE 7.40e+00
PPVPPRPQCRHLHAAPLLPALWGSDGRAQHGLKPPALIPLEIRERPWQLHLSRAPRTWDQPPR

SEQ ID NO: 30997 - protein, 23 aa, Homo sapiens
  MAP TO AC018427.3; EXPRESSED IN PLACENTA, SIGNAL = 0.71; EXPRESSED IN ADULT LIVER, SIGNAL = 0.78; SWISSPROT HIT: Q60793, EVALUE 6.80e+00
SSSSQAPVQTSPCSAPAACSLGI

SEQ ID NO: 30998 - protein, 49 aa, Homo sapiens
  MAP TO AC011471.5; EXPRESSED IN BRAIN, SIGNAL = 1.3; EXPRESSED IN LUNG, SIGNAL = 1.6; EXPRESSED IN BONE MARROW, SIGNAL =   1; EXPRESSED IN ADULT LIVER, SIGNAL = 1.3; EXPRESSED IN PLACENTA, SIGNAL =   1
MTIPEFFRESVNRFGTYPALASKNGKKWEILNFNQYYEACRKAAKSLIK

SEQ ID NO: 30999 - protein, 47 aa, Homo sapiens
  MAP TO AC000124.1; EXPRESSED IN HELA, SIGNAL = 0.44; EXPRESSED IN ADULT LIVER, SIGNAL = 0.57; SWISSPROT HIT: P36941, EVALUE 1.30e+00
VFMSSKSKQEDGRQENDKIFCELISSCPEGHELFKGSYHCTPFSCNI

SEQ ID NO: 31000 - protein, 35 aa, Homo sapiens
  MAP TO AC022116.3; EXPRESSED IN LUNG, SIGNAL = 1.2; EXPRESSED IN BRAIN, SIGNAL = 0.69; EXPRESSED IN FETAL LIVER, SIGNAL = 0.99; EXPRESSED IN ADULT LIVER, SIGNAL = 0.63; SWISSPROT HIT: Q19532, EVALUE 1.70e+00
LKKCIKTPEIPSKHVRNWVPKVLEQRRQGLETYLQ

SEQ ID NO: 31001 - protein, 86 aa, Homo sapiens
  MAP TO AL031730.1; EXPRESSED IN BONE MARROW, SIGNAL = 2.3; EXPRESSED IN PLACENTA, SIGNAL = 1.1; EXPRESSED IN ADULT LIVER, SIGNAL = 1.2; EXPRESSED IN BRAIN, SIGNAL = 1.1; EXPRESSED IN LUNG, SIGNAL = 1.6; EXPRESSED IN FETAL LIVER, SIGNAL = 0.83; SWISSPROT HIT: P76228, EVALUE 5.40e+00
SGPIPSSPGDSCRTALRCPLWTETGGGSARGGHSSLHFFHICSSQRFPESTSLAASRRADGLLWEAFSGGCRHFCRWIRGSLCGLH

SEQ ID NO: 31002 - protein, 44 aa, Homo sapiens
  MAP TO AC016639.5; EXPRESSED IN HEART, SIGNAL = 0.99; EXPRESSED IN ADULT LIVER, SIGNAL = 1.3; SWISSPROT HIT: Q9PQP0, EVALUE 3.70e+00
PFCIEPTNIVNVNHVIQRVSDHASAMNKRIHYYSRLTTPADKAL

SEQ ID NO: 31003 - protein, 75 aa, Homo sapiens
  MAP TO AL121592.14; EXPRESSED IN BONE MARROW, SIGNAL = 4.1; EXPRESSED IN PLACENTA, SIGNAL = 4.8; EXPRESSED IN ADULT LIVER, SIGNAL = 4.2; EXPRESSED IN FETAL LIVER, SIGNAL = 5.3; EXPRESSED IN BRAIN, SIGNAL = 4.7; SWISSPROT HIT: P55201, EVALUE 7.70e+00
FRSEGQGLGSQSCRWEWGLVVPLPAPPMAALVPISTHFLPSEVHKSPRLRHSRAEDGEDEETSGQPATERSNALC

SEQ ID NO: 31004 - protein, 48 aa, Homo sapiens
  MAP TO AL121877.13; EXPRESSED IN FETAL LIVER, SIGNAL = 1.3; EXPRESSED IN BRAIN, SIGNAL = 1.1; EXPRESSED IN PLACENTA, SIGNAL =   1; EXPRESSED IN BONE MARROW, SIGNAL = 1.2; EXPRESSED IN ADULT LIVER, SIGNAL = 1.2
AIMSPYYRTLHSNASSKLGKVNFPNLKLVGLGLGSGKGNPEAQYAGKR

SEQ ID NO: 31005 - protein, 17 aa, Homo sapiens
  MAP TO AL121877.13; EXPRESSED IN FETAL LIVER, SIGNAL = 1.3; EXPRESSED IN BRAIN, SIGNAL = 1.1; EXPRESSED IN PLACENTA, SIGNAL =   1; EXPRESSED IN BONE MARROW, SIGNAL = 1.2; EXPRESSED IN ADULT LIVER, SIGNAL = 1.2
QLCLHTTGHSTQMHPPN

SEQ ID NO: 31006 - protein, 48 aa, Homo sapiens
  MAP TO AC053467.1; EXPRESSED IN LUNG, SIGNAL = 8.8; EXPRESSED IN FETAL LIVER, SIGNAL = 4.6; EXPRESSED IN BONE MARROW, SIGNAL = 8.3; EXPRESSED IN PLACENTA, SIGNAL = 5.2; EXPRESSED IN ADULT LIVER, SIGNAL = 6.1; SWISSPROT HIT: Q61982, EVALUE 5.70e-01
LPGQILSGTGVQLPCLPLRPGPQLCHAGEPASADRPQPALPRLRQWPV

SEQ ID NO: 31007 - protein, 25 aa, Homo sapiens
  MAP TO AC020553.4; EXPRESSED IN HEART, SIGNAL = 0.92; EXPRESSED IN LUNG, SIGNAL = 2.1; EXPRESSED IN FETAL LIVER, SIGNAL = 0.83; EXPRESSED IN BONE MARROW, SIGNAL = 1.8; EXPRESSED IN ADULT LIVER, SIGNAL = 1.2
TIEMMLDKAKFELFSYLSSKWVVKQ

SEQ ID NO: 31008 - protein, 93 aa, Homo sapiens
  MAP TO AC020553.4; EXPRESSED IN HEART, SIGNAL = 0.92; EXPRESSED IN LUNG, SIGNAL = 2.1; EXPRESSED IN FETAL LIVER, SIGNAL = 0.83; EXPRESSED IN BONE MARROW, SIGNAL = 1.8; EXPRESSED IN ADULT LIVER, SIGNAL = 1.2; SWISSPROT HIT: P41997, EVALUE 3.00e-07
YRNDVRQSQIRAIFLFEFKMGCKAMKTTYNINNTFGPGTVNKCPVQWWFKNFSKGDESLEDEELSGWLLQVDNDQLRAIIETDLLKTTQEVAK

SEQ ID NO: 31009 - protein, 70 aa, Homo sapiens
  MAP TO AC003961.1; EXPRESSED IN ADULT LIVER, SIGNAL = 0.52; SWISSPROT HIT: P08548, EVALUE 9.00e-04
PEILAKEISQKKEMKEEEPNQELISIYNIYKQTKIHLTREVKDLHKENYTILMKEIIENTNMEKHPLFMD

SEQ ID NO: 31010 - protein, 43 aa, Homo sapiens
  MAP TO AC016830.5; EXPRESSED IN BRAIN, SIGNAL = 1.3; EXPRESSED IN BONE MARROW, SIGNAL = 2.4; EXPRESSED IN PLACENTA, SIGNAL = 1.1; EXPRESSED IN HEART, SIGNAL = 1.5; EXPRESSED IN ADULT LIVER, SIGNAL = 1.2; EXPRESSED IN LUNG, SIGNAL = 2.1; EXPRESSED IN HELA, SIGNAL = 1.6
LPVTARDVKLVKTMQGGLKQHEADHGPDLHWLVLAAAADGGYK

SEQ ID NO: 31011 - protein, 42 aa, Homo sapiens
  MAP TO AC067967.2; EXPRESSED IN FETAL LIVER, SIGNAL = 0.92; EXPRESSED IN HELA, SIGNAL = 0.85; EXPRESSED IN BONE MARROW, SIGNAL = 1.5; EXPRESSED IN PLACENTA, SIGNAL = 1.1; EXPRESSED IN ADULT LIVER, SIGNAL = 1.8
ELNEEKHKELIEKKEMEISELNAKLRSQEKEKQNEIIKLQLE

SEQ ID NO: 31012 - protein, 58 aa, Homo sapiens
  MAP TO AF131215.1; EXPRESSED IN PLACENTA, SIGNAL = 1.1; EXPRESSED IN ADULT LIVER, SIGNAL = 1.3; EXPRESSED IN LUNG, SIGNAL = 0.69; EXPRESSED IN HELA, SIGNAL = 1.2; EXPRESSED IN FETAL LIVER, SIGNAL = 1.4; SWISSPROT HIT: P15662, EVALUE 9.40e-01
WHLHCALSSGTALPSLMMFLACHLIAAEDRLQCYLLRGTAVSSLSKTVLSLHQIPSNL

SEQ ID NO: 31013 - protein, 23 aa, Homo sapiens
  MAP TO AF131215.1; EXPRESSED IN PLACENTA, SIGNAL = 1.1; EXPRESSED IN ADULT LIVER, SIGNAL = 1.3; EXPRESSED IN LUNG, SIGNAL = 0.69; EXPRESSED IN HELA, SIGNAL = 1.2; EXPRESSED IN FETAL LIVER, SIGNAL = 1.4
DVLGLPPHRSRGSAPVLPAQRHC

SEQ ID NO: 31014 - protein, 48 aa, Homo sapiens
  MAP TO AC026745.3; EXPRESSED IN PLACENTA, SIGNAL = 0.95; EXPRESSED IN ADULT LIVER, SIGNAL = 1.2; EXPRESSED IN HEART, SIGNAL = 1.7; EXPRESSED IN BRAIN, SIGNAL = 0.91; EXPRESSED IN LUNG, SIGNAL = 0.85; EXPRESSED IN HELA, SIGNAL = 1.8; EXPRESSED IN FETAL LIVER, SIGNAL =   2; SWISSPROT HIT: Q9V7H4, EVALUE 4.80e+00
SPSGVPFWLTPTGSLGTLTIVHRRPPPGIGNQARRIAVLEGKIENAQA

SEQ ID NO: 31015 - protein, 49 aa, Homo sapiens
  MAP TO AC026745.3; EXPRESSED IN PLACENTA, SIGNAL = 0.95; EXPRESSED IN ADULT LIVER, SIGNAL = 1.2; EXPRESSED IN HEART, SIGNAL = 1.7; EXPRESSED IN BRAIN, SIGNAL = 0.91; EXPRESSED IN LUNG, SIGNAL = 0.85; EXPRESSED IN HELA, SIGNAL = 1.8; EXPRESSED IN FETAL LIVER, SIGNAL =   2
ISFWGTFLADSNRKSGDFNYSPQKTTSGDREPGKKNSSFGGEDRKCPGY

SEQ ID NO: 31016 - protein, 112 aa, Homo sapiens
  MAP TO AC016940.7; EXPRESSED IN BONE MARROW, SIGNAL = 2.4; EXPRESSED IN PLACENTA, SIGNAL = 2.7; EXPRESSED IN HEART, SIGNAL = 2.2; EXPRESSED IN ADULT LIVER, SIGNAL = 1.6; EXPRESSED IN LUNG, SIGNAL = 2.4; EXPRESSED IN HELA, SIGNAL = 1.5; EXPRESSED IN FETAL LIVER, SIGNAL = 2.7; SWISSPROT HIT: P38533, EVALUE 2.00e-07
MSQDPGSQDNSPPEDRNQRVVNVEDNHNLFRLSFPRKLWTIVEEDTFKSVSWNDDGDAVIIDKDLFQREVLQRKGAERIFKTDSLTSFIRQLNLYGFCKTRPSNSPGNKKMM

SEQ ID NO: 31017 - protein, 49 aa, Homo sapiens
  MAP TO AC016940.7; EXPRESSED IN BONE MARROW, SIGNAL = 2.4; EXPRESSED IN PLACENTA, SIGNAL = 2.7; EXPRESSED IN HEART, SIGNAL = 2.2; EXPRESSED IN ADULT LIVER, SIGNAL = 1.6; EXPRESSED IN LUNG, SIGNAL = 2.4; EXPRESSED IN HELA, SIGNAL = 1.5; EXPRESSED IN FETAL LIVER, SIGNAL = 2.7
WRVRTLNRNMKPSWPHLLVESQQAGAHLVLHLIQIQIPARFWTGTRTKP

SEQ ID NO: 31018 - protein, 24 aa, Homo sapiens
  MAP TO AC013602.2; EXPRESSED IN LUNG, SIGNAL = 1.3; EXPRESSED IN HELA, SIGNAL = 0.49; EXPRESSED IN BONE MARROW, SIGNAL = 1.1; EXPRESSED IN BRAIN, SIGNAL =   1; EXPRESSED IN PLACENTA, SIGNAL =   1; EXPRESSED IN HEART, SIGNAL = 1.2; EXPRESSED IN ADULT LIVER, SIGNAL = 1.1
VFSRAPEAASSSMSPKTTGDCSEK

SEQ ID NO: 31019 - protein, 28 aa, Homo sapiens
  MAP TO AC016951.9; EXPRESSED IN HEART, SIGNAL = 1.2; EXPRESSED IN ADULT LIVER, SIGNAL = 1.3; EXPRESSED IN BRAIN, SIGNAL = 1.2; EXPRESSED IN LUNG, SIGNAL = 2.4; EXPRESSED IN HELA, SIGNAL = 0.78; EXPRESSED IN BONE MARROW, SIGNAL = 1.7
ARYMEKVSAPSQLNRPHMMIIKSYLKMR

SEQ ID NO: 31020 - protein, 18 aa, Homo sapiens
  MAP TO AC016951.9; EXPRESSED IN HEART, SIGNAL = 1.2; EXPRESSED IN ADULT LIVER, SIGNAL = 1.3; EXPRESSED IN BRAIN, SIGNAL = 1.2; EXPRESSED IN LUNG, SIGNAL = 2.4; EXPRESSED IN HELA, SIGNAL = 0.78; EXPRESSED IN BONE MARROW, SIGNAL = 1.7
TPSSSRPDTWKRCLLRAS

SEQ ID NO: 31021 - protein, 99 aa, Homo sapiens
  MAP TO AL121906.18; EXPRESSED IN BONE MARROW, SIGNAL = 1.2; EXPRESSED IN PLACENTA, SIGNAL = 0.96; EXPRESSED IN ADULT LIVER, SIGNAL = 1.1; EXPRESSED IN LUNG, SIGNAL = 0.92; EXPRESSED IN FETAL LIVER, SIGNAL = 1.1; EXPRESSED IN HELA, SIGNAL = 1.3; SWISSPROT HIT: Q06455, EVALUE 7.00e-21
NCWNCGRKASETCSGCNIARYCGSFCQHKDWERHHRLCGQNLHGQSPHGQGRPLLPVGRGSSARSADCSVPSPALDKTSATTSRSSTPASVTAIDTNGL

SEQ ID NO: 31022 - protein, 63 aa, Homo sapiens
  MAP TO AL121906.18; EXPRESSED IN BONE MARROW, SIGNAL = 1.2; EXPRESSED IN PLACENTA, SIGNAL = 0.96; EXPRESSED IN ADULT LIVER, SIGNAL = 1.1; EXPRESSED IN LUNG, SIGNAL = 0.92; EXPRESSED IN FETAL LIVER, SIGNAL = 1.1; EXPRESSED IN HELA, SIGNAL = 1.3
LMPVSCRTAGTVAAKPARHAVAAISRDTVALSASTRTGSGTTASVVRTCMARAPTARAGRCFL

SEQ ID NO: 31023 - protein, 99 aa, Homo sapiens
  MAP TO AL121906.18; EXPRESSED IN BONE MARROW, SIGNAL = 1.2; EXPRESSED IN PLACENTA, SIGNAL = 0.96; EXPRESSED IN ADULT LIVER, SIGNAL = 1.1; EXPRESSED IN LUNG, SIGNAL = 0.92; EXPRESSED IN FETAL LIVER, SIGNAL = 1.1; EXPRESSED IN HELA, SIGNAL = 1.3
LLELWPQSQRDMQWLQYRAILWLFLPAQGLGAAPPPLWSEPAWPEPPRPGPAAASCRQGLLCQVRRLQRAQPSPRQDLGNHIAFLNTCFCDSYRHQRTL

SEQ ID NO: 31024 - protein, 24 aa, Homo sapiens
  MAP TO AC005601.1; EXPRESSED IN BONE MARROW, SIGNAL = 4.4; EXPRESSED IN PLACENTA, SIGNAL =   5; EXPRESSED IN ADULT LIVER, SIGNAL = 4.8; EXPRESSED IN HELA, SIGNAL = 5.3; EXPRESSED IN BRAIN, SIGNAL = 4.4; EXPRESSED IN FETAL LIVER, SIGNAL = 5.5
CFASYLVLPLPISLLQSLAALLTC

SEQ ID NO: 31025 - protein, 19 aa, Homo sapiens
  MAP TO AF031075.1; EXPRESSED IN BRAIN, SIGNAL = 1.1; EXPRESSED IN FETAL LIVER, SIGNAL = 2.6; EXPRESSED IN PLACENTA, SIGNAL = 3.8; EXPRESSED IN ADULT LIVER, SIGNAL =   2
WRKMRWRKSLRRASVPQGQ

SEQ ID NO: 31026 - protein, 58 aa, Homo sapiens
  MAP TO AC025469.3; EXPRESSED IN ADULT LIVER, SIGNAL = 1.1; EXPRESSED IN HEART, SIGNAL = 1.6; EXPRESSED IN LUNG, SIGNAL = 1.4; EXPRESSED IN HELA, SIGNAL = 2.1; EXPRESSED IN BRAIN, SIGNAL = 1.1; EXPRESSED IN PLACENTA, SIGNAL = 0.94; SWISSPROT HIT: Q16960, EVALUE 1.00e-02
TVRTWEVENPKKQKSVFKPRTMQGKKVIPTTCTYSRDGNLIAAACQNGSIQIWDRNLT

SEQ ID NO: 31027 - protein, 37 aa, Homo sapiens
  MAP TO AC002319.1; EXPRESSED IN ADULT LIVER, SIGNAL = 0.75; EXPRESSED IN HELA, SIGNAL =   1
APGSEAPSKGGQILNRTASCVQLVLPFRDCFKALINK

SEQ ID NO: 31028 - protein, 23 aa, Homo sapiens
  MAP TO AC036102.3; EXPRESSED IN BONE MARROW, SIGNAL = 0.99; EXPRESSED IN PLACENTA, SIGNAL = 0.72; EXPRESSED IN ADULT LIVER, SIGNAL = 0.84; EXPRESSED IN HEART, SIGNAL = 1.2; EXPRESSED IN BRAIN, SIGNAL = 0.73
KGTLASSFTTRVHQTKETESFIT

SEQ ID NO: 31029 - protein, 24 aa, Homo sapiens
  MAP TO AC012313.5; EXPRESSED IN PLACENTA, SIGNAL = 1.2; EXPRESSED IN HEART, SIGNAL = 1.2; EXPRESSED IN ADULT LIVER, SIGNAL = 1.2; EXPRESSED IN BRAIN, SIGNAL = 1.3; EXPRESSED IN LUNG, SIGNAL = 0.79; EXPRESSED IN BONE MARROW, SIGNAL = 1.3
WIRGHCSCHVSWKPLRGWTMITTL

SEQ ID NO: 31030 - protein, 70 aa, Homo sapiens
  MAP TO AC005789.1; EXPRESSED IN ADULT LIVER, SIGNAL = 5.7; EXPRESSED IN HEART, SIGNAL = 8.7; EXPRESSED IN BRAIN, SIGNAL = 6.6; EXPRESSED IN BONE MARROW, SIGNAL = 3.7; EXPRESSED IN PLACENTA, SIGNAL = 7.7; SWISSPROT HIT: P48634, EVALUE 4.60e+00
LMLFPSLSGPLVQDTFFLCNSNLINSQVLMGNVPDRGGRPNELEPPMPTWRSRREDGGPQCWGRKKKKKK

SEQ ID NO: 31031 - protein, 42 aa, Homo sapiens
  MAP TO AC005789.1; EXPRESSED IN ADULT LIVER, SIGNAL = 5.7; EXPRESSED IN HEART, SIGNAL = 8.7; EXPRESSED IN BRAIN, SIGNAL = 6.6; EXPRESSED IN BONE MARROW, SIGNAL = 3.7; EXPRESSED IN PLACENTA, SIGNAL = 7.7
CLWATFQTGGAAQMSWSLPCPPGGAEERMEAPSVGVARRRRR

SEQ ID NO: 31032 - protein, 47 aa, Homo sapiens
  MAP TO AL023576.1; EXPRESSED IN PLACENTA, SIGNAL = 0.9; EXPRESSED IN ADULT LIVER, SIGNAL = 0.85; EXPRESSED IN HELA, SIGNAL = 0.97; EXPRESSED IN FETAL LIVER, SIGNAL = 0.98; EXPRESSED IN BRAIN, SIGNAL = 1.1; SWISSPROT HIT: P08548, EVALUE 1.80e-02
MEFIQSVFFDHSGIKLEASNRRKFEENDKYVDILEHTLNNQWVKEEI

SEQ ID NO: 31033 - protein, 49 aa, Homo sapiens
  MAP TO AC022073.13; EXPRESSED IN FETAL LIVER, SIGNAL = 2.5; EXPRESSED IN ADULT LIVER, SIGNAL =   2; EXPRESSED IN PLACENTA, SIGNAL = 1.8; EXPRESSED IN HEART, SIGNAL = 3.5; SWISSPROT HIT: Q9Y3F4, EVALUE 1.00e-25
SYKGHFGPIHCVRFSPDGELYASGSEDGTLRLWQTVVGKTYGLWKCVLP

SEQ ID NO: 31034 - protein, 97 aa, Homo sapiens
  MAP TO AL121721.20; EXPRESSED IN ADULT LIVER, SIGNAL = 0.6; EXPRESSED IN FETAL LIVER, SIGNAL = 0.58; EXPRESSED IN BONE MARROW, SIGNAL = 0.75; SWISSPROT HIT: Q9RT03, EVALUE 7.20e+00
NIIVYGNTIDTYTTVETLLNLGVSGSRIHLVQPPPASTITCINNYSVESAVADALGAAGVTMYRDAILAQWNDGLHPDPIYSASFTTPTKPFRLQCS

SEQ ID NO: 31035 - protein, 19 aa, Homo sapiens
  MAP TO AL121721.20; EXPRESSED IN ADULT LIVER, SIGNAL = 0.6; EXPRESSED IN FETAL LIVER, SIGNAL = 0.58; EXPRESSED IN BONE MARROW, SIGNAL = 0.75
GISLSMGIQLILTPPWRRS

SEQ ID NO: 31036 - protein, 61 aa, Homo sapiens
  MAP TO AC010643.5; EXPRESSED IN LUNG, SIGNAL = 0.5; EXPRESSED IN FETAL LIVER, SIGNAL = 0.52; EXPRESSED IN BRAIN, SIGNAL = 0.9; EXPRESSED IN ADULT LIVER, SIGNAL = 0.75; SWISSPROT HIT: P11121, EVALUE 1.10e-01
TVAVAQVLAYLEAVTGQGPQDARLQTLANSLDPNGEGPKATVDLDTFLVVMRDWIAACQLH

SEQ ID NO: 31037 - protein, 46 aa, Homo sapiens
  MAP TO AC067968.1; EXPRESSED IN BRAIN, SIGNAL = 3.3; EXPRESSED IN HELA, SIGNAL = 2.3; EXPRESSED IN FETAL LIVER, SIGNAL = 5.1; EXPRESSED IN BONE MARROW, SIGNAL = 3.6; EXPRESSED IN PLACENTA, SIGNAL =   4; EXPRESSED IN HEART, SIGNAL = 3.4; EXPRESSED IN ADULT LIVER, SIGNAL = 3.9; SWISSPROT HIT: P08547, EVALUE 1.50e-01
IYPKELKAGNGINMRIGMFVVALFTAAKRWKEPNVTSRSMDKQNVV

SEQ ID NO: 31038 - protein, 39 aa, Homo sapiens
  MAP TO AC022101.3; EXPRESSED IN ADULT LIVER, SIGNAL = 0.59; EXPRESSED IN BRAIN, SIGNAL = 0.75; EXPRESSED IN LUNG, SIGNAL = 0.82; EXPRESSED IN FETAL LIVER, SIGNAL = 0.42
EDILTFTILCPIIMYKRYIIVIITIIVMMIIIIIINQHY

SEQ ID NO: 31039 - protein, 76 aa, Homo sapiens
  MAP TO AC026446.2; EXPRESSED IN BRAIN, SIGNAL = 1.1; EXPRESSED IN PLACENTA, SIGNAL = 0.83; EXPRESSED IN ADULT LIVER, SIGNAL = 0.89; EXPRESSED IN HEART, SIGNAL =   1; SWISSPROT HIT: P15575, EVALUE 7.20e-01
CGMMPLHHLFLPLGKKIPKATALLRNSCPSSQTQQQVEKTQKFCYLASLLLSTKPSCLLKSLLAALTMKWAAFLSP

SEQ ID NO: 31040 - protein, 59 aa, Homo sapiens
  MAP TO AC018557.5; EXPRESSED IN HEART, SIGNAL = 1.6; EXPRESSED IN ADULT LIVER, SIGNAL = 1.4; EXPRESSED IN FETAL LIVER, SIGNAL = 1.4; EXPRESSED IN PLACENTA, SIGNAL = 1.6; SWISSPROT HIT: Q04941, EVALUE 2.10e+00
ILALIAFICIETIMACSPCEGLYFFEFVSCSAFVVTGVLLIMFSLNLHMRIPQINWNLT

SEQ ID NO: 31041 - protein, 18 aa, Homo sapiens
  MAP TO AC018557.5; EXPRESSED IN HEART, SIGNAL = 1.6; EXPRESSED IN ADULT LIVER, SIGNAL = 1.4; EXPRESSED IN FETAL LIVER, SIGNAL = 1.4; EXPRESSED IN PLACENTA, SIGNAL = 1.6
LGPDCIHLHRDHHGMLPV

SEQ ID NO: 31042 - protein, 70 aa, Homo sapiens
  MAP TO AC005264.1; EXPRESSED IN ADULT LIVER, SIGNAL = 0.72; EXPRESSED IN BRAIN, SIGNAL = 0.82; EXPRESSED IN PLACENTA, SIGNAL = 0.54
MLRQPRGSSWTCTRGCTPGAWTAPRAARRAHDPDASSATTHVPQTHRTSARSSRTCGTRCSPATWTRSTC

SEQ ID NO: 31043 - protein, 74 aa, Homo sapiens
  MAP TO AC005264.1; EXPRESSED IN ADULT LIVER, SIGNAL = 0.72; EXPRESSED IN BRAIN, SIGNAL = 0.82; EXPRESSED IN PLACENTA, SIGNAL = 0.54; SWISSPROT HIT: P30679, EVALUE 7.00e-38
PKQDAEAAKRFILDMYTRMYTGCVDGPEGSKKGARSRRLFSHYTCATDTQNIRKVFKDVRDSVLARYLDEINLL

SEQ ID NO: 31044 - protein, 86 aa, Homo sapiens
  MAP TO AL022069.1; EXPRESSED IN PLACENTA, SIGNAL = 1.5; EXPRESSED IN BONE MARROW, SIGNAL = 1.2; EXPRESSED IN ADULT LIVER, SIGNAL = 1.6; EXPRESSED IN HEART, SIGNAL = 1.3; EXPRESSED IN LUNG, SIGNAL = 1.1; EXPRESSED IN FETAL LIVER, SIGNAL = 1.1; EXPRESSED IN BRAIN, SIGNAL = 1.2; SWISSPROT HIT: P51855, EVALUE 2.40e+00
GTLAMSGDFLVFPAGTGAPGIGEYGSGKLVSILCAQDSPHNLLPQRKVEKPSLSILVGESRSHVDKGQEVDILEMGMEFFFFIEFL

SEQ ID NO: 31045 - protein, 63 aa, Homo sapiens
  MAP TO AL022069.1; EXPRESSED IN PLACENTA, SIGNAL = 1.5; EXPRESSED IN BONE MARROW, SIGNAL = 1.2; EXPRESSED IN ADULT LIVER, SIGNAL = 1.6; EXPRESSED IN HEART, SIGNAL = 1.3; EXPRESSED IN LUNG, SIGNAL = 1.1; EXPRESSED IN FETAL LIVER, SIGNAL = 1.1; EXPRESSED IN BRAIN, SIGNAL = 1.2; SWISSPROT HIT: Q9R1C8, EVALUE 8.90e+00
GHWQCLETFWFFQLGQGLLALVNTGQGSWLASCVHRTAPTTCCPNERLRSPASASLWVRAGLM

SEQ ID NO: 31046 - protein, 93 aa, Homo sapiens
  MAP TO AL096870.3; EXPRESSED IN LUNG, SIGNAL = 2.7; EXPRESSED IN BRAIN, SIGNAL = 2.1; EXPRESSED IN BONE MARROW, SIGNAL = 2.7; EXPRESSED IN PLACENTA, SIGNAL = 1.5; EXPRESSED IN ADULT LIVER, SIGNAL = 1.7; SWISSPROT HIT: P22735, EVALUE 3.00e-46
SDAERKAVETAAAHGSKPNVYANRGSAEDVAMQVEAQDAVMGQDLMVSVMLINHSSSRRTVKLHLYLSVTFYTGVSGTIFKETKKEVELAPGA

SEQ ID NO: 31047 - protein, 35 aa, Homo sapiens
  MAP TO AC025167.4; EXPRESSED IN BRAIN, SIGNAL =   3; EXPRESSED IN FETAL LIVER, SIGNAL = 3.2; EXPRESSED IN LUNG, SIGNAL = 1.3; EXPRESSED IN PLACENTA, SIGNAL = 2.9; EXPRESSED IN ADULT LIVER, SIGNAL = 2.4
IWMILTSTRMSKRSQTPKRAYYIIPFIRSTQEEIL

SEQ ID NO: 31048 - protein, 110 aa, Homo sapiens
  MAP TO AC020948.6; EXPRESSED IN ADULT LIVER, SIGNAL = 7.9; EXPRESSED IN BRAIN, SIGNAL = 7.7; EXPRESSED IN FETAL LIVER, SIGNAL = 4.3; EXPRESSED IN BONE MARROW, SIGNAL = 8.5; EXPRESSED IN PLACENTA, SIGNAL = 5.9; SWISSPROT HIT: P13394, EVALUE 5.50e+00
PMTRPRIQCSSSIPTSTPPSDAHLLADLLCLDRRQFSYFLSSRGAVPYRRPSSCLVSRPSLGAAEAHQEVLEDVALRQHWAAGRVAHPADRALPVLGDEVLLEAARGPLL

SEQ ID NO: 31049 - protein, 40 aa, Homo sapiens
  MAP TO AC008624.5; EXPRESSED IN BONE MARROW, SIGNAL = 0.41; EXPRESSED IN PLACENTA, SIGNAL = 0.42; EXPRESSED IN ADULT LIVER, SIGNAL = 0.78; SWISSPROT HIT: P04008, EVALUE 1.70e+00
SLPSHHGSTALTDIVQNGCSSSSFYTCTPGSRRKEKVEKC

SEQ ID NO: 31050 - protein, 20 aa, Homo sapiens
  MAP TO AC005175.1; EXPRESSED IN BONE MARROW, SIGNAL = 1.5; EXPRESSED IN PLACENTA, SIGNAL = 0.63; EXPRESSED IN ADULT LIVER, SIGNAL = 0.98
RPPWWRRPRRQRAPRSLHAV

SEQ ID NO: 31051 - protein, 49 aa, Homo sapiens
  MAP TO AC005175.1; EXPRESSED IN BONE MARROW, SIGNAL = 1.5; EXPRESSED IN PLACENTA, SIGNAL = 0.63; EXPRESSED IN ADULT LIVER, SIGNAL = 0.98
STMVETSKKTASAQEFARCLDSVLGEFAFPDEFVVEVWAAIGEAREACG

SEQ ID NO: 31052 - protein, 69 aa, Homo sapiens
  MAP TO AC016597.4; EXPRESSED IN PLACENTA, SIGNAL = 1.7; EXPRESSED IN HEART, SIGNAL = 1.7; EXPRESSED IN ADULT LIVER, SIGNAL = 1.8; EXPRESSED IN BRAIN, SIGNAL = 1.9; EXPRESSED IN FETAL LIVER, SIGNAL = 2.1; EXPRESSED IN BONE MARROW, SIGNAL =   2
EGLNKCLCGELEEERKEGRKGGGREEEKEGREEGRKEGGKEGGKEEKKEGGREGGKEGRKEGEVEEFKP

SEQ ID NO: 31053 - protein, 60 aa, Homo sapiens
  MAP TO AC006290.1; EXPRESSED IN PLACENTA, SIGNAL = 0.66; EXPRESSED IN ADULT LIVER, SIGNAL = 0.71; EXPRESSED IN HEART, SIGNAL = 0.96; SWISSPROT HIT: Q9ER04, EVALUE 3.60e+00
HRQQRTGWQPGSGCPSCCLVHMGSWGECRGAGQLPSQLWGAHILVCCAPEVISSSRSPWT

SEQ ID NO: 31054 - protein, 30 aa, Homo sapiens
  MAP TO AC004201.1; EXPRESSED IN FETAL LIVER, SIGNAL = 0.77; EXPRESSED IN ADULT LIVER, SIGNAL = 1.2; EXPRESSED IN BRAIN, SIGNAL = 1.3; SWISSPROT HIT: P12528, EVALUE 8.70e+00
FEVPTSKSSNSEDDLPEDYPVVKKMLHRLT

SEQ ID NO: 31055 - protein, 28 aa, Homo sapiens
  MAP TO AC004201.1; EXPRESSED IN FETAL LIVER, SIGNAL = 0.77; EXPRESSED IN ADULT LIVER, SIGNAL = 1.2; EXPRESSED IN BRAIN, SIGNAL = 1.3
LKSQHPSHLIQRMISLKIIQWSKKCFID

SEQ ID NO: 31056 - protein, 92 aa, Homo sapiens
  MAP TO AL121928.13; EXPRESSED IN HELA, SIGNAL = 1.7; EXPRESSED IN BONE MARROW, SIGNAL = 1.5; EXPRESSED IN PLACENTA, SIGNAL = 1.6; EXPRESSED IN HEART, SIGNAL = 2.1; EXPRESSED IN ADULT LIVER, SIGNAL = 1.3; EXPRESSED IN FETAL LIVER, SIGNAL = 1.9; EXPRESSED IN LUNG, SIGNAL = 1.6; SWISSPROT HIT: Q92538, EVALUE 2.00e-17
FEKPESPRAASSSSPGSPVASSPSRLSPTPDGPPPLAQPPLILQPLASPLQVGVPPMTLPIILNPALIEATSPVPLLATPRPTDPIPTSEVN

SEQ ID NO: 31057 - protein, 26 aa, Homo sapiens
  MAP TO AL121928.13; EXPRESSED IN HELA, SIGNAL = 1.7; EXPRESSED IN BONE MARROW, SIGNAL = 1.5; EXPRESSED IN PLACENTA, SIGNAL = 1.6; EXPRESSED IN HEART, SIGNAL = 2.1; EXPRESSED IN ADULT LIVER, SIGNAL = 1.3; EXPRESSED IN FETAL LIVER, SIGNAL = 1.9; EXPRESSED IN LUNG, SIGNAL = 1.6
TLRSPRAPEPPAAAPQDHQWPQAPAG

SEQ ID NO: 31058 - protein, 22 aa, Homo sapiens
  MAP TO AC008033.8; EXPRESSED IN HEART, SIGNAL = 2.4; EXPRESSED IN ADULT LIVER, SIGNAL = 2.6; EXPRESSED IN LUNG, SIGNAL = 2.9; EXPRESSED IN BRAIN, SIGNAL = 2.2; EXPRESSED IN BONE MARROW, SIGNAL = 2.7; EXPRESSED IN PLACENTA, SIGNAL = 1.5
WWMRSFQELELGRRINTYMEEQ

SEQ ID NO: 31059 - protein, 24 aa, Homo sapiens
  MAP TO AC016951.9; EXPRESSED IN ADULT LIVER, SIGNAL = 0.63; EXPRESSED IN FETAL LIVER, SIGNAL = 0.89
EIWRGQNIQTLSCPKQQKAETRPW

SEQ ID NO: 31060 - protein, 18 aa, Homo sapiens
  MAP TO AL079302.4; EXPRESSED IN LUNG, SIGNAL = 2.7; EXPRESSED IN BRAIN, SIGNAL = 2.5; EXPRESSED IN PLACENTA, SIGNAL = 1.6; EXPRESSED IN ADULT LIVER, SIGNAL = 2.8; EXPRESSED IN FETAL LIVER, SIGNAL = 2.4
LWLWGLCSWRSVPWASPQ

SEQ ID NO: 31061 - protein, 90 aa, Homo sapiens
  MAP TO AL079302.4; EXPRESSED IN LUNG, SIGNAL = 2.7; EXPRESSED IN BRAIN, SIGNAL = 2.5; EXPRESSED IN PLACENTA, SIGNAL = 1.6; EXPRESSED IN ADULT LIVER, SIGNAL = 2.8; EXPRESSED IN FETAL LIVER, SIGNAL = 2.4
FPESTADPSSSSPQEDVREVWGTPSHGANPKSPLPAVVAVGTVLVALSAMGFTSVGIAASSIAAKMMSTAAIANGGGVAAGSLVAILQSV

SEQ ID NO: 31062 - protein, 23 aa, Homo sapiens
  MAP TO AC008699.4; EXPRESSED IN BONE MARROW, SIGNAL = 0.79; EXPRESSED IN PLACENTA, SIGNAL = 0.49; EXPRESSED IN ADULT LIVER, SIGNAL = 0.55; EXPRESSED IN LUNG, SIGNAL = 0.83; EXPRESSED IN FETAL LIVER, SIGNAL = 0.55
WITLQRAPQLLGCILKGYHTQAG

SEQ ID NO: 31063 - protein, 47 aa, Homo sapiens
  MAP TO AC011604.10; EXPRESSED IN BRAIN, SIGNAL = 0.51; EXPRESSED IN LUNG, SIGNAL = 0.64; EXPRESSED IN BONE MARROW, SIGNAL = 0.7; EXPRESSED IN ADULT LIVER, SIGNAL = 0.45
MATNYVLKYSGCYYKILNTEWLKQQKFISHILQAKKSKVKVPADSIP

SEQ ID NO: 31064 - protein, 40 aa, Homo sapiens
  MAP TO AL109910.27; EXPRESSED IN BONE MARROW, SIGNAL = 0.61; EXPRESSED IN PLACENTA, SIGNAL = 0.48; EXPRESSED IN ADULT LIVER, SIGNAL = 0.46
DTGPRERGLWPPQMTSAPCLWPLCLSTARSPGHTTTLQMI

SEQ ID NO: 31065 - protein, 64 aa, Homo sapiens
  MAP TO AC004208.1; EXPRESSED IN PLACENTA, SIGNAL = 4.8; EXPRESSED IN ADULT LIVER, SIGNAL = 5.7; EXPRESSED IN HEART, SIGNAL = 4.5; EXPRESSED IN HELA, SIGNAL = 8.9; EXPRESSED IN BRAIN, SIGNAL = 3.4; EXPRESSED IN LUNG, SIGNAL =  18; EXPRESSED IN FETAL LIVER, SIGNAL = 4.6; SWISSPROT HIT: P06489, EVALUE 1.60e+00
ILDSRSPPTVKAIFVGPGPRILQPGRIPLGISQQRAAEYNVQEWGVLSLRALGRRCSAFDHLDF

SEQ ID NO: 31066 - protein, 50 aa, Homo sapiens
  MAP TO AC008413.5; EXPRESSED IN HELA, SIGNAL = 4.2; EXPRESSED IN BRAIN, SIGNAL = 4.5; EXPRESSED IN FETAL LIVER, SIGNAL = 2.3; EXPRESSED IN BONE MARROW, SIGNAL =   6; EXPRESSED IN PLACENTA, SIGNAL = 3.1; EXPRESSED IN ADULT LIVER, SIGNAL = 3.9; EXPRESSED IN HEART, SIGNAL = 3.5; SWISSPROT HIT: P48460, EVALUE 6.30e+00
FFQSAGPEVRMTAFLMGALRFFHHKYTLSRSACLTLCFLSCVELPECSHL

SEQ ID NO: 31067 - protein, 58 aa, Homo sapiens
  MAP TO AC008413.5; EXPRESSED IN HELA, SIGNAL = 4.2; EXPRESSED IN BRAIN, SIGNAL = 4.5; EXPRESSED IN FETAL LIVER, SIGNAL = 2.3; EXPRESSED IN BONE MARROW, SIGNAL =   6; EXPRESSED IN PLACENTA, SIGNAL = 3.1; EXPRESSED IN ADULT LIVER, SIGNAL = 3.9; EXPRESSED IN HEART, SIGNAL = 3.5; SWISSPROT HIT: P42705, EVALUE 9.40e-01
VLPVSRTRGENDSILDGSIEILPSQVHTVTFSLPHAVFPLLRGASRVLTSVNGPALMA

SEQ ID NO: 31068 - protein, 29 aa, Homo sapiens
  MAP TO AC006272.1; EXPRESSED IN ADULT LIVER, SIGNAL = 1.2; EXPRESSED IN HEART, SIGNAL = 1.4; EXPRESSED IN BRAIN, SIGNAL = 1.3; EXPRESSED IN LUNG, SIGNAL = 0.92; EXPRESSED IN PLACENTA, SIGNAL = 1.8
MEMALAVHSACSVDIINRTWIVLGGKENE

SEQ ID NO: 31069 - protein, 124 aa, Homo sapiens
  MAP TO AC068323.6; EXPRESSED IN BONE MARROW, SIGNAL = 1.3; EXPRESSED IN ADULT LIVER, SIGNAL = 0.83; EXPRESSED IN BRAIN, SIGNAL = 0.89; EXPRESSED IN FETAL LIVER, SIGNAL = 0.72; SWISSPROT HIT: P70414, EVALUE 1.50e-01
PGILRIGAGINGNDRFTGLMQDVRSYERKLTLEEIYELHAMPAKSDLHPISGYLEFRQGETNKSFIISARDDNDEEGEELFILKLVSVYGGARISEENTTARLTIQKSDNANGLFGFTGACIPE

SEQ ID NO: 31070 - protein, 21 aa, Homo sapiens
  MAP TO AC008507.6; EXPRESSED IN LUNG, SIGNAL = 0.72; EXPRESSED IN BRAIN, SIGNAL = 1.1; EXPRESSED IN PLACENTA, SIGNAL = 1.3; EXPRESSED IN HEART, SIGNAL = 2.6; EXPRESSED IN ADULT LIVER, SIGNAL =   1; EXPRESSED IN FETAL LIVER, SIGNAL = 0.97
KPDTVIANGEDTTSSEEEKED

SEQ ID NO: 31071 - protein, 29 aa, Homo sapiens
  MAP TO AC006334.3; EXPRESSED IN BRAIN, SIGNAL =  11; EXPRESSED IN HELA, SIGNAL =  10; EXPRESSED IN BONE MARROW, SIGNAL = 2.8; EXPRESSED IN PLACENTA, SIGNAL =  15; EXPRESSED IN ADULT LIVER, SIGNAL =  10
CIPRSRTDRPASGRASYAPLLWPSSSVSC

SEQ ID NO: 31072 - protein, 41 aa, Homo sapiens
  MAP TO AC006334.3; EXPRESSED IN BRAIN, SIGNAL =  11; EXPRESSED IN HELA, SIGNAL =  10; EXPRESSED IN BONE MARROW, SIGNAL = 2.8; EXPRESSED IN PLACENTA, SIGNAL =  15; EXPRESSED IN ADULT LIVER, SIGNAL =  10
HSQKQNRQTCVRKSLICAFAMAFIISVMLIAANQILRSGME

SEQ ID NO: 31073 - protein, 43 aa, Homo sapiens
  MAP TO AF172277.1; EXPRESSED IN HELA, SIGNAL = 2.9; EXPRESSED IN FETAL LIVER, SIGNAL = 1.4; EXPRESSED IN BRAIN, SIGNAL = 2.6; EXPRESSED IN PLACENTA, SIGNAL = 1.6; EXPRESSED IN ADULT LIVER, SIGNAL = 1.5; EXPRESSED IN HEART, SIGNAL = 2.1
LPQLFTGQRKMECYPKTGQFIRTLRKPCRSFMFQKQTLEITNV

SEQ ID NO: 31074 - protein, 61 aa, Homo sapiens
  MAP TO AF172277.1; EXPRESSED IN HELA, SIGNAL = 2.9; EXPRESSED IN FETAL LIVER, SIGNAL = 1.4; EXPRESSED IN BRAIN, SIGNAL = 2.6; EXPRESSED IN PLACENTA, SIGNAL = 1.6; EXPRESSED IN ADULT LIVER, SIGNAL = 1.5; EXPRESSED IN HEART, SIGNAL = 2.1; SWISSPROT HIT: P35331, EVALUE 3.00e-19
PTPIIYWAKEDGMLPKNRTVYKNFEKTLQIIHVSEADSGNYQCIAKNALGAIHHTISVRVK

SEQ ID NO: 31075 - protein, 39 aa, Homo sapiens
  MAP TO AC011890.4; EXPRESSED IN LUNG, SIGNAL = 3.3; EXPRESSED IN FETAL LIVER, SIGNAL = 1.6; EXPRESSED IN PLACENTA, SIGNAL = 1.6; EXPRESSED IN HEART, SIGNAL = 4.7; EXPRESSED IN ADULT LIVER, SIGNAL = 2.7
PFILPHQQVDKGAIKFVLSGANIMCPGLTSPGAKLYPAA

SEQ ID NO: 31076 - protein, 28 aa, Homo sapiens
  MAP TO AC011890.4; EXPRESSED IN LUNG, SIGNAL = 3.3; EXPRESSED IN FETAL LIVER, SIGNAL = 1.6; EXPRESSED IN PLACENTA, SIGNAL = 1.6; EXPRESSED IN HEART, SIGNAL = 4.7; EXPRESSED IN ADULT LIVER, SIGNAL = 2.7
ILLSCHTSRLIKEPSNLYSVEQISCVQA

SEQ ID NO: 31077 - protein, 66 aa, Homo sapiens
  MAP TO AC009510.9; EXPRESSED IN HEART, SIGNAL = 0.98; EXPRESSED IN ADULT LIVER, SIGNAL = 1.3; EXPRESSED IN FETAL LIVER, SIGNAL = 0.76; EXPRESSED IN LUNG, SIGNAL = 0.43; EXPRESSED IN HELA, SIGNAL = 0.56; EXPRESSED IN PLACENTA, SIGNAL = 0.92; SWISSPROT HIT: P11369, EVALUE 9.20e-01
PNWRQLTYPSTIKCIHTLWNIHVMEINSAMRMNATTWRNLTMVMWNKHRRHKRKGNQEKPSIDNDI

SEQ ID NO: 31078 - protein, 44 aa, Homo sapiens
  MAP TO AL022321.1; EXPRESSED IN BONE MARROW, SIGNAL =   2; EXPRESSED IN ADULT LIVER, SIGNAL = 1.5; EXPRESSED IN FETAL LIVER, SIGNAL = 1.4; SWISSPROT HIT: P13866, EVALUE 7.00e-20
MEPSNCPTIICGVHYLYFAIILFAISFITIVVISLLTKPIPDVH

SEQ ID NO: 31079 - protein, 42 aa, Homo sapiens
  MAP TO AL117337.25; EXPRESSED IN HELA, SIGNAL = 3.2; EXPRESSED IN FETAL LIVER, SIGNAL = 3.8; EXPRESSED IN PLACENTA, SIGNAL = 3.5; EXPRESSED IN ADULT LIVER, SIGNAL = 2.9; EXPRESSED IN HEART, SIGNAL = 4.1; SWISSPROT HIT: Q06730, EVALUE 7.00e-05
YHVNKPNAVFKLKQGKEPWILEVEFPHRGFPGELEEIISHVT

SEQ ID NO: 31080 - protein, 19 aa, Homo sapiens
  MAP TO AC012083.6; EXPRESSED IN BONE MARROW, SIGNAL = 1.6; EXPRESSED IN PLACENTA, SIGNAL =   2; EXPRESSED IN ADULT LIVER, SIGNAL = 2.2; EXPRESSED IN BRAIN, SIGNAL = 2.4; EXPRESSED IN FETAL LIVER, SIGNAL = 1.6
PAVMRKFFLNTHRNVKVFT

SEQ ID NO: 31081 - protein, 42 aa, Homo sapiens
  MAP TO AC016597.4; EXPRESSED IN ADULT LIVER, SIGNAL = 4.6; EXPRESSED IN HEART, SIGNAL = 3.9; EXPRESSED IN BRAIN, SIGNAL = 4.3; EXPRESSED IN FETAL LIVER, SIGNAL = 3.6; EXPRESSED IN BONE MARROW, SIGNAL = 3.2; EXPRESSED IN PLACENTA, SIGNAL = 4.2; SWISSPROT HIT: O06200, EVALUE 4.90e+00
AAAPLPELFPSWLSRTVLHGAPVLQNHVPSVHSLTPHTRAHE

SEQ ID NO: 31082 - protein, 42 aa, Homo sapiens
  MAP TO AC016597.4; EXPRESSED IN ADULT LIVER, SIGNAL = 4.6; EXPRESSED IN HEART, SIGNAL = 3.9; EXPRESSED IN BRAIN, SIGNAL = 4.3; EXPRESSED IN FETAL LIVER, SIGNAL = 3.6; EXPRESSED IN BONE MARROW, SIGNAL = 3.2; EXPRESSED IN PLACENTA, SIGNAL = 4.2
CCSSTTRAFPILAFQNRPTWRPSSPKSRSLCALPHTAHTCTR

SEQ ID NO: 31083 - protein, 56 aa, Homo sapiens
  MAP TO AC008901.4; EXPRESSED IN BONE MARROW, SIGNAL = 0.55; EXPRESSED IN PLACENTA, SIGNAL = 0.87; EXPRESSED IN ADULT LIVER, SIGNAL = 1.6; EXPRESSED IN HELA, SIGNAL = 0.48; SWISSPROT HIT: P53578, EVALUE 8.00e+00
KQSPVKISSALVGKNVYGISRLGEAGVPSVMSCALTVSRMSLSVPVTMPLMPASVP

SEQ ID NO: 31084 - protein, 76 aa, Homo sapiens
  MAP TO AC008901.4; EXPRESSED IN BONE MARROW, SIGNAL = 0.55; EXPRESSED IN PLACENTA, SIGNAL = 0.87; EXPRESSED IN ADULT LIVER, SIGNAL = 1.6; EXPRESSED IN HELA, SIGNAL = 0.48; SWISSPROT HIT: P19883, EVALUE 4.00e-42
AKSCEDIQCTGGKKCLWDFKVGRGRCSLCDELCPDSKSDEPVCASDNATYASECAMKEAACSSGVLLEVKHSGSCN

SEQ ID NO: 31085 - protein, 61 aa, Homo sapiens
  MAP TO AC002325.1; EXPRESSED IN ADULT LIVER, SIGNAL = 3.5; EXPRESSED IN HEART, SIGNAL = 5.2; EXPRESSED IN BRAIN, SIGNAL =   4; EXPRESSED IN PLACENTA, SIGNAL = 4.3; SWISSPROT HIT: P27197, EVALUE 2.70e+00
AIMFAANLTLGLYIHFGPRPLSPNSTAGLESESWGDLAQPLAAPAGYLTLVPLLATMLFIM

SEQ ID NO: 31086 - protein, 54 aa, Homo sapiens
  MAP TO AC020728.4; EXPRESSED IN BONE MARROW, SIGNAL = 1.4; EXPRESSED IN ADULT LIVER, SIGNAL = 1.2; EXPRESSED IN HEART, SIGNAL = 1.8; EXPRESSED IN BRAIN, SIGNAL =   1; EXPRESSED IN LUNG, SIGNAL =   2; EXPRESSED IN HELA, SIGNAL = 2.9; SWISSPROT HIT: P42285, EVALUE 2.00e-20
IAIDIKSAKRELKKARTVLQMDELKCRKRVLRRLGFATSSDVIEMKGRVACEIS

SEQ ID NO: 31087 - protein, 131 aa, Homo sapiens
  MAP TO AC012156.14; EXPRESSED IN PLACENTA, SIGNAL = 1.4; EXPRESSED IN ADULT LIVER, SIGNAL = 1.4; EXPRESSED IN HEART, SIGNAL = 1.7; EXPRESSED IN BRAIN, SIGNAL = 1.4; SWISSPROT HIT: P21414, EVALUE 4.00e-01
LLAYRLLLHPPCHDPVRSSDNPPRRPSPREQTRNQDSWVSAPATPLSAPMQLTPTQFTSHESPAEPPKRCSEVTAAATSTRQTKESPHPSEPVCWDPPQAAEQGHGPGCLAGHHGGLGKWEYRCHDDHINE

SEQ ID NO: 31088 - protein, 47 aa, Homo sapiens
  MAP TO AC024076.4; EXPRESSED IN BRAIN, SIGNAL = 1.4; EXPRESSED IN HELA, SIGNAL =   2; EXPRESSED IN BONE MARROW, SIGNAL = 1.7; EXPRESSED IN ADULT LIVER, SIGNAL = 1.5; EXPRESSED IN HEART, SIGNAL = 2.4
GSVLPSRCKWRRRRMRMKRMRRRGQETCWRWRLPQPQPLLRPGPHQA

SEQ ID NO: 31089 - protein, 91 aa, Homo sapiens
  MAP TO AC004204.1; EXPRESSED IN BONE MARROW, SIGNAL =   1; EXPRESSED IN PLACENTA, SIGNAL = 1.1; EXPRESSED IN ADULT LIVER, SIGNAL = 1.1; EXPRESSED IN BRAIN, SIGNAL =   1; SWISSPROT HIT: P30509, EVALUE 1.00e-52
HPKTHVTHHPVSDHEATLRCWALGFYPAEITLTWQRDGEDQTQDTELVETRPAGDGTFQKWAAVVVPSGEEQRYTCHVQHEGLPEPLTLRW

SEQ ID NO: 31090 - protein, 28 aa, Homo sapiens
  MAP TO AC005864.1; EXPRESSED IN BONE MARROW, SIGNAL = 0.74; EXPRESSED IN PLACENTA, SIGNAL = 0.94; EXPRESSED IN HEART, SIGNAL = 1.3; EXPRESSED IN ADULT LIVER, SIGNAL = 0.94; EXPRESSED IN LUNG, SIGNAL =   1; EXPRESSED IN HELA, SIGNAL = 0.98; EXPRESSED IN FETAL LIVER, SIGNAL = 1.1; EXPRESSED IN BRAIN, SIGNAL = 1.2
CLSHLSRKQRSPRSPWQVPRSVSSVRAV

SEQ ID NO: 31091 - protein, 65 aa, Homo sapiens
  MAP TO AC020908.5; EXPRESSED IN BONE MARROW, SIGNAL =  12; EXPRESSED IN PLACENTA, SIGNAL = 7.7; EXPRESSED IN ADULT LIVER, SIGNAL = 9.2; EXPRESSED IN HEART, SIGNAL =  17; EXPRESSED IN BRAIN, SIGNAL = 7.8; EXPRESSED IN LUNG, SIGNAL =  13; EXPRESSED IN HELA, SIGNAL =  29; SWISSPROT HIT: O29048, EVALUE 3.20e-01
ALQHELVTTQRLLGELDVGDSEENVQVLDLLSELKDVTAKKDLELRRYLGKCFKKEVAPCLLRAV

SEQ ID NO: 31092 - protein, 165 aa, Homo sapiens
  MAP TO AC009123.6; EXPRESSED IN ADULT LIVER, SIGNAL = 0.88; EXPRESSED IN BRAIN, SIGNAL =   1; EXPRESSED IN HELA, SIGNAL = 0.77; EXPRESSED IN PLACENTA, SIGNAL = 0.72; SWISSPROT HIT: P13627, EVALUE 1.20e-02
EMTSSDDGENVPASAEGKEEPPGDRETRQKMELFVKESFEAKDELCPEKPSGEEPPVEAKREDGGPEPEGTLPAETLLLSSPVEVKGEDGDGEPEGTLPAEAPPPPPPVEVKGEDGDQEPEGTLPAETLLLSPPVKVKGEDGDREPEGTLPAEAPPPPPLGAARE

SEQ ID NO: 31093 - protein, 44 aa, Homo sapiens
  MAP TO AC009145.4; EXPRESSED IN BRAIN, SIGNAL = 1.4; EXPRESSED IN HELA, SIGNAL = 1.4; EXPRESSED IN BONE MARROW, SIGNAL = 0.82; EXPRESSED IN PLACENTA, SIGNAL = 1.5; EXPRESSED IN ADULT LIVER, SIGNAL = 1.5
MQGERTEQPQEKQTLNPTVVCREECGFRGELGNKGGNSLAGFKH

SEQ ID NO: 31094 - protein, 59 aa, Homo sapiens
  MAP TO AL121776.19; EXPRESSED IN FETAL LIVER, SIGNAL = 0.84; EXPRESSED IN ADULT LIVER, SIGNAL = 0.9
TILPTPASPRASTPSITAHPTTLPTSRPAASALRPSPRPPTSSRRHLTTSPTRVPSHLL

SEQ ID NO: 31095 - protein, 41 aa, Homo sapiens
  MAP TO AL023801.1; EXPRESSED IN LUNG, SIGNAL = 2.3; EXPRESSED IN FETAL LIVER, SIGNAL = 4.4; EXPRESSED IN PLACENTA, SIGNAL = 2.6; EXPRESSED IN BONE MARROW, SIGNAL = 2.4; EXPRESSED IN ADULT LIVER, SIGNAL = 2.6; EXPRESSED IN HEART, SIGNAL = 3.4; SWISSPROT HIT: Q04660, EVALUE 8.40e+00
VSLENQQAKNSKKERLLGSASSEDIWRNYSLDEIERNFCLQ

SEQ ID NO: 31096 - protein, 42 aa, Homo sapiens
  MAP TO AF196972.1; EXPRESSED IN PLACENTA, SIGNAL = 0.76; EXPRESSED IN ADULT LIVER, SIGNAL = 0.83; EXPRESSED IN LUNG, SIGNAL = 1.7; EXPRESSED IN FETAL LIVER, SIGNAL =   1; EXPRESSED IN BRAIN, SIGNAL = 1.7; SWISSPROT HIT: P53681, EVALUE 4.90e+00
WDGRQRTSGMSTTAWPRRMAGVLAAPSNCYNWIRNSNSSKVP

SEQ ID NO: 31097 - protein, 62 aa, Homo sapiens
  MAP TO AC004209.1; EXPRESSED IN ADULT LIVER, SIGNAL = 0.54; EXPRESSED IN PLACENTA, SIGNAL = 0.63; SWISSPROT HIT: P36915, EVALUE 3.00e-30
LYEYVTGELGLALVLVLNKVDLAPPALVVAWKHYFHQHYPQLHVVLFTSFPRDPRTPQDPSS

SEQ ID NO: 31098 - protein, 32 aa, Homo sapiens
  MAP TO AC008994.3; EXPRESSED IN LUNG, SIGNAL = 3.1; EXPRESSED IN BRAIN, SIGNAL = 5.8; EXPRESSED IN BONE MARROW, SIGNAL = 4.3; EXPRESSED IN PLACENTA, SIGNAL = 7.1; EXPRESSED IN HEART, SIGNAL = 6.4; EXPRESSED IN ADULT LIVER, SIGNAL = 6.2
MLWSLAQGLSLPHGECCEGVPGVPALRIDQRM

SEQ ID NO: 31099 - protein, 57 aa, Homo sapiens
  MAP TO AC008795.5; EXPRESSED IN BONE MARROW, SIGNAL = 1.3; EXPRESSED IN HEART, SIGNAL = 2.6; EXPRESSED IN ADULT LIVER, SIGNAL = 1.1; SWISSPROT HIT: P78695, EVALUE 1.20e+00
NYDDNFNVNGPGEGVKVDPEDTNLNQDSAKELEDSPQENVSVTEIIKPCDDPKSEAK

SEQ ID NO: 31100 - protein, 54 aa, Homo sapiens
  MAP TO AC022336.12; EXPRESSED IN BONE MARROW, SIGNAL = 2.2; EXPRESSED IN ADULT LIVER, SIGNAL = 3.3; EXPRESSED IN PLACENTA, SIGNAL = 4.5; EXPRESSED IN BRAIN, SIGNAL = 4.7
LQTAAWSTASKPPSGASRFRDTLCFRTSSLKLSTLSVRGSRWRNPKEGTQFGNN

SEQ ID NO: 31101 - protein, 119 aa, Homo sapiens
  MAP TO AC011525.4; EXPRESSED IN ADULT LIVER, SIGNAL =   1; EXPRESSED IN HEART, SIGNAL = 1.1; EXPRESSED IN FETAL LIVER, SIGNAL = 0.95; EXPRESSED IN HELA, SIGNAL = 0.76; SWISSPROT HIT: O27436, EVALUE 6.00e+00
LFATKKGREILRTKNGALFSHFHHLYPSPSDKGSSTRFEKNIEKKKNLETGQFGEAFGEPGVPKRPTRQLQLTRGLVREEGEAGRGISRTQLTGHQPERASWGLLAGPLPSPGSSPPQT

SEQ ID NO: 31102 - protein, 81 aa, Homo sapiens
  MAP TO AC006127.1; EXPRESSED IN BRAIN, SIGNAL = 1.9; EXPRESSED IN HELA, SIGNAL = 4.3; EXPRESSED IN BONE MARROW, SIGNAL = 1.5; EXPRESSED IN PLACENTA, SIGNAL = 1.6; EXPRESSED IN HEART, SIGNAL = 2.2; EXPRESSED IN ADULT LIVER, SIGNAL = 1.1; EXPRESSED IN LUNG, SIGNAL = 2.8; EXPRESSED IN FETAL LIVER, SIGNAL = 2.1; SWISSPROT HIT: P51532, EVALUE 8.00e-45
IRWKYMIVDEGHRMKNHHCKLTQVLNTHYVAPRRLLLTGTPLQNKLPELWALLNFLLPTIFKSCSTFEQWFNAPFAMTGEK

SEQ ID NO: 31103 - protein, 70 aa, Homo sapiens
  MAP TO AC006127.1; EXPRESSED IN BRAIN, SIGNAL = 1.9; EXPRESSED IN HELA, SIGNAL = 4.3; EXPRESSED IN BONE MARROW, SIGNAL = 1.5; EXPRESSED IN PLACENTA, SIGNAL = 1.6; EXPRESSED IN HEART, SIGNAL = 2.2; EXPRESSED IN ADULT LIVER, SIGNAL = 1.1; EXPRESSED IN LUNG, SIGNAL = 2.8; EXPRESSED IN FETAL LIVER, SIGNAL = 2.1; SWISSPROT HIT: P81408, EVALUE 7.00e-01
PLEVHDCGRRSPHEEPPLQADAGAQHALCGTPPPAADGHTAAEQASRALGAAQLPAAHHLQELQHLRAVV

SEQ ID NO: 31104 - protein, 58 aa, Homo sapiens
  MAP TO AL121886.22; EXPRESSED IN FETAL LIVER, SIGNAL = 0.78; EXPRESSED IN BONE MARROW, SIGNAL = 1.1; EXPRESSED IN ADULT LIVER, SIGNAL = 0.94; EXPRESSED IN BRAIN, SIGNAL = 0.84
ISDYMMLPYTATLSKRNRECLQESDEIPRDFTTLFDLSIFQLDTTSFHSVIESVPVGL

SEQ ID NO: 31105 - protein, 64 aa, Homo sapiens
  MAP TO AC010203.13; EXPRESSED IN HEART, SIGNAL =   2; EXPRESSED IN ADULT LIVER, SIGNAL = 1.9; EXPRESSED IN BRAIN, SIGNAL = 1.9; EXPRESSED IN BONE MARROW, SIGNAL = 1.6; EXPRESSED IN PLACENTA, SIGNAL = 1.9; SWISSPROT HIT: P13259, EVALUE 2.10e+00
PSPNLYSQLNALQFTVDERSILWLNQFLLDLKQSLNQFMAVYKLNDNSKSDEHVDVRVDGLMLK

SEQ ID NO: 31106 - protein, 26 aa, Homo sapiens
  MAP TO AL031590.2; EXPRESSED IN BRAIN, SIGNAL = 1.6; EXPRESSED IN LUNG, SIGNAL = 1.5; EXPRESSED IN HELA, SIGNAL = 1.6; EXPRESSED IN BONE MARROW, SIGNAL = 1.6; EXPRESSED IN PLACENTA, SIGNAL = 1.4; EXPRESSED IN HEART, SIGNAL = 1.9; EXPRESSED IN ADULT LIVER, SIGNAL = 1.4
HLAYTGWGLPSFPRSSCSWREERRAG

SEQ ID NO: 31107 - protein, 63 aa, Homo sapiens
  MAP TO AC009509.7; EXPRESSED IN BONE MARROW, SIGNAL = 1.6; EXPRESSED IN PLACENTA, SIGNAL = 2.3; EXPRESSED IN ADULT LIVER, SIGNAL = 2.2; EXPRESSED IN FETAL LIVER, SIGNAL = 1.5; EXPRESSED IN LUNG, SIGNAL =   2; EXPRESSED IN BRAIN, SIGNAL = 1.9; EXPRESSED IN HELA, SIGNAL = 2.2; SWISSPROT HIT: P39533, EVALUE 6.00e+00
VLEPRFNVETMAQLLNIPPNKTLLRRHLATHFNLLIGAEAQHQKRDAMELPDYVLLTATAKVK

SEQ ID NO: 31108 - protein, 56 aa, Homo sapiens
  MAP TO AC005789.1; EXPRESSED IN LUNG, SIGNAL = 5.7; EXPRESSED IN FETAL LIVER, SIGNAL = 3.1; EXPRESSED IN BRAIN, SIGNAL = 5.4; EXPRESSED IN BONE MARROW, SIGNAL =   5; EXPRESSED IN PLACENTA, SIGNAL = 4.4; EXPRESSED IN HEART, SIGNAL =   7; EXPRESSED IN ADULT LIVER, SIGNAL = 4.7; SWISSPROT HIT: P50551, EVALUE 4.00e-04
TTLECTLKPGLVYNKVNPIFHHWSLGDCKFGLTFQSPAEADEFQKSLLAALAALGR

SEQ ID NO: 31109 - protein, 24 aa, Homo sapiens
  MAP TO AC004753.1; EXPRESSED IN PLACENTA, SIGNAL = 0.64; EXPRESSED IN ADULT LIVER, SIGNAL =   1; EXPRESSED IN HEART, SIGNAL = 0.95; EXPRESSED IN HELA, SIGNAL = 0.93
GSIASKWRISHMPCTTWQGWQPEP

SEQ ID NO: 31110 - protein, 90 aa, Homo sapiens
  MAP TO AC004753.1; EXPRESSED IN PLACENTA, SIGNAL = 0.64; EXPRESSED IN ADULT LIVER, SIGNAL =   1; EXPRESSED IN HEART, SIGNAL = 0.95; EXPRESSED IN HELA, SIGNAL = 0.93; SWISSPROT HIT: P03162, EVALUE 4.60e+00
RVHCKQVENQPHAMYYVAGVAARALRSESLSHVTHVSHTSPRPAMKDKRTLRSDDTRSWHGPRRDHGREETSVSKEGPSAQRKLTQNHET

SEQ ID NO: 31111 - protein, 45 aa, Homo sapiens
  MAP TO AC004191.1; EXPRESSED IN ADULT LIVER, SIGNAL = 2.1; EXPRESSED IN LUNG, SIGNAL = 1.8; EXPRESSED IN BRAIN, SIGNAL =   3; EXPRESSED IN PLACENTA, SIGNAL = 2.5; EXPRESSED IN BONE MARROW, SIGNAL = 1.7; SWISSPROT HIT: P49245, EVALUE 1.70e+00
MWESLEPPKDLLNAFDKNADGDMNNKVQAEVVSDGDEELVGNWSK

SEQ ID NO: 31112 - protein, 56 aa, Homo sapiens
  MAP TO AC002083.1; EXPRESSED IN ADULT LIVER, SIGNAL = 0.94; EXPRESSED IN PLACENTA, SIGNAL = 0.99; SWISSPROT HIT: Q9WYC4, EVALUE 4.30e-01
MKLIGPVADDFVLCAFVGYLILEDIITSRSISVFIKSDRSASTAYKDLENNVNKVL

SEQ ID NO: 31113 - protein, 50 aa, Homo sapiens
  MAP TO AC035142.2; EXPRESSED IN BONE MARROW, SIGNAL = 1.4; EXPRESSED IN ADULT LIVER, SIGNAL = 1.2; EXPRESSED IN LUNG, SIGNAL = 1.1; EXPRESSED IN FETAL LIVER, SIGNAL = 1.6; EXPRESSED IN HELA, SIGNAL = 1.2; EXPRESSED IN BRAIN, SIGNAL = 1.4; SWISSPROT HIT: P20936, EVALUE 2.00e-23
WYHGKLDRTIAEERLRQAGKSGSYLIRESDRRPGSFVLSFLSQMNVVNHF

SEQ ID NO: 31114 - protein, 66 aa, Homo sapiens
  MAP TO AL121919.19; EXPRESSED IN BONE MARROW, SIGNAL = 0.92; EXPRESSED IN PLACENTA, SIGNAL = 0.77; EXPRESSED IN ADULT LIVER, SIGNAL = 0.9; EXPRESSED IN FETAL LIVER, SIGNAL = 0.94; SWISSPROT HIT: P92969, EVALUE 6.00e+00
EIAHWAVLDTATPHGGHLRAKCWSVPPGQEDVSPMQRPGDHATLCFLVGPSCDRHRCHRYHLCALQ

SEQ ID NO: 31115 - protein, 30 aa, Homo sapiens
  MAP TO AC004239.1; EXPRESSED IN HEART, SIGNAL =   1; EXPRESSED IN ADULT LIVER, SIGNAL = 0.63; EXPRESSED IN BRAIN, SIGNAL = 0.69
EVRVQRQKVSCGKTDAPRHPFPNHCFLNIK

SEQ ID NO: 31116 - protein, 96 aa, Homo sapiens
  MAP TO AJ009613.3; EXPRESSED IN ADULT LIVER, SIGNAL = 1.2; EXPRESSED IN BRAIN, SIGNAL = 1.4; EXPRESSED IN PLACENTA, SIGNAL = 1.3; SWISSPROT HIT: P53237, EVALUE 1.50e+00
ACCSLQGTMNAIVALCHFCELHGPRTLFCTEVLHAPLPQGDGNEDSPGQGEQAEEEEGGIQMNSRMRAHSPAEGASVESSSPGPKKSDMCEASVFG

SEQ ID NO: 31117 - protein, 80 aa, Homo sapiens
  MAP TO AL121928.13; EXPRESSED IN BONE MARROW, SIGNAL =   1; EXPRESSED IN ADULT LIVER, SIGNAL = 0.96; SWISSPROT HIT: Q92538, EVALUE 5.00e-33
VGKDDVDNSKPGPSRPGPSPLINQYSLTVGLDLGPHDTKSLLKCVESLSFIVRDAAHITPDNFELCVKTLRIFVEASLNG

SEQ ID NO: 31118 - protein, 20 aa, Homo sapiens
  MAP TO AL121928.13; EXPRESSED IN BONE MARROW, SIGNAL =   1; EXPRESSED IN ADULT LIVER, SIGNAL = 0.96
LGRMTLITPSQGPAAQALHP

SEQ ID NO: 31119 - protein, 85 aa, Homo sapiens
  MAP TO AC023818.3; EXPRESSED IN ADULT LIVER, SIGNAL = 1.9; EXPRESSED IN LUNG, SIGNAL =   2; EXPRESSED IN BRAIN, SIGNAL = 1.7; EXPRESSED IN BONE MARROW, SIGNAL =   1; EXPRESSED IN PLACENTA, SIGNAL = 1.4; SWISSPROT HIT: P36774, EVALUE 2.00e-28
RLDIRAARILLDNDHYAMEKLKKRVLEYLAVRQLKNNLKGPILCFVGPPGVGKTSVGRSVAKTLGREFHRIALGGVCDQSDIRGH

SEQ ID NO: 31120 - protein, 21 aa, Homo sapiens
  MAP TO AC023818.3; EXPRESSED IN ADULT LIVER, SIGNAL = 1.9; EXPRESSED IN LUNG, SIGNAL =   2; EXPRESSED IN BRAIN, SIGNAL = 1.7; EXPRESSED IN BONE MARROW, SIGNAL =   1; EXPRESSED IN PLACENTA, SIGNAL = 1.4
TAWTLGQPGFFWIMTITPWKN

SEQ ID NO: 31121 - protein, 31 aa, Homo sapiens
  MAP TO AC020894.3; EXPRESSED IN BRAIN, SIGNAL =   2; EXPRESSED IN BONE MARROW, SIGNAL = 1.7; EXPRESSED IN ADULT LIVER, SIGNAL = 2.1; EXPRESSED IN PLACENTA, SIGNAL = 1.9
LLHVWPILMKKCSKKLLEKPRFFWIMRRNGN

SEQ ID NO: 31122 - protein, 82 aa, Homo sapiens
  MAP TO AC020894.3; EXPRESSED IN BRAIN, SIGNAL =   2; EXPRESSED IN BONE MARROW, SIGNAL = 1.7; EXPRESSED IN ADULT LIVER, SIGNAL = 2.1; EXPRESSED IN PLACENTA, SIGNAL = 1.9; SWISSPROT HIT: P54136, EVALUE 3.00e-42
SIARLANIDEEMLQKAARETKILLDHEKEWKLGRCILRFPEILQKILDDLFLHTLCDYIYELATAFTEFYDSCYCVEKDRQT

SEQ ID NO: 31123 - protein, 114 aa, Homo sapiens
  MAP TO AC004151.1; EXPRESSED IN LUNG, SIGNAL = 4.8; EXPRESSED IN HELA, SIGNAL = 3.6; EXPRESSED IN FETAL LIVER, SIGNAL = 1.8; EXPRESSED IN BRAIN, SIGNAL = 1.3; EXPRESSED IN ADULT LIVER, SIGNAL = 1.7; SWISSPROT HIT: Q28862, EVALUE 1.30e+00
SRVVSNDSDSDLEEASELLSSSEASALGHLSFLEQQQSEASLEVASGSHSGSEEQLEATAREDGDGDEDGPAQQLSGFNTNQSNNVLQAPLPPMRLRGGRMTLGSCRERQPEFV

SEQ ID NO: 31124 - protein, 51 aa, Homo sapiens
  MAP TO AC007559.3; EXPRESSED IN ADULT LIVER, SIGNAL =   3; EXPRESSED IN FETAL LIVER, SIGNAL = 3.6; EXPRESSED IN PLACENTA, SIGNAL =   3; SWISSPROT HIT: P04602, EVALUE 3.70e+00
WTMKSRLRWSQKEMGNLLETRVKVTLAMQRDWQHFAPGPEICGTLNLREMI

SEQ ID NO: 31125 - protein, 61 aa, Homo sapiens
  MAP TO AC022424.3; EXPRESSED IN ADULT LIVER, SIGNAL = 1.4; EXPRESSED IN LUNG, SIGNAL = 1.9; EXPRESSED IN HELA, SIGNAL = 2.4; EXPRESSED IN FETAL LIVER, SIGNAL = 2.4; SWISSPROT HIT: Q89662, EVALUE 2.10e+00
GGMLPPRDTTMIPLNWKLRLPPGHFGLLLPLNQQAKKVVTVLAGVTDPDYQDKISLLLQNR

SEQ ID NO: 31126 - protein, 46 aa, Homo sapiens
  MAP TO AC005796.1; EXPRESSED IN BRAIN, SIGNAL = 2.5; EXPRESSED IN FETAL LIVER, SIGNAL = 1.4; EXPRESSED IN BONE MARROW, SIGNAL = 2.1; EXPRESSED IN ADULT LIVER, SIGNAL = 2.3; SWISSPROT HIT: Q92911, EVALUE 2.00e-22
FNPDPRSRYTFWTFVVGGTLVWLSMYGVNQAQVQRYVACRTEKQAK

SEQ ID NO: 31127 - protein, 27 aa, Homo sapiens
  MAP TO AC005796.1; EXPRESSED IN BRAIN, SIGNAL = 2.5; EXPRESSED IN FETAL LIVER, SIGNAL = 1.4; EXPRESSED IN BONE MARROW, SIGNAL = 2.1; EXPRESSED IN ADULT LIVER, SIGNAL = 2.3
LTLTRGAAIHSGLLWWVARWCGSPCMA

SEQ ID NO: 31128 - protein, 93 aa, Homo sapiens
  MAP TO AL031719.10; EXPRESSED IN PLACENTA, SIGNAL = 2.9; EXPRESSED IN ADULT LIVER, SIGNAL = 3.5; EXPRESSED IN BRAIN, SIGNAL = 2.7; EXPRESSED IN LUNG, SIGNAL = 3.3; SWISSPROT HIT: P23623, EVALUE 2.60e+00
MTVQRLVAAAVLVALVSLILNNVAAFTSNWVCQTLEDGRRRSVGLWRSCWLVDRTRGGPSPGARAGQVDAHDCEALGWGSEAAGFQESRGTVK

SEQ ID NO: 31129 - protein, 70 aa, Homo sapiens
  MAP TO AL031719.10; EXPRESSED IN PLACENTA, SIGNAL = 2.9; EXPRESSED IN ADULT LIVER, SIGNAL = 3.5; EXPRESSED IN BRAIN, SIGNAL = 2.7; EXPRESSED IN LUNG, SIGNAL = 3.3; SWISSPROT HIT: P34092, EVALUE 7.70e-02
DRAETRGRGRAGGPGLTHPQQRGGLHLQLGVPDAGGWAQAQRGAVEVLLAGGQDPGRAEPWGQSRPGGRT

SEQ ID NO: 31130 - protein, 46 aa, Homo sapiens
  MAP TO AC011452.5; EXPRESSED IN ADULT LIVER, SIGNAL = 3.5; EXPRESSED IN FETAL LIVER, SIGNAL = 3.1; EXPRESSED IN HELA, SIGNAL = 2.4; EXPRESSED IN PLACENTA, SIGNAL = 3.4; SWISSPROT HIT: P73894, EVALUE 2.60e-01
MISFCPDCGKSIQAAFKFCPYCGNSLPVEEHVGSQTFVNPHVSSFQ

SEQ ID NO: 31131 - protein, 21 aa, Homo sapiens
  MAP TO AC011452.5; EXPRESSED IN ADULT LIVER, SIGNAL = 3.5; EXPRESSED IN FETAL LIVER, SIGNAL = 3.1; EXPRESSED IN HELA, SIGNAL = 2.4; EXPRESSED IN PLACENTA, SIGNAL = 3.4
TVAKVSKRHSNSAPTVEILCL

SEQ ID NO: 31132 - protein, 53 aa, Homo sapiens
  MAP TO AC020908.5; EXPRESSED IN BONE MARROW, SIGNAL =   7; EXPRESSED IN PLACENTA, SIGNAL = 1.7; EXPRESSED IN ADULT LIVER, SIGNAL = 1.9; EXPRESSED IN BRAIN, SIGNAL = 1.7
MENNLAEFERRAEKNLLIMCKEKEKLQKKAHELKRRLLLSQRKRELADVLDAQ

SEQ ID NO: 31133 - protein, 28 aa, Homo sapiens
  MAP TO AC018757.4; EXPRESSED IN BONE MARROW, SIGNAL = 1.3; EXPRESSED IN PLACENTA, SIGNAL = 0.95; EXPRESSED IN ADULT LIVER, SIGNAL = 0.8; EXPRESSED IN LUNG, SIGNAL = 0.73
MATPSPQLLWPKTLALSLASLLFSYPHS

SEQ ID NO: 31134 - protein, 24 aa, Homo sapiens
  MAP TO AC003960.1; EXPRESSED IN ADULT LIVER, SIGNAL = 0.43; EXPRESSED IN BONE MARROW, SIGNAL = 0.49
PRRKRRKKRKIRRMSILRKIIAKY

SEQ ID NO: 31135 - protein, 58 aa, Homo sapiens
  MAP TO AF131215.1; EXPRESSED IN ADULT LIVER, SIGNAL = 2.3; EXPRESSED IN FETAL LIVER, SIGNAL = 1.6; EXPRESSED IN BONE MARROW, SIGNAL = 2.3; SWISSPROT HIT: P03474, EVALUE 4.70e+00
TSGVASTSALSMSSSASSFLRLQDSQVTYPKPRPACTFPLLSCRLTAASLKHRMPLKN

SEQ ID NO: 31136 - protein, 78 aa, Homo sapiens
  MAP TO AF172277.1; EXPRESSED IN BONE MARROW, SIGNAL = 1.3; EXPRESSED IN PLACENTA, SIGNAL = 1.7; EXPRESSED IN ADULT LIVER, SIGNAL = 1.3; EXPRESSED IN HEART, SIGNAL = 1.2; EXPRESSED IN BRAIN, SIGNAL = 1.6; EXPRESSED IN HELA, SIGNAL = 1.2; EXPRESSED IN LUNG, SIGNAL = 0.95; SWISSPROT HIT: P35331, EVALUE 1.00e-40
DAEDHKPLKKGSRTPSDRTVKKEDSDDSLVDYGEGVNGQFNEDGSFIGQYSGKKEKEPAEGNESSEAPSPVNAMNSFV

SEQ ID NO: 31137 - protein, 17 aa, Homo sapiens
  MAP TO AC006277.1; EXPRESSED IN BRAIN, SIGNAL = 1.4; EXPRESSED IN BONE MARROW, SIGNAL = 2.4; EXPRESSED IN PLACENTA, SIGNAL = 1.1; EXPRESSED IN ADULT LIVER, SIGNAL = 1.6
PLSLGWKSSWENSVINA

SEQ ID NO: 31138 - protein, 28 aa, Homo sapiens
  MAP TO AC006277.1; EXPRESSED IN BRAIN, SIGNAL = 1.4; EXPRESSED IN BONE MARROW, SIGNAL = 2.4; EXPRESSED IN PLACENTA, SIGNAL = 1.1; EXPRESSED IN ADULT LIVER, SIGNAL = 1.6
AFVTGLEEQLGKFGDKCIARGWDHQGDP

SEQ ID NO: 31139 - protein, 20 aa, Homo sapiens
  MAP TO AC005211.1; EXPRESSED IN PLACENTA, SIGNAL =   1; EXPRESSED IN ADULT LIVER, SIGNAL = 3.1; EXPRESSED IN HEART, SIGNAL = 1.3; EXPRESSED IN HELA, SIGNAL = 1.6; EXPRESSED IN FETAL LIVER, SIGNAL =   2
CLAGAGFSSSSSNSSNRQWC

SEQ ID NO: 31140 - protein, 51 aa, Homo sapiens
  MAP TO AC005211.1; EXPRESSED IN PLACENTA, SIGNAL =   1; EXPRESSED IN ADULT LIVER, SIGNAL = 3.1; EXPRESSED IN HEART, SIGNAL = 1.3; EXPRESSED IN HELA, SIGNAL = 1.6; EXPRESSED IN FETAL LIVER, SIGNAL =   2
RQSLSPWCPFPAVQLRPPAHQGLMSGWCRLQQQQQQQQQQTVVPVTQRLKC

SEQ ID NO: 31141 - protein, 20 aa, Homo sapiens
  MAP TO AC035149.2; EXPRESSED IN BRAIN, SIGNAL = 0.56; EXPRESSED IN FETAL LIVER, SIGNAL = 0.39; EXPRESSED IN BONE MARROW, SIGNAL = 0.51; EXPRESSED IN PLACENTA, SIGNAL = 0.53; EXPRESSED IN ADULT LIVER, SIGNAL = 0.53
IRGEGTAPLTRVTMPIGLKG

SEQ ID NO: 31142 - protein, 26 aa, Homo sapiens
  MAP TO AC018359.7; EXPRESSED IN HEART, SIGNAL = 2.1; EXPRESSED IN ADULT LIVER, SIGNAL = 2.1; EXPRESSED IN LUNG, SIGNAL =   2
FIDCDKCNVLVQEDDGEKARHVLGQW

SEQ ID NO: 31143 - protein, 25 aa, Homo sapiens
  MAP TO AC018359.7; EXPRESSED IN HEART, SIGNAL = 2.1; EXPRESSED IN ADULT LIVER, SIGNAL = 2.1; EXPRESSED IN LUNG, SIGNAL =   2
LLIVTNVTFWYRRMMVRRLVMFWGS

SEQ ID NO: 31144 - protein, 46 aa, Homo sapiens
  MAP TO AF031076.1; EXPRESSED IN PLACENTA, SIGNAL = 1.1; EXPRESSED IN HEART, SIGNAL = 1.4; EXPRESSED IN ADULT LIVER, SIGNAL =   1; EXPRESSED IN FETAL LIVER, SIGNAL = 0.97; EXPRESSED IN LUNG, SIGNAL =   1
MKVITGDLMEQLGRAVAAKEQLEKVEEGVETGTGVLLVKENRDARQ

SEQ ID NO: 31145 - protein, 48 aa, Homo sapiens
  MAP TO AC006128.1; EXPRESSED IN BONE MARROW, SIGNAL = 0.99; EXPRESSED IN ADULT LIVER, SIGNAL = 0.98; EXPRESSED IN PLACENTA, SIGNAL = 0.78; EXPRESSED IN LUNG, SIGNAL = 0.65; EXPRESSED IN HELA, SIGNAL = 0.85; EXPRESSED IN FETAL LIVER, SIGNAL = 0.54
QPRRWGFTGRRRELPLRGGQPGRLDDRTNRGHLPSGDPLSIQDASNYH

SEQ ID NO: 31146 - protein, 61 aa, Homo sapiens
  MAP TO AD000684.1; EXPRESSED IN ADULT LIVER, SIGNAL = 3.4; EXPRESSED IN FETAL LIVER, SIGNAL = 2.7; EXPRESSED IN BONE MARROW, SIGNAL =   4; EXPRESSED IN BRAIN, SIGNAL = 3.9; SWISSPROT HIT: Q9X5P2, EVALUE 6.10e+00
MAMQQMIGQTRSQLSVRVLVGEMGVTQPHQAVQAVTGRRGKLGKKVAGDGGMVVCSEGLFE

SEQ ID NO: 31147 - protein, 39 aa, Homo sapiens
  MAP TO AC026431.2; EXPRESSED IN HEART, SIGNAL = 1.9; EXPRESSED IN PLACENTA, SIGNAL =   2; EXPRESSED IN BRAIN, SIGNAL = 2.2; EXPRESSED IN ADULT LIVER, SIGNAL =   2
LMLLVLKPKPCPSPREFLYAFRFSSFYSDLTLQNSWLSQ

SEQ ID NO: 31148 - protein, 29 aa, Homo sapiens
  MAP TO AC026431.2; EXPRESSED IN HEART, SIGNAL = 1.9; EXPRESSED IN PLACENTA, SIGNAL =   2; EXPRESSED IN BRAIN, SIGNAL = 2.2; EXPRESSED IN ADULT LIVER, SIGNAL =   2
SCFWSLSQSPAHLQESFSMLLDSPLFTVT

SEQ ID NO: 31149 - protein, 61 aa, Homo sapiens
  MAP TO AC018452.11; EXPRESSED IN HEART, SIGNAL = 1.1; EXPRESSED IN ADULT LIVER, SIGNAL =   1; EXPRESSED IN HELA, SIGNAL = 0.97; EXPRESSED IN BRAIN, SIGNAL =   1; EXPRESSED IN PLACENTA, SIGNAL = 0.99; SWISSPROT HIT: P10815, EVALUE 6.10e+00
ELRKELDILLQEKIESPHPVDWNDTKSRDCAVLSAIIDLIKTQEKATPRNFPPRFQDGYYS

SEQ ID NO: 31150 - protein, 38 aa, Homo sapiens
  MAP TO AC006133.1; EXPRESSED IN PLACENTA, SIGNAL = 3.7; EXPRESSED IN ADULT LIVER, SIGNAL = 1.1; EXPRESSED IN HEART, SIGNAL = 1.3; EXPRESSED IN BRAIN, SIGNAL = 1.1; EXPRESSED IN LUNG, SIGNAL = 0.96; SWISSPROT HIT: P97400, EVALUE 1.00e-05
MNSCVFGIWRYEEKCYYLPFEDGKPFELCIYVRHKEYK

SEQ ID NO: 31151 - protein, 42 aa, Homo sapiens
  MAP TO AC005264.1; EXPRESSED IN FETAL LIVER, SIGNAL = 1.3; EXPRESSED IN ADULT LIVER, SIGNAL = 1.8; EXPRESSED IN PLACENTA, SIGNAL = 1.7; EXPRESSED IN HEART, SIGNAL = 1.5
ARAGRAPSSSRCGSSTAPATRRRSARASGPWSTRTSSCPCGP

SEQ ID NO: 31152 - protein, 61 aa, Homo sapiens
  MAP TO AC005264.1; EXPRESSED IN FETAL LIVER, SIGNAL = 1.3; EXPRESSED IN ADULT LIVER, SIGNAL = 1.8; EXPRESSED IN PLACENTA, SIGNAL = 1.7; EXPRESSED IN HEART, SIGNAL = 1.5; SWISSPROT HIT: P30679, EVALUE 3.00e-29
PGESGKSTFIKQMRIIHGAGYSEEERKGFRPLVYQNIFVSMRAMIEAMERLQIPFSRPESK

SEQ ID NO: 31153 - protein, 35 aa, Homo sapiens
  MAP TO AC004205.1; EXPRESSED IN BONE MARROW, SIGNAL = 0.68; EXPRESSED IN ADULT LIVER, SIGNAL = 0.46
PEYRTCRCCCLAGWWLRTGASSKDTLSPPTTRRFH

SEQ ID NO: 31154 - protein, 26 aa, Homo sapiens
  MAP TO AC004205.1; EXPRESSED IN BONE MARROW, SIGNAL = 0.68; EXPRESSED IN ADULT LIVER, SIGNAL = 0.46
VQSTAPADAAVWLGGGSGQELPRRTL

SEQ ID NO: 31155 - protein, 17 aa, Homo sapiens
  MAP TO AC026711.3; EXPRESSED IN BRAIN, SIGNAL = 2.8; EXPRESSED IN LUNG, SIGNAL = 1.4; EXPRESSED IN ADULT LIVER, SIGNAL = 2.5; EXPRESSED IN HEART, SIGNAL = 2.1
EAGSVKAALIKWKPSAA

SEQ ID NO: 31156 - protein, 34 aa, Homo sapiens
  MAP TO AF050737.1; EXPRESSED IN ADULT LIVER, SIGNAL = 1.2; EXPRESSED IN LUNG, SIGNAL = 1.1; EXPRESSED IN FETAL LIVER, SIGNAL = 0.94
SWSSSWRPLQEALSLTPCVHFSWPEPGHPVAPPP

SEQ ID NO: 31157 - protein, 105 aa, Homo sapiens
  MAP TO AF050737.1; EXPRESSED IN ADULT LIVER, SIGNAL = 1.2; EXPRESSED IN LUNG, SIGNAL = 1.1; EXPRESSED IN FETAL LIVER, SIGNAL = 0.94; SWISSPROT HIT: P52702, EVALUE 3.00e-41
AWPPSGSTALMDPLNLSWYDDDLERQNWSRPFNGSDGKADRPHYNYYATLLTLLIAVIVFGNVLVCMAVSREKALQTTTNYLIVSLAVADLLVATLVMPWVVYLE

SEQ ID NO: 31158 - protein, 93 aa, Homo sapiens
  MAP TO AC025182.2; EXPRESSED IN BRAIN, SIGNAL = 2.1; EXPRESSED IN LUNG, SIGNAL = 0.96; EXPRESSED IN PLACENTA, SIGNAL = 2.2; EXPRESSED IN ADULT LIVER, SIGNAL =   2; EXPRESSED IN HEART, SIGNAL = 2.2; SWISSPROT HIT: P21414, EVALUE 4.00e-05
EVAVMHCKGHQKGSDEIAEGNKLANQAAKSAARKPQSANTLEAPLIWEGSIREINFSILLQKQNGPFLADSLSSHQDGCSQRMASSICQPPTS

SEQ ID NO: 31159 - protein, 47 aa, Homo sapiens
  MAP TO AC005795.1; EXPRESSED IN LUNG, SIGNAL = 1.3; EXPRESSED IN BONE MARROW, SIGNAL = 1.9; EXPRESSED IN ADULT LIVER, SIGNAL = 0.97; EXPRESSED IN HEART, SIGNAL = 2.1; EXPRESSED IN BRAIN, SIGNAL = 0.45; SWISSPROT HIT: Q59934, EVALUE 8.30e+00
MRSNITLSRPGYYEPCHRRVYMPRDMGSNITLSSPGYYKPCYNPRDM

SEQ ID NO: 31160 - protein, 164 aa, Homo sapiens
  MAP TO AF020800.1; EXPRESSED IN HEART, SIGNAL = 2.2; EXPRESSED IN BRAIN, SIGNAL = 1.7; EXPRESSED IN FETAL LIVER, SIGNAL = 1.5; EXPRESSED IN BONE MARROW, SIGNAL = 1.2; EXPRESSED IN PLACENTA, SIGNAL = 1.5; EXPRESSED IN ADULT LIVER, SIGNAL = 1.3; SWISSPROT HIT: O30089, EVALUE 5.80e+00
MAKDQPLILGLPLHTGFGMQPPYLADNWAAATYGVISPVTTAHCVTTSDMIHLVLNLLLRSPAPCQITEVGSWQGLSYSRGASAHSPKRPWFMGLLRGSMLSCVSSSCCYNVTKEFVQGNLKETVISCREKSTGQEVKGSEFWRAGIISLALGLALQSCREQRT

SEQ ID NO: 31161 - protein, 50 aa, Homo sapiens
  MAP TO AC005266.1; EXPRESSED IN LUNG, SIGNAL =   2; EXPRESSED IN BRAIN, SIGNAL = 1.2; EXPRESSED IN PLACENTA, SIGNAL =   1; EXPRESSED IN HEART, SIGNAL =   1; EXPRESSED IN ADULT LIVER, SIGNAL = 1.3; EXPRESSED IN FETAL LIVER, SIGNAL = 0.72; SWISSPROT HIT: P05152, EVALUE 1.70e+00
MKPQGHWQGDPDITTIWSRKLSPSPTGKGGNPSHKQTAWEVRSVYQRPFP

SEQ ID NO: 31162 - protein, 40 aa, Homo sapiens
  MAP TO AF131216.1; EXPRESSED IN ADULT LIVER, SIGNAL = 0.83; EXPRESSED IN BRAIN, SIGNAL = 0.86; SWISSPROT HIT: Q37311, EVALUE 2.90e+00
LQCSYPPLNLYDHLETVSVFVYFVLRDIYEYLVFIEGEEE

SEQ ID NO: 31163 - protein, 29 aa, Homo sapiens
  MAP TO AF131216.1; EXPRESSED IN ADULT LIVER, SIGNAL = 0.83; EXPRESSED IN BRAIN, SIGNAL = 0.86
STVLLPTIKLVRPSGNSVCVCVLCTKRYL

SEQ ID NO: 31164 - protein, 39 aa, Homo sapiens
  MAP TO AC025447.3; EXPRESSED IN BONE MARROW, SIGNAL = 1.1; EXPRESSED IN ADULT LIVER, SIGNAL = 1.2; EXPRESSED IN HEART, SIGNAL = 1.7; EXPRESSED IN HELA, SIGNAL = 1.9; EXPRESSED IN BRAIN, SIGNAL = 1.3
TSMSICATQQTHFSLPLLPQLPESLCPPFCNHSYPWPMP

SEQ ID NO: 31165 - protein, 40 aa, Homo sapiens
  MAP TO AC020954.6; EXPRESSED IN BRAIN, SIGNAL = 0.92; EXPRESSED IN FETAL LIVER, SIGNAL = 0.4; EXPRESSED IN BONE MARROW, SIGNAL = 1.2; EXPRESSED IN PLACENTA, SIGNAL = 0.71; EXPRESSED IN ADULT LIVER, SIGNAL = 0.95
VVWEGWGGGKVEGGGDSSPEPRSLSFRLDPASWEPRGSCP

SEQ ID NO: 31166 - protein, 41 aa, Homo sapiens
  MAP TO AC020954.6; EXPRESSED IN BRAIN, SIGNAL = 0.92; EXPRESSED IN FETAL LIVER, SIGNAL = 0.4; EXPRESSED IN BONE MARROW, SIGNAL = 1.2; EXPRESSED IN PLACENTA, SIGNAL = 0.71; EXPRESSED IN ADULT LIVER, SIGNAL = 0.95
VWSGKAGAVARWRAGVTAARSRGASASAWTQPRGSPAGPAQ

SEQ ID NO: 31167 - protein, 65 aa, Homo sapiens
  MAP TO AC011526.6; EXPRESSED IN BONE MARROW, SIGNAL = 1.2; EXPRESSED IN ADULT LIVER, SIGNAL = 1.4; EXPRESSED IN HEART, SIGNAL = 1.3; SWISSPROT HIT: P17744, EVALUE 4.60e+00
SLRLVAPMWNGRIRGIHRLGAAVAPEGNQKKKRTILQFLTNYFYDVEALRDYLLQREMYKVHEKN

SEQ ID NO: 31168 - protein, 38 aa, Homo sapiens
  MAP TO AC011526.6; EXPRESSED IN BONE MARROW, SIGNAL = 1.2; EXPRESSED IN ADULT LIVER, SIGNAL = 1.4; EXPRESSED IN HEART, SIGNAL = 1.3
PCAWSPPCGMGVSGASIAWVRQWPQRAIRRRKGQYSSS

SEQ ID NO: 31169 - protein, 55 aa, Homo sapiens
  MAP TO AC069278.1; EXPRESSED IN BRAIN, SIGNAL = 3.1; EXPRESSED IN FETAL LIVER, SIGNAL = 4.5; EXPRESSED IN BONE MARROW, SIGNAL = 3.7; EXPRESSED IN PLACENTA, SIGNAL = 3.5; EXPRESSED IN ADULT LIVER, SIGNAL = 3.5; EXPRESSED IN HEART, SIGNAL = 3.9; EXPRESSED IN LUNG, SIGNAL = 3.8; SWISSPROT HIT: Q9UPN3, EVALUE 6.20e+00
NETDKIHTPPRTLIYLLLLEKSQCLSNVLDKPVLMESWENFDFVGSYNSQHLWVY

SEQ ID NO: 31170 - protein, 61 aa, Homo sapiens
  MAP TO AC027307.3; EXPRESSED IN ADULT LIVER, SIGNAL = 4.4; EXPRESSED IN HEART, SIGNAL = 3.6; EXPRESSED IN BRAIN, SIGNAL = 4.7; EXPRESSED IN LUNG, SIGNAL = 7.1; EXPRESSED IN BONE MARROW, SIGNAL =   4; EXPRESSED IN PLACENTA, SIGNAL = 3.5; SWISSPROT HIT: Q9H4B4, EVALUE 8.50e-02
VSFSGVPAQLVLSGEGEGLQLTLWEQGSPGTSYSLDVPRSHGCAPTTGQHLHHALRMLQSI

SEQ ID NO: 31171 - protein, 68 aa, Homo sapiens
  MAP TO AC037199.1; EXPRESSED IN LUNG, SIGNAL = 1.4; EXPRESSED IN BONE MARROW, SIGNAL = 1.8; EXPRESSED IN PLACENTA, SIGNAL = 1.2; EXPRESSED IN ADULT LIVER, SIGNAL = 1.2; EXPRESSED IN HEART, SIGNAL =   1; SWISSPROT HIT: P20151, EVALUE 3.00e-35
NSQVWLGRHNLFEPEDTGQRVPVSHSFPHPLYNMSLLKHQSLRPDEDSSHDLMLLRLSEPAKITDVVK

SEQ ID NO: 31172 - protein, 33 aa, Homo sapiens
  MAP TO AC037199.1; EXPRESSED IN LUNG, SIGNAL = 1.4; EXPRESSED IN BONE MARROW, SIGNAL = 1.8; EXPRESSED IN PLACENTA, SIGNAL = 1.2; EXPRESSED IN ADULT LIVER, SIGNAL = 1.2; EXPRESSED IN HEART, SIGNAL =   1
IARSGWVGTTCLSLKTQARGSLSATASHTRSTI

SEQ ID NO: 31173 - protein, 62 aa, Homo sapiens
  MAP TO AC006273.1; EXPRESSED IN LUNG, SIGNAL = 3.1; EXPRESSED IN ADULT LIVER, SIGNAL = 3.9; EXPRESSED IN HEART, SIGNAL = 3.5
RGLPDPPGPFLPFSLAAAVSCGAGCSSRRRPVLYLFHVHRRQPLASNTAHCPQDLPAGAGTQ

SEQ ID NO: 31174 - protein, 76 aa, Homo sapiens
  MAP TO AC004760.1; EXPRESSED IN HEART, SIGNAL = 1.2; EXPRESSED IN ADULT LIVER, SIGNAL =   1; EXPRESSED IN PLACENTA, SIGNAL = 0.83
GEAGAAVVVVAAWVVAGNCGPGLAAARRLFFPETEVGGSALAPHIRGSQVIVAHTVRVVSWSETAFGPLLHPPCPS

SEQ ID NO: 31175 - protein, 22 aa, Homo sapiens
  MAP TO AC004760.1; EXPRESSED IN HEART, SIGNAL = 1.2; EXPRESSED IN ADULT LIVER, SIGNAL =   1; EXPRESSED IN PLACENTA, SIGNAL = 0.83
ERLGLRLWLWRRGWWLGTVAQA

SEQ ID NO: 31176 - protein, 64 aa, Homo sapiens
  MAP TO AC013559.2; EXPRESSED IN ADULT LIVER, SIGNAL = 1.4; EXPRESSED IN LUNG, SIGNAL = 1.6; EXPRESSED IN BRAIN, SIGNAL = 1.3; EXPRESSED IN PLACENTA, SIGNAL = 1.1; SWISSPROT HIT: P54788, EVALUE 1.60e+00
KGPYAEKGDLYQEQTVRQLNVENELFLAPEQADVQPVASGIHKRWLMEIQTGSQIGQECMDCDS

SEQ ID NO: 31177 - protein, 78 aa, Homo sapiens
  MAP TO AB000876.1; EXPRESSED IN FETAL LIVER, SIGNAL = 1.8; EXPRESSED IN LUNG, SIGNAL = 1.6; EXPRESSED IN PLACENTA, SIGNAL = 1.6; EXPRESSED IN ADULT LIVER, SIGNAL = 1.1; SWISSPROT HIT: Q92949, EVALUE 4.80e+00
LWQRTMWTMSSWTMKMMRWRQQLGEMGLRPLPRRMSRAPMSPSTALAFVTSCSSQSCSGPLSTVALSIRQKVNFLLGM

SEQ ID NO: 31178 - protein, 70 aa, Homo sapiens
  MAP TO AB000876.1; EXPRESSED IN FETAL LIVER, SIGNAL = 1.8; EXPRESSED IN LUNG, SIGNAL = 1.6; EXPRESSED IN PLACENTA, SIGNAL = 1.6; EXPRESSED IN ADULT LIVER, SIGNAL = 1.1; SWISSPROT HIT: Q13838, EVALUE 1.00e-35
MAENDVDNELLDYEDDEVETAAGGDGAEAPAKKDVKGSYVSIHSSGFRDFLLKPELLRAIVDCGFEHPSE

SEQ ID NO: 31179 - protein, 40 aa, Homo sapiens
  MAP TO AC025760.2; EXPRESSED IN PLACENTA, SIGNAL = 3.3; EXPRESSED IN ADULT LIVER, SIGNAL =   3; EXPRESSED IN HEART, SIGNAL = 2.7; EXPRESSED IN HELA, SIGNAL = 2.8; EXPRESSED IN BRAIN, SIGNAL = 2.9
EKGRWRKPLSSFAKTLFTSLPITSQCRNSITEPECTAGKS

SEQ ID NO: 31180 - protein, 66 aa, Homo sapiens
  MAP TO AD000671.1; EXPRESSED IN BRAIN, SIGNAL = 5.2; EXPRESSED IN BONE MARROW, SIGNAL = 5.3; EXPRESSED IN PLACENTA, SIGNAL = 6.6; EXPRESSED IN ADULT LIVER, SIGNAL = 5.8; EXPRESSED IN LUNG, SIGNAL = 7.1; SWISSPROT HIT: Q11116, EVALUE 3.40e+00
LRPWLKKAKQPKHLARVQLRIGSGRWASSVEVLGVRAKTAEPWMAGKGRLGWKRQWEEAWWLVLNW

SEQ ID NO: 31181 - protein, 49 aa, Homo sapiens
  MAP TO AC022073.13; EXPRESSED IN BRAIN, SIGNAL = 0.96; EXPRESSED IN PLACENTA, SIGNAL = 0.96; EXPRESSED IN ADULT LIVER, SIGNAL = 1.1; SWISSPROT HIT: P00882, EVALUE 6.00e-03
AAWLLKAVTFIDLTTLSGDDTSSNIQRLCYKAKYPIREDLLKALNMHDK

SEQ ID NO: 31182 - protein, 45 aa, Homo sapiens
  MAP TO AC025816.1; EXPRESSED IN ADULT LIVER, SIGNAL = 1.8; EXPRESSED IN HEART, SIGNAL = 1.9; EXPRESSED IN LUNG, SIGNAL = 3.4; EXPRESSED IN BRAIN, SIGNAL = 3.1; EXPRESSED IN PLACENTA, SIGNAL = 2.1; SWISSPROT HIT: Q04956, EVALUE 6.40e+00
KNCRNSHSLTTEHNLSVLRTHGVDHLSYNELCQLLFQNDPWLLPE

SEQ ID NO: 31183 - protein, 46 aa, Homo sapiens
  MAP TO AC005615.1; EXPRESSED IN HELA, SIGNAL = 2.8; EXPRESSED IN BRAIN, SIGNAL =   2; EXPRESSED IN BONE MARROW, SIGNAL = 1.9; EXPRESSED IN PLACENTA, SIGNAL =   2; EXPRESSED IN ADULT LIVER, SIGNAL =   2; EXPRESSED IN HEART, SIGNAL = 2.4; SWISSPROT HIT: P54635, EVALUE 2.20e+00
VRWVWEPKSGCKRSCLPSCSSAHLENMCFLFPQTWALRIWKSCFPH

SEQ ID NO: 31184 - protein, 50 aa, Homo sapiens
  MAP TO AC035150.1; EXPRESSED IN HEART, SIGNAL = 1.9; EXPRESSED IN BRAIN, SIGNAL = 1.8; EXPRESSED IN BONE MARROW, SIGNAL = 1.7; EXPRESSED IN PLACENTA, SIGNAL = 2.2; EXPRESSED IN ADULT LIVER, SIGNAL = 1.8
WMVPKHFLVQWQQDLSSFSHASCSGSGNMVGCMLISCGSLLVGTGMPASV

SEQ ID NO: 31185 - protein, 108 aa, Homo sapiens
  MAP TO AC010219.4; EXPRESSED IN ADULT LIVER, SIGNAL = 1.8; EXPRESSED IN BRAIN, SIGNAL = 1.7; EXPRESSED IN HELA, SIGNAL = 3.3; EXPRESSED IN LUNG, SIGNAL =   3; EXPRESSED IN FETAL LIVER, SIGNAL = 3.9; EXPRESSED IN BONE MARROW, SIGNAL =   2; EXPRESSED IN PLACENTA, SIGNAL = 2.6
IIIITIISTTIIILIITITIITITNIITITIIILTIIILTIIILTIITIIIITTVIIIIIHHRYHHPHHHHCHPHHHHHHHHHHHSHHHHHCHHHHHHHDHHPYHHHH

SEQ ID NO: 31186 - protein, 79 aa, Homo sapiens
  MAP TO AB014077.1; EXPRESSED IN FETAL LIVER, SIGNAL = 3.8; EXPRESSED IN ADULT LIVER, SIGNAL = 2.7; SWISSPROT HIT: P36915, EVALUE 2.00e-17
TWESHPETTELVVLQGRVGPAGDEEEEEEEELSSSCEEEGEEDRDADEEGEGDEETPTSAPGSSLAGRNPYALLGEDEC

SEQ ID NO: 31187 - protein, 25 aa, Homo sapiens
  MAP TO AB014077.1; EXPRESSED IN FETAL LIVER, SIGNAL = 3.8; EXPRESSED IN ADULT LIVER, SIGNAL = 2.7
RPRSWWFCRAGWGQQVTRRRRKRKS

SEQ ID NO: 31188 - protein, 22 aa, Homo sapiens
  MAP TO AB014077.1; EXPRESSED IN FETAL LIVER, SIGNAL = 3.8; EXPRESSED IN ADULT LIVER, SIGNAL = 2.7
HLGVPSRDHGAGGFAGQGGASR

SEQ ID NO: 31189 - protein, 33 aa, Homo sapiens
  MAP TO AC006485.1; EXPRESSED IN ADULT LIVER, SIGNAL = 1.5; EXPRESSED IN HEART, SIGNAL = 1.9; EXPRESSED IN BRAIN, SIGNAL = 1.2
MGCLPPICASLPVFGKNTQEAELGASEESGSEE

SEQ ID NO: 31190 - protein, 24 aa, Homo sapiens
  MAP TO AC006485.1; EXPRESSED IN ADULT LIVER, SIGNAL = 1.5; EXPRESSED IN HEART, SIGNAL = 1.9; EXPRESSED IN BRAIN, SIGNAL = 1.2; SWISSPROT HIT: P95374, EVALUE 8.80e+00
PNQRKQRNLKSLASPRKRNPQSLS

SEQ ID NO: 31191 - protein, 38 aa, Homo sapiens
  MAP TO AC026431.2; EXPRESSED IN ADULT LIVER, SIGNAL = 1.4; EXPRESSED IN HEART, SIGNAL = 1.6; EXPRESSED IN LUNG, SIGNAL = 1.9; EXPRESSED IN PLACENTA, SIGNAL = 1.4
FQMAEPAHFDFLDHFLPLVWPSTGGAQALDVSQHTLLF

SEQ ID NO: 31192 - protein, 32 aa, Homo sapiens
  MAP TO AL020992.1; EXPRESSED IN LUNG, SIGNAL = 3.3; EXPRESSED IN PLACENTA, SIGNAL = 2.4; EXPRESSED IN ADULT LIVER, SIGNAL = 2.1; EXPRESSED IN HEART, SIGNAL = 2.1
TVQEVWRQHLVLVKAPGIFHSWCKVKGSRHHK

SEQ ID NO: 31193 - protein, 67 aa, Homo sapiens
  MAP TO AF072711.1; EXPRESSED IN PLACENTA, SIGNAL = 1.7; EXPRESSED IN ADULT LIVER, SIGNAL = 1.7; EXPRESSED IN HEART, SIGNAL = 3.5; EXPRESSED IN BRAIN, SIGNAL = 1.5; EXPRESSED IN HELA, SIGNAL = 1.4; SWISSPROT HIT: P19835, EVALUE 4.00e-33
EDFYKLVSEFTITKGLRGAKTTFDVYTESWAQDPSQENKKKTVVDFETDVLFLVPTEIALAQHRANA

SEQ ID NO: 31194 - protein, 59 aa, Homo sapiens
  MAP TO AF072711.1; EXPRESSED IN PLACENTA, SIGNAL = 1.7; EXPRESSED IN ADULT LIVER, SIGNAL = 1.7; EXPRESSED IN HEART, SIGNAL = 3.5; EXPRESSED IN BRAIN, SIGNAL = 1.5; EXPRESSED IN HELA, SIGNAL = 1.4
RTSTSWSVSSQSPRGSEAPRRPLMSTPSPGPRTHPRRIRRRLWWTLRPMSSSWCPPRLP

SEQ ID NO: 31195 - protein, 77 aa, Homo sapiens
  MAP TO AC020908.5; EXPRESSED IN HEART, SIGNAL = 2.1; EXPRESSED IN ADULT LIVER, SIGNAL = 1.7; EXPRESSED IN PLACENTA, SIGNAL = 1.9; SWISSPROT HIT: Q61838, EVALUE 8.00e-14
DPSGEGTLSVKVPDSITSWVGEAVALSTSQGLGIAEPSLLKTFKPFFVDFMLPALIIRGEQVKIPLSVYNYMGTCAE

SEQ ID NO: 31196 - protein, 54 aa, Homo sapiens
  MAP TO AC008518.3; EXPRESSED IN FETAL LIVER, SIGNAL = 0.96; EXPRESSED IN PLACENTA, SIGNAL = 1.1; EXPRESSED IN ADULT LIVER, SIGNAL = 1.2; EXPRESSED IN BRAIN, SIGNAL = 0.89
IYTKEFPLEFRNHKNVKDASQPAIQPMGRKNLAWKYKRTTPNRSPVGHWGEAAK

SEQ ID NO: 31197 - protein, 33 aa, Homo sapiens
  MAP TO AF004877.1; EXPRESSED IN ADULT LIVER, SIGNAL = 0.76; EXPRESSED IN HEART, SIGNAL = 1.4; EXPRESSED IN LUNG, SIGNAL = 2.9; EXPRESSED IN FETAL LIVER, SIGNAL = 2.1; EXPRESSED IN BRAIN, SIGNAL = 0.76; EXPRESSED IN PLACENTA, SIGNAL = 2.5; SWISSPROT HIT: O46392, EVALUE 1.00e+00
GERGPPGESGAAGPTGPIGSRGPSGPPGPDGNK

SEQ ID NO: 31198 - protein, 64 aa, Homo sapiens
  MAP TO AC022150.5; EXPRESSED IN PLACENTA, SIGNAL = 1.2; EXPRESSED IN HEART, SIGNAL = 1.2; EXPRESSED IN ADULT LIVER, SIGNAL = 0.78
PLLRRLNQVPILPQPPLPHPVTLLSPPLPTPSSAYNFVLQQILPNLPNNFLFEKCLELRASAEC

SEQ ID NO: 31199 - protein, 27 aa, Homo sapiens
  MAP TO AC005756.1; EXPRESSED IN PLACENTA, SIGNAL = 1.2; EXPRESSED IN ADULT LIVER, SIGNAL = 1.1; EXPRESSED IN HEART, SIGNAL = 1.2; EXPRESSED IN BRAIN, SIGNAL = 1.4
KEVWSPGQKTGERAGTSPWRIYSWRRT

SEQ ID NO: 31200 - protein, 46 aa, Homo sapiens
  MAP TO AC005756.1; EXPRESSED IN PLACENTA, SIGNAL = 1.2; EXPRESSED IN ADULT LIVER, SIGNAL = 1.1; EXPRESSED IN HEART, SIGNAL = 1.2; EXPRESSED IN BRAIN, SIGNAL = 1.4
QRRSGLPVRKQERGQGLLHGEYIHGEGRKRIQTRHHGHMRPLGHRP

SEQ ID NO: 31201 - protein, 37 aa, Homo sapiens
  MAP TO AF087017.1; EXPRESSED IN ADULT LIVER, SIGNAL = 1.5; EXPRESSED IN LUNG, SIGNAL = 0.92; EXPRESSED IN BRAIN, SIGNAL = 1.7
VDHPLLQLLRKQRVLPWPFCSLLGVWEGCEGRKKGRE

SEQ ID NO: 31202 - protein, 37 aa, Homo sapiens
  MAP TO AF087017.1; EXPRESSED IN ADULT LIVER, SIGNAL = 1.5; EXPRESSED IN LUNG, SIGNAL = 0.92; EXPRESSED IN BRAIN, SIGNAL = 1.7; SWISSPROT HIT: P41556, EVALUE 5.90e-01
LTTPCCSCSGNRGCCPGHFAPCWVSGRAARGGRRAGR

SEQ ID NO: 31203 - protein, 45 aa, Homo sapiens
  MAP TO AF196972.1; EXPRESSED IN PLACENTA, SIGNAL = 2.2; EXPRESSED IN ADULT LIVER, SIGNAL = 1.3; EXPRESSED IN HEART, SIGNAL = 1.6; EXPRESSED IN FETAL LIVER, SIGNAL = 2.1
WPPLAARNFSSSYCKAVSCLLPSRALTRSGCSLPSASPAASSGGS

SEQ ID NO: 31204 - protein, 134 aa, Homo sapiens
  MAP TO AF196972.1; EXPRESSED IN PLACENTA, SIGNAL = 2.2; EXPRESSED IN ADULT LIVER, SIGNAL = 1.3; EXPRESSED IN HEART, SIGNAL = 1.6; EXPRESSED IN FETAL LIVER, SIGNAL = 2.1
FIHSRSQAVRVHAEHPHAHSWWLSLMYLTSHAFPQSSSTVPLHGLGSPKLKCECQSASFKRGLPHGHPLPLCPCFDRSIHLAIHPWGSAMATFSRQEFFQQLLQGCLLPTAQQGLDQIWLLLAICLACRLLWRL

SEQ ID NO: 31205 - protein, 25 aa, Homo sapiens
  MAP TO AL024496.5; EXPRESSED IN BONE MARROW, SIGNAL = 1.2; EXPRESSED IN PLACENTA, SIGNAL = 1.3; EXPRESSED IN ADULT LIVER, SIGNAL = 1.5; EXPRESSED IN FETAL LIVER, SIGNAL = 1.8
SPEQGLCREGQFPWPRVVSLSQPGW

SEQ ID NO: 31206 - protein, 44 aa, Homo sapiens
  MAP TO AL024496.5; EXPRESSED IN BONE MARROW, SIGNAL = 1.2; EXPRESSED IN PLACENTA, SIGNAL = 1.3; EXPRESSED IN ADULT LIVER, SIGNAL = 1.5; EXPRESSED IN FETAL LIVER, SIGNAL = 1.8
AGGEWDEGVPRAGAAGEEESGFSEVAAKDGQVWRGCGLASPDAG

SEQ ID NO: 31207 - protein, 83 aa, Homo sapiens
  MAP TO AC007766.1; EXPRESSED IN HELA, SIGNAL = 0.55; EXPRESSED IN BRAIN, SIGNAL = 0.74; EXPRESSED IN FETAL LIVER, SIGNAL = 1.1; EXPRESSED IN PLACENTA, SIGNAL = 0.88; EXPRESSED IN ADULT LIVER, SIGNAL = 0.68; SWISSPROT HIT: Q04725, EVALUE 6.00e-08
TPGAFLRTCLLSSNSRSLLTGGYNLASVSVWDLAAPSLHVKEQLPCAGLNCQALDANLDANLAFASFTSGVVRIWDLRDQSVV

SEQ ID NO: 31208 - protein, 36 aa, Homo sapiens
  MAP TO AC005239.1; EXPRESSED IN BRAIN, SIGNAL = 0.88; EXPRESSED IN PLACENTA, SIGNAL = 7.3; EXPRESSED IN ADULT LIVER, SIGNAL = 0.77
PSSASGSRSPKRRWCPSCCPTFPCFSQATQRPSRST

SEQ ID NO: 31209 - protein, 24 aa, Homo sapiens
  MAP TO AC005760.1; EXPRESSED IN PLACENTA, SIGNAL = 1.9; EXPRESSED IN ADULT LIVER, SIGNAL = 1.8; EXPRESSED IN HEART, SIGNAL =   2; EXPRESSED IN LUNG, SIGNAL = 2.7; EXPRESSED IN HELA, SIGNAL = 1.2; EXPRESSED IN FETAL LIVER, SIGNAL = 0.97
ANLGSWPPCQMPLAGCFSFCKRNG

SEQ ID NO: 31210 - protein, 89 aa, Homo sapiens
  MAP TO AC005239.1; EXPRESSED IN BRAIN, SIGNAL = 0.88; EXPRESSED IN PLACENTA, SIGNAL = 7.3; EXPRESSED IN ADULT LIVER, SIGNAL = 0.77; SWISSPROT HIT: P05143, EVALUE 6.10e-01
HRQPVAAGVQREGGVPPAVPPSPASARQHRGQVGVHEATAESAGLLNREQCFHRGESPAAFLCPHPPSHHTGGPQRTGPLAEPPGRAVG

SEQ ID NO: 31211 - protein, 45 aa, Homo sapiens
  MAP TO AC020946.4; EXPRESSED IN FETAL LIVER, SIGNAL = 3.6; EXPRESSED IN BRAIN, SIGNAL = 3.5; EXPRESSED IN BONE MARROW, SIGNAL = 3.1; EXPRESSED IN PLACENTA, SIGNAL = 3.8; EXPRESSED IN HEART, SIGNAL = 3.4; EXPRESSED IN ADULT LIVER, SIGNAL = 3.2
IHGTKRTSACGTTCSRSSPACSSRAQKRALPASSTPATPSCSSPP

SEQ ID NO: 31212 - protein, 80 aa, Homo sapiens
  MAP TO AC020946.4; EXPRESSED IN FETAL LIVER, SIGNAL = 3.6; EXPRESSED IN BRAIN, SIGNAL = 3.5; EXPRESSED IN BONE MARROW, SIGNAL = 3.1; EXPRESSED IN PLACENTA, SIGNAL = 3.8; EXPRESSED IN HEART, SIGNAL = 3.4; EXPRESSED IN ADULT LIVER, SIGNAL = 3.2; SWISSPROT HIT: Q61626, EVALUE 7.00e-40
NSRYQTYQRMWNYMQSKQPSVFVKSTEEGIARVLNSRYAFLLESTMNEYHRRLNCNLTQIGGLLDTKGYGIGMPLGTAQH

SEQ ID NO: 31213 - protein, 123 aa, Homo sapiens
  MAP TO AC004175.1; EXPRESSED IN ADULT LIVER, SIGNAL = 0.45; EXPRESSED IN BONE MARROW, SIGNAL = 0.61; SWISSPROT HIT: P35410, EVALUE 5.00e-64
QQKATRVYAVVQISAPMFLLWALPLSVAPLITDFKMFVTTSYLISLFLIINSSANPIIYFFVGSLRKKRLKESLRVILQRALADKPEVGRNKKAAGIDPMEQPHSTQHVENLLPREHRVDVET

SEQ ID NO: 31214 - protein, 44 aa, Homo sapiens
  MAP TO AC006479.2; EXPRESSED IN BONE MARROW, SIGNAL =   1; EXPRESSED IN ADULT LIVER, SIGNAL = 1.2; EXPRESSED IN PLACENTA, SIGNAL =   1; EXPRESSED IN FETAL LIVER, SIGNAL = 1.1; SWISSPROT HIT: Q03238, EVALUE 8.30e+00
MFSVRTENCQAWRFWNFILLSSLLCPHHMPVPEAQEQREAPLDQ

SEQ ID NO: 31215 - protein, 42 aa, Homo sapiens
  MAP TO AL031033.5; EXPRESSED IN PLACENTA, SIGNAL = 1.2; EXPRESSED IN ADULT LIVER, SIGNAL = 1.4; EXPRESSED IN LUNG, SIGNAL = 0.99; EXPRESSED IN FETAL LIVER, SIGNAL = 1.8
TWRNSAASLSCLPASPSPTRRSSSSPARSRWRRCGGRRLLPG

SEQ ID NO: 31216 - protein, 48 aa, Homo sapiens
  MAP TO AL031033.5; EXPRESSED IN PLACENTA, SIGNAL = 1.2; EXPRESSED IN ADULT LIVER, SIGNAL = 1.4; EXPRESSED IN LUNG, SIGNAL = 0.99; EXPRESSED IN FETAL LIVER, SIGNAL = 1.8
NVEELCRFPELPARKPLTYQTKQLIAREIEVEKMRRAEASARVENSPQ

SEQ ID NO: 31217 - protein, 39 aa, Homo sapiens
  MAP TO AC019183.3; EXPRESSED IN HELA, SIGNAL = 0.7; EXPRESSED IN BONE MARROW, SIGNAL = 0.59; EXPRESSED IN PLACENTA, SIGNAL = 0.64; EXPRESSED IN ADULT LIVER, SIGNAL = 0.65
RGARRRALKARLRNKMSPKGMKMTLWGRGMTWSSRSNGT

SEQ ID NO: 31218 - protein, 43 aa, Homo sapiens
  MAP TO AC006479.2; EXPRESSED IN BONE MARROW, SIGNAL =   1; EXPRESSED IN ADULT LIVER, SIGNAL = 1.2; EXPRESSED IN PLACENTA, SIGNAL =   1; EXPRESSED IN FETAL LIVER, SIGNAL = 1.1; SWISSPROT HIT: Q9QZB1, EVALUE 3.80e+00
CSQSGQKTAKPGASGTSSYCLVFCALITCLFLKPRNREKLLWI

SEQ ID NO: 31219 - protein, 32 aa, Homo sapiens
  MAP TO AC006127.1; EXPRESSED IN BONE MARROW, SIGNAL = 1.2; EXPRESSED IN PLACENTA, SIGNAL = 0.94; EXPRESSED IN ADULT LIVER, SIGNAL = 1.3
TCKRRTEPTASGSRTRCVCSASAPSTAWRRRS

SEQ ID NO: 31220 - protein, 58 aa, Homo sapiens
  MAP TO AC006127.1; EXPRESSED IN BONE MARROW, SIGNAL = 1.2; EXPRESSED IN PLACENTA, SIGNAL = 0.94; EXPRESSED IN ADULT LIVER, SIGNAL = 1.3; SWISSPROT HIT: Q01956, EVALUE 2.90e-02
PASAGPSPPHRAAERGACAPPLHRQQRGGEDPSCSQVQAQRGPEGDPGRHVRPEVLQP

SEQ ID NO: 31221 - protein, 47 aa, Homo sapiens
  MAP TO AC000080.2; EXPRESSED IN BRAIN, SIGNAL =   2; EXPRESSED IN HEART, SIGNAL = 3.5; EXPRESSED IN ADULT LIVER, SIGNAL = 2.1; EXPRESSED IN LUNG, SIGNAL = 0.47; SWISSPROT HIT: Q9X6Y8, EVALUE 6.30e+00
CTGSPWITGSQSNPLPESWSPFITPDQPQRAGLLAAVPAFAGGFQPC

SEQ ID NO: 31222 - protein, 57 aa, Homo sapiens
  MAP TO AF181449.1; EXPRESSED IN BONE MARROW, SIGNAL = 2.1; EXPRESSED IN ADULT LIVER, SIGNAL = 0.59; EXPRESSED IN HELA, SIGNAL =   2; EXPRESSED IN LUNG, SIGNAL = 5.5; SWISSPROT HIT: Q01469, EVALUE 2.00e-27
VGIALRKMGAMAKPDCIITCDGKNLTIKTESTLKTTQFSCTLGEKFEETTADGRKTQ

SEQ ID NO: 31223 - protein, 122 aa, Homo sapiens
  MAP TO AJ251973.1; EXPRESSED IN ADULT LIVER, SIGNAL =  11; EXPRESSED IN HEART, SIGNAL = 9.2; EXPRESSED IN BRAIN, SIGNAL =  10; EXPRESSED IN FETAL LIVER, SIGNAL =  12; EXPRESSED IN BONE MARROW, SIGNAL =  12; EXPRESSED IN PLACENTA, SIGNAL =  12; SWISSPROT HIT: P50494, EVALUE 1.50e-01
SLEMTCYDSDDANPRSVSSLSNRSSPLSWRYGQSSPRLQAGDAPSVGGSCRSEGTPAWYMHGERAHYSHTMPMRSPSKLSHISRLELVESLDSDEVDLKSGYMSDSDLMGKTMTEDDDITTG

SEQ ID NO: 31224 - protein, 42 aa, Homo sapiens
  MAP TO AJ007973.1; EXPRESSED IN PLACENTA, SIGNAL = 5.1; EXPRESSED IN ADULT LIVER, SIGNAL =  12; EXPRESSED IN HEART, SIGNAL = 6.6; EXPRESSED IN FETAL LIVER, SIGNAL =  11; EXPRESSED IN BRAIN, SIGNAL = 6.5
DPAIPMPPRQFHQLAAQGPQECLVRIYIVRAFGLQPKDPNGK

SEQ ID NO: 31225 - protein, 42 aa, Homo sapiens
  MAP TO AJ007973.1; EXPRESSED IN PLACENTA, SIGNAL = 5.1; EXPRESSED IN ADULT LIVER, SIGNAL =  12; EXPRESSED IN HEART, SIGNAL = 6.6; EXPRESSED IN FETAL LIVER, SIGNAL =  11; EXPRESSED IN BRAIN, SIGNAL = 6.5; SWISSPROT HIT: P51432, EVALUE 8.40e+00
KTQPSPCPQDSSTSWPPRDPRSAWSVSTLSEHLACSPRTPME

SEQ ID NO: 31226 - protein, 121 aa, Homo sapiens
  MAP TO AC005239.1; EXPRESSED IN BRAIN, SIGNAL = 0.88; EXPRESSED IN PLACENTA, SIGNAL = 7.3; EXPRESSED IN ADULT LIVER, SIGNAL = 0.77; SWISSPROT HIT: O67518, EVALUE 9.60e+00
MRLLQKVLAYSIESNAFIEESRQLLSYALIHPATTLEDRNALALWLSHLEERLASGFRSRPEPSYHSRQGSDEWGGPAELGPGEAGPGWQDKPPRENGHVPFHPSSSVPPAINSIGSNANT

SEQ ID NO: 31227 - protein, 78 aa, Homo sapiens
  MAP TO AC020894.3; EXPRESSED IN BONE MARROW, SIGNAL = 1.3; EXPRESSED IN PLACENTA, SIGNAL = 1.6; EXPRESSED IN ADULT LIVER, SIGNAL = 1.3; EXPRESSED IN BRAIN, SIGNAL = 1.4; EXPRESSED IN FETAL LIVER, SIGNAL = 1.1; SWISSPROT HIT: Q03001, EVALUE 1.00e-01
PSSVKSLRSERLIRTSLDLELDLQATRTWHSQLTQEISVLKELKEQLEQAKSHGEKELPQWLREDERFRLLLRMLEKR

SEQ ID NO: 31228 - protein, 47 aa, Homo sapiens
  MAP TO AC007207.22; EXPRESSED IN PLACENTA, SIGNAL = 0.79; EXPRESSED IN ADULT LIVER, SIGNAL =   1; EXPRESSED IN LUNG, SIGNAL = 0.85; EXPRESSED IN BRAIN, SIGNAL = 1.1; EXPRESSED IN FETAL LIVER, SIGNAL = 0.71
CCQGWGLIRKLYGRTILFQTQTLLEIFIFSGCWPEATLGSLPCGPIQ

SEQ ID NO: 31229 - protein, 114 aa, Homo sapiens
  MAP TO AC007207.22; EXPRESSED IN PLACENTA, SIGNAL = 0.79; EXPRESSED IN ADULT LIVER, SIGNAL =   1; EXPRESSED IN LUNG, SIGNAL = 0.85; EXPRESSED IN BRAIN, SIGNAL = 1.1; EXPRESSED IN FETAL LIVER, SIGNAL = 0.71; SWISSPROT HIT: Q9KNZ9, EVALUE 9.30e-01
MLPRLGPHQKTLRKNNPLPNADVVGDLYLLWLLARGYPWFLAMWTHPVESTSKREVKISCNLITEVMSLQLCHIVLIKIKSIGPAPTQAEGVLYKDRNTKRQESLGPPWKSSYH

SEQ ID NO: 31230 - protein, 62 aa, Homo sapiens
  MAP TO AF172277.1; EXPRESSED IN FETAL LIVER, SIGNAL = 1.6; EXPRESSED IN BRAIN, SIGNAL = 1.2; EXPRESSED IN HELA, SIGNAL = 1.4; EXPRESSED IN BONE MARROW, SIGNAL = 0.95; EXPRESSED IN ADULT LIVER, SIGNAL = 1.1; EXPRESSED IN PLACENTA, SIGNAL = 1.2; SWISSPROT HIT: P02469, EVALUE 4.00e-07
GSETFGQSPAVHVVLGEPVPGNPVTWTGPGFARVLPGAGLRFAVNNIPFPVDFTIAIHYETQ

SEQ ID NO: 31231 - protein, 42 aa, Homo sapiens
  MAP TO AC008747.4; EXPRESSED IN HEART, SIGNAL = 2.9; EXPRESSED IN BRAIN, SIGNAL = 1.1; EXPRESSED IN LUNG, SIGNAL = 0.94; EXPRESSED IN ADULT LIVER, SIGNAL = 1.2
KSILERSLMNVENVRKLSAVAHTLLHIKEFTLWRNNMNATNV

SEQ ID NO: 31232 - protein, 29 aa, Homo sapiens
  MAP TO AC008775.5; EXPRESSED IN BRAIN, SIGNAL = 1.5; EXPRESSED IN LUNG, SIGNAL = 0.72; EXPRESSED IN PLACENTA, SIGNAL = 1.4; EXPRESSED IN ADULT LIVER, SIGNAL = 1.3
EESQAGCKNLCNEELDVYHQDKGKNVTRA

SEQ ID NO: 31233 - protein, 41 aa, Homo sapiens
  MAP TO AC007883.3; EXPRESSED IN PLACENTA, SIGNAL = 4.1; EXPRESSED IN ADULT LIVER, SIGNAL = 3.1; EXPRESSED IN BRAIN, SIGNAL = 3.4
DKDSGKTSVVVGTWNQEEHIEWAKKNTARAYHLQDDGTQTV

SEQ ID NO: 31234 - protein, 41 aa, Homo sapiens
  MAP TO AC007883.3; EXPRESSED IN PLACENTA, SIGNAL = 4.1; EXPRESSED IN ADULT LIVER, SIGNAL = 3.1; EXPRESSED IN BRAIN, SIGNAL = 3.4; SWISSPROT HIT: P76463, EVALUE 1.30e+00
TRIVGKPLWLSGHGTKKSILNGLRRILLELIIFKTMVPRQS

SEQ ID NO: 31235 - protein, 121 aa, Homo sapiens
  MAP TO AC010200.7; EXPRESSED IN ADULT LIVER, SIGNAL = 2.2; EXPRESSED IN HEART, SIGNAL = 1.5; EXPRESSED IN BONE MARROW, SIGNAL = 4.7; EXPRESSED IN PLACENTA, SIGNAL = 1.1; SWISSPROT HIT: O18473, EVALUE 3.00e-09
VLTEQVAGPLGQNLEVEPYSQYSNVQFPQVQPQISSSSYYSNLGFYPQQPEEWYSPGIYELRRMPAETLYQGETEVAEMPVTKKPRMGASAGRIKGDELCVVCGDRASGYHYNALTCEGCK

SEQ ID NO: 31236 - protein, 41 aa, Homo sapiens
  MAP TO AC006231.18; EXPRESSED IN PLACENTA, SIGNAL = 2.4; EXPRESSED IN ADULT LIVER, SIGNAL = 1.9; EXPRESSED IN HEART, SIGNAL = 2.2; EXPRESSED IN BRAIN, SIGNAL = 1.8; SWISSPROT HIT: P30269, EVALUE 8.40e+00
WRDLITSFPAGPKEQRNLIMKTGRSSSEKGQQKIAYLVTPP

SEQ ID NO: 31237 - protein, 90 aa, Homo sapiens
  MAP TO AC005942.2; EXPRESSED IN ADULT LIVER, SIGNAL = 1.2; EXPRESSED IN BRAIN, SIGNAL = 1.2; EXPRESSED IN PLACENTA, SIGNAL =  19; SWISSPROT HIT: O67420, EVALUE 1.30e+00
KKASRPERALTCKCQKRLGQPPNKLVTGNLIALLTSKLTGRFLKALEKQRVKRHSYCCSPMAWPLKTDGAQSPGPICHHYMGAQGNSANS

SEQ ID NO: 31238 - protein, 38 aa, Homo sapiens
  MAP TO AC008620.5; EXPRESSED IN ADULT LIVER, SIGNAL = 0.79; SWISSPROT HIT: P39793, EVALUE 5.00e+00
SESKKQHHTAPHARDHEARSEEQVTCGEKRDNEQSQAQ

SEQ ID NO: 31239 - protein, 33 aa, Homo sapiens
  MAP TO AC008989.6; EXPRESSED IN BRAIN, SIGNAL = 0.7; EXPRESSED IN HEART, SIGNAL =   1; EXPRESSED IN ADULT LIVER, SIGNAL = 0.76; EXPRESSED IN LUNG, SIGNAL = 0.79
PLQHPCGSRKVIPSGQLNYGQGVSPLLADTAMS

SEQ ID NO: 31240 - protein, 88 aa, Homo sapiens
  MAP TO AC012467.9; EXPRESSED IN BONE MARROW, SIGNAL = 0.4; EXPRESSED IN ADULT LIVER, SIGNAL = 0.55; SWISSPROT HIT: P20832, EVALUE 4.00e+00
SAKATADRKSASKPIGFEGDLRGQSSDLPERLHSQEVDLGSAQGDGLMAGNDSEEALTALMSRKTAISLFEGKALGLDKAILHSIDCC

SEQ ID NO: 31241 - protein, 36 aa, Homo sapiens
  MAP TO AC012467.9; EXPRESSED IN BONE MARROW, SIGNAL = 0.4; EXPRESSED IN ADULT LIVER, SIGNAL = 0.55
LQKLLLTESLHPNLLDLKGIFVASPLIFQKDSIPRR

SEQ ID NO: 31242 - protein, 77 aa, Homo sapiens
  MAP TO AC068323.6; EXPRESSED IN ADULT LIVER, SIGNAL = 0.83; EXPRESSED IN BRAIN, SIGNAL = 0.64; EXPRESSED IN FETAL LIVER, SIGNAL = 0.5; SWISSPROT HIT: Q9UPR5, EVALUE 2.00e-07
VNITIIRSSGDFGHVRLWYKTMSGTAEAGLDFVPAAGELLFEAGEMRKSLHVEILDDDYPEGPEEFSLTITKVELQG

SEQ ID NO: 31243 - protein, 21 aa, Homo sapiens
  MAP TO AC068323.6; EXPRESSED IN ADULT LIVER, SIGNAL = 0.83; EXPRESSED IN BRAIN, SIGNAL = 0.64; EXPRESSED IN FETAL LIVER, SIGNAL = 0.5
LTSQSSVPVEILAMCDSGTRR

SEQ ID NO: 31244 - protein, 48 aa, Homo sapiens
  MAP TO AL109944.19; EXPRESSED IN BRAIN, SIGNAL = 0.48; EXPRESSED IN FETAL LIVER, SIGNAL = 0.92; EXPRESSED IN PLACENTA, SIGNAL = 0.82; EXPRESSED IN ADULT LIVER, SIGNAL = 0.6; SWISSPROT HIT: P48873, EVALUE 2.20e+00
IEYHKRNSGLKSYEVISDTSRQFVLIKFSLVEFHSTLEEHFSWKGSSK

SEQ ID NO: 31245 - protein, 65 aa, Homo sapiens
  MAP TO AC016605.4; EXPRESSED IN ADULT LIVER, SIGNAL = 2.2; EXPRESSED IN FETAL LIVER, SIGNAL = 2.3; EXPRESSED IN BRAIN, SIGNAL = 2.2; EXPRESSED IN LUNG, SIGNAL = 1.9; EXPRESSED IN BONE MARROW, SIGNAL = 3.4; SWISSPROT HIT: O51532, EVALUE 7.40e+00
WAPEQQDVRFWFMDHIMDPSLTLLNAKIPPFRFRHQMGFRDQLGYVLGQHDMSILKLLVIVFVRI

SEQ ID NO: 31246 - protein, 87 aa, Homo sapiens
  MAP TO AC010238.4; EXPRESSED IN HEART, SIGNAL = 1.5; EXPRESSED IN HELA, SIGNAL = 1.3; EXPRESSED IN BRAIN, SIGNAL =   1; EXPRESSED IN FETAL LIVER, SIGNAL = 0.87; EXPRESSED IN PLACENTA, SIGNAL = 1.1; EXPRESSED IN ADULT LIVER, SIGNAL = 1.2
SMGKGMSGPGSFVSPVILLLMKLHVNPVPLSSPLPLTCQLSALLSQGTLVSCHRATVTRDRLPGGNRTFLLGSQIWLHKGGGIQAEP

SEQ ID NO: 31247 - protein, 33 aa, Homo sapiens
  MAP TO AC008705.4; EXPRESSED IN BONE MARROW, SIGNAL = 0.68; EXPRESSED IN PLACENTA, SIGNAL = 0.6; EXPRESSED IN ADULT LIVER, SIGNAL = 0.7; EXPRESSED IN BRAIN, SIGNAL = 0.56
VKKNSIKARLSSMKKDLKLGFPEPCQLFQDHQY

SEQ ID NO: 31248 - protein, 72 aa, Homo sapiens
  MAP TO AC002481.1; EXPRESSED IN ADULT LIVER, SIGNAL = 1.7; EXPRESSED IN HEART, SIGNAL =   4; EXPRESSED IN BRAIN, SIGNAL = 2.2; EXPRESSED IN HELA, SIGNAL = 4.7; EXPRESSED IN PLACENTA, SIGNAL = 3.1; SWISSPROT HIT: P09890, EVALUE 1.60e+00
GCWEAWMVIEDLLEEVALRIWMGPPADESNTIHLKVIEQRPDPPVAQEYDVPVFTKDKEDFFNSQWDLTTQQ

SEQ ID NO: 31249 - protein, 55 aa, Homo sapiens
  MAP TO AF190641.1; EXPRESSED IN BONE MARROW, SIGNAL = 0.95; EXPRESSED IN PLACENTA, SIGNAL = 1.4; EXPRESSED IN ADULT LIVER, SIGNAL = 1.1; EXPRESSED IN BRAIN, SIGNAL = 1.3; EXPRESSED IN LUNG, SIGNAL = 0.59; EXPRESSED IN FETAL LIVER, SIGNAL = 0.97; SWISSPROT HIT: O00410, EVALUE 8.10e+00
MTLWAFLCDTIRNTVMKDPGTNVKSEIDRKVYIRKILNNDWLNLQDNRIISSHKK

SEQ ID NO: 31250 - protein, 23 aa, Homo sapiens
  MAP TO AC004175.1; EXPRESSED IN BRAIN, SIGNAL = 0.58; EXPRESSED IN ADULT LIVER, SIGNAL = 0.5; EXPRESSED IN LUNG, SIGNAL = 0.53
TVSANAAWGMLVITVSLWVRKHI

SEQ ID NO: 31251 - protein, 37 aa, Homo sapiens
  MAP TO AC002497.1; EXPRESSED IN HEART, SIGNAL =   1; EXPRESSED IN LUNG, SIGNAL = 0.53; EXPRESSED IN BRAIN, SIGNAL = 0.69; EXPRESSED IN HELA, SIGNAL = 0.48; EXPRESSED IN ADULT LIVER, SIGNAL = 0.66
KRKRRKRRGGGGGGRRGRRGRKRGRGRRRRRREEEEK

SEQ ID NO: 31252 - protein, 52 aa, Homo sapiens
  MAP TO AC005254.1; EXPRESSED IN PLACENTA, SIGNAL = 0.61; EXPRESSED IN ADULT LIVER, SIGNAL = 0.65; EXPRESSED IN BRAIN, SIGNAL = 1.3; EXPRESSED IN LUNG, SIGNAL = 0.58; EXPRESSED IN FETAL LIVER, SIGNAL = 0.74; SWISSPROT HIT: P55067, EVALUE 7.00e-28
TEGCDRGWHKFQGHCYRYFAHRRAWEDAEKDCRRRSGHLTSVHSPEEHSFIN

SEQ ID NO: 31253 - protein, 39 aa, Homo sapiens
  MAP TO AC005254.1; EXPRESSED IN PLACENTA, SIGNAL = 0.61; EXPRESSED IN ADULT LIVER, SIGNAL = 0.65; EXPRESSED IN BRAIN, SIGNAL = 1.3; EXPRESSED IN LUNG, SIGNAL = 0.58; EXPRESSED IN FETAL LIVER, SIGNAL = 0.74
TPRAVTAAGISSRATVTAILPTGGHGKMPRRTAAAAPAT

SEQ ID NO: 31254 - protein, 91 aa, Homo sapiens
  MAP TO AC011512.5; EXPRESSED IN FETAL LIVER, SIGNAL = 0.37; EXPRESSED IN LUNG, SIGNAL = 0.87; EXPRESSED IN BONE MARROW, SIGNAL = 0.92; EXPRESSED IN ADULT LIVER, SIGNAL = 0.65; EXPRESSED IN PLACENTA, SIGNAL = 1.1; SWISSPROT HIT: P98203, EVALUE 1.40e-01
PQSIGGASREVASWGALAKVFGGSPCRTLLCGFDLPGQRTLASRGQRASPHPGLFLAGGCVVADYHLRHTGKKGVRDLPWGRRSFLALPLD

SEQ ID NO: 31255 - protein, 92 aa, Homo sapiens
  MAP TO AC008282.2; EXPRESSED IN BRAIN, SIGNAL = 3.8; EXPRESSED IN LUNG, SIGNAL = 1.9; EXPRESSED IN BONE MARROW, SIGNAL = 2.9; EXPRESSED IN PLACENTA, SIGNAL = 4.8; EXPRESSED IN ADULT LIVER, SIGNAL = 3.4
MLHFTAQYSQGSALLVIVNLPSSSCRSNCHTHIKLTVEKFQPISLFPFHCVSIPTEPGSIAQMVYEKKSITTHHRVLFGAKAHRRLMLHNGK

SEQ ID NO: 31256 - protein, 50 aa, Homo sapiens
  MAP TO AC023818.3; EXPRESSED IN PLACENTA, SIGNAL = 0.78; EXPRESSED IN ADULT LIVER, SIGNAL =   1; EXPRESSED IN BONE MARROW, SIGNAL = 0.92; SWISSPROT HIT: P93647, EVALUE 2.00e-09
VLDPEQNHNFTDHYLNVAFDLSQVLFIATANTTATIPAALLDRMEIIQVP

SEQ ID NO: 31257 - protein, 49 aa, Homo sapiens
  MAP TO AC016046.1; EXPRESSED IN BRAIN, SIGNAL = 0.94; EXPRESSED IN HELA, SIGNAL = 0.62; EXPRESSED IN BONE MARROW, SIGNAL =   2; EXPRESSED IN PLACENTA, SIGNAL = 0.83; EXPRESSED IN ADULT LIVER, SIGNAL = 0.93; EXPRESSED IN FETAL LIVER, SIGNAL = 1.1
ITLIQLFRTAILSLSLKTSLIRYPIPQKLLPSTYYHLPCCLSKATWRLT

SEQ ID NO: 31258 - protein, 51 aa, Homo sapiens
  MAP TO AC016046.1; EXPRESSED IN BRAIN, SIGNAL = 0.94; EXPRESSED IN HELA, SIGNAL = 0.62; EXPRESSED IN BONE MARROW, SIGNAL =   2; EXPRESSED IN PLACENTA, SIGNAL = 0.83; EXPRESSED IN ADULT LIVER, SIGNAL = 0.93; EXPRESSED IN FETAL LIVER, SIGNAL = 1.1; SWISSPROT HIT: P03203, EVALUE 5.70e-01
NYPYPVVQNSNLVIIPEDFPHTLSNPPETASIHLLPLALLPVQGNMASDIK

SEQ ID NO: 31259 - protein, 36 aa, Homo sapiens
  MAP TO AC010280.5; EXPRESSED IN BRAIN, SIGNAL = 0.96; EXPRESSED IN FETAL LIVER, SIGNAL = 1.3; EXPRESSED IN PLACENTA, SIGNAL = 1.3; EXPRESSED IN ADULT LIVER, SIGNAL = 1.2
ILCSDHAVLPAWLLFHGNCEVLIVLGLVGTQESCTG

SEQ ID NO: 31260 - protein, 34 aa, Homo sapiens
  MAP TO AC008747.4; EXPRESSED IN ADULT LIVER, SIGNAL = 1.2; EXPRESSED IN HEART, SIGNAL = 0.99; EXPRESSED IN HELA, SIGNAL = 0.94; EXPRESSED IN BONE MARROW, SIGNAL = 0.93
KTNQDLTSTQTLSLIRNIYNLLFLKPATWTLHLH

SEQ ID NO: 31261 - protein, 33 aa, Homo sapiens
  MAP TO AL049861.18; EXPRESSED IN ADULT LIVER, SIGNAL = 0.88; EXPRESSED IN LUNG, SIGNAL = 1.4; EXPRESSED IN FETAL LIVER, SIGNAL = 0.86; EXPRESSED IN BRAIN, SIGNAL = 0.94; EXPRESSED IN BONE MARROW, SIGNAL = 1.3; EXPRESSED IN PLACENTA, SIGNAL = 0.82
WYSRPFIIRPQHISPTSPSTRPPPMHTIFWSSQ

SEQ ID NO: 31262 - protein, 78 aa, Homo sapiens
  MAP TO AC005265.1; EXPRESSED IN PLACENTA, SIGNAL = 0.42; EXPRESSED IN ADULT LIVER, SIGNAL = 0.61; EXPRESSED IN BRAIN, SIGNAL = 0.5; SWISSPROT HIT: P46855, EVALUE 9.00e+00
FLLLQVPAFTHHDLLWPIHLVATLLLLASNSNVDCHAERKQCLGKYPGKKKKQETTLLFPLLPLFLSLPFVQRGIQEV

SEQ ID NO: 31263 - protein, 64 aa, Homo sapiens
  MAP TO AC008427.5; EXPRESSED IN FETAL LIVER, SIGNAL = 2.8; EXPRESSED IN BONE MARROW, SIGNAL = 4.3; EXPRESSED IN PLACENTA, SIGNAL = 9.3; EXPRESSED IN ADULT LIVER, SIGNAL = 2.9; EXPRESSED IN BRAIN, SIGNAL = 3.3
FLICSVRIMVVPTLWTIMGAELEYVECSAAGSGVRCFLWYKKTYMFGLRSWFLTEILKPLEFPE

SEQ ID NO: 31264 - protein, 38 aa, Homo sapiens
  MAP TO AC000067.2; EXPRESSED IN FETAL LIVER, SIGNAL = 1.2; EXPRESSED IN PLACENTA, SIGNAL = 2.1; EXPRESSED IN ADULT LIVER, SIGNAL = 2.4; EXPRESSED IN HEART, SIGNAL = 2.5
QTHNRLDVERSGSAEEDTSGWTSRGARWRKSTATEEHT

SEQ ID NO: 31265 - protein, 69 aa, Homo sapiens
  MAP TO AL049779.5; EXPRESSED IN ADULT LIVER, SIGNAL = 0.9; EXPRESSED IN HELA, SIGNAL = 0.6; EXPRESSED IN BRAIN, SIGNAL = 0.65; EXPRESSED IN PLACENTA, SIGNAL = 1.1; SWISSPROT HIT: Q03326, EVALUE 6.00e-03
HFLLTYLLLERLKVSAPARVVNVSSVAHHIGKIPFHDLQSEKRYSRGFAYCHSKLANVLFTRELAKRLQ

SEQ ID NO: 31266 - protein, 51 aa, Homo sapiens
  MAP TO AC008449.4; EXPRESSED IN HELA, SIGNAL = 1.7; EXPRESSED IN BRAIN, SIGNAL =   1; EXPRESSED IN BONE MARROW, SIGNAL = 0.68; EXPRESSED IN PLACENTA, SIGNAL = 1.7; EXPRESSED IN HEART, SIGNAL =   2; EXPRESSED IN ADULT LIVER, SIGNAL = 0.9; EXPRESSED IN FETAL LIVER, SIGNAL = 2.2
VPPKTNSKSLVMRLKYCYSTKALYINFNTEWYRLTTCHALSWILRIQRQKI

SEQ ID NO: 31267 - protein, 28 aa, Homo sapiens
  MAP TO AL050302.2; EXPRESSED IN LUNG, SIGNAL = 6.2; EXPRESSED IN BRAIN, SIGNAL = 2.8; EXPRESSED IN FETAL LIVER, SIGNAL =   3; EXPRESSED IN BONE MARROW, SIGNAL = 5.9; EXPRESSED IN PLACENTA, SIGNAL = 2.1; EXPRESSED IN ADULT LIVER, SIGNAL = 3.8
LNSSHFLISSSGMSWLLGCPGLSSSTEM

SEQ ID NO: 31268 - protein, 69 aa, Homo sapiens
  MAP TO AC010990.3; EXPRESSED IN ADULT LIVER, SIGNAL = 0.97; EXPRESSED IN BRAIN, SIGNAL = 1.2; SWISSPROT HIT: Q9Z0H3, EVALUE 2.10e+00
FATLSCPLTSKWSPSRQSAFWEWEMMGKEERIVRSPDPGLEKFCAPLGLCGPFASTDLSLPRLPLHSDP

SEQ ID NO: 31269 - protein, 39 aa, Homo sapiens
  MAP TO AF274853.1; EXPRESSED IN PLACENTA, SIGNAL =   2; EXPRESSED IN ADULT LIVER, SIGNAL = 1.7; EXPRESSED IN BRAIN, SIGNAL = 1.8; EXPRESSED IN LUNG, SIGNAL = 1.3; EXPRESSED IN BONE MARROW, SIGNAL = 1.9; SWISSPROT HIT: Q9PN94, EVALUE 2.20e+00
DQVEKKEEDIEKQNHERLGNEMAKEILVLKKELGIDELE

SEQ ID NO: 31270 - protein, 55 aa, Homo sapiens
  MAP TO AC027307.3; EXPRESSED IN HEART, SIGNAL =  15; EXPRESSED IN LUNG, SIGNAL = 5.1; EXPRESSED IN BRAIN, SIGNAL = 4.7; EXPRESSED IN HELA, SIGNAL = 9.7; EXPRESSED IN FETAL LIVER, SIGNAL = 8.6; EXPRESSED IN BONE MARROW, SIGNAL = 3.2; EXPRESSED IN PLACENTA, SIGNAL = 5.5; EXPRESSED IN ADULT LIVER, SIGNAL = 3.5; SWISSPROT HIT: P48809, EVALUE 2.00e-12
TLRSYFSQYGEVVDCVIMKDKTTNQSRGFGFVKFKDPNCVGTVLASRPHTLDGRN

SEQ ID NO: 31271 - protein, 20 aa, Homo sapiens
  MAP TO AC027307.3; EXPRESSED IN HEART, SIGNAL =  15; EXPRESSED IN LUNG, SIGNAL = 5.1; EXPRESSED IN BRAIN, SIGNAL = 4.7; EXPRESSED IN HELA, SIGNAL = 9.7; EXPRESSED IN FETAL LIVER, SIGNAL = 8.6; EXPRESSED IN BONE MARROW, SIGNAL = 3.2; EXPRESSED IN PLACENTA, SIGNAL = 5.5; EXPRESSED IN ADULT LIVER, SIGNAL = 3.5
DSAQLLFPIWRSRRLCYHER

SEQ ID NO: 31272 - protein, 19 aa, Homo sapiens
  MAP TO AC010203.13; EXPRESSED IN BONE MARROW, SIGNAL = 4.8; EXPRESSED IN PLACENTA, SIGNAL = 7.3; EXPRESSED IN ADULT LIVER, SIGNAL = 5.9; EXPRESSED IN BRAIN, SIGNAL = 6.1; EXPRESSED IN FETAL LIVER, SIGNAL = 8.4
EPCQQWGVCTRRGGEAFSL

SEQ ID NO: 31273 - protein, 133 aa, Homo sapiens
  MAP TO AC008988.7; EXPRESSED IN PLACENTA, SIGNAL = 1.2; EXPRESSED IN ADULT LIVER, SIGNAL = 1.8; EXPRESSED IN HEART, SIGNAL = 1.5; EXPRESSED IN BRAIN, SIGNAL = 1.8; EXPRESSED IN FETAL LIVER, SIGNAL = 1.9; SWISSPROT HIT: P98083, EVALUE 2.00e-05
GWDLAASSRGHLSAPDRKRGPRTLGVSEPVPMGGSGILRPILWLVSRNSLVRPLVHAGTLGAPRQDPRTPISYSTGPGGLPGADAEVSVPQVRTKDVLFESISHLIDHHLQNGQPIVAAESELHLRGVVSREP

SEQ ID NO: 31274 - protein, 32 aa, Homo sapiens
  MAP TO AJ004799.1; EXPRESSED IN ADULT LIVER, SIGNAL = 0.92; EXPRESSED IN BRAIN, SIGNAL = 1.2; EXPRESSED IN BONE MARROW, SIGNAL = 1.1; EXPRESSED IN PLACENTA, SIGNAL = 1.9; SWISSPROT HIT: O04857, EVALUE 5.10e+00
EGGAQKQTLYVPNWNCSLWSTNTDCSFLCVPS

SEQ ID NO: 31275 - protein, 42 aa, Homo sapiens
  MAP TO AC004076.1; EXPRESSED IN ADULT LIVER, SIGNAL = 0.43; SWISSPROT HIT: Q13360, EVALUE 5.00e-07
DCMVFEDVAIYFSQEEWGILNDAQRHLHSNVMLENFALLSSV

SEQ ID NO: 31276 - protein, 30 aa, Homo sapiens
  MAP TO AC004076.1; EXPRESSED IN ADULT LIVER, SIGNAL = 0.43
IVWSLRMWPYISPKRNGGSLMMLRDTCTAM

SEQ ID NO: 31277 - protein, 36 aa, Homo sapiens
  MAP TO AL121924.12; EXPRESSED IN BONE MARROW, SIGNAL = 0.77; EXPRESSED IN ADULT LIVER, SIGNAL = 0.84
RDLPLAPVRPCLSMWERVVCRLVLVSCSEDASSVGP

SEQ ID NO: 31278 - protein, 73 aa, Homo sapiens
  MAP TO AC010202.6; EXPRESSED IN HEART, SIGNAL = 4.5; EXPRESSED IN LUNG, SIGNAL = 3.2; EXPRESSED IN HELA, SIGNAL = 4.3; EXPRESSED IN FETAL LIVER, SIGNAL = 3.8; EXPRESSED IN PLACENTA, SIGNAL = 3.2; EXPRESSED IN ADULT LIVER, SIGNAL = 3.5
ASFQLQRVLNCSAVLELNEKLSANPVPSFSPHRRADTTRFEDSGWLWVRSGFGLVVWHELQKMRNEHTDVNPY

SEQ ID NO: 31279 - protein, 32 aa, Homo sapiens
  MAP TO AC004403.1; EXPRESSED IN BRAIN, SIGNAL = 0.97; EXPRESSED IN PLACENTA, SIGNAL = 0.76; EXPRESSED IN ADULT LIVER, SIGNAL = 0.45; SWISSPROT HIT: P11955, EVALUE 6.60e+00
TSMPMSRWWRAWAPTPRQHLGLVVYSSWSPSG

SEQ ID NO: 31280 - protein, 32 aa, Homo sapiens
  MAP TO AC004403.1; EXPRESSED IN BRAIN, SIGNAL = 0.97; EXPRESSED IN PLACENTA, SIGNAL = 0.76; EXPRESSED IN ADULT LIVER, SIGNAL = 0.45
DKHADEQMVESVGSDPTAASRIGCLQFLEPQW

SEQ ID NO: 31281 - protein, 105 aa, Homo sapiens
  MAP TO AC016940.7; EXPRESSED IN LUNG, SIGNAL = 3.4; EXPRESSED IN HELA, SIGNAL = 2.5; EXPRESSED IN BRAIN, SIGNAL = 2.9; EXPRESSED IN BONE MARROW, SIGNAL = 2.7; EXPRESSED IN ADULT LIVER, SIGNAL = 3.1; EXPRESSED IN PLACENTA, SIGNAL = 3.3; EXPRESSED IN HEART, SIGNAL =   3; SWISSPROT HIT: P43362, EVALUE 1.00e-33
EVDTTGHSYILVTSLGLSYDGLLGDDQSKPNAGLQIMVLCTIIMEGNCTPEEVIWETLSVMGLYAGKKHSVYGKPRKLLTQDWVQENYLEYHQVPSSDPAHYEFL

SEQ ID NO: 31282 - protein, 50 aa, Homo sapiens
  MAP TO AC011358.5; EXPRESSED IN PLACENTA, SIGNAL = 0.87; EXPRESSED IN ADULT LIVER, SIGNAL = 0.96; EXPRESSED IN HELA, SIGNAL = 0.87; EXPRESSED IN BRAIN, SIGNAL = 0.95; EXPRESSED IN LUNG, SIGNAL = 0.72
VTNPMKDEVDDAFTPYPFHPLSNWFHKIVSYKAWKRGRTPKRTDAMNHGS

SEQ ID NO: 31283 - protein, 33 aa, Homo sapiens
  MAP TO AC010205.5; EXPRESSED IN HELA, SIGNAL = 0.7; EXPRESSED IN FETAL LIVER, SIGNAL = 1.2; EXPRESSED IN LUNG, SIGNAL = 0.86; EXPRESSED IN PLACENTA, SIGNAL = 0.99; EXPRESSED IN ADULT LIVER, SIGNAL = 1.4; EXPRESSED IN HEART, SIGNAL = 1.3; EXPRESSED IN BRAIN, SIGNAL = 1.2; SWISSPROT HIT: Q63520, EVALUE 4.00e-08
QKLNQEYSQQFLTLFQQWDLDMQKAEEQEEKIL

SEQ ID NO: 31284 - protein, 35 aa, Homo sapiens
  MAP TO AC009001.6; EXPRESSED IN PLACENTA, SIGNAL = 3.4; EXPRESSED IN ADULT LIVER, SIGNAL = 3.2; EXPRESSED IN FETAL LIVER, SIGNAL = 7.2
SQIPAKSNWVTMLALVMSWSPPAASSRPWGRLGLA

SEQ ID NO: 31285 - protein, 43 aa, Homo sapiens
  MAP TO AC037199.1; EXPRESSED IN BRAIN, SIGNAL = 0.68; EXPRESSED IN PLACENTA, SIGNAL = 0.65; EXPRESSED IN ADULT LIVER, SIGNAL = 0.73; SWISSPROT HIT: O00321, EVALUE 5.80e-01
KRAVTSRSLAWKGAVTSGSLPWKGEVTSGSLPWKGEVTFRSLP

SEQ ID NO: 31286 - protein, 85 aa, Homo sapiens
  MAP TO AC004510.1; EXPRESSED IN ADULT LIVER, SIGNAL = 0.49; EXPRESSED IN LUNG, SIGNAL = 0.57; SWISSPROT HIT: P03356, EVALUE 1.00e-10
ASSPFPHISIFPIPNPDHTWFIHGSSSKPSQISPAKAGYAVVSHTSIIEAAALPPSTTSQQAKLIALTCALSVAKGMHIKIYIDS

SEQ ID NO: 31287 - protein, 95 aa, Homo sapiens
  MAP TO AC000041.2; EXPRESSED IN PLACENTA, SIGNAL = 0.47; EXPRESSED IN ADULT LIVER, SIGNAL = 0.65; EXPRESSED IN BRAIN, SIGNAL = 0.94; SWISSPROT HIT: P19474, EVALUE 8.00e-05
MAALFQEASSCPVCSDYLEKPMSLECGCAVCFKCINSLQKEPHGEDLLCCCCSMVSQKNKIRPSWQLERLASHIKELEPKLKKILQMNPRMRKFQ

SEQ ID NO: 31288 - protein, 38 aa, Homo sapiens
  MAP TO AC022116.3; EXPRESSED IN PLACENTA, SIGNAL = 2.6; EXPRESSED IN ADULT LIVER, SIGNAL = 1.7; EXPRESSED IN HEART, SIGNAL = 2.8; EXPRESSED IN BRAIN, SIGNAL = 1.8; EXPRESSED IN LUNG, SIGNAL = 1.4
SIQHGRKMKTGRLSKSPSSACFILVALADDHMLPTQIE

SEQ ID NO: 31289 - protein, 25 aa, Homo sapiens
  MAP TO AF087017.1; EXPRESSED IN HEART, SIGNAL = 5.2; EXPRESSED IN LUNG, SIGNAL = 2.8; EXPRESSED IN BRAIN, SIGNAL = 1.9; EXPRESSED IN HELA, SIGNAL = 2.9; EXPRESSED IN PLACENTA, SIGNAL =   2; EXPRESSED IN ADULT LIVER, SIGNAL =   2; EXPRESSED IN FETAL LIVER, SIGNAL = 3.9; EXPRESSED IN BONE MARROW, SIGNAL = 2.2
RMFDGSGVLHAQGSSRPAGGSWHVE

SEQ ID NO: 31290 - protein, 47 aa, Homo sapiens
  MAP TO AC005257.1; EXPRESSED IN BRAIN, SIGNAL = 1.3; EXPRESSED IN BONE MARROW, SIGNAL = 1.2; EXPRESSED IN ADULT LIVER, SIGNAL = 1.3; EXPRESSED IN LUNG, SIGNAL = 0.98
LEGRCLSACAQTRARRVLVSASSLPPVLLCCWKKRVLMQTPREERTR

SEQ ID NO: 31291 - protein, 47 aa, Homo sapiens
  MAP TO AC005257.1; EXPRESSED IN BRAIN, SIGNAL = 1.3; EXPRESSED IN BONE MARROW, SIGNAL = 1.2; EXPRESSED IN ADULT LIVER, SIGNAL = 1.3; EXPRESSED IN LUNG, SIGNAL = 0.98; SWISSPROT HIT: Q04998, EVALUE 2.80e+00
ARGSVSVSLCSDEGEESSGQRVQPPSCVALLLEKEGPDADPKRGENS

SEQ ID NO: 31292 - protein, 18 aa, Homo sapiens
  MAP TO AC011525.4; EXPRESSED IN BRAIN, SIGNAL = 1.2; EXPRESSED IN PLACENTA, SIGNAL = 0.79; EXPRESSED IN ADULT LIVER, SIGNAL = 0.61
HGGSQSSEEGVLCSPASC

SEQ ID NO: 31293 - protein, 42 aa, Homo sapiens
  MAP TO AF205588.1; EXPRESSED IN BONE MARROW, SIGNAL = 0.99; EXPRESSED IN ADULT LIVER, SIGNAL =   1; EXPRESSED IN HEART, SIGNAL =   2; EXPRESSED IN FETAL LIVER, SIGNAL = 1.1; EXPRESSED IN BRAIN, SIGNAL = 1.2; SWISSPROT HIT: Q06730, EVALUE 5.00e-16
GSVSFRDVTVGFTQEEWQHLDPAQRTLYRDVMLENYSHLVSV

SEQ ID NO: 31294 - protein, 108 aa, Homo sapiens
  MAP TO AC004186.1; EXPRESSED IN PLACENTA, SIGNAL = 0.8; EXPRESSED IN ADULT LIVER, SIGNAL = 0.57; SWISSPROT HIT: P19474, EVALUE 2.00e-16
CTTDVRPISGSRPVCPLCKKPFKKENIRPVWQLASLVENIERLKVDKGRQPGEVTREQQDAKLCERHREKLHYYCEDDGKLLCVMCRESREHRPHTAVLMEKAAQPHR

SEQ ID NO: 31295 - protein, 19 aa, Homo sapiens
  MAP TO AC004186.1; EXPRESSED IN PLACENTA, SIGNAL = 0.8; EXPRESSED IN ADULT LIVER, SIGNAL = 0.57
GHVSPTTEPGRGGDLLHLS

SEQ ID NO: 31296 - protein, 77 aa, Homo sapiens
  MAP TO AC005744.2; EXPRESSED IN ADULT LIVER, SIGNAL = 0.45; EXPRESSED IN LUNG, SIGNAL = 0.5; EXPRESSED IN BRAIN, SIGNAL = 0.56; EXPRESSED IN HELA, SIGNAL = 0.43; EXPRESSED IN PLACENTA, SIGNAL = 0.66; SWISSPROT HIT: P04066, EVALUE 9.60e+00
FPGIVGYRDASGTSLSSRTQWEETVHCGRPLSSWFDYPKSGVFVRVMHGGAAAAAPKDDSPQPPAPLRGLPWLVTLP

SEQ ID NO: 31297 - protein, 30 aa, Homo sapiens
  MAP TO AC005744.2; EXPRESSED IN ADULT LIVER, SIGNAL = 0.45; EXPRESSED IN LUNG, SIGNAL = 0.5; EXPRESSED IN BRAIN, SIGNAL = 0.56; EXPRESSED IN HELA, SIGNAL = 0.43; EXPRESSED IN PLACENTA, SIGNAL = 0.66
FQGLWDIEMHQALPSPPGLSGKRLSTVGGH

SEQ ID NO: 31298 - protein, 54 aa, Homo sapiens
  MAP TO AF222684.1; EXPRESSED IN BRAIN, SIGNAL = 0.96; EXPRESSED IN PLACENTA, SIGNAL = 1.6; EXPRESSED IN HEART, SIGNAL = 0.96; EXPRESSED IN ADULT LIVER, SIGNAL = 1.2; EXPRESSED IN FETAL LIVER, SIGNAL = 1.4; SWISSPROT HIT: P08826, EVALUE 2.80e+00
VARFWDREAGGGVGRVNSRVLPGVTETEFGGHVCSPGCPECAAKASDCIAFRAK

SEQ ID NO: 31299 - protein, 23 aa, Homo sapiens
  MAP TO AF222684.1; EXPRESSED IN BRAIN, SIGNAL = 0.96; EXPRESSED IN PLACENTA, SIGNAL = 1.6; EXPRESSED IN HEART, SIGNAL = 0.96; EXPRESSED IN ADULT LIVER, SIGNAL = 1.2; EXPRESSED IN FETAL LIVER, SIGNAL = 1.4
WQDSGIERQVEELEGSIPVFCLG

SEQ ID NO: 31300 - protein, 55 aa, Homo sapiens
  MAP TO AF207953.2; EXPRESSED IN BONE MARROW, SIGNAL = 0.88; EXPRESSED IN ADULT LIVER, SIGNAL = 0.9; EXPRESSED IN FETAL LIVER, SIGNAL = 1.1; EXPRESSED IN BRAIN, SIGNAL = 0.85; SWISSPROT HIT: Q14541, EVALUE 1.00e-24
SSAPETSMNTTDNGVNCLCAICGDRATGKHYGASSCDGCKGFFRRSIRKSHVYSC

SEQ ID NO: 31301 - protein, 46 aa, Homo sapiens
  MAP TO AL022069.1; EXPRESSED IN HEART, SIGNAL = 1.5; EXPRESSED IN BONE MARROW, SIGNAL = 1.2; EXPRESSED IN PLACENTA, SIGNAL = 0.76; EXPRESSED IN ADULT LIVER, SIGNAL = 0.97; SWISSPROT HIT: Q15349, EVALUE 2.00e-21
DVVSKMLHVDPHQRLTAMQVLKHPWVVNREYLSPNQLSRQDVHLVK

SEQ ID NO: 31302 - protein, 50 aa, Homo sapiens
  MAP TO AL022069.1; EXPRESSED IN HEART, SIGNAL = 1.5; EXPRESSED IN BONE MARROW, SIGNAL = 1.2; EXPRESSED IN PLACENTA, SIGNAL = 0.76; EXPRESSED IN ADULT LIVER, SIGNAL = 0.97; SWISSPROT HIT: Q9WTM3, EVALUE 4.30e-01
RRVQDAPRGPSSAPDGDASAQTPVGGQQRVPVPKPAQPTGRAPGEGTGRR

SEQ ID NO: 31303 - protein, 63 aa, Homo sapiens
  MAP TO AC016545.4; EXPRESSED IN PLACENTA, SIGNAL = 2.5; EXPRESSED IN ADULT LIVER, SIGNAL = 2.3; EXPRESSED IN HEART, SIGNAL = 2.5; EXPRESSED IN FETAL LIVER, SIGNAL = 2.2; SWISSPROT HIT: Q14103, EVALUE 6.00e+00
AEDTVAGSPSVGKCQVKLESKTFRQDDQQRWGHRAGLDQTAVLRVYSTEPISKLNLLDLSLGV

SEQ ID NO: 31304 - protein, 44 aa, Homo sapiens
  MAP TO AL117337.25; EXPRESSED IN ADULT LIVER, SIGNAL = 0.81; EXPRESSED IN BRAIN, SIGNAL = 1.8; EXPRESSED IN HELA, SIGNAL = 1.5; EXPRESSED IN PLACENTA, SIGNAL = 0.89
FSPQITSKDSHRREALCMQGMWEVLFSEVTFYYTSEKTHRGEAL

SEQ ID NO: 31305 - protein, 100 aa, Homo sapiens
  MAP TO AF044083.1; EXPRESSED IN PLACENTA, SIGNAL = 1.7; EXPRESSED IN ADULT LIVER, SIGNAL =   1; EXPRESSED IN BRAIN, SIGNAL = 1.2
NVEPLVLKKSIKIKFLLSKFYSPQINEYYSSYTFSFTKGHVSILLLYRKAILKKKKKGKRKTSDKTGFGRTTLRQDSIRYKNQMTGNRRLIKIKTVLVIR

SEQ ID NO: 31306 - protein, 47 aa, Homo sapiens
  MAP TO AC010209.13; EXPRESSED IN BRAIN, SIGNAL = 1.1; EXPRESSED IN BONE MARROW, SIGNAL =   1; EXPRESSED IN PLACENTA, SIGNAL = 0.81; EXPRESSED IN HEART, SIGNAL = 1.3; EXPRESSED IN ADULT LIVER, SIGNAL =   1; SWISSPROT HIT: O43903, EVALUE 1.00e-17
NFPMRKVPCKKDAASGSFFARDNTANFLHWCRDIGVDETYLFESEGL

SEQ ID NO: 31307 - protein, 49 aa, Homo sapiens
  MAP TO AC034103.5; EXPRESSED IN BRAIN, SIGNAL = 1.8; EXPRESSED IN LUNG, SIGNAL = 1.4; EXPRESSED IN FETAL LIVER, SIGNAL = 1.5; EXPRESSED IN PLACENTA, SIGNAL = 1.4; EXPRESSED IN ADULT LIVER, SIGNAL = 1.7; SWISSPROT HIT: P24189, EVALUE 2.20e+00
WTEQCVEIHFVNFCFKDHCKNIPEKPKKFTDPLKEAACYCKCCKTTGKL

SEQ ID NO: 31308 - protein, 33 aa, Homo sapiens
  MAP TO AC005257.1; EXPRESSED IN ADULT LIVER, SIGNAL = 0.41; EXPRESSED IN PLACENTA, SIGNAL = 1.5; EXPRESSED IN LUNG, SIGNAL = 0.79; EXPRESSED IN BONE MARROW, SIGNAL = 0.69
STPSAPRSRAAAATLRQHGTEAPTPGPTSTPTT

SEQ ID NO: 31309 - protein, 61 aa, Homo sapiens
  MAP TO AC005257.1; EXPRESSED IN ADULT LIVER, SIGNAL = 0.41; EXPRESSED IN PLACENTA, SIGNAL = 1.5; EXPRESSED IN LUNG, SIGNAL = 0.79; EXPRESSED IN BONE MARROW, SIGNAL = 0.69
MKGASPAERSALSTARDTVLLYSLVVDRLNALCTQEQSGRGHPEAAWNRGPHTGTYLHSHN

SEQ ID NO: 31310 - protein, 73 aa, Homo sapiens
  MAP TO AF107045.1; EXPRESSED IN ADULT LIVER, SIGNAL = 1.4; EXPRESSED IN BRAIN, SIGNAL = 1.5; EXPRESSED IN LUNG, SIGNAL = 1.1; EXPRESSED IN BONE MARROW, SIGNAL = 2.1; EXPRESSED IN PLACENTA, SIGNAL = 1.4; SWISSPROT HIT: P07742, EVALUE 4.00e-21
VFVLSNHFCDSASFPCSKLRHFFPRSCFLLSMKDDSIEGIYDTLKQCALISKSAGGIGVAVSCIRATGSYIAG

SEQ ID NO: 31311 - protein, 43 aa, Homo sapiens
  MAP TO AC026736.3; EXPRESSED IN PLACENTA, SIGNAL = 0.83; EXPRESSED IN ADULT LIVER, SIGNAL = 0.84; EXPRESSED IN HEART, SIGNAL = 0.94; EXPRESSED IN BRAIN, SIGNAL = 0.92; EXPRESSED IN LUNG, SIGNAL = 0.81; SWISSPROT HIT: Q9WTN3, EVALUE 2.20e+00
IAWLLNGDLTEEDQDGGRRGKQEATATIKARNGSSWDRWSQWT

SEQ ID NO: 31312 - protein, 41 aa, Homo sapiens
  MAP TO AF238380.1; EXPRESSED IN BONE MARROW, SIGNAL = 1.3; EXPRESSED IN HEART, SIGNAL = 0.94; EXPRESSED IN ADULT LIVER, SIGNAL = 2.3; SWISSPROT HIT: O60829, EVALUE 1.00e-18
RKVEGDCQEMDLEKTRSERGDGSDVKEKTPPNPKHAKTKEA

SEQ ID NO: 31313 - protein, 21 aa, Homo sapiens
  MAP TO AF238380.1; EXPRESSED IN BONE MARROW, SIGNAL = 1.3; EXPRESSED IN HEART, SIGNAL = 0.94; EXPRESSED IN ADULT LIVER, SIGNAL = 2.3
KVIARKWIWKRLGVSVEMALM

SEQ ID NO: 31314 - protein, 52 aa, Homo sapiens
  MAP TO AC026805.3; EXPRESSED IN BONE MARROW, SIGNAL = 1.9; EXPRESSED IN PLACENTA, SIGNAL = 1.5; EXPRESSED IN ADULT LIVER, SIGNAL = 1.6; EXPRESSED IN BRAIN, SIGNAL = 2.4; EXPRESSED IN LUNG, SIGNAL =   2; EXPRESSED IN HELA, SIGNAL = 1.3; SWISSPROT HIT: O00555, EVALUE 2.00e-19
LRRLCHYILNLRYFEMCILMVIAMSSIALAAEDPVQPNAPRNNVSPTEHTPS

SEQ ID NO: 31315 - protein, 34 aa, Homo sapiens
  MAP TO AC025458.3; EXPRESSED IN LUNG, SIGNAL = 1.9; EXPRESSED IN BRAIN, SIGNAL = 1.9; EXPRESSED IN PLACENTA, SIGNAL = 2.4; EXPRESSED IN HEART, SIGNAL = 1.8; EXPRESSED IN ADULT LIVER, SIGNAL = 2.5
WGQVWCLLTCFISHHGKLGTCLHSTLPVHAMEEK

SEQ ID NO: 31316 - protein, 28 aa, Homo sapiens
  MAP TO AC002497.1; EXPRESSED IN ADULT LIVER, SIGNAL = 5.1; EXPRESSED IN HEART, SIGNAL = 4.8; EXPRESSED IN BONE MARROW, SIGNAL = 2.3
PVLTCKFTNTSSGPGRTGRLLSTYTTSK

SEQ ID NO: 31317 - protein, 62 aa, Homo sapiens
  MAP TO AC004184.1; EXPRESSED IN BONE MARROW, SIGNAL = 1.1; EXPRESSED IN ADULT LIVER, SIGNAL = 0.56
ALLVLQAPFMVSVLDRYAILKIFLLITFLLYLFSVYTCLDPQILTIVLELAAMFHTVTCYII

SEQ ID NO: 31318 - protein, 95 aa, Homo sapiens
  MAP TO AL021366.1; EXPRESSED IN LUNG, SIGNAL = 2.3; EXPRESSED IN PLACENTA, SIGNAL = 1.3; EXPRESSED IN ADULT LIVER, SIGNAL = 1.5; SWISSPROT HIT: O43189, EVALUE 2.00e-18
SPLELHIGFPTDIPKSAPHSMTASSSSVSSPSPGLPRRSAPPSPLCRSLSPGTGGGVRGGVGYLSRGDPVRVLARRVRPDGSVQYLVEWGGGGIF

SEQ ID NO: 31319 - protein, 20 aa, Homo sapiens
  MAP TO AL021366.1; EXPRESSED IN LUNG, SIGNAL = 2.3; EXPRESSED IN PLACENTA, SIGNAL = 1.3; EXPRESSED IN ADULT LIVER, SIGNAL = 1.5
HPWNFTLVSPQTSLKVPPTR

SEQ ID NO: 31320 - protein, 71 aa, Homo sapiens
  MAP TO AF037222.1; EXPRESSED IN LUNG, SIGNAL = 1.8; EXPRESSED IN PLACENTA, SIGNAL = 1.8; EXPRESSED IN ADULT LIVER, SIGNAL = 1.6; EXPRESSED IN HEART, SIGNAL = 1.9; SWISSPROT HIT: O15315, EVALUE 3.00e-03
DTLLECVNKKVPVLLSRGMARLVVIDSVAAPFRCEFDSQASAPRARHLQSLGAMLRELSSAFQSPVLCINQ

SEQ ID NO: 31321 - protein, 54 aa, Homo sapiens
  MAP TO AC004058.1; EXPRESSED IN ADULT LIVER, SIGNAL = 0.42; EXPRESSED IN BONE MARROW, SIGNAL = 0.51; SWISSPROT HIT: P70275, EVALUE 4.70e+00
WLGNTSSTTGSSRWTWDSSKKQCNPKEQRRVKQDSCPPRTGMQQGEAPHYGKMV

SEQ ID NO: 31322 - protein, 47 aa, Homo sapiens
  MAP TO AF230666.1; EXPRESSED IN ADULT LIVER, SIGNAL = 0.56; EXPRESSED IN BRAIN, SIGNAL = 0.68; EXPRESSED IN FETAL LIVER, SIGNAL = 0.65; SWISSPROT HIT: P01266, EVALUE 7.00e-20
LELLLDEIYDTIFAGLDLPSTFTETTLYRILQRRFLAVQSVISGRFR

SEQ ID NO: 31323 - protein, 48 aa, Homo sapiens
  MAP TO AF230666.1; EXPRESSED IN ADULT LIVER, SIGNAL = 0.56; EXPRESSED IN BRAIN, SIGNAL = 0.68; EXPRESSED IN FETAL LIVER, SIGNAL = 0.65; SWISSPROT HIT: Q17307, EVALUE 1.30e+00
VWSCYWMKFMTPFLLAWTFLPPSLKPPCTGYCRDGSSQFNQSSLADSD

SEQ ID NO: 31324 - protein, 26 aa, Homo sapiens
  MAP TO AC025811.1; EXPRESSED IN BONE MARROW, SIGNAL = 1.9; EXPRESSED IN PLACENTA, SIGNAL = 1.7; EXPRESSED IN HEART, SIGNAL = 2.9; EXPRESSED IN ADULT LIVER, SIGNAL = 1.6; SWISSPROT HIT: Q9I7C5, EVALUE 8.80e+00
MALNPSPRHPAQPTPTAPCVAGCQPV

SEQ ID NO: 31325 - protein, 29 aa, Homo sapiens
  MAP TO AC012262.14; EXPRESSED IN BONE MARROW, SIGNAL = 1.2; EXPRESSED IN ADULT LIVER, SIGNAL = 1.6; EXPRESSED IN HEART, SIGNAL = 1.4; EXPRESSED IN PLACENTA, SIGNAL = 1.4
MSFTKEGKESLQGTTMIKIIEERLMPLGN

SEQ ID NO: 31326 - protein, 85 aa, Homo sapiens
  MAP TO AC026404.4; EXPRESSED IN LUNG, SIGNAL = 2.1; EXPRESSED IN PLACENTA, SIGNAL =  24; EXPRESSED IN HEART, SIGNAL = 6.1; EXPRESSED IN ADULT LIVER, SIGNAL = 3.6; SWISSPROT HIT: O08717, EVALUE 2.40e+00
WLLAVLVISHKRRKPRVPGSFLLCRRLGGPGEKPHLSRGEYTVLESPSRSPPIWCSSLFHQRTWCSEPAPGPGCLWMPLALRKGH

SEQ ID NO: 31327 - protein, 65 aa, Homo sapiens
  MAP TO AC016830.5; EXPRESSED IN PLACENTA, SIGNAL =   1; EXPRESSED IN ADULT LIVER, SIGNAL = 0.66; EXPRESSED IN BRAIN, SIGNAL = 1.1; EXPRESSED IN LUNG, SIGNAL = 0.59; EXPRESSED IN BONE MARROW, SIGNAL = 0.8; SWISSPROT HIT: Q16186, EVALUE 4.20e-01
GNAYQSTWAKREFRLAMPAGSSSAWNTASRQTALLMLKLARSTMMTPSPPFSARLAMGSMCPGPS

SEQ ID NO: 31328 - protein, 74 aa, Homo sapiens
  MAP TO AC016830.5; EXPRESSED IN PLACENTA, SIGNAL =   1; EXPRESSED IN ADULT LIVER, SIGNAL = 0.66; EXPRESSED IN BRAIN, SIGNAL = 1.1; EXPRESSED IN LUNG, SIGNAL = 0.59; EXPRESSED IN BONE MARROW, SIGNAL = 0.8; SWISSPROT HIT: Q9NY65, EVALUE 4.00e-39
RECISVHVGQAGVQIGNACWELFCLEHGIQADGTFDAQASKINDDDSFTTFFSETGNGKHVPRAVMIDLEPTVV

SEQ ID NO: 31329 - protein, 21 aa, Homo sapiens
  MAP TO AC005793.1; EXPRESSED IN PLACENTA, SIGNAL = 6.4; EXPRESSED IN ADULT LIVER, SIGNAL = 3.9; EXPRESSED IN FETAL LIVER, SIGNAL = 7.2; EXPRESSED IN BRAIN, SIGNAL = 5.6
CSSPRLATSSSRTSACPRSAS

SEQ ID NO: 31330 - protein, 29 aa, Homo sapiens
  MAP TO AC005793.1; EXPRESSED IN PLACENTA, SIGNAL = 6.4; EXPRESSED IN ADULT LIVER, SIGNAL = 3.9; EXPRESSED IN FETAL LIVER, SIGNAL = 7.2; EXPRESSED IN BRAIN, SIGNAL = 5.6; SWISSPROT HIT: P34422, EVALUE 5.10e+00
SAHHLAWPHQAHGLRPVQDRPHEHGHQPL

SEQ ID NO: 31331 - protein, 113 aa, Homo sapiens
  MAP TO AC005793.1; EXPRESSED IN PLACENTA, SIGNAL = 6.4; EXPRESSED IN ADULT LIVER, SIGNAL = 3.9; EXPRESSED IN FETAL LIVER, SIGNAL = 7.2; EXPRESSED IN BRAIN, SIGNAL = 5.6; SWISSPROT HIT: P22612, EVALUE 5.00e-15
MSMATNLYEGHIEKDAREFIDKQVGGQVGGQPRDASSSLLGPLLGWGLASVSPFSLAQVCGTPEYIAPEVIFRQGYGKPVDWWAMGVVLYEFLVGCVPFFGDTPEELFGQVVS

SEQ ID NO: 31332 - protein, 38 aa, Homo sapiens
  MAP TO AF196970.1; EXPRESSED IN BONE MARROW, SIGNAL = 3.1; EXPRESSED IN ADULT LIVER, SIGNAL =   2; EXPRESSED IN PLACENTA, SIGNAL = 1.6; EXPRESSED IN HEART, SIGNAL = 1.8; EXPRESSED IN FETAL LIVER, SIGNAL = 1.8; EXPRESSED IN BRAIN, SIGNAL = 1.7
TRTRPRPSGPSCRRRYKKGIRGKVEVRRPQGRKGSWAE

SEQ ID NO: 31333 - protein, 47 aa, Homo sapiens
  MAP TO AF196970.1; EXPRESSED IN BONE MARROW, SIGNAL = 3.1; EXPRESSED IN ADULT LIVER, SIGNAL =   2; EXPRESSED IN PLACENTA, SIGNAL = 1.6; EXPRESSED IN HEART, SIGNAL = 1.8; EXPRESSED IN FETAL LIVER, SIGNAL = 1.8; EXPRESSED IN BRAIN, SIGNAL = 1.7; SWISSPROT HIT: P42768, EVALUE 3.00e-13
DCQAGLNFADEDEAQAFRALVQEKIQKRNQRQSGGEEATGEERKLGR

SEQ ID NO: 31334 - protein, 50 aa, Homo sapiens
  MAP TO AC007570.23; EXPRESSED IN ADULT LIVER, SIGNAL = 3.5; EXPRESSED IN HEART, SIGNAL = 2.6; EXPRESSED IN BRAIN, SIGNAL = 3.3; EXPRESSED IN BONE MARROW, SIGNAL = 1.9; EXPRESSED IN PLACENTA, SIGNAL = 3.1; SWISSPROT HIT: Q13574, EVALUE 2.80e+00
RPLPEPGKFSENFRLQTLGAAPAYDLKGTAVPLAKKVSVLCDRLFAEEAG

SEQ ID NO: 31335 - protein, 25 aa, Homo sapiens
  MAP TO AC022143.6; EXPRESSED IN HEART, SIGNAL =   2; EXPRESSED IN FETAL LIVER, SIGNAL =   2; EXPRESSED IN BONE MARROW, SIGNAL = 1.7; EXPRESSED IN PLACENTA, SIGNAL =   2; EXPRESSED IN ADULT LIVER, SIGNAL = 2.2
MWVLKCHERKFLPVSHASIPPTTLQ

SEQ ID NO: 31336 - protein, 117 aa, Homo sapiens
  MAP TO AL023753.1; EXPRESSED IN BONE MARROW, SIGNAL = 0.45; EXPRESSED IN ADULT LIVER, SIGNAL = 0.39; EXPRESSED IN BRAIN, SIGNAL = 0.46; EXPRESSED IN FETAL LIVER, SIGNAL = 0.73; SWISSPROT HIT: P10266, EVALUE 5.00e-52
EALQPVRDKFSDYVFHYVDDLLCAAETRDTLIDCYTFLQTEVANAGLTIASDKIQTSTPVHYLGMQVEERKFKQQKIEIRKDTLKTLNDFHKLLGDINWIWPTLGILTYAMSNLFSI

SEQ ID NO: 31337 - protein, 65 aa, Homo sapiens
  MAP TO AC006178.1; EXPRESSED IN LUNG, SIGNAL = 1.3; EXPRESSED IN FETAL LIVER, SIGNAL = 1.3; EXPRESSED IN HELA, SIGNAL = 2.1; EXPRESSED IN PLACENTA, SIGNAL = 1.7; EXPRESSED IN ADULT LIVER, SIGNAL =   1; EXPRESSED IN HEART, SIGNAL = 2.9
MVAQKKAWYTNSKLHFLLRTLSSGLVPPGNNSLAGRQDRRPGSCASLKARLESDNCLAAPSGFRE

SEQ ID NO: 31338 - protein, 23 aa, Homo sapiens
  MAP TO AC061958.9; EXPRESSED IN BRAIN, SIGNAL = 1.1; EXPRESSED IN BONE MARROW, SIGNAL = 1.1; EXPRESSED IN PLACENTA, SIGNAL = 0.77; EXPRESSED IN ADULT LIVER, SIGNAL = 0.48
MSKILQTVNFIILQALIIHLPTT

SEQ ID NO: 31339 - protein, 31 aa, Homo sapiens
  MAP TO AC061958.9; EXPRESSED IN BRAIN, SIGNAL = 1.1; EXPRESSED IN BONE MARROW, SIGNAL = 1.1; EXPRESSED IN PLACENTA, SIGNAL = 0.77; EXPRESSED IN ADULT LIVER, SIGNAL = 0.48
GELTDQNELECTPALPTLANRRGCLYPSTTL

SEQ ID NO: 31340 - protein, 17 aa, Homo sapiens
  MAP TO AL031730.1; EXPRESSED IN BRAIN, SIGNAL = 0.42; EXPRESSED IN PLACENTA, SIGNAL = 0.6; EXPRESSED IN ADULT LIVER, SIGNAL = 0.52
LLLHRVHGRPGAVAGVV

SEQ ID NO: 31341 - protein, 52 aa, Homo sapiens
  MAP TO AC007619.22; EXPRESSED IN BRAIN, SIGNAL = 0.89; EXPRESSED IN BONE MARROW, SIGNAL = 0.77; EXPRESSED IN PLACENTA, SIGNAL = 0.67; EXPRESSED IN FETAL LIVER, SIGNAL = 0.44; EXPRESSED IN ADULT LIVER, SIGNAL = 0.92; SWISSPROT HIT: Q9Y6K9, EVALUE 6.20e+00
LLSGQTSPTNAKLEKLDSQQVLQLCLRYQDHLHQCAEAVAFDQNALVKRIKE

SEQ ID NO: 31342 - protein, 44 aa, Homo sapiens
  MAP TO AL022309.1; EXPRESSED IN LUNG, SIGNAL = 0.92; EXPRESSED IN FETAL LIVER, SIGNAL = 1.7; EXPRESSED IN BONE MARROW, SIGNAL = 1.3; EXPRESSED IN PLACENTA, SIGNAL = 1.2; EXPRESSED IN ADULT LIVER, SIGNAL = 1.2; EXPRESSED IN HEART, SIGNAL = 1.2
SVRQRMMSLPWNIMNSFTKSCLMNDRKKRMAILLMSLHTTSVDD

SEQ ID NO: 31343 - protein, 48 aa, Homo sapiens
  MAP TO AC012384.16; EXPRESSED IN BRAIN, SIGNAL = 1.2; EXPRESSED IN PLACENTA, SIGNAL = 1.6; EXPRESSED IN ADULT LIVER, SIGNAL = 1.4; SWISSPROT HIT: P21851, EVALUE 1.70e+00
LLATTSDDDLPGDLQSLSWLTAVDVPRLQQMASGRVDLGGPCVPHPHP

SEQ ID NO: 31344 - protein, 23 aa, Homo sapiens
  MAP TO AF246928.1; EXPRESSED IN HEART, SIGNAL = 0.95; EXPRESSED IN ADULT LIVER, SIGNAL = 0.93; EXPRESSED IN FETAL LIVER, SIGNAL = 1.6
ILMRNILGARFQITCTSYFGGSS

SEQ ID NO: 31345 - protein, 20 aa, Homo sapiens
  MAP TO AC026774.4; EXPRESSED IN ADULT LIVER, SIGNAL = 1.1; EXPRESSED IN FETAL LIVER, SIGNAL = 0.78; EXPRESSED IN BONE MARROW, SIGNAL = 1.3; EXPRESSED IN PLACENTA, SIGNAL = 1.3
ATISGTAHACVTASHSTWVP

SEQ ID NO: 31346 - protein, 44 aa, Homo sapiens
  MAP TO AC006124.1; EXPRESSED IN HEART, SIGNAL = 1.8; EXPRESSED IN ADULT LIVER, SIGNAL = 0.99; EXPRESSED IN BRAIN, SIGNAL = 1.2
CGWPRRGHVVFQHVDGHAVLIHSSINRHLDCFHLWAAGSYAAVA

SEQ ID NO: 31347 - protein, 20 aa, Homo sapiens
  MAP TO AC006124.1; EXPRESSED IN HEART, SIGNAL = 1.8; EXPRESSED IN ADULT LIVER, SIGNAL = 0.99; EXPRESSED IN BRAIN, SIGNAL = 1.2
RVDGHAVATSYFSMWMAMLC

SEQ ID NO: 31348 - protein, 48 aa, Homo sapiens
  MAP TO AL031186.8; EXPRESSED IN ADULT LIVER, SIGNAL = 0.86; EXPRESSED IN FETAL LIVER, SIGNAL = 1.4; EXPRESSED IN HELA, SIGNAL = 0.98; SWISSPROT HIT: P34687, EVALUE 9.70e-01
PQGPPGSPGRAGAVGTPGERGPPGPPGPPGPPGPPAPVGPPHARISQH

SEQ ID NO: 31349 - protein, 48 aa, Homo sapiens
  MAP TO AL031186.8; EXPRESSED IN ADULT LIVER, SIGNAL = 0.86; EXPRESSED IN FETAL LIVER, SIGNAL = 1.4; EXPRESSED IN HELA, SIGNAL = 0.98
STGPPREPWPGWSCGHPWREGTSWATRASWPPWAPSPCWATPCPDLPA

SEQ ID NO: 31350 - protein, 56 aa, Homo sapiens
  MAP TO AC018557.5; EXPRESSED IN FETAL LIVER, SIGNAL = 1.2; EXPRESSED IN BRAIN, SIGNAL =   2; EXPRESSED IN HELA, SIGNAL = 2.6; EXPRESSED IN BONE MARROW, SIGNAL = 1.6; EXPRESSED IN PLACENTA, SIGNAL = 1.3; EXPRESSED IN ADULT LIVER, SIGNAL = 1.6; SWISSPROT HIT: O43237, EVALUE 5.00e-28
VKDFQDYMEPEEGCQGSPQRRGPLTSGSDEENVALPLGDNVLTHNLGIPVLVVCTK

SEQ ID NO: 31351 - protein, 28 aa, Homo sapiens
  MAP TO AC005524.1; EXPRESSED IN PLACENTA, SIGNAL = 0.57; EXPRESSED IN ADULT LIVER, SIGNAL = 0.42
TVLPTFWLLWLQLWLKELQILLVPPIQS

SEQ ID NO: 31352 - protein, 66 aa, Homo sapiens
  MAP TO AF178030.1; EXPRESSED IN ADULT LIVER, SIGNAL = 1.2; EXPRESSED IN HEART, SIGNAL = 1.2; SWISSPROT HIT: P55558, EVALUE 2.10e+00
VVSKVDARLWLERILLDKAFTLRNYYQMQSSTGRKNTLMTEYAEIKKHKVLLSEFTLEFLPLVSVW

SEQ ID NO: 31353 - protein, 81 aa, Homo sapiens
  MAP TO AF037338.1; EXPRESSED IN ADULT LIVER, SIGNAL = 2.1; EXPRESSED IN PLACENTA, SIGNAL = 2.4; SWISSPROT HIT: P19747, EVALUE 4.40e+00
VKFDAVSGDYYPIIYFNDYWNLQKDYYPINESLASLPLRVSFCPLSLWRWQLYAAQSTKSPWNFLGDELYEQSDEEQDSVK

SEQ ID NO: 31354 - protein, 20 aa, Homo sapiens
  MAP TO AC022469.4; EXPRESSED IN BONE MARROW, SIGNAL = 0.76; EXPRESSED IN ADULT LIVER, SIGNAL = 1.1; EXPRESSED IN PLACENTA, SIGNAL = 1.1; EXPRESSED IN HELA, SIGNAL = 1.4
LFANLFHCGSFCLAMHSVYW

SEQ ID NO: 31355 - protein, 76 aa, Homo sapiens
  MAP TO AC023818.3; EXPRESSED IN BONE MARROW, SIGNAL = 2.2; EXPRESSED IN PLACENTA, SIGNAL = 1.6; EXPRESSED IN ADULT LIVER, SIGNAL = 1.8; EXPRESSED IN BRAIN, SIGNAL = 1.6; SWISSPROT HIT: P56252, EVALUE 3.40e+00
VPVNLTSNHASGAEILTCLVVTNANTVKNVIFVIVPEIVHEKSMTVKYCDSDVYHCELPVLGDWSAFTVTKISYVA

SEQ ID NO: 31356 - protein, 28 aa, Homo sapiens
  MAP TO AC006339.3; EXPRESSED IN ADULT LIVER, SIGNAL =   2; EXPRESSED IN HEART, SIGNAL = 5.3; EXPRESSED IN PLACENTA, SIGNAL =   3
LELTAIIKTMDDMALITSLSSFSKKRHQ

SEQ ID NO: 31357 - protein, 65 aa, Homo sapiens
  MAP TO AC006339.3; EXPRESSED IN ADULT LIVER, SIGNAL =   2; EXPRESSED IN HEART, SIGNAL = 5.3; EXPRESSED IN PLACENTA, SIGNAL =   3; SWISSPROT HIT: P32630, EVALUE 4.60e+00
PGIDCYHQNYGRHGSNYLTFFIFQKETPMSQKPLSEFIEVTMLYYCNHLTTLSSIPLIPDYTVEE

SEQ ID NO: 31358 - protein, 31 aa, Homo sapiens
  MAP TO AC025432.3; EXPRESSED IN BONE MARROW, SIGNAL = 1.6; EXPRESSED IN PLACENTA, SIGNAL = 1.9; EXPRESSED IN ADULT LIVER, SIGNAL = 1.8; EXPRESSED IN HELA, SIGNAL = 2.1
CLSQKSLQRLSMDVWAWIALGESISRSRTST

SEQ ID NO: 31359 - protein, 121 aa, Homo sapiens
  MAP TO AL022159.1; EXPRESSED IN LUNG, SIGNAL = 1.1; EXPRESSED IN ADULT LIVER, SIGNAL = 2.2; EXPRESSED IN BRAIN, SIGNAL = 2.1; EXPRESSED IN HELA, SIGNAL = 1.6; EXPRESSED IN BONE MARROW, SIGNAL = 2.3; EXPRESSED IN PLACENTA, SIGNAL = 2.2; SWISSPROT HIT: Q9NYV4, EVALUE 8.80e-01
CQVVIDQEEFLKEIKSATLVNPQMIRKQNSLIADMENILVVWIDQNSHKIPLSQSLIQSKALTLFNSVKAKSAEEAAEHKLEASRGWFMRFKEISCLQNIKVQSETASTELKAIASYPEDT

SEQ ID NO: 31360 - protein, 51 aa, Homo sapiens
  MAP TO AL031708.3; EXPRESSED IN HEART, SIGNAL = 1.5; EXPRESSED IN ADULT LIVER, SIGNAL = 1.3; EXPRESSED IN BRAIN, SIGNAL = 1.6; EXPRESSED IN PLACENTA, SIGNAL = 1.4; SWISSPROT HIT: P40600, EVALUE 6.30e+00
NFQEKQVHPYALSSHEDAAVWRRLESREHWAAVLYLGRDRPTCVQAVEGMS

SEQ ID NO: 31361 - protein, 33 aa, Homo sapiens
  MAP TO AF196968.1; EXPRESSED IN ADULT LIVER, SIGNAL = 3.1; EXPRESSED IN HEART, SIGNAL = 2.6; EXPRESSED IN LUNG, SIGNAL = 4.5; EXPRESSED IN BRAIN, SIGNAL =   3
SALLPLGATLSLEGVGDNCDDRDDDVGSSNDSN

SEQ ID NO: 31362 - protein, 66 aa, Homo sapiens
  MAP TO AC020893.4; EXPRESSED IN FETAL LIVER, SIGNAL =   1; EXPRESSED IN BRAIN, SIGNAL = 1.1; EXPRESSED IN HELA, SIGNAL = 3.2; EXPRESSED IN PLACENTA, SIGNAL = 6.9; EXPRESSED IN ADULT LIVER, SIGNAL = 1.3; SWISSPROT HIT: P24130, EVALUE 6.00e+00
VSSNGIQSTPLNLATYWKCSASTTDLRVDYKYNPEAMVAPSVLSNIQVVVPVDGGVTNMQSLPPAI

SEQ ID NO: 31363 - protein, 77 aa, Homo sapiens
  MAP TO AC004202.1; EXPRESSED IN LUNG, SIGNAL = 2.6; EXPRESSED IN PLACENTA, SIGNAL = 3.8; EXPRESSED IN ADULT LIVER, SIGNAL = 2.8; EXPRESSED IN HEART, SIGNAL = 2.9; SWISSPROT HIT: O15553, EVALUE 6.40e-01
DQVEHEKQRILTEFELLHQVLEEEKNFLLSRIYWLGHEGTEAGKHYVASTEPQLNDLKKLVDSLKTKQNMPPRQLLE

SEQ ID NO: 31364 - protein, 39 aa, Homo sapiens
  MAP TO AC020908.5; EXPRESSED IN LUNG, SIGNAL = 1.1; EXPRESSED IN BRAIN, SIGNAL = 0.94; EXPRESSED IN PLACENTA, SIGNAL = 0.91; EXPRESSED IN ADULT LIVER, SIGNAL = 0.91
ALRRHEPCQHLDLECDLKRLASRTASQYTSVVLATQRAV

SEQ ID NO: 31365 - protein, 55 aa, Homo sapiens
  MAP TO AJ250235.1; EXPRESSED IN BRAIN, SIGNAL = 0.61; EXPRESSED IN HELA, SIGNAL = 0.81; EXPRESSED IN ADULT LIVER, SIGNAL = 0.81; SWISSPROT HIT: P22830, EVALUE 1.00e-26
VGPMPWLGPQTDESIKGLCERGRKNILLVPIAFTSDHIETLYELDIEYSQVLAKE

SEQ ID NO: 31366 - protein, 30 aa, Homo sapiens
  MAP TO AJ250235.1; EXPRESSED IN BRAIN, SIGNAL = 0.61; EXPRESSED IN HELA, SIGNAL = 0.81; EXPRESSED IN ADULT LIVER, SIGNAL = 0.81
LVRCPGWVLKQTNLSKGFVRGGGRISSWFR

SEQ ID NO: 31367 - protein, 69 aa, Homo sapiens
  MAP TO AC006167.1; EXPRESSED IN ADULT LIVER, SIGNAL = 1.5; EXPRESSED IN HEART, SIGNAL = 3.2; EXPRESSED IN BRAIN, SIGNAL = 1.5; EXPRESSED IN PLACENTA, SIGNAL =   2; SWISSPROT HIT: Q13437, EVALUE 2.70e-01
MWKQLWNWVTGSNWNSLEGSEDRKVWESMELPRDLLNGFDQNPDNDMDNEIQAEVVSNGDEELVGNWSK

SEQ ID NO: 31368 - protein, 45 aa, Homo sapiens
  MAP TO AC018725.1; EXPRESSED IN PLACENTA, SIGNAL = 1.2; EXPRESSED IN ADULT LIVER, SIGNAL = 1.3; SWISSPROT HIT: O36015, EVALUE 3.70e+00
TLRFVLHPLLPLDYICPLALASSFPATLSSLLLLCPVMDTVFPVA

SEQ ID NO: 31369 - protein, 62 aa, Homo sapiens
  MAP TO AC006942.1; EXPRESSED IN FETAL LIVER, SIGNAL = 2.4; EXPRESSED IN BONE MARROW, SIGNAL =   4; EXPRESSED IN PLACENTA, SIGNAL = 3.4; EXPRESSED IN ADULT LIVER, SIGNAL = 3.3; EXPRESSED IN HEART, SIGNAL = 4.6; SWISSPROT HIT: P39285, EVALUE 7.90e+00
LFLYLVNFPAENSAEKSAEPFFAGTLDSSCIHLKTRHILGNVVIGAPVSCWLASVSGGELWG

SEQ ID NO: 31370 - protein, 36 aa, Homo sapiens
  MAP TO AC018555.4; EXPRESSED IN ADULT LIVER, SIGNAL = 1.1; EXPRESSED IN FETAL LIVER, SIGNAL = 0.98; EXPRESSED IN BRAIN, SIGNAL = 0.89; SWISSPROT HIT: Q28949, EVALUE 5.00e+00
QFLWSWKQEYLQHHTPSSRRFSTKRESLCLGKSKGK

SEQ ID NO: 31371 - protein, 37 aa, Homo sapiens
  MAP TO AL031845.6; EXPRESSED IN BRAIN, SIGNAL = 0.74; EXPRESSED IN PLACENTA, SIGNAL = 0.61; EXPRESSED IN HEART, SIGNAL =   1; EXPRESSED IN ADULT LIVER, SIGNAL = 0.8; SWISSPROT HIT: Q9XF62, EVALUE 3.80e+00
KVQGEGASADGEAATNHPEDLVKIIDEGGHTKQQIFK

SEQ ID NO: 31372 - protein, 29 aa, Homo sapiens
  MAP TO AC026733.3; EXPRESSED IN BONE MARROW, SIGNAL = 5.9; EXPRESSED IN PLACENTA, SIGNAL = 3.4; EXPRESSED IN ADULT LIVER, SIGNAL = 4.4; EXPRESSED IN BRAIN, SIGNAL = 3.8
RSCYRGSLSTSSPDKSPGTWSTCSTGSAA

SEQ ID NO: 31373 - protein, 41 aa, Homo sapiens
  MAP TO AC008959.4; EXPRESSED IN ADULT LIVER, SIGNAL = 0.54; EXPRESSED IN LUNG, SIGNAL = 0.79; EXPRESSED IN BRAIN, SIGNAL = 0.42
MTYFGGLTAQFLASLVPYPPDSPSFPDLQGNNLKSLHHTGK

SEQ ID NO: 31374 - protein, 19 aa, Homo sapiens
  MAP TO AC008959.4; EXPRESSED IN ADULT LIVER, SIGNAL = 0.54; EXPRESSED IN LUNG, SIGNAL = 0.79; EXPRESSED IN BRAIN, SIGNAL = 0.42
DIFWGSDSSVSGKLGTIPS

SEQ ID NO: 31375 - protein, 55 aa, Homo sapiens
  MAP TO AC006189.1; EXPRESSED IN HELA, SIGNAL = 0.6; EXPRESSED IN PLACENTA, SIGNAL = 0.9; EXPRESSED IN ADULT LIVER, SIGNAL = 0.86; SWISSPROT HIT: Q93073, EVALUE 3.60e+00
MTWGQHNTKWMEWAEKGEGLDFPFNHEEVVCELGLEEKDLDKGRMWERAQQAGEW

SEQ ID NO: 31376 - protein, 55 aa, Homo sapiens
  MAP TO AC006997.3; EXPRESSED IN BRAIN, SIGNAL = 1.9; EXPRESSED IN FETAL LIVER, SIGNAL = 1.3; EXPRESSED IN PLACENTA, SIGNAL = 2.5; EXPRESSED IN ADULT LIVER, SIGNAL = 1.8; EXPRESSED IN HEART, SIGNAL = 2.6; SWISSPROT HIT: Q04725, EVALUE 8.10e+00
KKKFGSSNSPPHDIGGEESIGLHDDPVCVLALCYSKCDLWTSTTNVSWQAVGDAG

SEQ ID NO: 31377 - protein, 29 aa, Homo sapiens
  MAP TO AC006997.3; EXPRESSED IN BRAIN, SIGNAL = 1.9; EXPRESSED IN FETAL LIVER, SIGNAL = 1.3; EXPRESSED IN PLACENTA, SIGNAL = 2.5; EXPRESSED IN ADULT LIVER, SIGNAL = 1.8; EXPRESSED IN HEART, SIGNAL = 2.6
KKSLVLQIAPLMILVGRSPLAFMMILYVC

SEQ ID NO: 31378 - protein, 55 aa, Homo sapiens
  MAP TO AC025172.2; EXPRESSED IN BRAIN, SIGNAL =   1; EXPRESSED IN ADULT LIVER, SIGNAL =   1; SWISSPROT HIT: O17583, EVALUE 4.70e+00
PLPERDPLVPADGKAPEGLMDPPMSHGHSFHLDAEALGWPLCNAQCSIMTWPQDA

SEQ ID NO: 31379 - protein, 35 aa, Homo sapiens
  MAP TO AC008719.5; EXPRESSED IN ADULT LIVER, SIGNAL = 0.53; EXPRESSED IN HELA, SIGNAL = 0.42; EXPRESSED IN BONE MARROW, SIGNAL = 0.56; SWISSPROT HIT: Q9QXT8, EVALUE 2.00e-08
EMMDIVKAIYDMMGKYTYPVLKEDTPRQHVDVFFQ

SEQ ID NO: 31380 - protein, 96 aa, Homo sapiens
  MAP TO AC026745.3; EXPRESSED IN HEART, SIGNAL =   1; EXPRESSED IN ADULT LIVER, SIGNAL = 0.92; EXPRESSED IN BRAIN, SIGNAL =   1; EXPRESSED IN FETAL LIVER, SIGNAL = 1.4; EXPRESSED IN HELA, SIGNAL = 1.6; EXPRESSED IN PLACENTA, SIGNAL = 1.4; SWISSPROT HIT: P75245, EVALUE 9.60e+00
NHPRRRNIITKDVCGREGGEPGAGGLQPLVQRADSKTVFKRPGSTGSAELNGANVSSDYCPAYLTQLEGGCLQAKKRALIRNRMVFDLILHFQPPD

SEQ ID NO: 31381 - protein, 49 aa, Homo sapiens
  MAP TO AC026745.3; EXPRESSED IN HEART, SIGNAL =   1; EXPRESSED IN ADULT LIVER, SIGNAL = 0.92; EXPRESSED IN BRAIN, SIGNAL =   1; EXPRESSED IN FETAL LIVER, SIGNAL = 1.4; EXPRESSED IN HELA, SIGNAL = 1.6; EXPRESSED IN PLACENTA, SIGNAL = 1.4
TIPEEGTSSQRMCVAEKGVSQGLGGCSLWYRELTPKQSLKGLVLQVLLN

SEQ ID NO: 31382 - protein, 18 aa, Homo sapiens
  MAP TO AC026745.3; EXPRESSED IN HEART, SIGNAL =   1; EXPRESSED IN ADULT LIVER, SIGNAL = 0.92; EXPRESSED IN BRAIN, SIGNAL =   1; EXPRESSED IN FETAL LIVER, SIGNAL = 1.4; EXPRESSED IN HELA, SIGNAL = 1.6; EXPRESSED IN PLACENTA, SIGNAL = 1.4
PSQKKEHHHKGCVWQRRG

SEQ ID NO: 31383 - protein, 181 aa, Homo sapiens
  MAP TO AC022336.12; EXPRESSED IN FETAL LIVER, SIGNAL = 1.4; EXPRESSED IN LUNG, SIGNAL = 0.57; EXPRESSED IN HELA, SIGNAL = 0.78; EXPRESSED IN PLACENTA, SIGNAL = 1.1; EXPRESSED IN ADULT LIVER, SIGNAL = 0.83; SWISSPROT HIT: O75962, EVALUE 1.00e-58
PENLLIDLRIPVPRVKLIDLEDAVQISGHFHIHHLLGNPEFAAPEVIQGIPVSLGTDIWSIGVLTYVMLSGVSPFLDESKEETCINVCRVDFSFPHEYFCGVSNAARDFINVILQEDFRRRPTAATCLQHPWLQPHNGSYSKIPLDTSRLACFIERRKHQNDVRPIPNVKSYIVNRVNQGT

SEQ ID NO: 31384 - protein, 72 aa, Homo sapiens
  MAP TO AL078589.8; EXPRESSED IN BRAIN, SIGNAL = 2.9; EXPRESSED IN PLACENTA, SIGNAL = 2.2; EXPRESSED IN HEART, SIGNAL = 2.6; EXPRESSED IN ADULT LIVER, SIGNAL = 2.1; EXPRESSED IN LUNG, SIGNAL = 4.2; SWISSPROT HIT: Q9P2N7, EVALUE 1.30e-02
ELNSFNYLDLYRLADLFNLTLLEKAVIDFLVKHLSELLKSRPEEVLTLPYCLLQEVLKSDRLTSLSEEQIWQ

SEQ ID NO: 31385 - protein, 29 aa, Homo sapiens
  MAP TO AC006277.1; EXPRESSED IN BONE MARROW, SIGNAL = 1.3; EXPRESSED IN PLACENTA, SIGNAL = 1.7; EXPRESSED IN ADULT LIVER, SIGNAL = 1.5; EXPRESSED IN HEART, SIGNAL = 1.8; EXPRESSED IN BRAIN, SIGNAL = 1.5
PLNFGPPESEQAVSVESPVTSPELADHEE

SEQ ID NO: 31386 - protein, 24 aa, Homo sapiens
  MAP TO AC005947.1; EXPRESSED IN HELA, SIGNAL = 0.71; EXPRESSED IN FETAL LIVER, SIGNAL = 0.49; EXPRESSED IN BRAIN, SIGNAL = 0.7; EXPRESSED IN ADULT LIVER, SIGNAL = 0.66
VSVVAVMNETLSDLHGRDLIDRRP

SEQ ID NO: 31387 - protein, 35 aa, Homo sapiens
  MAP TO AC012601.5; EXPRESSED IN BONE MARROW, SIGNAL = 0.52; EXPRESSED IN ADULT LIVER, SIGNAL = 0.56; SWISSPROT HIT: O75366, EVALUE 1.70e+00
SLLQHMEIMRVTIPDEILMRRQPNSIKRYHVFCKN

SEQ ID NO: 31388 - protein, 17 aa, Homo sapiens
  MAP TO AC012601.5; EXPRESSED IN BONE MARROW, SIGNAL = 0.52; EXPRESSED IN ADULT LIVER, SIGNAL = 0.56
PSYNTWRLCELQFQMRF

SEQ ID NO: 31389 - protein, 64 aa, Homo sapiens
  MAP TO AC007207.22; EXPRESSED IN PLACENTA, SIGNAL = 1.9; EXPRESSED IN ADULT LIVER, SIGNAL = 2.7; SWISSPROT HIT: P22983, EVALUE 2.70e+00
TKETRFIRGPKTPAPVTDWEGSLPLVFNQCRDASLIIHPRFKGVRPRRDACLGPSTSAASPAFL

SEQ ID NO: 31390 - protein, 27 aa, Homo sapiens
  MAP TO AC007207.22; EXPRESSED IN PLACENTA, SIGNAL = 1.9; EXPRESSED IN ADULT LIVER, SIGNAL = 2.7; SWISSPROT HIT: P98091, EVALUE 8.80e+00
DKGDTFYPWTQNSGASHGLGRQPSLGV

SEQ ID NO: 31391 - protein, 34 aa, Homo sapiens
  MAP TO AF045450.1; EXPRESSED IN PLACENTA, SIGNAL = 2.5; EXPRESSED IN HEART, SIGNAL = 1.5; EXPRESSED IN ADULT LIVER, SIGNAL = 1.5; EXPRESSED IN BONE MARROW, SIGNAL = 1.2
GRLTGSGAQQILCRIWRNGSQRRVCDGGKQQWWT

SEQ ID NO: 31392 - protein, 34 aa, Homo sapiens
  MAP TO AF045450.1; EXPRESSED IN PLACENTA, SIGNAL = 2.5; EXPRESSED IN HEART, SIGNAL = 1.5; EXPRESSED IN ADULT LIVER, SIGNAL = 1.5; EXPRESSED IN BONE MARROW, SIGNAL = 1.2
WAPHWIRSTADTLPDLEEWKSAAGLRWWQTAVVD

SEQ ID NO: 31393 - protein, 31 aa, Homo sapiens
  MAP TO AC010163.7; EXPRESSED IN PLACENTA, SIGNAL = 0.39; EXPRESSED IN ADULT LIVER, SIGNAL = 0.49; EXPRESSED IN LUNG, SIGNAL = 0.61; EXPRESSED IN FETAL LIVER, SIGNAL = 0.53; EXPRESSED IN BRAIN, SIGNAL = 0.7
APHTSPTPTAWNTACLPCWFPSKMTTINSAV

SEQ ID NO: 31394 - protein, 28 aa, Homo sapiens
  MAP TO AC008509.5; EXPRESSED IN PLACENTA, SIGNAL = 0.39; EXPRESSED IN ADULT LIVER, SIGNAL = 0.65; EXPRESSED IN HELA, SIGNAL = 0.46
WVQIMPMLKLENLQHLMARWNETVKEKK

SEQ ID NO: 31395 - protein, 54 aa, Homo sapiens
  MAP TO AC008509.5; EXPRESSED IN PLACENTA, SIGNAL = 0.39; EXPRESSED IN ADULT LIVER, SIGNAL = 0.65; EXPRESSED IN HELA, SIGNAL = 0.46
VYTVGPDYAHAEARKSPALDGKVERDSEGKEVRYPVILNAREKLIAWKVCLAFK

SEQ ID NO: 31396 - protein, 17 aa, Homo sapiens
  MAP TO AL118558.2; EXPRESSED IN LUNG, SIGNAL = 8.6; EXPRESSED IN BONE MARROW, SIGNAL = 4.6; EXPRESSED IN PLACENTA, SIGNAL = 4.3; EXPRESSED IN ADULT LIVER, SIGNAL = 4.4
LTLSSHSQPLPPLLVSC

SEQ ID NO: 31397 - protein, 89 aa, Homo sapiens
  MAP TO AL118558.2; EXPRESSED IN LUNG, SIGNAL = 8.6; EXPRESSED IN BONE MARROW, SIGNAL = 4.6; EXPRESSED IN PLACENTA, SIGNAL = 4.3; EXPRESSED IN ADULT LIVER, SIGNAL = 4.4; SWISSPROT HIT: Q9JHU4, EVALUE 3.00e-39
LNAIISFSASAPITCELLNKQVKVSPDMAIFITMNPAYAGRSNLPDNLKKLFRSLAMTKPDRQLIAQVMLYSQGFRTAEVLANKIVPFF

SEQ ID NO: 31398 - protein, 18 aa, Homo sapiens
  MAP TO AL109767.3; EXPRESSED IN ADULT LIVER, SIGNAL = 3.3; EXPRESSED IN FETAL LIVER, SIGNAL = 2.7; EXPRESSED IN LUNG, SIGNAL = 2.5; EXPRESSED IN BRAIN, SIGNAL =   3; EXPRESSED IN BONE MARROW, SIGNAL = 3.4; EXPRESSED IN PLACENTA, SIGNAL = 2.5; EXPRESSED IN HEART, SIGNAL = 1.5; SWISSPROT HIT: O68547, EVALUE 4.00e+00
QRLTMWRPPSSKKTRVWR

SEQ ID NO: 31399 - protein, 65 aa, Homo sapiens
  MAP TO AC010271.5; EXPRESSED IN PLACENTA, SIGNAL = 1.6; EXPRESSED IN ADULT LIVER, SIGNAL = 1.6; EXPRESSED IN HEART, SIGNAL =   2; SWISSPROT HIT: Q63425, EVALUE 1.00e-31
DQLLSARVFFENFKYEDALRLLQCAEPYKVSFCLKRTVPTGDLALRPGTVSGYEIKGPRAKVAKL

SEQ ID NO: 31400 - protein, 65 aa, Homo sapiens
  MAP TO AC010271.5; EXPRESSED IN PLACENTA, SIGNAL = 1.6; EXPRESSED IN ADULT LIVER, SIGNAL = 1.6; EXPRESSED IN HEART, SIGNAL =   2; SWISSPROT HIT: P06798, EVALUE 3.50e+00
GPAAECPSVLRELQVRGRTTPAAMRRALQSLLLPEAHCAHRGPGSAARDRVWLRDQGPAGQGGQA

SEQ ID NO: 31401 - protein, 40 aa, Homo sapiens
  MAP TO AC018427.3; EXPRESSED IN BONE MARROW, SIGNAL = 2.4; EXPRESSED IN PLACENTA, SIGNAL = 2.5; EXPRESSED IN ADULT LIVER, SIGNAL = 2.5; EXPRESSED IN HEART, SIGNAL =  11; EXPRESSED IN BRAIN, SIGNAL = 3.3; EXPRESSED IN LUNG, SIGNAL = 4.1; EXPRESSED IN FETAL LIVER, SIGNAL = 2.2
VNGLLLTSLSKGEQAEESTFVSLPPALQAPLLGSRPPAPM

SEQ ID NO: 31402 - protein, 33 aa, Homo sapiens
  MAP TO AC008427.5; EXPRESSED IN LUNG, SIGNAL = 0.87; EXPRESSED IN BRAIN, SIGNAL = 3.3; EXPRESSED IN HELA, SIGNAL = 2.4; EXPRESSED IN HEART, SIGNAL = 2.8; EXPRESSED IN ADULT LIVER, SIGNAL = 2.3; SWISSPROT HIT: O63066, EVALUE 3.00e+00
NSPVSTRRSPQCWTGSPTIARSGRRLLMSTMPR

SEQ ID NO: 31403 - protein, 49 aa, Homo sapiens
  MAP TO AC008427.5; EXPRESSED IN LUNG, SIGNAL = 0.87; EXPRESSED IN BRAIN, SIGNAL = 3.3; EXPRESSED IN HELA, SIGNAL = 2.4; EXPRESSED IN HEART, SIGNAL = 2.8; EXPRESSED IN ADULT LIVER, SIGNAL = 2.3; SWISSPROT HIT: P16499, EVALUE 8.00e-13
EFSRFHEEITPMLDGITNNRKEWKALADEYDAKMKVQEEKKQKQQSAKS

SEQ ID NO: 31404 - protein, 21 aa, Homo sapiens
  MAP TO AC005797.1; EXPRESSED IN ADULT LIVER, SIGNAL = 1.1; EXPRESSED IN FETAL LIVER, SIGNAL = 0.72; EXPRESSED IN PLACENTA, SIGNAL = 1.3
SLTLTTVCSGLAPAARPLVLV

SEQ ID NO: 31405 - protein, 77 aa, Homo sapiens
  MAP TO AC009087.4; EXPRESSED IN HELA, SIGNAL = 0.46; EXPRESSED IN ADULT LIVER, SIGNAL = 0.77; SWISSPROT HIT: P16720, EVALUE 3.50e-01
VGPQSTILRTQCLCNHLTFFASDFFVVPRTVNVEDTIKLFLRVTNNPVGVSLLASLLGFYVITVVWARKKDQADMQK

SEQ ID NO: 31406 - protein, 26 aa, Homo sapiens
  MAP TO AC007343.4; EXPRESSED IN LUNG, SIGNAL = 0.54; EXPRESSED IN FETAL LIVER, SIGNAL = 0.78; EXPRESSED IN PLACENTA, SIGNAL =   1; EXPRESSED IN BONE MARROW, SIGNAL = 0.61; EXPRESSED IN ADULT LIVER, SIGNAL = 1.2
HVAMSLVNAEPPSGAFTTVVYHIDLP

SEQ ID NO: 31407 - protein, 37 aa, Homo sapiens
  MAP TO AC010598.5; EXPRESSED IN ADULT LIVER, SIGNAL = 0.65; EXPRESSED IN LUNG, SIGNAL = 0.77; EXPRESSED IN BRAIN, SIGNAL = 0.42; SWISSPROT HIT: P55978, EVALUE 8.50e+00
ELKNVSETVHNKDKGDSSVLALELDSAGEISHAVIGS

SEQ ID NO: 31408 - protein, 74 aa, Homo sapiens
  MAP TO AC024561.4; EXPRESSED IN ADULT LIVER, SIGNAL = 0.76; EXPRESSED IN FETAL LIVER, SIGNAL = 2.3; EXPRESSED IN BRAIN, SIGNAL = 0.52; SWISSPROT HIT: P57682, EVALUE 2.00e-05
AGSLLTCHLSMPQMMAAALSWHRIWSLGILLVIQPVVVQPIPFMYMSHLQEPLMVSLRRRRRKRSSMEEMKNSS

SEQ ID NO: 31409 - protein, 60 aa, Homo sapiens
  MAP TO AC024561.4; EXPRESSED IN ADULT LIVER, SIGNAL = 0.76; EXPRESSED IN FETAL LIVER, SIGNAL = 2.3; EXPRESSED IN BRAIN, SIGNAL = 0.52
DGSCPLLAQNMEPGDLAGHPAGGGAAHPLYVHESPPGASHGLLEEEEEEEVFHGGDEKFQ

SEQ ID NO: 31410 - protein, 71 aa, Homo sapiens
  MAP TO AC016943.7; EXPRESSED IN PLACENTA, SIGNAL = 0.99; EXPRESSED IN ADULT LIVER, SIGNAL = 0.7; EXPRESSED IN LUNG, SIGNAL = 0.86; EXPRESSED IN HELA, SIGNAL = 0.52
KKKKKKKKKKKKKKRKRKRKRKEEEEEEEKEKKKRRRRRRRRRRRRRRRRRRRRRRRRRRRRRRRRKKKVI

SEQ ID NO: 31411 - protein, 72 aa, Homo sapiens
  MAP TO AC016943.7; EXPRESSED IN PLACENTA, SIGNAL = 0.99; EXPRESSED IN ADULT LIVER, SIGNAL = 0.7; EXPRESSED IN LUNG, SIGNAL = 0.86; EXPRESSED IN HELA, SIGNAL = 0.52
EEEEEEEEEEEEEEEEEEEEEEGGGGGGGEGEEEKKKKKKKKKKKKKKKKKKKKKKKKKKKKEKKKKEESHK

SEQ ID NO: 31412 - protein, 17 aa, Homo sapiens
  MAP TO AC009123.6; EXPRESSED IN FETAL LIVER, SIGNAL = 1.7; EXPRESSED IN ADULT LIVER, SIGNAL = 1.1; EXPRESSED IN HEART, SIGNAL = 1.5
WGRMAGRIAEPLPPPWS

SEQ ID NO: 31413 - protein, 55 aa, Homo sapiens
  MAP TO AC001456.1; EXPRESSED IN ADULT LIVER, SIGNAL = 0.47; EXPRESSED IN HELA, SIGNAL = 0.65
MGLFGISKRGNCSSPPGDFAREAFSGFPLIFTLNTCWDSGRTSCSSQKLHILMPA

SEQ ID NO: 31414 - protein, 34 aa, Homo sapiens
  MAP TO AC010615.5; EXPRESSED IN HEART, SIGNAL = 1.9; EXPRESSED IN ADULT LIVER, SIGNAL = 1.4; EXPRESSED IN LUNG, SIGNAL = 2.2; EXPRESSED IN FETAL LIVER, SIGNAL = 0.95; EXPRESSED IN BRAIN, SIGNAL = 1.4; EXPRESSED IN PLACENTA, SIGNAL = 1.1
SRQTLGSFQMILIGIQMSYRVEGKPSISLGEMSC

SEQ ID NO: 31415 - protein, 73 aa, Homo sapiens
  MAP TO AC010643.5; EXPRESSED IN BONE MARROW, SIGNAL = 0.91; EXPRESSED IN PLACENTA, SIGNAL = 0.77; EXPRESSED IN ADULT LIVER, SIGNAL = 1.2; EXPRESSED IN HEART, SIGNAL = 1.5; EXPRESSED IN BRAIN, SIGNAL = 0.81; SWISSPROT HIT: P23683, EVALUE 3.20e+00
YPGWRRRRPWYPSRRPRTASTQNSIPGWPSGSLSCHGGGPTRMPWRAATGSARSDTACRPSGMDSARGPTRTS

SEQ ID NO: 31416 - protein, 103 aa, Homo sapiens
  MAP TO AC010643.5; EXPRESSED IN BONE MARROW, SIGNAL = 0.91; EXPRESSED IN PLACENTA, SIGNAL = 0.77; EXPRESSED IN ADULT LIVER, SIGNAL = 1.2; EXPRESSED IN HEART, SIGNAL = 1.5; EXPRESSED IN BRAIN, SIGNAL = 0.81; SWISSPROT HIT: Q9UK85, EVALUE 2.00e-55
VPRMEEKEALVPIQKATDSFHTELHPRVAFWIIKLPRRRSHQDALEGGHWLSEKRHRLQAIRDGLRKGTHKDVLEEGTESSSHSRLSPRKTHLLYILRPSRQL

SEQ ID NO: 31417 - protein, 88 aa, Homo sapiens
  MAP TO AC010327.5; EXPRESSED IN FETAL LIVER, SIGNAL = 1.5; EXPRESSED IN BONE MARROW, SIGNAL = 0.89; EXPRESSED IN PLACENTA, SIGNAL = 0.97; EXPRESSED IN ADULT LIVER, SIGNAL = 1.3; EXPRESSED IN HELA, SIGNAL = 0.59; SWISSPROT HIT: P54755, EVALUE 2.00e-04
PNPVRNLRVEAQTNSSIALTWEVPDGPDPQNSTYGVEYTGDGGRAGTRSTAHTNITVDGLEPGCLYAFSMWVGKNGINSSRETRNATT

SEQ ID NO: 31418 - protein, 36 aa, Homo sapiens
  MAP TO AC010327.5; EXPRESSED IN FETAL LIVER, SIGNAL = 1.5; EXPRESSED IN BONE MARROW, SIGNAL = 0.89; EXPRESSED IN PLACENTA, SIGNAL = 0.97; EXPRESSED IN ADULT LIVER, SIGNAL = 1.3; EXPRESSED IN HELA, SIGNAL = 0.59
SQPSEEPESGGSDQQLHRPDLGGPRRPRPTELHLRG

SEQ ID NO: 31419 - protein, 150 aa, Homo sapiens
  MAP TO AC005329.1; EXPRESSED IN ADULT LIVER, SIGNAL = 0.81; EXPRESSED IN BRAIN, SIGNAL = 1.1
PPQPTTATGEEIGTRLSQMQGAVRDEAARTLVSGPWDSGGARGGGCSGPRCSLTFVSLASARLREQETRPWPGSSASHARTLGSVLSGAVGHTPEEAGVRAVGLGPLLVAVSGTRGGQYHRLRRGSAALHVRASYCLMENPPEPPSIVGS

SEQ ID NO: 31420 - protein, 151 aa, Homo sapiens
  MAP TO AC005329.1; EXPRESSED IN ADULT LIVER, SIGNAL = 0.81; EXPRESSED IN BRAIN, SIGNAL = 1.1
PSPADDSHRRGDRNTIVSDAGRCAGRSRKDSRIGPLGLGRCQRRRLLWTSVFTDLCFTCLCSTPRAGNPAVAWQLRLPCPHAGVCLVWSSGAHPGGGGGQGCRPWPPAGRCFGDSGRPVPPPEAGLSSVACTGLVLPHGKSSGAALHCGFL

SEQ ID NO: 31421 - protein, 49 aa, Homo sapiens
  MAP TO AC008993.3; EXPRESSED IN ADULT LIVER, SIGNAL =   1; SWISSPROT HIT: P34474, EVALUE 5.70e-01
MTPVRMQHSLAGQTYAVPFIQPDLRREEAVQQMADALQYLQKVSGDIFS

SEQ ID NO: 31422 - protein, 25 aa, Homo sapiens
  MAP TO AC000095.3; EXPRESSED IN ADULT LIVER, SIGNAL = 0.64; EXPRESSED IN LUNG, SIGNAL = 0.99
RSALLHQSATFFSRSRSSAVTPDPS

SEQ ID NO: 31423 - protein, 62 aa, Homo sapiens
  MAP TO AC010422.6; EXPRESSED IN LUNG, SIGNAL = 1.9; EXPRESSED IN FETAL LIVER, SIGNAL = 1.1; EXPRESSED IN HELA, SIGNAL = 0.63; EXPRESSED IN PLACENTA, SIGNAL = 0.96; EXPRESSED IN ADULT LIVER, SIGNAL =   1; SWISSPROT HIT: O00754, EVALUE 1.00e-21
VVIFPSSDSQAHPPELLFSASLPALGFSTYSVAQVPRWKPQARAPQPIPRRSWSPALTIENE

SEQ ID NO: 31424 - protein, 44 aa, Homo sapiens
  MAP TO AC010444.4; EXPRESSED IN BRAIN, SIGNAL = 1.7; EXPRESSED IN HELA, SIGNAL = 1.7; EXPRESSED IN PLACENTA, SIGNAL = 3.1; EXPRESSED IN HEART, SIGNAL = 2.2; EXPRESSED IN ADULT LIVER, SIGNAL = 2.2
HLTAANLDMEASDFTTDSQQDRLHGHVTCVVTHGPILESSPYLV

SEQ ID NO: 31425 - protein, 39 aa, Homo sapiens
  MAP TO AC002055.2; EXPRESSED IN LUNG, SIGNAL = 0.72; EXPRESSED IN PLACENTA, SIGNAL = 0.95; EXPRESSED IN ADULT LIVER, SIGNAL = 0.93; SWISSPROT HIT: Q40607, EVALUE 8.50e+00
SLRLDLHLYVLRGGCYTHAEVMLVAWTVKGEKWIWETFR

SEQ ID NO: 31426 - protein, 47 aa, Homo sapiens
  MAP TO AC010513.5; EXPRESSED IN LUNG, SIGNAL = 3.1; EXPRESSED IN BRAIN, SIGNAL = 1.7; EXPRESSED IN BONE MARROW, SIGNAL = 1.3; EXPRESSED IN PLACENTA, SIGNAL = 0.96; EXPRESSED IN ADULT LIVER, SIGNAL = 2.1; SWISSPROT HIT: P09284, EVALUE 6.30e+00
IIRHLEWTDAVQLTALVMGSEALQQQLLAMLVNYVTKELRAEIQYDD

SEQ ID NO: 31427 - protein, 64 aa, Homo sapiens
  MAP TO AC004826.3; EXPRESSED IN BRAIN, SIGNAL = 1.8; EXPRESSED IN BONE MARROW, SIGNAL = 1.4; EXPRESSED IN PLACENTA, SIGNAL = 2.3; EXPRESSED IN ADULT LIVER, SIGNAL = 1.8; SWISSPROT HIT: O95235, EVALUE 8.00e-34
TSHRWAQPDTAPLPVPANIRFSIWISFFEIYNELLYDLLEPPSQQRKRQTLRLCEDQNGNPYVK

SEQ ID NO: 31428 - protein, 39 aa, Homo sapiens
  MAP TO AC004826.3; EXPRESSED IN BRAIN, SIGNAL = 1.8; EXPRESSED IN BONE MARROW, SIGNAL = 1.4; EXPRESSED IN PLACENTA, SIGNAL = 2.3; EXPRESSED IN ADULT LIVER, SIGNAL = 1.8
KQVIDGHSQTLPHYLSRQTFASPSGSHSLRSTTNCFMTY

SEQ ID NO: 31429 - protein, 28 aa, Homo sapiens
  MAP TO AC004826.3; EXPRESSED IN BRAIN, SIGNAL = 1.8; EXPRESSED IN BONE MARROW, SIGNAL = 1.4; EXPRESSED IN PLACENTA, SIGNAL = 2.3; EXPRESSED IN ADULT LIVER, SIGNAL = 1.8
NKSSMGTARHCPTTCPGKHSLLHLDLIL

SEQ ID NO: 31430 - protein, 68 aa, Homo sapiens
  MAP TO AC000087.2; EXPRESSED IN PLACENTA, SIGNAL =   9; EXPRESSED IN ADULT LIVER, SIGNAL =  10; EXPRESSED IN HEART, SIGNAL = 6.4; EXPRESSED IN LUNG, SIGNAL = 7.2; SWISSPROT HIT: P24077, EVALUE 4.40e+00
HHLLCSHCRGAMWVCIPWPGPVPDNYCRGGILYVKIPVVFTMWTLGLSCLVIWGWAQWPTQHYGFCKM

SEQ ID NO: 31431 - protein, 27 aa, Homo sapiens
  MAP TO AC006505.1; EXPRESSED IN FETAL LIVER, SIGNAL = 1.7; EXPRESSED IN BRAIN, SIGNAL = 3.5; EXPRESSED IN BONE MARROW, SIGNAL = 2.4; EXPRESSED IN PLACENTA, SIGNAL = 2.7; EXPRESSED IN HEART, SIGNAL = 4.2; EXPRESSED IN ADULT LIVER, SIGNAL = 3.2; SWISSPROT HIT: O04425, EVALUE 1.80e+00
CAFLTYCARDSAIKAQTALHEQKTLPG

SEQ ID NO: 31432 - protein, 27 aa, Homo sapiens
  MAP TO AC006505.1; EXPRESSED IN FETAL LIVER, SIGNAL = 1.7; EXPRESSED IN BRAIN, SIGNAL = 3.5; EXPRESSED IN BONE MARROW, SIGNAL = 2.4; EXPRESSED IN PLACENTA, SIGNAL = 2.7; EXPRESSED IN HEART, SIGNAL = 4.2; EXPRESSED IN ADULT LIVER, SIGNAL = 3.2; SWISSPROT HIT: P76027, EVALUE 8.80e+00
AVPSSPTVPGIPPSKLRLPCTSRRPCP

SEQ ID NO: 31433 - protein, 27 aa, Homo sapiens
  MAP TO AC006505.1; EXPRESSED IN FETAL LIVER, SIGNAL = 1.7; EXPRESSED IN BRAIN, SIGNAL = 3.5; EXPRESSED IN BONE MARROW, SIGNAL = 2.4; EXPRESSED IN PLACENTA, SIGNAL = 2.7; EXPRESSED IN HEART, SIGNAL = 4.2; EXPRESSED IN ADULT LIVER, SIGNAL = 3.2
LCLPHLLCQGFRHQSSDCPARAEDLAR

SEQ ID NO: 31434 - protein, 39 aa, Homo sapiens
  MAP TO AC004858.2; EXPRESSED IN FETAL LIVER, SIGNAL = 2.3; EXPRESSED IN BONE MARROW, SIGNAL =   2; EXPRESSED IN PLACENTA, SIGNAL =   2; EXPRESSED IN ADULT LIVER, SIGNAL = 2.4
LLLTRPSQVPILPRPPLPHPIILLSPPLLIPGLAYSFVS

SEQ ID NO: 31435 - protein, 34 aa, Homo sapiens
  MAP TO AC006479.2; EXPRESSED IN ADULT LIVER, SIGNAL = 6.7; EXPRESSED IN HEART, SIGNAL =  11; EXPRESSED IN LUNG, SIGNAL = 3.4; EXPRESSED IN BRAIN, SIGNAL = 5.8; EXPRESSED IN FETAL LIVER, SIGNAL =  10; EXPRESSED IN BONE MARROW, SIGNAL = 5.1; EXPRESSED IN PLACENTA, SIGNAL = 9.4
KLQNKLHILKSKQQNKLHMLCSMQSHRIINLRNN

SEQ ID NO: 31436 - protein, 32 aa, Homo sapiens
  MAP TO AC004091.1; EXPRESSED IN ADULT LIVER, SIGNAL = 1.1; EXPRESSED IN HEART, SIGNAL =   2
RLSKLMSPTHLFLPALFKLRWKLIGWCPSTLK

SEQ ID NO: 31437 - protein, 24 aa, Homo sapiens
  MAP TO AC010598.5; EXPRESSED IN FETAL LIVER, SIGNAL =   1; EXPRESSED IN PLACENTA, SIGNAL = 1.1; EXPRESSED IN ADULT LIVER, SIGNAL = 1.2
SIYNVDHQRPPESHPSPGRHRDTP

SEQ ID NO: 31438 - protein, 31 aa, Homo sapiens
  MAP TO AC024126.1; EXPRESSED IN ADULT LIVER, SIGNAL = 3.1; EXPRESSED IN HEART, SIGNAL = 4.4; EXPRESSED IN BRAIN, SIGNAL = 2.4; EXPRESSED IN LUNG, SIGNAL = 1.7; EXPRESSED IN BONE MARROW, SIGNAL = 2.5
TGVRRPGLSGQGWMAAPGRSLWTRTFTGPMD

SEQ ID NO: 31439 - protein, 65 aa, Homo sapiens
  MAP TO AC024126.1; EXPRESSED IN ADULT LIVER, SIGNAL = 3.1; EXPRESSED IN HEART, SIGNAL = 4.4; EXPRESSED IN BRAIN, SIGNAL = 2.4; EXPRESSED IN LUNG, SIGNAL = 1.7; EXPRESSED IN BONE MARROW, SIGNAL = 2.5; SWISSPROT HIT: Q07954, EVALUE 1.00e-18
YMYWTDWGETPRIERAGMDGSTRKIIVDSDIYWPNGLTIDLEEQKLYWADAKLSFIHRANLDGSF

SEQ ID NO: 31440 - protein, 63 aa, Homo sapiens
  MAP TO AC006189.1; EXPRESSED IN HELA, SIGNAL = 0.97; EXPRESSED IN BRAIN, SIGNAL = 0.79; EXPRESSED IN PLACENTA, SIGNAL = 0.88; EXPRESSED IN ADULT LIVER, SIGNAL = 0.92; EXPRESSED IN FETAL LIVER, SIGNAL = 0.65; SWISSPROT HIT: P54317, EVALUE 2.00e-20
KMFEVEKVNCICVDWRHGSRAMYTQAVQNIRVVGAETAFLIQALSVKPCLGPVLWVGVREGQG

SEQ ID NO: 31441 - protein, 140 aa, Homo sapiens
  MAP TO AC040171.3; EXPRESSED IN BONE MARROW, SIGNAL =   1; EXPRESSED IN ADULT LIVER, SIGNAL = 0.92; SWISSPROT HIT: P03356, EVALUE 2.00e-21
SDNGPAFTSQITQAVSQALGIQWNLHIAYHPQSSGKVEWTNGLLKTHLTKLSLQLKKDWTVLLPLALLRIRACPRDATGYSPFELLYGRTFLLGPNLFTDTSPLGDYLPVLQQARQEIPQTANLLLLTPDPQPYEDTLAG

SEQ ID NO: 31442 - protein, 86 aa, Homo sapiens
  MAP TO AC016543.5; EXPRESSED IN HEART, SIGNAL = 2.4; EXPRESSED IN FETAL LIVER, SIGNAL = 3.1; EXPRESSED IN BRAIN, SIGNAL = 3.7; EXPRESSED IN ADULT LIVER, SIGNAL =   4; SWISSPROT HIT: P79194, EVALUE 7.70e+00
AFGFRSQIDLHLQRLPVGPEPPILQMPQEGACRGDPGPPSGQDPSQRHPAGQSPRASLGSRTSWSDRSDFPSLPSDATHAKQPKRQ

SEQ ID NO: 31443 - protein, 146 aa, Homo sapiens
  MAP TO AC016778.2; EXPRESSED IN PLACENTA, SIGNAL =   6; EXPRESSED IN ADULT LIVER, SIGNAL = 5.7; EXPRESSED IN BRAIN, SIGNAL = 5.9; SWISSPROT HIT: P24024, EVALUE 7.90e-01
GLGALCPSFSGVAERDQCRARAVASEGASLKPWQLPHGVEPVGAQKSRTGVWEPPPRFQRMYGNAWMSRQKYAVGAGLSWRTSAKAVWKGNVGSQPPYRVPTGALPSGAVRRGHPPDTRNDRSIDSLHCVPGKATNTQCQPMKAAG

SEQ ID NO: 31444 - protein, 42 aa, Homo sapiens
  MAP TO AC005947.1; EXPRESSED IN BRAIN, SIGNAL = 2.5; EXPRESSED IN PLACENTA, SIGNAL =   2; EXPRESSED IN ADULT LIVER, SIGNAL =   2; EXPRESSED IN LUNG, SIGNAL =   2; EXPRESSED IN FETAL LIVER, SIGNAL = 1.2
GRRRPEKDHLCHREEAGSDACGHCGDRETQGDNSIHSRRNGW

SEQ ID NO: 31445 - protein, 19 aa, Homo sapiens
  MAP TO AC008455.5; EXPRESSED IN ADULT LIVER, SIGNAL = 1.5; EXPRESSED IN BONE MARROW, SIGNAL = 0.47; EXPRESSED IN BRAIN, SIGNAL = 1.3
CMLILPYPQLMCGQPAMLA

SEQ ID NO: 31446 - protein, 114 aa, Homo sapiens
  MAP TO AC008455.5; EXPRESSED IN ADULT LIVER, SIGNAL = 1.5; EXPRESSED IN BONE MARROW, SIGNAL = 0.47; EXPRESSED IN BRAIN, SIGNAL = 1.3; SWISSPROT HIT: O32186, EVALUE 3.70e+00
HAHPTIPPADVWAACYAGMNAHRNTGNLIPTGALPLLYCYHAPPAGCCHPAPSGAPPQLTHGHTAMLPQLLSHKSDDGSCCHHPNKELWLAFPHRSVVDNIEHEHFGPSSAADA

SEQ ID NO: 31447 - protein, 85 aa, Homo sapiens
  MAP TO AC009003.7; EXPRESSED IN BONE MARROW, SIGNAL = 1.7; EXPRESSED IN PLACENTA, SIGNAL = 1.6; EXPRESSED IN ADULT LIVER, SIGNAL = 1.6; EXPRESSED IN FETAL LIVER, SIGNAL = 2.5; EXPRESSED IN BRAIN, SIGNAL = 2.1; SWISSPROT HIT: Q9U969, EVALUE 9.00e-05
DVSLHFVLWGCLHVYQRMIDKAEDVCLFVAQPGELVGQLAVLTGEPLIFTLRAQRDCTFLRISKSDFYEYDSPKLECGWHSEDPN

SEQ ID NO: 31448 - protein, 17 aa, Homo sapiens
  MAP TO AC007782.20; EXPRESSED IN LUNG, SIGNAL = 1.1; EXPRESSED IN HELA, SIGNAL = 0.79; EXPRESSED IN FETAL LIVER, SIGNAL = 0.41; EXPRESSED IN BONE MARROW, SIGNAL = 0.52; EXPRESSED IN PLACENTA, SIGNAL = 0.91; EXPRESSED IN ADULT LIVER, SIGNAL = 0.76
WTICGEPMNIMKLISCS

SEQ ID NO: 31449 - protein, 49 aa, Homo sapiens
  MAP TO AC016940.7; EXPRESSED IN PLACENTA, SIGNAL =  10; EXPRESSED IN ADULT LIVER, SIGNAL = 9.7; EXPRESSED IN BRAIN, SIGNAL = 9.3; EXPRESSED IN BONE MARROW, SIGNAL = 6.9
RVLLPSLLSKRLPSPPREDEEKSGCQVCTKTSGGGQARSCWILSGTSRH

SEQ ID NO: 31450 - protein, 57 aa, Homo sapiens
  MAP TO AC002321.1; EXPRESSED IN PLACENTA, SIGNAL = 1.9; EXPRESSED IN ADULT LIVER, SIGNAL = 2.1; EXPRESSED IN HEART, SIGNAL = 3.2; EXPRESSED IN HELA, SIGNAL = 2.5; EXPRESSED IN FETAL LIVER, SIGNAL = 2.6
ARMCPRLSHLSPLQTATSRGLLSPGTRMTKRLTPTSPPRSSSRLTPSLTSCWAQALT

SEQ ID NO: 31451 - protein, 123 aa, Homo sapiens
  MAP TO AC002321.1; EXPRESSED IN PLACENTA, SIGNAL = 1.9; EXPRESSED IN ADULT LIVER, SIGNAL = 2.1; EXPRESSED IN HEART, SIGNAL = 3.2; EXPRESSED IN HELA, SIGNAL = 2.5; EXPRESSED IN FETAL LIVER, SIGNAL = 2.6; SWISSPROT HIT: Q07282, EVALUE 1.50e+00
RNVTGTPLTGDKDDEEVDTHFASQEFFSANAISDQLLGAGSDLKDFTLNETVNSIFAQGAPRSSLAESFFVDYEENEGAGPYLLNGSYLELSSDRVANSSSEAPFPNVSTSLLTSAGNRTHKA

SEQ ID NO: 31452 - protein, 24 aa, Homo sapiens
  MAP TO AC008821.4; EXPRESSED IN BONE MARROW, SIGNAL = 1.6; EXPRESSED IN ADULT LIVER, SIGNAL = 1.4; EXPRESSED IN FETAL LIVER, SIGNAL = 1.7; EXPRESSED IN HELA, SIGNAL =   2
LVPITMKKNTDVNIFITSWLTSKG

SEQ ID NO: 31453 - protein, 38 aa, Homo sapiens
  MAP TO AC008821.4; EXPRESSED IN BONE MARROW, SIGNAL = 1.6; EXPRESSED IN ADULT LIVER, SIGNAL = 1.4; EXPRESSED IN FETAL LIVER, SIGNAL = 1.7; EXPRESSED IN HELA, SIGNAL =   2; SWISSPROT HIT: O00472, EVALUE 1.00e-17
SSPNYHEEKYRCEYLHNKLAHIKRLIGEFDQQQAESWS

SEQ ID NO: 31454 - protein, 133 aa, Homo sapiens
  MAP TO AC010168.6; EXPRESSED IN HELA, SIGNAL = 4.5; EXPRESSED IN BONE MARROW, SIGNAL = 0.91; EXPRESSED IN PLACENTA, SIGNAL = 0.46; EXPRESSED IN ADULT LIVER, SIGNAL = 0.56; SWISSPROT HIT: P02304, EVALUE 3.00e-40
SASRDYKPWSATGNHSGQPDFLLSRRCDFRMSGRGKGGKGLGKGGAKRHRKVLRDNIQGITKPAIRRLARRGGVKRISGLIYEETRGVLKVFLENVIRDAVTYTEHAKRKTVTAMDVVYALKRQGRTLYGFGG

SEQ ID NO: 31455 - protein, 66 aa, Homo sapiens
  MAP TO AC004202.1; EXPRESSED IN ADULT LIVER, SIGNAL = 0.75; EXPRESSED IN HEART, SIGNAL = 1.1; EXPRESSED IN HELA, SIGNAL = 0.81
GRTTSGPPNHHSSAPSHSLFRASSAGKVTFPVCLLASYDEISGQGASSQDTKTFDVALSEELHAAL

SEQ ID NO: 31456 - protein, 66 aa, Homo sapiens
  MAP TO AC004202.1; EXPRESSED IN ADULT LIVER, SIGNAL = 0.75; EXPRESSED IN HEART, SIGNAL = 1.1; EXPRESSED IN HELA, SIGNAL = 0.81; SWISSPROT HIT: P26019, EVALUE 9.20e+00
AAELHRGHQITTLQPHPTPCFGPRLLGKSLFQYVSWPLMMRFLVKERALRIRRHLTLRCPRSSMRH

SEQ ID NO: 31457 - protein, 41 aa, Homo sapiens
  MAP TO AL109940.18; EXPRESSED IN FETAL LIVER, SIGNAL = 2.3; EXPRESSED IN BRAIN, SIGNAL = 4.4; EXPRESSED IN PLACENTA, SIGNAL = 2.9; EXPRESSED IN HEART, SIGNAL =   3; EXPRESSED IN ADULT LIVER, SIGNAL = 2.3
TPGGYANVALKTTLFTELQLWPDTAGLQGHVGAQASLPPEE

SEQ ID NO: 31458 - protein, 37 aa, Homo sapiens
  MAP TO AC016627.5; EXPRESSED IN PLACENTA, SIGNAL = 3.1; EXPRESSED IN ADULT LIVER, SIGNAL = 2.3; EXPRESSED IN HEART, SIGNAL = 2.5; EXPRESSED IN BRAIN, SIGNAL = 4.4; EXPRESSED IN FETAL LIVER, SIGNAL = 3.5; EXPRESSED IN BONE MARROW, SIGNAL =   2; EXPRESSED IN LUNG, SIGNAL = 2.1
MAEGLKEGPQIKNRMLSDKAITPGENEVEEALLLWGG

SEQ ID NO: 31459 - protein, 115 aa, Homo sapiens
  MAP TO AC004826.3; EXPRESSED IN BRAIN, SIGNAL =   4; EXPRESSED IN LUNG, SIGNAL = 2.6; EXPRESSED IN ADULT LIVER, SIGNAL = 3.6; EXPRESSED IN PLACENTA, SIGNAL = 3.4; SWISSPROT HIT: O95235, EVALUE 1.00e-10
SINSNSDHRCGKPHLQDNDETGKGDKVVKMSMWVGMIVEPKSSCTETFEVKWGSVIIVPRNYCLPICSEVTAEINLWFWAGILPQVPSEDSMEKVKVYLRVRPLLPSELERQEDQ

SEQ ID NO: 31460 - protein, 43 aa, Homo sapiens
  MAP TO AC000028.1; EXPRESSED IN BONE MARROW, SIGNAL = 1.9; EXPRESSED IN ADULT LIVER, SIGNAL = 1.6; EXPRESSED IN HEART, SIGNAL = 1.5; EXPRESSED IN BRAIN, SIGNAL = 1.9; SWISSPROT HIT: Q12999, EVALUE 4.40e-01
LVSLLLIGVAAWGKGLGLVSSIHIIGGVIAVGVFLLLIAVAGL

SEQ ID NO: 31461 - protein, 59 aa, Homo sapiens
  MAP TO AC018846.2; EXPRESSED IN ADULT LIVER, SIGNAL = 1.1; EXPRESSED IN HEART, SIGNAL = 1.6; EXPRESSED IN LUNG, SIGNAL = 0.86; EXPRESSED IN BRAIN, SIGNAL = 1.2; EXPRESSED IN FETAL LIVER, SIGNAL = 1.8; SWISSPROT HIT: P37222, EVALUE 4.70e+00
CFCYYNINTLDSLVYKQQEFISHISGVWEVEDQGTEKFGVGEGLFLIDDTFYVGLHSRR

SEQ ID NO: 31462 - protein, 77 aa, Homo sapiens
  MAP TO AC004181.1; EXPRESSED IN BONE MARROW, SIGNAL = 1.9; EXPRESSED IN ADULT LIVER, SIGNAL = 1.6; EXPRESSED IN HEART, SIGNAL = 3.3; EXPRESSED IN FETAL LIVER, SIGNAL = 2.8; SWISSPROT HIT: P51802, EVALUE 4.20e+00
VGAFGTSIPDTLLLPTHISLHPSGTSVDVSRQQRSTVARRGNADGTQRWMAAAEAAGKPDQEAEDQTSLFFRSRFFS

SEQ ID NO: 31463 - protein, 29 aa, Homo sapiens
  MAP TO AC004181.1; EXPRESSED IN BONE MARROW, SIGNAL = 1.9; EXPRESSED IN ADULT LIVER, SIGNAL = 1.6; EXPRESSED IN HEART, SIGNAL = 3.3; EXPRESSED IN FETAL LIVER, SIGNAL = 2.8
GWGPLAPQSPIPYSFPPTSPCTHLEPRLM

SEQ ID NO: 31464 - protein, 59 aa, Homo sapiens
  MAP TO AC007162.1; EXPRESSED IN HEART, SIGNAL = 1.8; EXPRESSED IN ADULT LIVER, SIGNAL = 1.2; EXPRESSED IN FETAL LIVER, SIGNAL = 0.83; EXPRESSED IN BRAIN, SIGNAL = 2.1
WRSVRPCAPGWPSWCRGSSSAWAAPSTSRASSAAATPCGPRCRVKGNRRRWRSSRPSWT

SEQ ID NO: 31465 - protein, 63 aa, Homo sapiens
  MAP TO AC007162.1; EXPRESSED IN HEART, SIGNAL = 1.8; EXPRESSED IN ADULT LIVER, SIGNAL = 1.2; EXPRESSED IN FETAL LIVER, SIGNAL = 0.83; EXPRESSED IN BRAIN, SIGNAL = 2.1; SWISSPROT HIT: Q99758, EVALUE 5.00e-31
MEECEALCTRLAIMVQGQFKCLGSPQHLKSKFGSGYSLRAKVQSEGQQEALEEFKAFVDLTFP

SEQ ID NO: 31466 - protein, 53 aa, Homo sapiens
  MAP TO AC005321.1; EXPRESSED IN ADULT LIVER, SIGNAL = 0.44; EXPRESSED IN HELA, SIGNAL = 0.56; SWISSPROT HIT: P21827, EVALUE 8.10e+00
MLLGHHRALPCWGADEIPQSLPLRSASNVWRWGVGQQGPVARPRADKPEAEEN

SEQ ID NO: 31467 - protein, 40 aa, Homo sapiens
  MAP TO AC022336.12; EXPRESSED IN FETAL LIVER, SIGNAL = 0.71; EXPRESSED IN BRAIN, SIGNAL = 1.2; EXPRESSED IN BONE MARROW, SIGNAL = 1.3; EXPRESSED IN PLACENTA, SIGNAL = 0.75; EXPRESSED IN ADULT LIVER, SIGNAL =   1; SWISSPROT HIT: O75962, EVALUE 3.40e-01
MKKKEQAAHEAALLQHLQHPQYITLHDTYESPTSYILILE

SEQ ID NO: 31468 - protein, 60 aa, Homo sapiens
  MAP TO AL109835.13; EXPRESSED IN PLACENTA, SIGNAL = 3.9; EXPRESSED IN HEART, SIGNAL = 3.5; EXPRESSED IN ADULT LIVER, SIGNAL = 3.5; EXPRESSED IN BRAIN, SIGNAL = 2.6; EXPRESSED IN FETAL LIVER, SIGNAL = 5.1; EXPRESSED IN BONE MARROW, SIGNAL = 3.3; SWISSPROT HIT: P08858, EVALUE 8.00e+00
NIVTMSDGSAPAEIKKSKWAPPFLLMRMYRRAVVEQRHLIFMLLGASACPTSGPHGAPNQ

SEQ ID NO: 31469 - protein, 20 aa, Homo sapiens
  MAP TO AL023880.1; EXPRESSED IN BONE MARROW, SIGNAL =   2; EXPRESSED IN ADULT LIVER, SIGNAL = 1.9; EXPRESSED IN PLACENTA, SIGNAL = 2.3; EXPRESSED IN BRAIN, SIGNAL = 1.8
ILDQKGTLSASPFGIHQHIL

SEQ ID NO: 31470 - protein, 43 aa, Homo sapiens
  MAP TO AL023880.1; EXPRESSED IN BONE MARROW, SIGNAL =   2; EXPRESSED IN ADULT LIVER, SIGNAL = 1.9; EXPRESSED IN PLACENTA, SIGNAL = 2.3; EXPRESSED IN BRAIN, SIGNAL = 1.8; SWISSPROT HIT: O00754, EVALUE 4.90e+00
IGSERYTFSFTIRDSPAHFVNAASWGNEDYIKSLSDSFRVGDC

SEQ ID NO: 31471 - protein, 74 aa, Homo sapiens
  MAP TO AC020663.1; EXPRESSED IN ADULT LIVER, SIGNAL = 1.6; EXPRESSED IN FETAL LIVER, SIGNAL = 1.3; EXPRESSED IN HELA, SIGNAL = 1.7; EXPRESSED IN BRAIN, SIGNAL = 1.4; SWISSPROT HIT: P25992, EVALUE 2.60e+00
MSEPHRVQFTSLPGSLNPAFLKKSRKEEAGAGEQHQDCEPAAAAVRITLTLFEPDHKRCPEFFYPELVKNIRGK

SEQ ID NO: 31472 - protein, 17 aa, Homo sapiens
  MAP TO AC020893.4; EXPRESSED IN ADULT LIVER, SIGNAL = 0.88; EXPRESSED IN LUNG, SIGNAL = 1.1; EXPRESSED IN HELA, SIGNAL = 1.1; EXPRESSED IN BRAIN, SIGNAL = 0.91; EXPRESSED IN PLACENTA, SIGNAL = 1.3
LKKKLQELWKLSKPFRA

SEQ ID NO: 31473 - protein, 51 aa, Homo sapiens
  MAP TO AC020893.4; EXPRESSED IN ADULT LIVER, SIGNAL = 0.88; EXPRESSED IN LUNG, SIGNAL = 1.1; EXPRESSED IN HELA, SIGNAL = 1.1; EXPRESSED IN BRAIN, SIGNAL = 0.91; EXPRESSED IN PLACENTA, SIGNAL = 1.3; SWISSPROT HIT: P54497, EVALUE 4.30e-01
TKEEVAGTLEAVQTIQSITQALQKSKENYNAKCVEQERLKKEGATQREIEK

SEQ ID NO: 31474 - protein, 26 aa, Homo sapiens
  MAP TO AC000392.1; EXPRESSED IN BRAIN, SIGNAL = 0.61; EXPRESSED IN BONE MARROW, SIGNAL = 0.59; EXPRESSED IN ADULT LIVER, SIGNAL = 0.51; SWISSPROT HIT: Q9RSK7, EVALUE 9.40e-02
VLLLGPVGSGKSLQAALLAQKYRLVN

SEQ ID NO: 31475 - protein, 18 aa, Homo sapiens
  MAP TO AC004213.1; EXPRESSED IN PLACENTA, SIGNAL = 0.49; EXPRESSED IN ADULT LIVER, SIGNAL = 0.5; EXPRESSED IN BRAIN, SIGNAL = 0.93; EXPRESSED IN LUNG, SIGNAL = 1.5
GFSGRSCLRRLLRGPSPS

SEQ ID NO: 31476 - protein, 84 aa, Homo sapiens
  MAP TO AC024077.2; EXPRESSED IN PLACENTA, SIGNAL = 1.5e+02; EXPRESSED IN ADULT LIVER, SIGNAL = 0.65; EXPRESSED IN FETAL LIVER, SIGNAL = 0.6; EXPRESSED IN LUNG, SIGNAL = 0.62; EXPRESSED IN HELA, SIGNAL = 0.58; SWISSPROT HIT: P11465, EVALUE 7.00e-45
GPDLPRIHPSYTNYRSGDNLYLSCFANSNPPAQYSWTINGKFQQSGQNLFIPQITTKHSGLYVCSVRNSATGEESSTSLTVKVS

SEQ ID NO: 31477 - protein, 79 aa, Homo sapiens
  MAP TO AC024077.2; EXPRESSED IN PLACENTA, SIGNAL = 1.5e+02; EXPRESSED IN ADULT LIVER, SIGNAL = 0.65; EXPRESSED IN FETAL LIVER, SIGNAL = 0.6; EXPRESSED IN LUNG, SIGNAL = 0.62; EXPRESSED IN HELA, SIGNAL = 0.58
MVQTSPEFTLHTPITVQEITSTCLASRTLTHRHSILGQLMGSFSNQDKICLSPKLLQSIAGSMFALFVTQPLARKAPHR

SEQ ID NO: 31478 - protein, 76 aa, Homo sapiens
  MAP TO AC020908.5; EXPRESSED IN HEART, SIGNAL = 0.98; EXPRESSED IN BRAIN, SIGNAL = 0.66; EXPRESSED IN PLACENTA, SIGNAL =   1; EXPRESSED IN BONE MARROW, SIGNAL = 0.69; EXPRESSED IN ADULT LIVER, SIGNAL = 0.99; SWISSPROT HIT: P51306, EVALUE 3.80e+00
ILGSRDFDICVRDMIPADVPEHFRGRVSIWAMVTSVDGSQQVAFDDSTPVQRQLVDIRYSKDTRKQFKPGLAYVGK

SEQ ID NO: 31479 - protein, 42 aa, Homo sapiens
  MAP TO AC004754.1; EXPRESSED IN ADULT LIVER, SIGNAL = 4.1; EXPRESSED IN HEART, SIGNAL = 2.7; EXPRESSED IN BRAIN, SIGNAL = 3.2
FLKLWLRLLVFLMTAVEKNIGIFLLLMSKSLDLSHGVFICKL

SEQ ID NO: 31480 - protein, 60 aa, Homo sapiens
  MAP TO AL035450.1; EXPRESSED IN BRAIN, SIGNAL =  10; EXPRESSED IN LUNG, SIGNAL =  18; EXPRESSED IN FETAL LIVER, SIGNAL = 9.2; EXPRESSED IN PLACENTA, SIGNAL = 8.6; EXPRESSED IN ADULT LIVER, SIGNAL =  12; EXPRESSED IN HELA, SIGNAL = 7.3; EXPRESSED IN BONE MARROW, SIGNAL =  14; EXPRESSED IN HEART, SIGNAL = 4.5; SWISSPROT HIT: P40051, EVALUE 2.00e-07
FTAPQAELYEAVLEIQRDCLALCFPGTSLENIYSMMLTLIGQKLKDLGIMKNIKENNAFK

SEQ ID NO: 31481 - protein, 87 aa, Homo sapiens
  MAP TO AL031600.4; EXPRESSED IN BRAIN, SIGNAL = 4.7; EXPRESSED IN FETAL LIVER, SIGNAL = 4.1; EXPRESSED IN LUNG, SIGNAL = 1.3; EXPRESSED IN BONE MARROW, SIGNAL =   3; EXPRESSED IN PLACENTA, SIGNAL = 2.8; EXPRESSED IN ADULT LIVER, SIGNAL = 2.1; EXPRESSED IN HEART, SIGNAL = 5.9
QGREEQHTRWGPREGSHVVGVAALTLPSPDTDQGRGGGGGGDGRRGGQSEEMEGGAEWGEGAQACAGRSGAAPQGSGGEEALVCLLL

SEQ ID NO: 31482 - protein, 64 aa, Homo sapiens
  MAP TO AF187320.1; EXPRESSED IN ADULT LIVER, SIGNAL = 3.7; EXPRESSED IN HEART, SIGNAL = 3.5; EXPRESSED IN FETAL LIVER, SIGNAL = 6.8; EXPRESSED IN PLACENTA, SIGNAL = 4.1; SWISSPROT HIT: P02786, EVALUE 1.00e-32
FMIGYLGYCKGVEPKTECERLAGTESPVREEPGEDFPAARRLYWDDLKRKLSEKLDSTDFTGTI

SEQ ID NO: 31483 - protein, 23 aa, Homo sapiens
  MAP TO AL096870.3; EXPRESSED IN LUNG, SIGNAL = 1.8; EXPRESSED IN PLACENTA, SIGNAL = 1.2; EXPRESSED IN ADULT LIVER, SIGNAL = 3.9
WSAVIWPGTGEAQAQQGHRPIHL

SEQ ID NO: 31484 - protein, 30 aa, Homo sapiens
  MAP TO AC016749.4; EXPRESSED IN FETAL LIVER, SIGNAL = 1.6; EXPRESSED IN BONE MARROW, SIGNAL = 0.79; EXPRESSED IN PLACENTA, SIGNAL = 1.3; EXPRESSED IN ADULT LIVER, SIGNAL = 0.88; EXPRESSED IN HEART, SIGNAL = 1.6
CNNGSSKPSLRLPFQKFKRLSWGWPFQMFC

SEQ ID NO: 31485 - protein, 37 aa, Homo sapiens
  MAP TO AC005163.2; EXPRESSED IN HEART, SIGNAL = 2.2; EXPRESSED IN BRAIN, SIGNAL = 1.9; EXPRESSED IN HELA, SIGNAL = 2.3; EXPRESSED IN PLACENTA, SIGNAL = 2.1; EXPRESSED IN ADULT LIVER, SIGNAL = 1.9
PWASSPSWRNSASSPKPPMPRSRQPCTTTTWASPATS

SEQ ID NO: 31486 - protein, 60 aa, Homo sapiens
  MAP TO AC005163.2; EXPRESSED IN HEART, SIGNAL = 2.2; EXPRESSED IN BRAIN, SIGNAL = 1.9; EXPRESSED IN HELA, SIGNAL = 2.3; EXPRESSED IN PLACENTA, SIGNAL = 2.1; EXPRESSED IN ADULT LIVER, SIGNAL = 1.9; SWISSPROT HIT: P04461, EVALUE 8.00e-21
PMGIFSILEEQCVFPKATDATFKAALYDNHLGKSSNFLKPKGGKSKGPEVHFELVHYAGT

SEQ ID NO: 31487 - protein, 36 aa, Homo sapiens
  MAP TO AC005582.1; EXPRESSED IN BONE MARROW, SIGNAL = 0.46; EXPRESSED IN ADULT LIVER, SIGNAL = 0.62; EXPRESSED IN FETAL LIVER, SIGNAL = 0.41
FFQTGGVAPAGCGNPGADQKRKCEDSVRSHFAINQQ

SEQ ID NO: 31488 - protein, 28 aa, Homo sapiens
  MAP TO AC004400.1; EXPRESSED IN BONE MARROW, SIGNAL = 0.71; EXPRESSED IN PLACENTA, SIGNAL =   1; EXPRESSED IN HEART, SIGNAL = 1.4; EXPRESSED IN ADULT LIVER, SIGNAL = 0.65; EXPRESSED IN BRAIN, SIGNAL = 0.73; EXPRESSED IN FETAL LIVER, SIGNAL = 0.78
LHARGGADIPKGHAEVGAGGHSPAVSAG

SEQ ID NO: 31489 - protein, 29 aa, Homo sapiens
  MAP TO AC003111.1; EXPRESSED IN HELA, SIGNAL = 0.52; EXPRESSED IN ADULT LIVER, SIGNAL = 0.45; EXPRESSED IN LUNG, SIGNAL = 0.93
LDVTVLSGAAIGLLELLASTVVGCCGDTQ

SEQ ID NO: 31490 - protein, 44 aa, Homo sapiens
  MAP TO AL031709.10; EXPRESSED IN BRAIN, SIGNAL = 2.3; EXPRESSED IN ADULT LIVER, SIGNAL = 2.8; EXPRESSED IN PLACENTA, SIGNAL = 2.2; EXPRESSED IN HEART, SIGNAL = 2.6; EXPRESSED IN FETAL LIVER, SIGNAL = 3.4
GHEKLLRTLFEDAGYLKTPEENEPTQLEGGPDSLGFETLENCRK

SEQ ID NO: 31491 - protein, 47 aa, Homo sapiens
  MAP TO AF087017.1; EXPRESSED IN ADULT LIVER, SIGNAL = 1.8; EXPRESSED IN HELA, SIGNAL =   2; EXPRESSED IN BONE MARROW, SIGNAL = 1.1; EXPRESSED IN PLACENTA, SIGNAL = 1.9; SWISSPROT HIT: P33144, EVALUE 6.30e+00
LEATMGWSPAQPPSHLGCPAQDGQFQGVQAGALGAEEHKLLKSLWSS

SEQ ID NO: 31492 - protein, 46 aa, Homo sapiens
  MAP TO AC009320.7; EXPRESSED IN HEART, SIGNAL = 1.1; EXPRESSED IN BRAIN, SIGNAL = 0.95; EXPRESSED IN LUNG, SIGNAL = 0.78; EXPRESSED IN FETAL LIVER, SIGNAL = 0.71; EXPRESSED IN PLACENTA, SIGNAL =   1; EXPRESSED IN ADULT LIVER, SIGNAL = 0.99; SWISSPROT HIT: O43765, EVALUE 1.20e-01
GKYVSARAYYERALQLVPDSKLLKENLAKLDRLEKRLQEVREKDQT

SEQ ID NO: 31493 - protein, 22 aa, Homo sapiens
  MAP TO AC009320.7; EXPRESSED IN HEART, SIGNAL = 1.1; EXPRESSED IN BRAIN, SIGNAL = 0.95; EXPRESSED IN LUNG, SIGNAL = 0.78; EXPRESSED IN FETAL LIVER, SIGNAL = 0.71; EXPRESSED IN PLACENTA, SIGNAL =   1; EXPRESSED IN ADULT LIVER, SIGNAL = 0.99
ENMCLQELIMREPYSWFQTANC

SEQ ID NO: 31494 - protein, 76 aa, Homo sapiens
  MAP TO AL031719.10; EXPRESSED IN PLACENTA, SIGNAL = 2.9; EXPRESSED IN ADULT LIVER, SIGNAL = 3.8; EXPRESSED IN HEART, SIGNAL = 3.2; EXPRESSED IN BRAIN, SIGNAL = 4.2
FVLVIGLVTFYRIGPYTNLSWSCYLNIGACLLATLAAAMLIWNILHKREDCMAPRVIVISRSLTARFRRGLDNDYV

SEQ ID NO: 31495 - protein, 25 aa, Homo sapiens
  MAP TO AC008821.4; EXPRESSED IN BONE MARROW, SIGNAL = 0.82; EXPRESSED IN PLACENTA, SIGNAL = 1.7; EXPRESSED IN ADULT LIVER, SIGNAL = 1.2; EXPRESSED IN HEART, SIGNAL = 1.5; EXPRESSED IN BRAIN, SIGNAL = 1.1; EXPRESSED IN LUNG, SIGNAL = 0.93
GKECKFGKHLKLFQIQFLRGKGQPP

SEQ ID NO: 31496 - protein, 86 aa, Homo sapiens
  MAP TO AC008821.4; EXPRESSED IN BONE MARROW, SIGNAL = 0.82; EXPRESSED IN PLACENTA, SIGNAL = 1.7; EXPRESSED IN ADULT LIVER, SIGNAL = 1.2; EXPRESSED IN HEART, SIGNAL = 1.5; EXPRESSED IN BRAIN, SIGNAL = 1.1; EXPRESSED IN LUNG, SIGNAL = 0.93; SWISSPROT HIT: O00472, EVALUE 6.00e-43
KRVQIRKAPQAVSDTVPERKRSTPMNPANTIRKTHSSSTISQRPYRDRVIHLLALKAYKKPELLARLQKDGVNQKDKNSLGAILQQ

SEQ ID NO: 31497 - protein, 76 aa, Homo sapiens
  MAP TO AL118558.2; EXPRESSED IN HEART, SIGNAL = 4.9; EXPRESSED IN ADULT LIVER, SIGNAL = 3.8; EXPRESSED IN FETAL LIVER, SIGNAL = 4.3; EXPRESSED IN BRAIN, SIGNAL = 6.4; EXPRESSED IN PLACENTA, SIGNAL = 5.6; SWISSPROT HIT: Q9JHU4, EVALUE 1.00e-38
VMVACFEVFQTWDDEYEKLQVLLRDIVKRKREENLKMVWRINPAHRKLQARLDQMRKFRRQHEQLRAVIVRVLRPQ

SEQ ID NO: 31498 - protein, 20 aa, Homo sapiens
  MAP TO AC020728.4; EXPRESSED IN BONE MARROW, SIGNAL = 0.99; EXPRESSED IN PLACENTA, SIGNAL = 1.5; EXPRESSED IN ADULT LIVER, SIGNAL =   1; EXPRESSED IN BRAIN, SIGNAL = 0.89; EXPRESSED IN FETAL LIVER, SIGNAL = 1.6; EXPRESSED IN HELA, SIGNAL = 1.5
NVLMVNYNQNQLIMEKIREM

SEQ ID NO: 31499 - protein, 68 aa, Homo sapiens
  MAP TO AC020728.4; EXPRESSED IN BONE MARROW, SIGNAL = 0.99; EXPRESSED IN PLACENTA, SIGNAL = 1.5; EXPRESSED IN ADULT LIVER, SIGNAL =   1; EXPRESSED IN BRAIN, SIGNAL = 0.89; EXPRESSED IN FETAL LIVER, SIGNAL = 1.6; EXPRESSED IN HELA, SIGNAL = 1.5; SWISSPROT HIT: P42285, EVALUE 2.00e-20
FYDVALKVKVDTAEFIPNYLLFRKRFDGKLQSESTNNGKNKRDVDFEGTDEPIFGKKPRIEESITEDL

SEQ ID NO: 31500 - protein, 90 aa, Homo sapiens
  MAP TO AC024070.2; EXPRESSED IN BRAIN, SIGNAL = 0.86; EXPRESSED IN HELA, SIGNAL = 0.78; EXPRESSED IN FETAL LIVER, SIGNAL = 0.89; EXPRESSED IN BONE MARROW, SIGNAL = 0.76; EXPRESSED IN PLACENTA, SIGNAL = 0.94; EXPRESSED IN ADULT LIVER, SIGNAL = 0.93; SWISSPROT HIT: O88884, EVALUE 5.40e-01
HWCVISIPSGYERSRLKVTLPEEGRGALPFLVSVAISSGSCSDNNAAVPTVLEGATTVISAAAVLRDPHDGAREIILEAMTISAVAIAAE

SEQ ID NO: 31501 - protein, 19 aa, Homo sapiens
  MAP TO AC004790.1; EXPRESSED IN BRAIN, SIGNAL = 1.1; EXPRESSED IN BONE MARROW, SIGNAL = 0.8; EXPRESSED IN PLACENTA, SIGNAL = 0.87; EXPRESSED IN ADULT LIVER, SIGNAL =   1
WGSPGRRCLRAPGSGSDVL

SEQ ID NO: 31502 - protein, 70 aa, Homo sapiens
  MAP TO AF254983.1; EXPRESSED IN PLACENTA, SIGNAL = 1.1; EXPRESSED IN ADULT LIVER, SIGNAL = 0.9; EXPRESSED IN HEART, SIGNAL = 0.92
PPKTYTQDDVCLIESGMTQLQSLTVTVPRRKLSKPKLKLKIINQNSVAVLQTPPDIQSEHSRDGDMDDSR

SEQ ID NO: 31503 - protein, 28 aa, Homo sapiens
  MAP TO AC012398.4; EXPRESSED IN ADULT LIVER, SIGNAL = 0.85; EXPRESSED IN LUNG, SIGNAL = 0.84; EXPRESSED IN FETAL LIVER, SIGNAL = 0.66; EXPRESSED IN BONE MARROW, SIGNAL = 0.83; EXPRESSED IN PLACENTA, SIGNAL = 0.85
VVQVAPLRRESSKYSGITYQENNLDAKK

SEQ ID NO: 31504 - protein, 36 aa, Homo sapiens
  MAP TO AC010163.7; EXPRESSED IN BONE MARROW, SIGNAL = 0.5; EXPRESSED IN ADULT LIVER, SIGNAL = 0.69; EXPRESSED IN BRAIN, SIGNAL = 0.52
TAAVCHTASCLVHQCPQQVTLDSIPGAKCGPRVRLT

SEQ ID NO: 31505 - protein, 46 aa, Homo sapiens
  MAP TO AL031300.1; EXPRESSED IN ADULT LIVER, SIGNAL = 1.6; EXPRESSED IN PLACENTA, SIGNAL = 1.8; EXPRESSED IN HEART, SIGNAL = 1.9; EXPRESSED IN BONE MARROW, SIGNAL = 2.1
SKYGRLTQFWKMRRSGKSTWCFWESYFSLVRERHPLPYCWIIVVRI

SEQ ID NO: 31506 - protein, 130 aa, Homo sapiens
  MAP TO AF134576.1; EXPRESSED IN PLACENTA, SIGNAL = 1.9; EXPRESSED IN ADULT LIVER, SIGNAL = 1.1; EXPRESSED IN FETAL LIVER, SIGNAL = 1.6; SWISSPROT HIT: P43359, EVALUE 1.00e-56
QWVSIAQLLPTLLPVAVTRVVMSLEQKSQHCKPEEGLDTQEEALGLVGVQAATTEEQEAVSSSSPLVPGTLGEVPAAGSPGPLKSPQGASAIPTAIDFTLWRQSIKGSSNQEEEGPSTSPDPESVFRAAL

SEQ ID NO: 31507 - protein, 59 aa, Homo sapiens
  MAP TO AL031598.4; EXPRESSED IN ADULT LIVER, SIGNAL = 2.6; EXPRESSED IN PLACENTA, SIGNAL = 3.7; EXPRESSED IN HEART, SIGNAL = 3.8; EXPRESSED IN BRAIN, SIGNAL = 4.4; EXPRESSED IN FETAL LIVER, SIGNAL = 4.4; EXPRESSED IN BONE MARROW, SIGNAL = 5.9; SWISSPROT HIT: P51789, EVALUE 1.60e+00
SILCTEQPRKAQLSSLLTKQRVLQGLGRVAEGPPLQQAWGPPPGHVLITARVPEVPPLS

SEQ ID NO: 31508 - protein, 50 aa, Homo sapiens
  MAP TO AC008456.4; EXPRESSED IN BONE MARROW, SIGNAL = 0.88; EXPRESSED IN PLACENTA, SIGNAL = 0.87; EXPRESSED IN ADULT LIVER, SIGNAL = 0.95; EXPRESSED IN HELA, SIGNAL = 0.62; SWISSPROT HIT: O94823, EVALUE 4.00e-23
STMIDYWQMIFFNLFFTSLPPLVFGVLDKDISAETLLALPELYKSGQNSE

SEQ ID NO: 31509 - protein, 39 aa, Homo sapiens
  MAP TO AC008456.4; EXPRESSED IN BONE MARROW, SIGNAL = 0.88; EXPRESSED IN PLACENTA, SIGNAL = 0.87; EXPRESSED IN ADULT LIVER, SIGNAL = 0.95; EXPRESSED IN HELA, SIGNAL = 0.62
ELVTGCTWSPTHKAMLSACSATSTCSSGISSSVVSPAPP

SEQ ID NO: 31510 - protein, 54 aa, Homo sapiens
  MAP TO AC004191.1; EXPRESSED IN ADULT LIVER, SIGNAL = 0.7; EXPRESSED IN LUNG, SIGNAL = 0.55; EXPRESSED IN HELA, SIGNAL = 0.81; EXPRESSED IN FETAL LIVER, SIGNAL = 0.38; SWISSPROT HIT: P38479, EVALUE 8.10e+00
HTVVIEQEDSDTVWLVLYLQKFKCWLPRLLQLSDQGPKLDHLLRILDDTAVPPF

SEQ ID NO: 31511 - protein, 35 aa, Homo sapiens
  MAP TO AL033544.15; EXPRESSED IN ADULT LIVER, SIGNAL = 2.1; EXPRESSED IN PLACENTA, SIGNAL = 2.3; EXPRESSED IN HEART, SIGNAL = 1.2; EXPRESSED IN FETAL LIVER, SIGNAL = 2.6; EXPRESSED IN BRAIN, SIGNAL = 2.4; EXPRESSED IN LUNG, SIGNAL = 1.6; EXPRESSED IN HELA, SIGNAL = 2.2
TSSKSLPSALPSALPSALPSALPVLTRTPLEALPL

SEQ ID NO: 31512 - protein, 35 aa, Homo sapiens
  MAP TO AL033544.15; EXPRESSED IN ADULT LIVER, SIGNAL = 2.1; EXPRESSED IN PLACENTA, SIGNAL = 2.3; EXPRESSED IN HEART, SIGNAL = 1.2; EXPRESSED IN FETAL LIVER, SIGNAL = 2.6; EXPRESSED IN BRAIN, SIGNAL = 2.4; EXPRESSED IN LUNG, SIGNAL = 1.6; EXPRESSED IN HELA, SIGNAL = 2.2
NIFQEPAISSAISPAISSAISSASTDKDSLGGTSP

SEQ ID NO: 31513 - protein, 55 aa, Homo sapiens
  MAP TO AC008488.6; EXPRESSED IN PLACENTA, SIGNAL = 0.65; EXPRESSED IN ADULT LIVER, SIGNAL = 0.97; EXPRESSED IN BRAIN, SIGNAL = 0.89; SWISSPROT HIT: P19838, EVALUE 1.30e-02
MRQYMAAACQSDRFSFSVFLGKHGLTVIHLAAWSGSLEVMLMLVKAGADQRAKNQ

SEQ ID NO: 31514 - protein, 34 aa, Homo sapiens
  MAP TO AL118559.4; EXPRESSED IN HELA, SIGNAL = 1.1; EXPRESSED IN FETAL LIVER, SIGNAL = 1.3; EXPRESSED IN BONE MARROW, SIGNAL = 1.1; EXPRESSED IN PLACENTA, SIGNAL = 1.6; EXPRESSED IN ADULT LIVER, SIGNAL = 0.77; EXPRESSED IN HEART, SIGNAL = 1.3
SQGQRGHSPCPQGAQRQEGKEWQIPTFLSSQSAM

SEQ ID NO: 31515 - protein, 62 aa, Homo sapiens
  MAP TO AC007343.4; EXPRESSED IN HEART, SIGNAL = 1.7; EXPRESSED IN BRAIN, SIGNAL = 1.5; EXPRESSED IN FETAL LIVER, SIGNAL = 0.87; EXPRESSED IN PLACENTA, SIGNAL = 1.5; EXPRESSED IN ADULT LIVER, SIGNAL = 1.5; SWISSPROT HIT: O19113, EVALUE 4.20e-01
MHRDTAMNRTDAASQEQMIQATRRQLQQHVNKGKMCSSSVRTGEESNPVLWEPVGQKSLVSK

SEQ ID NO: 31516 - protein, 68 aa, Homo sapiens
  MAP TO AC000958.1; EXPRESSED IN BONE MARROW, SIGNAL = 1.5; EXPRESSED IN PLACENTA, SIGNAL = 1.3; EXPRESSED IN ADULT LIVER, SIGNAL = 1.3; EXPRESSED IN BRAIN, SIGNAL = 1.3; EXPRESSED IN FETAL LIVER, SIGNAL = 1.1; SWISSPROT HIT: Q90988, EVALUE 1.70e-02
YIKALETLRQVRQTQGQKVKEYQMELKYLKQYKEKACEIRDQITSKEAQLTSSKEIVKSYENELDPLK

SEQ ID NO: 31517 - protein, 91 aa, Homo sapiens
  MAP TO AC005626.1; EXPRESSED IN ADULT LIVER, SIGNAL = 3.4; EXPRESSED IN FETAL LIVER, SIGNAL = 4.4; EXPRESSED IN BONE MARROW, SIGNAL = 5.8; EXPRESSED IN BRAIN, SIGNAL = 3.3; EXPRESSED IN PLACENTA, SIGNAL = 4.3; SWISSPROT HIT: P16573, EVALUE 4.00e-25
SVAQPSIQASSTTVTEKGSVVLTCHTNNTGTSFQWIFNNQRLQVTKRMKLSWFNHMLTIDPIRQEDAGEYQCEVSNPVSSNRSDPLKLTVK

SEQ ID NO: 31518 - protein, 27 aa, Homo sapiens
  MAP TO AC005626.1; EXPRESSED IN ADULT LIVER, SIGNAL = 3.4; EXPRESSED IN FETAL LIVER, SIGNAL = 4.4; EXPRESSED IN BONE MARROW, SIGNAL = 5.8; EXPRESSED IN BRAIN, SIGNAL = 3.3; EXPRESSED IN PLACENTA, SIGNAL = 4.3
VSGSALHPSQQHHSHREGLRGPDLPHK

SEQ ID NO: 31519 - protein, 51 aa, Homo sapiens
  MAP TO AB023060.1; EXPRESSED IN PLACENTA, SIGNAL =   1; EXPRESSED IN ADULT LIVER, SIGNAL = 0.82; EXPRESSED IN BRAIN, SIGNAL = 0.82
PPRTDPPQPPRPDDPWPAGPQPPENPWPPAPEVDNRPQEEPDLDPPREEYR

SEQ ID NO: 31520 - protein, 55 aa, Homo sapiens
  MAP TO AC000358.1; EXPRESSED IN BRAIN, SIGNAL = 0.46; EXPRESSED IN ADULT LIVER, SIGNAL = 0.54
RLSPLKMVQRRAAAGMLHRSCTLQRLLLCAENILLRRERLHKGRATGHVQQDVQL

SEQ ID NO: 31521 - protein, 122 aa, Homo sapiens
  MAP TO AC005574.1; EXPRESSED IN BRAIN, SIGNAL = 0.87; EXPRESSED IN BONE MARROW, SIGNAL = 0.46; EXPRESSED IN ADULT LIVER, SIGNAL = 0.75
YYLKPSSSPPFLSQFPSSMGAEVSGTDPIRLFEMRFFDPPPPAPSSKPSSKTSHKGTIAPSPSNDTTEIAIVEVKDLKQTLAIKTGYQDANAWLEWIKYSIHTLNKSNCYACAHSRPEAQTV

SEQ ID NO: 31522 - protein, 31 aa, Homo sapiens
  MAP TO AC010649.5; EXPRESSED IN HEART, SIGNAL = 1.2; EXPRESSED IN HELA, SIGNAL = 1.2; EXPRESSED IN BONE MARROW, SIGNAL = 1.1; EXPRESSED IN ADULT LIVER, SIGNAL = 0.81
EPPPAWWSSSPTRTRSGRSGACSRWWASWAS

SEQ ID NO: 31523 - protein, 28 aa, Homo sapiens
  MAP TO AL031393.1; EXPRESSED IN BONE MARROW, SIGNAL = 1.9; EXPRESSED IN PLACENTA, SIGNAL = 2.1; EXPRESSED IN ADULT LIVER, SIGNAL = 2.4; EXPRESSED IN HEART, SIGNAL = 4.1; EXPRESSED IN FETAL LIVER, SIGNAL = 1.8
MLIVIWTMKSRLKWSQMEMQNLLGTGAK

SEQ ID NO: 31524 - protein, 74 aa, Homo sapiens
  MAP TO AF187320.1; EXPRESSED IN BRAIN, SIGNAL = 2.3; EXPRESSED IN ADULT LIVER, SIGNAL = 2.6; EXPRESSED IN PLACENTA, SIGNAL = 5.4; EXPRESSED IN HEART, SIGNAL = 2.9; SWISSPROT HIT: P02786, EVALUE 5.00e-37
DTDYPYLGTTMDTYKELIERIPELNKVARAAAEVAGQFVIKLTHDVELNLDYERYNSQLLSFVRDLNQYRADIK

SEQ ID NO: 31525 - protein, 89 aa, Homo sapiens
  MAP TO AL117259.3; EXPRESSED IN HEART, SIGNAL = 3.7; EXPRESSED IN ADULT LIVER, SIGNAL = 2.8; EXPRESSED IN LUNG, SIGNAL = 1.9; EXPRESSED IN BONE MARROW, SIGNAL = 2.3; EXPRESSED IN PLACENTA, SIGNAL = 3.1; SWISSPROT HIT: P20848, EVALUE 2.00e-48
KWKDKFKAERIMVEGFHVDDKTIIRVPMINHLGRFDIHRDRELSSWVLAQHYVGNATAFFILPDPKKMWQLEEKLTYSHLENIQRAFDI

SEQ ID NO: 31526 - protein, 33 aa, Homo sapiens
  MAP TO AC010613.5; EXPRESSED IN BRAIN, SIGNAL = 0.81; EXPRESSED IN BONE MARROW, SIGNAL = 0.93; EXPRESSED IN PLACENTA, SIGNAL = 0.56; EXPRESSED IN ADULT LIVER, SIGNAL = 0.87; EXPRESSED IN HEART, SIGNAL =   1; EXPRESSED IN HELA, SIGNAL = 0.87
CSGLEKDTRTQGSQPRSTGEELKKKINPIHSLS

SEQ ID NO: 31527 - protein, 120 aa, Homo sapiens
  MAP TO AC010613.5; EXPRESSED IN BRAIN, SIGNAL = 0.81; EXPRESSED IN BONE MARROW, SIGNAL = 0.93; EXPRESSED IN PLACENTA, SIGNAL = 0.56; EXPRESSED IN ADULT LIVER, SIGNAL = 0.87; EXPRESSED IN HEART, SIGNAL =   1; EXPRESSED IN HELA, SIGNAL = 0.87
MFGFREGYQDTGQSAKVNWGRAKEKNQSHPQSLMKPQSLLNTQALGFGKTLENTIPQFLLQRNTVWIFKSRHLLPVGYVSKGKYCRRNHFVMLCRGWQQAEGTGNRAKTGEYSTRETWVV

SEQ ID NO: 31528 - protein, 67 aa, Homo sapiens
  MAP TO AL049779.5; EXPRESSED IN ADULT LIVER, SIGNAL = 0.96; EXPRESSED IN BRAIN, SIGNAL = 1.3; EXPRESSED IN PLACENTA, SIGNAL = 0.85; EXPRESSED IN BONE MARROW, SIGNAL = 1.8; SWISSPROT HIT: P78540, EVALUE 2.00e-31
LLSALDLVEVNPQLATSEEEAKTTANLAVDVIASSFGQTREGGHIVYDQLPTPSSPDESENQARVRI

SEQ ID NO: 31529 - protein, 32 aa, Homo sapiens
  MAP TO AL109865.36; EXPRESSED IN BRAIN, SIGNAL = 1.9; EXPRESSED IN PLACENTA, SIGNAL = 1.1; EXPRESSED IN BONE MARROW, SIGNAL = 1.5; EXPRESSED IN ADULT LIVER, SIGNAL = 1.2; SWISSPROT HIT: Q9Y2N3, EVALUE 2.30e+00
ETEGSQLTSPKSPENPTSDSASPQEIIVPVFQ

SEQ ID NO: 31530 - protein, 181 aa, Homo sapiens
  MAP TO AF196968.1; EXPRESSED IN HELA, SIGNAL = 1.4; EXPRESSED IN BRAIN, SIGNAL = 5.8; EXPRESSED IN ADULT LIVER, SIGNAL =  49; EXPRESSED IN PLACENTA, SIGNAL = 2.2; EXPRESSED IN HEART, SIGNAL = 1.8; SWISSPROT HIT: P25304, EVALUE 3.80e-01
MQWGRAAMTLGATLLLMASRGDTLPGPGWPFLTKRQLHTKAQWAAGCRVLAWAGVIREECGKHNCFPSPSHGAALTWPSKAGKLPPIAGVAFMLGARLEEGSPRWWVACMPQWELNPCKQLGVTGPFVALWGWGRSSHSSTTHCCKQAVLERVGREPEPGAGDLFGVSILVMTDSWEPKWQ

SEQ ID NO: 31531 - protein, 68 aa, Homo sapiens
  MAP TO AF196968.1; EXPRESSED IN HELA, SIGNAL = 1.4; EXPRESSED IN BRAIN, SIGNAL = 5.8; EXPRESSED IN ADULT LIVER, SIGNAL =  49; EXPRESSED IN PLACENTA, SIGNAL = 2.2; EXPRESSED IN HEART, SIGNAL = 1.8; SWISSPROT HIT: Q14934, EVALUE 9.60e-01
AVGAGGHDPGGNTAPHGFPWRHSPRARLALSHQAPAPHKGTMGCRLPGPGLGWGNQGRMREAQLFPKP

SEQ ID NO: 31532 - protein, 18 aa, Homo sapiens
  MAP TO AC004416.1; EXPRESSED IN BRAIN, SIGNAL = 0.42; EXPRESSED IN ADULT LIVER, SIGNAL = 0.49; EXPRESSED IN HEART, SIGNAL = 0.97
ISFLIHLRTVHADKCSIL

SEQ ID NO: 31533 - protein, 76 aa, Homo sapiens
  MAP TO AC004416.1; EXPRESSED IN BRAIN, SIGNAL = 0.42; EXPRESSED IN ADULT LIVER, SIGNAL = 0.49; EXPRESSED IN HEART, SIGNAL = 0.97; SWISSPROT HIT: P08581, EVALUE 5.00e-38
QFPNSSQNGSCRQVQYPLTDMSPILTSGDSDISSPLLQNTVHIDLSALNPELVQAVQHVVIGPSSLIVHFNEVIGR

SEQ ID NO: 31534 - protein, 25 aa, Homo sapiens
  MAP TO AC025458.3; EXPRESSED IN FETAL LIVER, SIGNAL = 1.4; EXPRESSED IN BRAIN, SIGNAL = 1.1; EXPRESSED IN ADULT LIVER, SIGNAL = 0.92; EXPRESSED IN HEART, SIGNAL = 1.5
MASLKHHYIILAEVINDSHGTRAQE

SEQ ID NO: 31535 - protein, 69 aa, Homo sapiens
  MAP TO AC010393.4; EXPRESSED IN ADULT LIVER, SIGNAL = 0.95; EXPRESSED IN BRAIN, SIGNAL = 1.2; EXPRESSED IN LUNG, SIGNAL = 0.72; EXPRESSED IN FETAL LIVER, SIGNAL = 0.99; EXPRESSED IN BONE MARROW, SIGNAL = 0.82; EXPRESSED IN PLACENTA, SIGNAL = 1.1
CMTSFSGSGCQEALSAVSPHLLKGQAWSSTPVLGLKGSKKRRKGRNKESGTIGSRRSLGSRWKASHAPS

SEQ ID NO: 31536 - protein, 17 aa, Homo sapiens
  MAP TO AF270510.1; EXPRESSED IN ADULT LIVER, SIGNAL = 3.9; EXPRESSED IN HEART, SIGNAL = 3.1; EXPRESSED IN BRAIN, SIGNAL =   3; EXPRESSED IN LUNG, SIGNAL = 3.6; EXPRESSED IN FETAL LIVER, SIGNAL = 3.6; EXPRESSED IN BONE MARROW, SIGNAL = 4.3; EXPRESSED IN PLACENTA, SIGNAL = 4.6
EFGRSGFQSSWMRGSRF

SEQ ID NO: 31537 - protein, 65 aa, Homo sapiens
  MAP TO AF270510.1; EXPRESSED IN ADULT LIVER, SIGNAL = 3.9; EXPRESSED IN HEART, SIGNAL = 3.1; EXPRESSED IN BRAIN, SIGNAL =   3; EXPRESSED IN LUNG, SIGNAL = 3.6; EXPRESSED IN FETAL LIVER, SIGNAL = 3.6; EXPRESSED IN BONE MARROW, SIGNAL = 4.3; EXPRESSED IN PLACENTA, SIGNAL = 4.6; SWISSPROT HIT: P44933, EVALUE 2.70e+00
VWKKWIPILMDEGFKILVKEATADVVETAIELELEVEPEDVIKLLQSHNKTRTSEELLHIVEQRK

SEQ ID NO: 31538 - protein, 65 aa, Homo sapiens
  MAP TO AL049840.4; EXPRESSED IN HEART, SIGNAL =  10; EXPRESSED IN ADULT LIVER, SIGNAL = 5.2; EXPRESSED IN LUNG, SIGNAL = 7.5; EXPRESSED IN BRAIN, SIGNAL = 6.5; EXPRESSED IN BONE MARROW, SIGNAL = 6.3; EXPRESSED IN PLACENTA, SIGNAL =   5; SWISSPROT HIT: Q13625, EVALUE 1.00e-06
AEIERFSAMFQEKKQEVQTAILRVDQLSQQLEDLKKGKLNGFQSYNGKLTGPAAVELKRLYQELQ

SEQ ID NO: 31539 - protein, 88 aa, Homo sapiens
  MAP TO AC002100.1; EXPRESSED IN BONE MARROW, SIGNAL = 0.44; EXPRESSED IN ADULT LIVER, SIGNAL = 0.66; EXPRESSED IN LUNG, SIGNAL = 0.78; SWISSPROT HIT: P73538, EVALUE 1.10e+00
MDQCCGHGCRSQNLSQLCGCGWGAHRGASFTPVHGRTLNSELLDNGRVVMLGGELPVTREPGTGRSWGPLQMRSLWGSRSESQEMTRS

SEQ ID NO: 31540 - protein, 27 aa, Homo sapiens
  MAP TO AC016951.9; EXPRESSED IN HEART, SIGNAL = 0.99; EXPRESSED IN ADULT LIVER, SIGNAL = 0.9; EXPRESSED IN FETAL LIVER, SIGNAL = 1.1; EXPRESSED IN PLACENTA, SIGNAL = 0.99; SWISSPROT HIT: Q01207, EVALUE 8.80e+00
CPPPSGSTYSVPKGRSPGRAHAWWREC

SEQ ID NO: 31541 - protein, 21 aa, Homo sapiens
  MAP TO AC010206.8; EXPRESSED IN HEART, SIGNAL = 1.2; EXPRESSED IN BRAIN, SIGNAL =   1; EXPRESSED IN BONE MARROW, SIGNAL = 0.82; EXPRESSED IN PLACENTA, SIGNAL = 1.5; EXPRESSED IN ADULT LIVER, SIGNAL = 1.2
SSLPNAEGSRTASLQLEKHKM

SEQ ID NO: 31542 - protein, 114 aa, Homo sapiens
  MAP TO AC010206.8; EXPRESSED IN HEART, SIGNAL = 1.2; EXPRESSED IN BRAIN, SIGNAL =   1; EXPRESSED IN BONE MARROW, SIGNAL = 0.82; EXPRESSED IN PLACENTA, SIGNAL = 1.5; EXPRESSED IN ADULT LIVER, SIGNAL = 1.2; SWISSPROT HIT: Q9N0L8, EVALUE 6.40e+00
AAFQTQKGREQHPCSWRNTKCRSSSRARWEMCCRRCGAPFEAEGEGSLPEEGHAQGAARQQQGQHHRLCQQPALQHAGAGHEAQATLRGLWGGGPDPTHLQQPWGFPRLLLRGV

SEQ ID NO: 31543 - protein, 35 aa, Homo sapiens
  MAP TO AC010276.5; EXPRESSED IN PLACENTA, SIGNAL =   3; EXPRESSED IN ADULT LIVER, SIGNAL = 3.1; EXPRESSED IN HEART, SIGNAL = 3.1; EXPRESSED IN HELA, SIGNAL = 2.2; EXPRESSED IN FETAL LIVER, SIGNAL = 2.6; EXPRESSED IN BRAIN, SIGNAL = 2.7; EXPRESSED IN BONE MARROW, SIGNAL = 2.5
CLNNILEEILHMYTRKDIMFVTVLFIELKKTEMMH

SEQ ID NO: 31544 - protein, 55 aa, Homo sapiens
  MAP TO AC004754.1; EXPRESSED IN LUNG, SIGNAL = 1.3; EXPRESSED IN BRAIN, SIGNAL = 0.83; EXPRESSED IN FETAL LIVER, SIGNAL = 0.85; EXPRESSED IN PLACENTA, SIGNAL = 0.64; EXPRESSED IN ADULT LIVER, SIGNAL = 0.72; SWISSPROT HIT: O44248, EVALUE 2.80e+00
LLCRGPTAARSGRDLWPKTWPSWSVLCPSQEAVRHLLPASWWADPVLSLQSTCSQ

SEQ ID NO: 31545 - protein, 54 aa, Homo sapiens
  MAP TO AC004754.1; EXPRESSED IN LUNG, SIGNAL = 1.3; EXPRESSED IN BRAIN, SIGNAL = 0.83; EXPRESSED IN FETAL LIVER, SIGNAL = 0.85; EXPRESSED IN PLACENTA, SIGNAL = 0.64; EXPRESSED IN ADULT LIVER, SIGNAL = 0.72
AVSGANGSTLWERPVAQDVALVECAVPQPRGSEAPSACILVGRPSSFIAVNLFT

SEQ ID NO: 31546 - protein, 29 aa, Homo sapiens
  MAP TO AC004778.1; EXPRESSED IN BRAIN, SIGNAL = 0.43; EXPRESSED IN ADULT LIVER, SIGNAL = 0.51
GGEKEGCRAHHPSQSCTRATRRRSRRRSS

SEQ ID NO: 31547 - protein, 24 aa, Homo sapiens
  MAP TO AC010451.5; EXPRESSED IN HEART, SIGNAL = 1.2; EXPRESSED IN BRAIN, SIGNAL = 1.3; EXPRESSED IN BONE MARROW, SIGNAL = 1.1; EXPRESSED IN PLACENTA, SIGNAL = 0.89; EXPRESSED IN ADULT LIVER, SIGNAL = 1.3
NSWRLSAGRRWLKKLFSQSTSRKD

SEQ ID NO: 31548 - protein, 29 aa, Homo sapiens
  MAP TO AC009003.7; EXPRESSED IN BONE MARROW, SIGNAL = 1.1; EXPRESSED IN ADULT LIVER, SIGNAL = 1.3; EXPRESSED IN BRAIN, SIGNAL = 1.5
VLGVMIGAGVAVVVTAVLILLVVRRLRVP

SEQ ID NO: 31549 - protein, 89 aa, Homo sapiens
  MAP TO AC009003.7; EXPRESSED IN BONE MARROW, SIGNAL = 1.1; EXPRESSED IN ADULT LIVER, SIGNAL = 1.3; EXPRESSED IN BRAIN, SIGNAL = 1.5
TRCVRSGGTTFPGMHCGPPGLREESRPRGGSSTGPFCRWGHRVTGWLRTPRGRRWRRGMGSRTSWRPGKARRDGFAVRSQCRSSLRCLA

SEQ ID NO: 31550 - protein, 35 aa, Homo sapiens
  MAP TO AC022078.12; EXPRESSED IN LUNG, SIGNAL = 0.77; EXPRESSED IN ADULT LIVER, SIGNAL = 0.46
TLVLMYTCDKTVFKNRGLAFVTALLFAVHPIHTEA

SEQ ID NO: 31551 - protein, 32 aa, Homo sapiens
  MAP TO AC022078.12; EXPRESSED IN LUNG, SIGNAL = 0.77; EXPRESSED IN ADULT LIVER, SIGNAL = 0.46
AKHIFDWYEPILLSCSKYNFTLLSDSCADVHL

SEQ ID NO: 31552 - protein, 35 aa, Homo sapiens
  MAP TO AC018757.4; EXPRESSED IN HEART, SIGNAL =   5; EXPRESSED IN ADULT LIVER, SIGNAL = 8.2; EXPRESSED IN HELA, SIGNAL = 3.4; EXPRESSED IN FETAL LIVER, SIGNAL = 5.3; EXPRESSED IN BRAIN, SIGNAL = 4.1; EXPRESSED IN BONE MARROW, SIGNAL = 3.4; EXPRESSED IN PLACENTA, SIGNAL =   5
LVSFQKPEPLFITQCCLQKPTFPCRDSTMRPFSFC

SEQ ID NO: 31553 - protein, 42 aa, Homo sapiens
  MAP TO AC004176.1; EXPRESSED IN PLACENTA, SIGNAL = 1.7; EXPRESSED IN HEART, SIGNAL = 1.6; EXPRESSED IN ADULT LIVER, SIGNAL = 1.9; EXPRESSED IN BONE MARROW, SIGNAL = 1.4; EXPRESSED IN BRAIN, SIGNAL =   2; SWISSPROT HIT: P26368, EVALUE 8.40e+00
MNSLRGRKNKDQREVGKIQSKRSIQCTMAVFQDGGGHEQKNA

SEQ ID NO: 31554 - protein, 94 aa, Homo sapiens
  MAP TO AL096870.3; EXPRESSED IN BONE MARROW, SIGNAL = 2.6; EXPRESSED IN PLACENTA, SIGNAL = 1.7; EXPRESSED IN ADULT LIVER, SIGNAL =   2; EXPRESSED IN FETAL LIVER, SIGNAL = 1.7; EXPRESSED IN BRAIN, SIGNAL = 1.7; EXPRESSED IN HELA, SIGNAL = 1.7; SWISSPROT HIT: Q60855, EVALUE 4.00e-08
MASLDNEFVLRLEGVIEKVNWDQDPKPALVTKFMENGSLSGLLQSQCPRPWPLLCRLLKEVVLGMFYLHDQNPVLLHRDLKPSNVLLDPELHVK

SEQ ID NO: 31555 - protein, 26 aa, Homo sapiens
  MAP TO AL096870.3; EXPRESSED IN BONE MARROW, SIGNAL = 2.6; EXPRESSED IN PLACENTA, SIGNAL = 1.7; EXPRESSED IN ADULT LIVER, SIGNAL =   2; EXPRESSED IN FETAL LIVER, SIGNAL = 1.7; EXPRESSED IN BRAIN, SIGNAL = 1.7; EXPRESSED IN HELA, SIGNAL = 1.7
LSWSVGRRYPGRSRPWQVWITNSCCA

SEQ ID NO: 31556 - protein, 54 aa, Homo sapiens
  MAP TO AF196971.1; EXPRESSED IN BRAIN, SIGNAL = 2.3; EXPRESSED IN FETAL LIVER, SIGNAL = 3.7; EXPRESSED IN PLACENTA, SIGNAL = 2.7; EXPRESSED IN HEART, SIGNAL = 3.2; EXPRESSED IN ADULT LIVER, SIGNAL = 2.2; EXPRESSED IN LUNG, SIGNAL = 2.4; SWISSPROT HIT: Q9UBN7, EVALUE 7.00e-15
TVERDNMEEDNVEESEEEGPWEPPVLPILTWPVLQSRTGLVYDQNMMNHCNLWD

SEQ ID NO: 31557 - protein, 64 aa, Homo sapiens
  MAP TO AC016605.4; EXPRESSED IN PLACENTA, SIGNAL = 0.97; EXPRESSED IN ADULT LIVER, SIGNAL = 0.91; EXPRESSED IN HEART, SIGNAL = 0.98; EXPRESSED IN FETAL LIVER, SIGNAL =   1; EXPRESSED IN HELA, SIGNAL =   1; EXPRESSED IN BRAIN, SIGNAL = 0.85; EXPRESSED IN BONE MARROW, SIGNAL = 0.61; SWISSPROT HIT: P54316, EVALUE 7.90e+00
LLDFLDQHPFSFTPLIQRSLEFSVSYVFTEVGEGVTFERFIVQCMNLIKMIVKNYAYKPSKNFE

SEQ ID NO: 31558 - protein, 136 aa, Homo sapiens
  MAP TO AC005204.1; EXPRESSED IN BRAIN, SIGNAL = 0.79; EXPRESSED IN LUNG, SIGNAL = 0.85; EXPRESSED IN FETAL LIVER, SIGNAL = 0.66; EXPRESSED IN PLACENTA, SIGNAL = 0.77; EXPRESSED IN ADULT LIVER, SIGNAL = 0.69; SWISSPROT HIT: P13688, EVALUE 5.00e-28
ELSKPSVTSNNSNPMEDKDAVALTCEPETQGTTYLWWVNGQSLPASSRLQLSNNNRTLTVLNVTRNYTGPYKCEIWNRVSVSHSYPVTLDVLCSPGCQPKLTWPESRPLSPSQVQEQRLSALDIKAVHDCLPQANF

SEQ ID NO: 31559 - protein, 23 aa, Homo sapiens
  MAP TO AC005204.1; EXPRESSED IN BRAIN, SIGNAL = 0.79; EXPRESSED IN LUNG, SIGNAL = 0.85; EXPRESSED IN FETAL LIVER, SIGNAL = 0.66; EXPRESSED IN PLACENTA, SIGNAL = 0.77; EXPRESSED IN ADULT LIVER, SIGNAL = 0.69
QSCPSPPSPATTPTPWRTRMLWP

SEQ ID NO: 31560 - protein, 40 aa, Homo sapiens
  MAP TO AC004790.1; EXPRESSED IN HEART, SIGNAL = 1.6; EXPRESSED IN BRAIN, SIGNAL =   3; EXPRESSED IN LUNG, SIGNAL = 1.6; EXPRESSED IN FETAL LIVER, SIGNAL = 1.3; EXPRESSED IN ADULT LIVER, SIGNAL = 2.8
TAAAATGVAASAGFPDGGSAQQPLPQLFGGSQANKGSNDD

SEQ ID NO: 31561 - protein, 21 aa, Homo sapiens
  MAP TO AC005262.1; EXPRESSED IN BRAIN, SIGNAL =   4; EXPRESSED IN LUNG, SIGNAL = 6.5; EXPRESSED IN BONE MARROW, SIGNAL = 4.5; EXPRESSED IN PLACENTA, SIGNAL = 2.4; EXPRESSED IN ADULT LIVER, SIGNAL = 3.2; EXPRESSED IN HEART, SIGNAL = 2.4; SWISSPROT HIT: P29992, EVALUE 3.00e-05
MQAMIRAMETLKILYKYEQNK

SEQ ID NO: 31562 - protein, 44 aa, Homo sapiens
  MAP TO AC005262.1; EXPRESSED IN BRAIN, SIGNAL =   4; EXPRESSED IN LUNG, SIGNAL = 6.5; EXPRESSED IN BONE MARROW, SIGNAL = 4.5; EXPRESSED IN PLACENTA, SIGNAL = 2.4; EXPRESSED IN ADULT LIVER, SIGNAL = 3.2; EXPRESSED IN HEART, SIGNAL = 2.4
ARARAGRARSSSRCASSTAPATRRRTSAASPSSSTRTSSPPCRP

SEQ ID NO: 31563 - protein, 61 aa, Homo sapiens
  MAP TO AC005262.1; EXPRESSED IN BRAIN, SIGNAL =   4; EXPRESSED IN LUNG, SIGNAL = 6.5; EXPRESSED IN BONE MARROW, SIGNAL = 4.5; EXPRESSED IN PLACENTA, SIGNAL = 2.4; EXPRESSED IN ADULT LIVER, SIGNAL = 3.2; EXPRESSED IN HEART, SIGNAL = 2.4; SWISSPROT HIT: P04196, EVALUE 7.20e-01
HGREREEHVHQADAHHPRRRLLGGGQARLHQARLPEHLHRHAGHDPGHGDAQDPLQVRAEQ

SEQ ID NO: 31564 - protein, 31 aa, Homo sapiens
  MAP TO AJ250235.1; EXPRESSED IN LUNG, SIGNAL = 0.5; EXPRESSED IN PLACENTA, SIGNAL = 0.51; EXPRESSED IN ADULT LIVER, SIGNAL = 0.48; SWISSPROT HIT: P22830, EVALUE 9.20e-02
LNMGGPETLGDVHDFLLRLFLDQDLMTLPIQ

SEQ ID NO: 31565 - protein, 36 aa, Homo sapiens
  MAP TO AF004877.1; EXPRESSED IN ADULT LIVER, SIGNAL = 2.1; EXPRESSED IN LUNG, SIGNAL = 4.3; EXPRESSED IN FETAL LIVER, SIGNAL = 5.9; EXPRESSED IN BRAIN, SIGNAL = 2.1
GSAGPQGPPGPSGEEGKRGPNGEAGSAGPPGPPGLR

SEQ ID NO: 31566 - protein, 58 aa, Homo sapiens
  MAP TO AC010252.3; EXPRESSED IN LUNG, SIGNAL = 0.58; EXPRESSED IN BONE MARROW, SIGNAL = 0.96; EXPRESSED IN ADULT LIVER, SIGNAL =   1; EXPRESSED IN BRAIN, SIGNAL = 0.79; SWISSPROT HIT: Q9NR20, EVALUE 4.70e+00
QDTEEANHTRDLDLINIVLEPKSQHSMVLFDFGLSLLIYDHEVYSPALEGRQMLEPDE

SEQ ID NO: 31567 - protein, 39 aa, Homo sapiens
  MAP TO AC004173.1; EXPRESSED IN ADULT LIVER, SIGNAL = 0.76; EXPRESSED IN BRAIN, SIGNAL = 0.71; EXPRESSED IN PLACENTA, SIGNAL = 0.57; SWISSPROT HIT: P21888, EVALUE 5.00e+00
GKGMRSSVLVDSRQTMVLRLWEMKEEEQGWLSPGLSPWR

SEQ ID NO: 31568 - protein, 53 aa, Homo sapiens
  MAP TO AC010327.5; EXPRESSED IN FETAL LIVER, SIGNAL = 1.7; EXPRESSED IN BRAIN, SIGNAL = 1.6; EXPRESSED IN PLACENTA, SIGNAL = 1.9; EXPRESSED IN HEART, SIGNAL =   2; EXPRESSED IN ADULT LIVER, SIGNAL = 1.8; SWISSPROT HIT: P05990, EVALUE 3.60e+00
WRSRRHCLCANSTTRPGRITAFPPPQTPCWLSGGCFGSGWIRPWREAHPLCTA

SEQ ID NO: 31569 - protein, 53 aa, Homo sapiens
  MAP TO AC010327.5; EXPRESSED IN FETAL LIVER, SIGNAL = 1.7; EXPRESSED IN BRAIN, SIGNAL = 1.6; EXPRESSED IN PLACENTA, SIGNAL = 1.9; EXPRESSED IN HEART, SIGNAL =   2; EXPRESSED IN ADULT LIVER, SIGNAL = 1.8; SWISSPROT HIT: P23467, EVALUE 7.00e-09
VEEQKTLSVRQFHYQAWPDHGVPSSPDTLLAFWRMLRQWLDQTMEGGPPIVHC

SEQ ID NO: 31570 - protein, 19 aa, Homo sapiens
  MAP TO AC067969.1; EXPRESSED IN HEART, SIGNAL = 2.2; EXPRESSED IN FETAL LIVER, SIGNAL = 1.8; EXPRESSED IN PLACENTA, SIGNAL = 1.8; EXPRESSED IN ADULT LIVER, SIGNAL = 1.8
RPEVASEPIAPLQCSHSPL

SEQ ID NO: 31571 - protein, 66 aa, Homo sapiens
  MAP TO AC004794.1; EXPRESSED IN BRAIN, SIGNAL = 0.74; EXPRESSED IN FETAL LIVER, SIGNAL = 0.47; EXPRESSED IN BONE MARROW, SIGNAL = 0.83; EXPRESSED IN ADULT LIVER, SIGNAL = 0.63; SWISSPROT HIT: P12114, EVALUE 3.30e+00
ATQPSAQSPALQSQSPRLPKGPRPEQRGPPAPRHQGALHGEPTCKAWSPVAADGCWVGPSQLRTPL

SEQ ID NO: 31572 - protein, 113 aa, Homo sapiens
  MAP TO AC004794.1; EXPRESSED IN BRAIN, SIGNAL = 0.74; EXPRESSED IN FETAL LIVER, SIGNAL = 0.47; EXPRESSED IN BONE MARROW, SIGNAL = 0.83; EXPRESSED IN ADULT LIVER, SIGNAL = 0.63
HPAQRPEPSPPEPEPQAPEGSQAGAEGPSSPEASRSPARGAYLQSLEPSSRRWVLGGAKPAEDTSLGPGVPGTGEPAGEIWYNPIPEEDPRPPAPEPPGPQPGSAESEGLAPQ

SEQ ID NO: 31573 - protein, 59 aa, Homo sapiens
  MAP TO AC022103.4; EXPRESSED IN FETAL LIVER, SIGNAL = 0.48; EXPRESSED IN BRAIN, SIGNAL = 0.59; EXPRESSED IN HELA, SIGNAL = 0.57; EXPRESSED IN PLACENTA, SIGNAL = 0.66; EXPRESSED IN ADULT LIVER, SIGNAL = 0.6
GTGRGAWLERTPDNQRPHVELAIHWSPTNVQRRVLVQVDIGKDCSLVYGNPDKFLGKVA

SEQ ID NO: 31574 - protein, 20 aa, Homo sapiens
  MAP TO AC022103.4; EXPRESSED IN FETAL LIVER, SIGNAL = 0.48; EXPRESSED IN BRAIN, SIGNAL = 0.59; EXPRESSED IN HELA, SIGNAL = 0.57; EXPRESSED IN PLACENTA, SIGNAL = 0.66; EXPRESSED IN ADULT LIVER, SIGNAL = 0.6
ELVEVPGLREHQTTKGHMWN

SEQ ID NO: 31575 - protein, 27 aa, Homo sapiens
  MAP TO AC011749.2; EXPRESSED IN BRAIN, SIGNAL = 1.1; EXPRESSED IN FETAL LIVER, SIGNAL = 0.82; EXPRESSED IN BONE MARROW, SIGNAL = 1.1; EXPRESSED IN PLACENTA, SIGNAL = 0.75; EXPRESSED IN ADULT LIVER, SIGNAL =   1
PDFRDHPEYSLEEEKEASDLQASKNQE

SEQ ID NO: 31576 - protein, 59 aa, Homo sapiens
  MAP TO AC011749.2; EXPRESSED IN BRAIN, SIGNAL = 1.1; EXPRESSED IN FETAL LIVER, SIGNAL = 0.82; EXPRESSED IN BONE MARROW, SIGNAL = 1.1; EXPRESSED IN PLACENTA, SIGNAL = 0.75; EXPRESSED IN ADULT LIVER, SIGNAL =   1
AKINALTSTLTADIRLLLSMYTEPSIRSMGYSPQKEKLSKIKKKFWPCLKLFGSLNRWL

SEQ ID NO: 31577 - protein, 29 aa, Homo sapiens
  MAP TO AL035532.1; EXPRESSED IN BONE MARROW, SIGNAL = 1.4; EXPRESSED IN PLACENTA, SIGNAL =   1; EXPRESSED IN ADULT LIVER, SIGNAL = 1.1
KRLRKDIVRGQPSASHKQRPHQKPTLQAP

SEQ ID NO: 31578 - protein, 52 aa, Homo sapiens
  MAP TO AC008282.2; EXPRESSED IN HEART, SIGNAL = 6.2; EXPRESSED IN BRAIN, SIGNAL = 4.5; EXPRESSED IN LUNG, SIGNAL = 6.9; EXPRESSED IN FETAL LIVER, SIGNAL = 4.3; EXPRESSED IN PLACENTA, SIGNAL = 4.4; EXPRESSED IN ADULT LIVER, SIGNAL =   4; EXPRESSED IN HELA, SIGNAL = 4.1; EXPRESSED IN BONE MARROW, SIGNAL = 4.1
LTDSIRGFGKDIGIRGKKPVSCMSISWLILIAKKVCSSGAFKLLSDPTNWPM

SEQ ID NO: 31579 - protein, 100 aa, Homo sapiens
  MAP TO AC016639.5; EXPRESSED IN PLACENTA, SIGNAL = 1.8; EXPRESSED IN ADULT LIVER, SIGNAL = 1.8; EXPRESSED IN FETAL LIVER, SIGNAL = 1.8; EXPRESSED IN BRAIN, SIGNAL = 1.9; SWISSPROT HIT: Q01074, EVALUE 9.90e+00
HRTLSSDFGLECRKLQENVCHFYTNNKSQITYTYSLVACVPLSSHAPKRVTTGYIEGGQVLGTGALSLDKDSLPQDGTAAARLLAPKALPMELRAPQLTW

SEQ ID NO: 31580 - protein, 25 aa, Homo sapiens
  MAP TO AC004511.1; EXPRESSED IN ADULT LIVER, SIGNAL = 1.9; EXPRESSED IN HEART, SIGNAL = 4.4; EXPRESSED IN PLACENTA, SIGNAL = 2.4
LGQPQALLMEALAPIQASSSTRLDK

SEQ ID NO: 31581 - protein, 32 aa, Homo sapiens
  MAP TO AC004012.1; EXPRESSED IN PLACENTA, SIGNAL = 0.45; EXPRESSED IN ADULT LIVER, SIGNAL = 0.45; EXPRESSED IN HELA, SIGNAL = 0.52
FLYPPSQSRYRTVPIPQRTLLLPFYNQPTILS

SEQ ID NO: 31582 - protein, 73 aa, Homo sapiens
  MAP TO AF241734.1; EXPRESSED IN LUNG, SIGNAL = 0.85; EXPRESSED IN BRAIN, SIGNAL = 0.39; EXPRESSED IN BONE MARROW, SIGNAL = 0.45; EXPRESSED IN HEART, SIGNAL = 0.96; EXPRESSED IN ADULT LIVER, SIGNAL = 0.88
MVVDSERMCPCPKIKSFERQEEEATRPIKGYTRNKYRFISIILHWSKESQGLTRFKGVKTDLMDEWQVTLQKT

SEQ ID NO: 31583 - protein, 57 aa, Homo sapiens
  MAP TO AF241734.1; EXPRESSED IN LUNG, SIGNAL = 0.85; EXPRESSED IN BRAIN, SIGNAL = 0.39; EXPRESSED IN BONE MARROW, SIGNAL = 0.45; EXPRESSED IN HEART, SIGNAL = 0.96; EXPRESSED IN ADULT LIVER, SIGNAL = 0.88; SWISSPROT HIT: Q28084, EVALUE 2.80e+00
WWWILRGCVPVPKSRVSRGRKRKPPGQLRATPGTSIDSFPSYSIGQKSHRASPDSKE

SEQ ID NO: 31584 - protein, 85 aa, Homo sapiens
  MAP TO AL110118.3; EXPRESSED IN FETAL LIVER, SIGNAL =   9; EXPRESSED IN LUNG, SIGNAL = 8.3; EXPRESSED IN ADULT LIVER, SIGNAL = 8.6
LGTCSPPCLSLPPPPWTPVQPQPPRRVPPPAPRRPVPSTTQGLRSASARQRGTGRQLHLQPWCQFRWVKPAGLLSLVGMWRIFMP

SEQ ID NO: 31585 - protein, 27 aa, Homo sapiens
  MAP TO AL049869.5; EXPRESSED IN BONE MARROW, SIGNAL = 4.9; EXPRESSED IN PLACENTA, SIGNAL = 3.4; EXPRESSED IN ADULT LIVER, SIGNAL =   4; EXPRESSED IN HEART, SIGNAL = 3.7; EXPRESSED IN HELA, SIGNAL = 2.5; EXPRESSED IN FETAL LIVER, SIGNAL = 3.7; EXPRESSED IN LUNG, SIGNAL = 3.7
MSWAFTFTHHALTDSPIATPVLQAPFM

SEQ ID NO: 31586 - protein, 30 aa, Homo sapiens
  MAP TO AC016698.2; EXPRESSED IN BONE MARROW, SIGNAL = 0.96; EXPRESSED IN PLACENTA, SIGNAL = 1.4; EXPRESSED IN ADULT LIVER, SIGNAL = 1.5; EXPRESSED IN FETAL LIVER, SIGNAL = 1.9; EXPRESSED IN BRAIN, SIGNAL = 1.3; EXPRESSED IN HELA, SIGNAL = 2.8
WDLLAIAVLTHLSIYSFVPGGQRRPICRLS

SEQ ID NO: 31587 - protein, 53 aa, Homo sapiens
  MAP TO AC008985.5; EXPRESSED IN PLACENTA, SIGNAL = 5.8; EXPRESSED IN ADULT LIVER, SIGNAL = 4.5; EXPRESSED IN HEART, SIGNAL = 5.6; EXPRESSED IN FETAL LIVER, SIGNAL = 6.2; EXPRESSED IN BONE MARROW, SIGNAL = 3.8; SWISSPROT HIT: Q54513, EVALUE 6.20e+00
QRRSHRRTEGHVKKEAKLNVTWLRAKDHLELRGLDQAKKALGSSLEPPEGAQL

SEQ ID NO: 31588 - protein, 97 aa, Homo sapiens [sequence omitted]

SEQ ID NO: 31589 - protein, 89 aa, Homo sapiens
  MAP TO AC005081.2; EXPRESSED IN BONE MARROW, SIGNAL = 0.57; EXPRESSED IN ADULT LIVER, SIGNAL = 0.48; EXPRESSED IN BRAIN, SIGNAL = 0.7; SWISSPROT HIT: P79295, EVALUE 5.10e+00
MFPKYTRPLTILLAPASLVEAGLCLPLPGPIAAHPTGPHRGRLVSTNHKGTFVPARQYLLHLLTKASILRVSRLAFAFHRTDLGREAGR

SEQ ID NO: 31590 - protein, 99 aa, Homo sapiens
  MAP TO AF192304.2; EXPRESSED IN ADULT LIVER, SIGNAL = 1.6; EXPRESSED IN HEART, SIGNAL = 1.6; EXPRESSED IN BRAIN, SIGNAL = 1.1; EXPRESSED IN FETAL LIVER, SIGNAL = 1.4; EXPRESSED IN BONE MARROW, SIGNAL = 1.9; EXPRESSED IN PLACENTA, SIGNAL = 3.2; SWISSPROT HIT: P18406, EVALUE 3.00e-20
AGKKCLAVYQPEASMNFTLAGCISTRSYQPKYCGVCMDNRCCIPYKSKTIDVSFQCPDGLGFSRQVLWINACFCNLSCRNPNDIFADLESYPDFSEIAN

SEQ ID NO: 31591 - protein, 132 aa, Homo sapiens
  MAP TO AC004017.1; EXPRESSED IN ADULT LIVER, SIGNAL = 1.5; EXPRESSED IN PLACENTA, SIGNAL = 0.93; EXPRESSED IN HEART, SIGNAL = 1.1; EXPRESSED IN LUNG, SIGNAL = 2.4; EXPRESSED IN HELA, SIGNAL = 1.1; EXPRESSED IN BRAIN, SIGNAL = 1.7; EXPRESSED IN BONE MARROW, SIGNAL = 1.6; SWISSPROT HIT: P49910, EVALUE 2.00e-08
MALDLRTIFQCEPSENNLGSENSAFQQSQGPAVQREEGISEFSRMVLNSFQDSNNSYARQELQRLYRIFHSWLQPEKHSKDEIISLLVLEQFMIGGHCNDKASVKEKWKSSGKNLERFIEDLTDDSINPPAL

SEQ ID NO: 31592 - protein, 105 aa, Homo sapiens
  MAP TO AC025816.1; EXPRESSED IN PLACENTA, SIGNAL = 1.3; EXPRESSED IN HEART, SIGNAL = 1.3; EXPRESSED IN ADULT LIVER, SIGNAL = 1.4; EXPRESSED IN LUNG, SIGNAL = 1.8; EXPRESSED IN FETAL LIVER, SIGNAL = 1.3; EXPRESSED IN BRAIN, SIGNAL = 1.3; SWISSPROT HIT: Q64707, EVALUE 2.30e+00
ICQHYNKGDGPHGSCAFQKQCIKLHICQYFLQGECKFGTSCKRSHDFSNSENLEKLEKLGMSSDLVSRLPTIYRNAHDIKNKSSAPSRVPPLFVPQGTSGKAGGE

SEQ ID NO: 31593 - protein, 44 aa, Homo sapiens
  MAP TO AC034103.5; EXPRESSED IN PLACENTA, SIGNAL =   2; EXPRESSED IN ADULT LIVER, SIGNAL = 2.1; EXPRESSED IN HEART, SIGNAL = 2.1; EXPRESSED IN FETAL LIVER, SIGNAL = 2.1
AKENQCKISLSPHPNALIRKSVQKKVVISKVILTTASRIMDDPV

SEQ ID NO: 31594 - protein, 39 aa, Homo sapiens
  MAP TO AC016553.4; EXPRESSED IN BRAIN, SIGNAL = 1.4; EXPRESSED IN HELA, SIGNAL = 1.1; EXPRESSED IN BONE MARROW, SIGNAL = 0.65; EXPRESSED IN ADULT LIVER, SIGNAL = 1.1; SWISSPROT HIT: P09856, EVALUE 1.30e+00
PLTWQMPFSPFLSIRPTRSNLPSAGKARNIPSLSYLRGI

SEQ ID NO: 31595 - protein, 78 aa, Homo sapiens
  MAP TO AL031707.17; EXPRESSED IN FETAL LIVER, SIGNAL = 3.8; EXPRESSED IN BRAIN, SIGNAL = 2.9; EXPRESSED IN LUNG, SIGNAL = 1.5; EXPRESSED IN ADULT LIVER, SIGNAL = 2.3; EXPRESSED IN PLACENTA, SIGNAL = 2.6; SWISSPROT HIT: Q9H213, EVALUE 7.70e+00
GSAKDRQTLRAKDALAWPVRGQAGSLPGFGDFEPAAAAGVAGPARQVLLPGGSPTSCWRVWGGRAGHSPAAKPAESGW

SEQ ID NO: 31596 - protein, 18 aa, Homo sapiens
  MAP TO AC004711.1; EXPRESSED IN BONE MARROW, SIGNAL = 0.83; EXPRESSED IN PLACENTA, SIGNAL = 1.4; EXPRESSED IN ADULT LIVER, SIGNAL =   1; EXPRESSED IN LUNG, SIGNAL = 0.61
QCKNRLIQKMGTWSGALL

SEQ ID NO: 31597 - protein, 25 aa, Homo sapiens
  MAP TO AC026733.3; EXPRESSED IN HEART, SIGNAL = 1.2; EXPRESSED IN ADULT LIVER, SIGNAL = 1.2; EXPRESSED IN HELA, SIGNAL = 0.84; EXPRESSED IN PLACENTA, SIGNAL = 1.1
PIPRFRKAYRYRSKKWVGNQQKASQ

SEQ ID NO: 31598 - protein, 45 aa, Homo sapiens
  MAP TO AC026730.3; EXPRESSED IN BONE MARROW, SIGNAL = 5.5; EXPRESSED IN ADULT LIVER, SIGNAL = 3.5; EXPRESSED IN BRAIN, SIGNAL = 4.1; EXPRESSED IN FETAL LIVER, SIGNAL = 3.2; SWISSPROT HIT: P29572, EVALUE 1.70e+00
IPVAVIAVNSGFWCFQNDETVSFSIEMLAFLSDINLGYLMIKTMT

SEQ ID NO: 31599 - protein, 17 aa, Homo sapiens
  MAP TO AC026730.3; EXPRESSED IN BONE MARROW, SIGNAL = 5.5; EXPRESSED IN ADULT LIVER, SIGNAL = 3.5; EXPRESSED IN BRAIN, SIGNAL = 4.1; EXPRESSED IN FETAL LIVER, SIGNAL = 3.2
SSGCDCRKFWLLVFSKR

SEQ ID NO: 31600 - protein, 40 aa, Homo sapiens
  MAP TO AF006752.1; EXPRESSED IN BRAIN, SIGNAL = 0.92; EXPRESSED IN HELA, SIGNAL = 0.46; EXPRESSED IN ADULT LIVER, SIGNAL = 0.85; SWISSPROT HIT: P09193, EVALUE 4.90e+00
VRGQRDRSEFSCLLGRHLTWLGCGDLLEREACHGSRIENS

SEQ ID NO: 31601 - protein, 75 aa, Homo sapiens
  MAP TO AC009087.4; EXPRESSED IN ADULT LIVER, SIGNAL = 2.3; EXPRESSED IN FETAL LIVER, SIGNAL = 8.2; EXPRESSED IN BONE MARROW, SIGNAL = 1.9; EXPRESSED IN HELA, SIGNAL =  11
CGNQCRLALRLWIAWCQLVVVSMSSLLVTEGLGKPQLLLTQSLTRNISMIDLKKRRSCTVSMLLLVERDPLLLSW

SEQ ID NO: 31602 - protein, 35 aa, Homo sapiens
  MAP TO AC005944.1; EXPRESSED IN BONE MARROW, SIGNAL = 0.99; EXPRESSED IN PLACENTA, SIGNAL = 1.1; EXPRESSED IN ADULT LIVER, SIGNAL = 1.2
LCQEMALFSPRALIKSSSSRSRRPRPQGREEAVGS

SEQ ID NO: 31603 - protein, 36 aa, Homo sapiens
  MAP TO AC010505.6; EXPRESSED IN FETAL LIVER, SIGNAL = 1.3; EXPRESSED IN PLACENTA, SIGNAL = 0.98; EXPRESSED IN ADULT LIVER, SIGNAL = 1.1; EXPRESSED IN HEART, SIGNAL = 1.4; EXPRESSED IN BRAIN, SIGNAL = 0.99
WLQPSKLLNKGLWTRPAWPRRQGLQLRSSQGKREQA

SEQ ID NO: 31604 - protein, 49 aa, Homo sapiens
  MAP TO AC010512.7; EXPRESSED IN FETAL LIVER, SIGNAL = 0.47; EXPRESSED IN ADULT LIVER, SIGNAL = 0.95; EXPRESSED IN HEART, SIGNAL = 0.92; SWISSPROT HIT: P31792, EVALUE 1.70e+00
VIRKCQGINTFWDGPYQVALVDQYPNSFTSDGIMEWVFYAVSQSTREAL

SEQ ID NO: 31605 - protein, 61 aa, Homo sapiens
  MAP TO AF212831.1; EXPRESSED IN BONE MARROW, SIGNAL =   1; EXPRESSED IN ADULT LIVER, SIGNAL = 0.92; EXPRESSED IN LUNG, SIGNAL = 0.77; EXPRESSED IN FETAL LIVER, SIGNAL = 0.58; SWISSPROT HIT: P23414, EVALUE 3.60e+00
GTSSTMLNNSGESGHPCRGPDLKENVFMFFPSSIIVPMGLLYMAFIVFLLPPDFLRIFIMK

SEQ ID NO: 31606 - protein, 73 aa, Homo sapiens
  MAP TO AC011471.5; EXPRESSED IN ADULT LIVER, SIGNAL = 5.8; EXPRESSED IN HEART, SIGNAL = 6.6; SWISSPROT HIT: P27028, EVALUE 4.50e+00
ITWIAGAVTKDFKLTDKHETVVSYLPLSHIAAQMMDIWVPIKIGALTYFAQADALKVRLSKDLGLRLHPLGQP

SEQ ID NO: 31607 - protein, 64 aa, Homo sapiens
  MAP TO AL031709.10; EXPRESSED IN FETAL LIVER, SIGNAL = 3.2; EXPRESSED IN ADULT LIVER, SIGNAL = 2.1; EXPRESSED IN HEART, SIGNAL = 1.2; SWISSPROT HIT: Q9YA48, EVALUE 2.40e-01
LCVVLNNVELVRKAAGQALKGLAWPEGATGPEGVLPRPLLSCTQALDDDLQREAHTVTAHLTSK

SEQ ID NO: 31608 - protein, 18 aa, Homo sapiens
  MAP TO AL031709.10; EXPRESSED IN FETAL LIVER, SIGNAL = 3.2; EXPRESSED IN ADULT LIVER, SIGNAL = 2.1; EXPRESSED IN HEART, SIGNAL = 1.2
SAWSSTMWSSCARLLGRP

SEQ ID NO: 31609 - protein, 47 aa, Homo sapiens
  MAP TO AL031709.10; EXPRESSED IN FETAL LIVER, SIGNAL = 3.2; EXPRESSED IN ADULT LIVER, SIGNAL = 2.1; EXPRESSED IN HEART, SIGNAL = 1.2
LRGPQQCGARAQGCWAGLEGPGMARGGHGARGGAPPPSAQLHTGPGR

SEQ ID NO: 31610 - protein, 41 aa, Homo sapiens
  MAP TO AJ012008.1; EXPRESSED IN BONE MARROW, SIGNAL = 3.6; EXPRESSED IN ADULT LIVER, SIGNAL = 2.1; EXPRESSED IN PLACENTA, SIGNAL = 3.6; EXPRESSED IN HEART, SIGNAL = 3.3; EXPRESSED IN BRAIN, SIGNAL = 2.6; EXPRESSED IN FETAL LIVER, SIGNAL = 4.1; SWISSPROT HIT: O00299, EVALUE 6.00e-19
RTETVQKLCPGGQLPFLLYGTEVHTDTNKIEEFLEAVLCPP

SEQ ID NO: 31611 - protein, 41 aa, Homo sapiens
  MAP TO AJ012008.1; EXPRESSED IN BONE MARROW, SIGNAL = 3.6; EXPRESSED IN ADULT LIVER, SIGNAL = 2.1; EXPRESSED IN PLACENTA, SIGNAL = 3.6; EXPRESSED IN HEART, SIGNAL = 3.3; EXPRESSED IN BRAIN, SIGNAL = 2.6; EXPRESSED IN FETAL LIVER, SIGNAL = 4.1
GPRQCRSCAQGGSSHSCCMALKCTQTPTRLRNFWRQCCALP

SEQ ID NO: 31612 - protein, 21 aa, Homo sapiens
  MAP TO AJ012008.1; EXPRESSED IN BONE MARROW, SIGNAL = 3.6; EXPRESSED IN ADULT LIVER, SIGNAL = 2.1; EXPRESSED IN PLACENTA, SIGNAL = 3.6; EXPRESSED IN HEART, SIGNAL = 3.3; EXPRESSED IN BRAIN, SIGNAL = 2.6; EXPRESSED IN FETAL LIVER, SIGNAL = 4.1
ADRDSAEAVPRGAAPIPAVWH

SEQ ID NO: 31613 - protein, 42 aa, Homo sapiens
  MAP TO AC010609.5; EXPRESSED IN ADULT LIVER, SIGNAL =   1; EXPRESSED IN HEART, SIGNAL = 1.2; EXPRESSED IN FETAL LIVER, SIGNAL = 0.76; EXPRESSED IN PLACENTA, SIGNAL = 0.94
MVEKQNIEAKVEKAQGGQELEMISGTMTSEKTEMIVFETKSI

SEQ ID NO: 31614 - protein, 58 aa, Homo sapiens
  MAP TO AL023494.12; EXPRESSED IN BONE MARROW, SIGNAL = 3.1; EXPRESSED IN ADULT LIVER, SIGNAL = 3.4; EXPRESSED IN FETAL LIVER, SIGNAL = 4.8; SWISSPROT HIT: Q19981, EVALUE 8.00e+00
LLDLATALFWSMFVATRAELSIHHCCFASVADFHPSGSSRVSSVLLIQQGAHCRSRSG

SEQ ID NO: 31615 - protein, 28 aa, Homo sapiens
  MAP TO AC018555.4; EXPRESSED IN ADULT LIVER, SIGNAL = 0.84
SWQKAKEKQLPSSQWCQEREREQEQECE

SEQ ID NO: 31616 - protein, 21 aa, Homo sapiens
  MAP TO AC010617.5; EXPRESSED IN ADULT LIVER, SIGNAL = 1.3; EXPRESSED IN HEART, SIGNAL = 1.2
VTQEDPWSARSPLAGSFWLAS

SEQ ID NO: 31617 - protein, 113 aa, Homo sapiens
  MAP TO AC010617.5; EXPRESSED IN ADULT LIVER, SIGNAL = 1.3; EXPRESSED IN HEART, SIGNAL = 1.2; SWISSPROT HIT: Q05319, EVALUE 1.00e-13
GDSGGPLVCEEPSGRFFLAGIVSWGIGCAEARRPGVYARVTRLRDWILEATTKASMPLAPTMAPAPAAPSTAWPTSPESPVVSTPTKSMQALSTVPLDWVTVPKLQGIFGAER

SEQ ID NO: 31618 - protein, 51 aa, Homo sapiens
  MAP TO AL031007.1; EXPRESSED IN ADULT LIVER, SIGNAL =   1; EXPRESSED IN FETAL LIVER, SIGNAL = 1.4; EXPRESSED IN LUNG, SIGNAL =   1; EXPRESSED IN PLACENTA, SIGNAL = 0.82; SWISSPROT HIT: P03066, EVALUE 8.20e+00
NNKIPFKNTSKAEENSRRKPQGVDTSGKENKEACSWYLSQQASGSQKPAEH

SEQ ID NO: 31619 - protein, 22 aa, Homo sapiens
  MAP TO AL031007.1; EXPRESSED IN ADULT LIVER, SIGNAL =   1; EXPRESSED IN FETAL LIVER, SIGNAL = 1.4; EXPRESSED IN LUNG, SIGNAL =   1; EXPRESSED IN PLACENTA, SIGNAL = 0.82
TTKYPLRTPQRLRKTLEGNHKG

SEQ ID NO: 31620 - protein, 72 aa, Homo sapiens
  MAP TO AC002481.1; EXPRESSED IN ADULT LIVER, SIGNAL = 0.9; EXPRESSED IN HEART, SIGNAL = 1.4; EXPRESSED IN FETAL LIVER, SIGNAL = 0.95; EXPRESSED IN BRAIN, SIGNAL = 1.1; EXPRESSED IN BONE MARROW, SIGNAL = 0.48; SWISSPROT HIT: P52178, EVALUE 5.20e+00
RHWAEGLASLRAPATQASRLSLTSVHRRWGRLCARNEELRAWARLLPWAAAAASNAYSSASSTPRWDPRSPI

SEQ ID NO: 31621 - protein, 67 aa, Homo sapiens
  MAP TO AC007136.1; EXPRESSED IN BONE MARROW, SIGNAL = 2.4; EXPRESSED IN PLACENTA, SIGNAL = 0.81; EXPRESSED IN HEART, SIGNAL = 1.6; EXPRESSED IN ADULT LIVER, SIGNAL = 1.4; EXPRESSED IN FETAL LIVER, SIGNAL = 0.86
ERHGSPARKGRSILCLQSELRGIPEAGSRATRTQWPGGGWGSAGAAFQARQTEPFSCRPSREQDPIQ

SEQ ID NO: 31622 - protein, 68 aa, Homo sapiens
  MAP TO AC007136.1; EXPRESSED IN BONE MARROW, SIGNAL = 2.4; EXPRESSED IN PLACENTA, SIGNAL = 0.81; EXPRESSED IN HEART, SIGNAL = 1.6; EXPRESSED IN ADULT LIVER, SIGNAL = 1.4; EXPRESSED IN FETAL LIVER, SIGNAL = 0.86
ESAMGHLPEKAGPSSACSQNSGGSLRPAAEPRGRSGLAAGGAARELLSRPDRRSRSPAGLPGSRIPSS

SEQ ID NO: 31623 - protein, 70 aa, Homo sapiens
  MAP TO AC004176.1; EXPRESSED IN ADULT LIVER, SIGNAL = 0.61; EXPRESSED IN BRAIN, SIGNAL = 0.62; EXPRESSED IN FETAL LIVER, SIGNAL = 0.44; EXPRESSED IN HELA, SIGNAL = 0.74; SWISSPROT HIT: Q9KCB7, EVALUE 1.20e+00
ADAKIIAVFAITIILTKNYSHWTKANCNDPCDGESQNAMKVALTRNRSFDPWLIDISIDFRCTMFGLMCK

SEQ ID NO: 31624 - protein, 87 aa, Homo sapiens
  MAP TO AL117382.28; EXPRESSED IN BRAIN, SIGNAL = 1.3; EXPRESSED IN PLACENTA, SIGNAL = 1.4; EXPRESSED IN HEART, SIGNAL = 1.6; EXPRESSED IN ADULT LIVER, SIGNAL = 1.3; SWISSPROT HIT: P51826, EVALUE 7.00e-01
MPLLPSTVGLAGLLFWAGQAVNALIMPNATPAPAQPESTAMRLLSGLEVPRYRRKRHISVRDMNALLDYHNHIRASVYPPAANMEYM

SEQ ID NO: 31625 - protein, 47 aa, Homo sapiens
  MAP TO AL080273.10; EXPRESSED IN PLACENTA, SIGNAL = 1.2; EXPRESSED IN ADULT LIVER, SIGNAL =   1; EXPRESSED IN BRAIN, SIGNAL = 2.1; EXPRESSED IN FETAL LIVER, SIGNAL = 1.5
RSSGGSSSISDSSSTGSSSTWELVRNADAWIPSQAYPVRVYILTRSP

SEQ ID NO: 31626 - protein, 144 aa, Homo sapiens
  MAP TO AC009494.2; EXPRESSED IN LUNG, SIGNAL = 3.3; EXPRESSED IN BRAIN, SIGNAL = 1.8; EXPRESSED IN BONE MARROW, SIGNAL = 1.5; EXPRESSED IN ADULT LIVER, SIGNAL = 1.9; EXPRESSED IN HEART, SIGNAL = 1.8; SWISSPROT HIT: Q9QXE7, EVALUE 1.00e-09
WMDPEMGDSMSHFSMGLILCRSHSSSPFLCGVKSNTRQLKLPNAKMARTETGIQRYEKRQKSTCGQCHLAREQAVVSFSSHFNQTPEPPVFLFCRSEDSTAKIWNLNENGNRASTQLMLRHRIPEGAMTSQVTKMSDVISLDWN

SEQ ID NO: 31627 - protein, 79 aa, Homo sapiens
  MAP TO AC002321.1; EXPRESSED IN BONE MARROW, SIGNAL = 0.55; EXPRESSED IN ADULT LIVER, SIGNAL = 0.58; SWISSPROT HIT: P19450, EVALUE 7.10e+00
MKASVCLVHLRCPALVVGAREKPRPTSSALAVPSGSSSPAPSKPTGPQDGEPGKHTDVPTAVQLHGPCNLMASQAAPLT

SEQ ID NO: 31628 - protein, 62 aa, Homo sapiens
  MAP TO AC002985.1; EXPRESSED IN HEART, SIGNAL = 5.6; EXPRESSED IN HELA, SIGNAL = 4.3; EXPRESSED IN ADULT LIVER, SIGNAL =   5; SWISSPROT HIT: Q09903, EVALUE 3.00e-08
VMDEADRLLEQGCTDFTVDLEAILAAVPARRQTLLFSATLTDTLRELQGLATNQPFFWEAQA

SEQ ID NO: 31629 - protein, 56 aa, Homo sapiens
  MAP TO AC008886.4; EXPRESSED IN ADULT LIVER, SIGNAL = 1.3; EXPRESSED IN PLACENTA, SIGNAL = 0.81; EXPRESSED IN HEART, SIGNAL = 1.5; EXPRESSED IN BRAIN, SIGNAL = 0.98; EXPRESSED IN BONE MARROW, SIGNAL = 1.2; SWISSPROT HIT: P37810, EVALUE 4.70e+00
MTEAGNLLFVQKGHREGEKRASVLRNCCLKMQEEHKAKEEISIVQATGSENHENWR

SEQ ID NO: 31630 - protein, 46 aa, Homo sapiens
  MAP TO AC004185.1; EXPRESSED IN ADULT LIVER, SIGNAL = 0.57; SWISSPROT HIT: P50863, EVALUE 4.90e+00
YQDELINQLKGAKSQCVRIVLEICKWKNERKGRDSVMEKKTLSLKV

SEQ ID NO: 31631 - protein, 51 aa, Homo sapiens
  MAP TO AC027663.12; EXPRESSED IN ADULT LIVER, SIGNAL = 1.7; EXPRESSED IN HEART, SIGNAL = 1.9; EXPRESSED IN BRAIN, SIGNAL = 2.2; EXPRESSED IN LUNG, SIGNAL = 1.5; SWISSPROT HIT: Q90953, EVALUE 8.20e+00
CYILWVRTNDITHLQLVTDSEYDSRSLNSETPAQTLENMSQYLMSYECYSD

SEQ ID NO: 31632 - protein, 18 aa, Homo sapiens
  MAP TO AL118559.4; EXPRESSED IN PLACENTA, SIGNAL = 0.62; EXPRESSED IN ADULT LIVER, SIGNAL = 0.82; EXPRESSED IN HELA, SIGNAL = 0.61
LRSPMRSIMRKCSKNWWC

SEQ ID NO: 31633 - protein, 79 aa, Homo sapiens
  MAP TO AC011452.5; EXPRESSED IN BRAIN, SIGNAL = 0.82; EXPRESSED IN PLACENTA, SIGNAL = 0.71; EXPRESSED IN HEART, SIGNAL = 0.96; EXPRESSED IN ADULT LIVER, SIGNAL = 0.85; SWISSPROT HIT: O09046, EVALUE 5.00e-14
LHLLVLVPILLSLVASQDWKAERSQDPFEKCMQDPDYEQLLKVVTWGLNRTLKPQRVIVVGAGVAGLVAAKVLSDAGHK

SEQ ID NO: 31634 - protein, 44 aa, Homo sapiens
  MAP TO AC011452.5; EXPRESSED IN BRAIN, SIGNAL = 0.82; EXPRESSED IN PLACENTA, SIGNAL = 0.71; EXPRESSED IN HEART, SIGNAL = 0.96; EXPRESSED IN ADULT LIVER, SIGNAL = 0.85
PCTSSSSSPSSSAWWPPRTGRLNAAKTPSRNACRILTMSSCSRW

SEQ ID NO: 31635 - protein, 40 aa, Homo sapiens
  MAP TO AC004090.24; EXPRESSED IN ADULT LIVER, SIGNAL = 1.7; EXPRESSED IN FETAL LIVER, SIGNAL = 0.59
CTGSMATLLGFWEGVRKLTVMVEGETGAGTSHGQSRKKRD

SEQ ID NO: 31636 - protein, 24 aa, Homo sapiens
  MAP TO AJ239328.2; EXPRESSED IN FETAL LIVER, SIGNAL = 1.2; EXPRESSED IN PLACENTA, SIGNAL = 0.84; EXPRESSED IN ADULT LIVER, SIGNAL = 0.87
PHRKVPPFPTAQSPPPPLSFLQVV

SEQ ID NO: 31637 - protein, 25 aa, Homo sapiens
  MAP TO AJ239328.2; EXPRESSED IN FETAL LIVER, SIGNAL = 1.2; EXPRESSED IN PLACENTA, SIGNAL = 0.84; EXPRESSED IN ADULT LIVER, SIGNAL = 0.87; SWISSPROT HIT: P57721, EVALUE 8.00e-09
SPPKGATIPYRPKPASTPVIFAGGQ

SEQ ID NO: 31638 - protein, 21 aa, Homo sapiens
  MAP TO AC025811.1; EXPRESSED IN BRAIN, SIGNAL = 1.3; EXPRESSED IN LUNG, SIGNAL = 0.99; EXPRESSED IN PLACENTA, SIGNAL = 1.4; EXPRESSED IN ADULT LIVER, SIGNAL = 1.5
QASLSDGTLECCCGNWGSCKM

SEQ ID NO: 31639 - protein, 21 aa, Homo sapiens
  MAP TO AC011452.5; EXPRESSED IN BRAIN, SIGNAL = 0.82; EXPRESSED IN PLACENTA, SIGNAL = 0.71; EXPRESSED IN HEART, SIGNAL = 0.96; EXPRESSED IN ADULT LIVER, SIGNAL = 0.85
PAPPRPRPHPPQPGGLPGLEG

SEQ ID NO: 31640 - protein, 26 aa, Homo sapiens
  MAP TO AC024561.4; EXPRESSED IN ADULT LIVER, SIGNAL = 0.44; EXPRESSED IN BRAIN, SIGNAL = 0.57
VHLQSATMNWGTDISFQCIAWHRQST

SEQ ID NO: 31641 - protein, 25 aa, Homo sapiens
  MAP TO AC004461.3; EXPRESSED IN ADULT LIVER, SIGNAL = 0.76; EXPRESSED IN FETAL LIVER, SIGNAL = 0.83; EXPRESSED IN HELA, SIGNAL = 1.9
EKHKEQLRQVNPGKGAAGHYQLVNP

SEQ ID NO: 31642 - protein, 62 aa, Homo sapiens
  MAP TO AC018555.4; EXPRESSED IN BRAIN, SIGNAL = 1.1; EXPRESSED IN LUNG, SIGNAL = 0.51; EXPRESSED IN PLACENTA, SIGNAL =   1; EXPRESSED IN ADULT LIVER, SIGNAL = 1.1; SWISSPROT HIT: Q57252, EVALUE 1.60e+00
RPDLQSKHTVKLKQIVKGINRGLQEIFGKYQTYHFLKQVPSCCGLAGLPGHRAFFVHPVYWR

SEQ ID NO: 31643 - protein, 57 aa, Homo sapiens
  MAP TO AC026404.4; EXPRESSED IN BRAIN, SIGNAL = 1.4; EXPRESSED IN LUNG, SIGNAL = 1.3; EXPRESSED IN PLACENTA, SIGNAL = 3.4; EXPRESSED IN ADULT LIVER, SIGNAL = 1.4; SWISSPROT HIT: P41257, EVALUE 8.00e+00
VKPKSDVLSQLSLRGPTVQIIAEEQRFPNVFYPETFIQMEADMEAQHVKWENMTIHS

SEQ ID NO: 31644 - protein, 42 aa, Homo sapiens
  MAP TO AC010645.5; EXPRESSED IN ADULT LIVER, SIGNAL = 0.9; EXPRESSED IN HEART, SIGNAL = 1.1; SWISSPROT HIT: O75820, EVALUE 4.00e-08
GTVTFEDVAVKFTQEEWNLLSEAQRCLYRDVTLENLALMSSL

SEQ ID NO: 31645 - protein, 50 aa, Homo sapiens
  MAP TO AC005680.1; EXPRESSED IN BRAIN, SIGNAL = 1.3; EXPRESSED IN PLACENTA, SIGNAL = 1.6; EXPRESSED IN HEART, SIGNAL = 2.3; EXPRESSED IN ADULT LIVER, SIGNAL = 1.5; SWISSPROT HIT: P52746, EVALUE 6.30e+00
PNLLILGKEISFASKHFLKSNLLMSLGILCPHNPPIHYLNAEKLETFSKG

SEQ ID NO: 31646 - protein, 49 aa, Homo sapiens
  MAP TO AC005570.1; EXPRESSED IN ADULT LIVER, SIGNAL = 0.51; EXPRESSED IN BRAIN, SIGNAL = 0.54; EXPRESSED IN HELA, SIGNAL = 0.49; SWISSPROT HIT: P81286, EVALUE 1.00e-07
GDSGGPLTCLQSGSWVLVGVVSWGKGCALPNRPGVYTSVATYSPWIQAR

SEQ ID NO: 31647 - protein, 153 aa, Homo sapiens
  MAP TO AC004189.1; EXPRESSED IN PLACENTA, SIGNAL = 0.4; EXPRESSED IN ADULT LIVER, SIGNAL = 0.68; SWISSPROT HIT: Q02084, EVALUE 3.00e-25
HISLDPQTSHPKLLLSEDHQRAQFSYKWQNSPDNPQRFDRATCVLAHTGITGGRHTWVVSIDLAHGGSCTVGVVSEDVQRKGELRLRPEEGVWAVRLAWGFVSALGSFPTRLTLKEQPRQVRVSLDYEVGWVTFTNAVTREPIYTFTASFTRK

SEQ ID NO: 31648 - protein, 51 aa, Homo sapiens
  MAP TO AC004189.1; EXPRESSED IN PLACENTA, SIGNAL = 0.4; EXPRESSED IN ADULT LIVER, SIGNAL = 0.68; SWISSPROT HIT: Q99160, EVALUE 4.80e+00
LPTPSSSCPRTTSELSSPTNGRTHQTTPSVLTGPPVFWPTLASQGGDTRGW

SEQ ID NO: 31649 - protein, 38 aa, Homo sapiens
  MAP TO AC004189.1; EXPRESSED IN PLACENTA, SIGNAL = 0.4; EXPRESSED IN ADULT LIVER, SIGNAL = 0.68; SWISSPROT HIT: P48634, EVALUE 6.50e+00
SHFSRPSDFPPQAPLVRGPPASSVLLQMAELTRQPPAF

SEQ ID NO: 31650 - protein, 176 aa, Homo sapiens
  MAP TO AC025182.2; EXPRESSED IN LUNG, SIGNAL = 0.61; EXPRESSED IN BONE MARROW, SIGNAL = 1.1; EXPRESSED IN PLACENTA, SIGNAL = 1.3; EXPRESSED IN ADULT LIVER, SIGNAL =   1; SWISSPROT HIT: P03330, EVALUE 2.00e-04
EGQLVLKYKFITQAAPDIRRKLQKQAIGPDSILENLLRVATSVFYSRDREEAQEKERKHRRRMESLMAALEVCKVQDPLIAIHVANQGTLRRTVLAVRSHLDPVQPVARTTRGRTACRDGETSPSRTGLPNAPAELMGPRAQFLNSSGPNCRYAQEPWVILEIEGRRVDLLLDTGA

SEQ ID NO: 31651 - protein, 26 aa, Homo sapiens
  MAP TO AC004004.1; EXPRESSED IN ADULT LIVER, SIGNAL = 2.9; EXPRESSED IN HEART, SIGNAL = 3.4; EXPRESSED IN LUNG, SIGNAL = 3.1; EXPRESSED IN BRAIN, SIGNAL = 2.8; EXPRESSED IN FETAL LIVER, SIGNAL = 2.9; EXPRESSED IN BONE MARROW, SIGNAL = 1.9
LRSHAVSGMGGCLGLTDFKNEAADPR

SEQ ID NO: 31652 - protein, 18 aa, Homo sapiens
  MAP TO AC005680.1; EXPRESSED IN BRAIN, SIGNAL = 1.3; EXPRESSED IN PLACENTA, SIGNAL = 1.6; EXPRESSED IN HEART, SIGNAL = 2.3; EXPRESSED IN ADULT LIVER, SIGNAL = 1.5
GQIFSYWERKLALLQSTF

SEQ ID NO: 31653 - protein, 64 aa, Homo sapiens
  MAP TO AF230666.1; EXPRESSED IN ADULT LIVER, SIGNAL = 2.3; EXPRESSED IN HEART, SIGNAL = 1.5; EXPRESSED IN BRAIN, SIGNAL = 2.2; EXPRESSED IN BONE MARROW, SIGNAL = 1.4; EXPRESSED IN PLACENTA, SIGNAL = 2.5; SWISSPROT HIT: P24604, EVALUE 7.90e+00
QRWSAKYRYDKEWLNNGRMCGLSFFKENYSHLNAKKIVSTHHLLADVYGVTEVLHGLQLKIGIL

SEQ ID NO: 31654 - protein, 18 aa, Homo sapiens
  MAP TO AF230666.1; EXPRESSED IN ADULT LIVER, SIGNAL = 2.3; EXPRESSED IN HEART, SIGNAL = 1.5; EXPRESSED IN BRAIN, SIGNAL = 2.2; EXPRESSED IN BONE MARROW, SIGNAL = 1.4; EXPRESSED IN PLACENTA, SIGNAL = 2.5
CAGYHFSKKIILISMPKR

SEQ ID NO: 31655 - protein, 20 aa, Homo sapiens
  MAP TO AC010593.4; EXPRESSED IN BRAIN, SIGNAL = 0.95; EXPRESSED IN PLACENTA, SIGNAL = 0.69; EXPRESSED IN ADULT LIVER, SIGNAL = 0.89
KAPAQCPLLVSGSQARASCQ

SEQ ID NO: 31656 - protein, 18 aa, Homo sapiens
  MAP TO AC025467.3; EXPRESSED IN BONE MARROW, SIGNAL = 1.5; EXPRESSED IN PLACENTA, SIGNAL = 1.3; EXPRESSED IN ADULT LIVER, SIGNAL = 1.3; EXPRESSED IN BRAIN, SIGNAL = 1.3; EXPRESSED IN LUNG, SIGNAL = 0.95
KFCRRPVRGLDWREHGGV

SEQ ID NO: 31657 - protein, 57 aa, Homo sapiens
  MAP TO AC006138.1; EXPRESSED IN PLACENTA, SIGNAL = 0.58; EXPRESSED IN ADULT LIVER, SIGNAL = 0.77; EXPRESSED IN LUNG, SIGNAL = 1.7; EXPRESSED IN FETAL LIVER, SIGNAL = 0.68; EXPRESSED IN BONE MARROW, SIGNAL = 0.71
KDKKKRKDEGKSRTTLPERPLTEVKAETRAEEAPEKKREKPKSLRTTAPSHAKFRST

SEQ ID NO: 31658 - protein, 21 aa, Homo sapiens
  MAP TO AC006138.1; EXPRESSED IN PLACENTA, SIGNAL = 0.58; EXPRESSED IN ADULT LIVER, SIGNAL = 0.77; EXPRESSED IN LUNG, SIGNAL = 1.7; EXPRESSED IN FETAL LIVER, SIGNAL = 0.68; EXPRESSED IN BONE MARROW, SIGNAL = 0.71
RKIRRNVKMKEKVELPFLSDL

SEQ ID NO: 31659 - protein, 46 aa, Homo sapiens
  MAP TO AC006565.3; EXPRESSED IN ADULT LIVER, SIGNAL = 2.1; EXPRESSED IN PLACENTA, SIGNAL = 3.1; EXPRESSED IN BRAIN, SIGNAL = 2.5; EXPRESSED IN LUNG, SIGNAL = 2.8; EXPRESSED IN HELA, SIGNAL = 2.4; EXPRESSED IN FETAL LIVER, SIGNAL = 3.6; SWISSPROT HIT: Q92609, EVALUE 3.70e+00
PLPSTNKKESPNKISANSPSLLNLLRKLFSPGLLQRNVWNGHLLSP

SEQ ID NO: 31660 - protein, 77 aa, Homo sapiens
  MAP TO AC002103.1; EXPRESSED IN ADULT LIVER, SIGNAL =   1; EXPRESSED IN HEART, SIGNAL = 1.4; EXPRESSED IN BRAIN, SIGNAL = 1.1; SWISSPROT HIT: P23258, EVALUE 1.30e+00
MLVIGFAAHPKLGWPLLEVLTSVTSAKTVFLNQVTFGGSGSQDKIGDVVHSPASALLTLSSVQTVTGCLVPLCPGLP

SEQ ID NO: 31661 - protein, 22 aa, Homo sapiens
  MAP TO AC024124.1; EXPRESSED IN BRAIN, SIGNAL = 1.7; EXPRESSED IN FETAL LIVER, SIGNAL = 2.8; EXPRESSED IN HELA, SIGNAL = 2.4; EXPRESSED IN PLACENTA, SIGNAL = 2.8; EXPRESSED IN BONE MARROW, SIGNAL = 1.5; EXPRESSED IN ADULT LIVER, SIGNAL =   2
CLCSSRRNRGSRKGHPRRPSTP

SEQ ID NO: 31662 - protein, 24 aa, Homo sapiens
  MAP TO AC004780.1; EXPRESSED IN ADULT LIVER, SIGNAL = 0.5; EXPRESSED IN BRAIN, SIGNAL = 0.47
PPSPPSTGCFTRPWIWQPGTPRVC

SEQ ID NO: 31663 - protein, 53 aa, Homo sapiens
  MAP TO AC004780.1; EXPRESSED IN ADULT LIVER, SIGNAL = 0.5; EXPRESSED IN BRAIN, SIGNAL = 0.47
ARPDFQSASFHPSGHPGHLQHLLHHHLPDASHAPGFGSQGHQECADSDLPWQH

SEQ ID NO: 31664 - protein, 31 aa, Homo sapiens
  MAP TO AC006506.1; EXPRESSED IN ADULT LIVER, SIGNAL = 2.1; EXPRESSED IN BRAIN, SIGNAL = 2.5; EXPRESSED IN LUNG, SIGNAL = 1.3; EXPRESSED IN FETAL LIVER, SIGNAL = 1.5; EXPRESSED IN HELA, SIGNAL = 2.3; EXPRESSED IN PLACENTA, SIGNAL = 2.3
LTARTLWAVLSSAESNSHSLWALSSPTRASC

SEQ ID NO: 31665 - protein, 57 aa, Homo sapiens
  MAP TO AC010336.5; EXPRESSED IN BRAIN, SIGNAL = 1.3; EXPRESSED IN BONE MARROW, SIGNAL = 2.1; EXPRESSED IN PLACENTA, SIGNAL = 1.3; EXPRESSED IN HEART, SIGNAL =   1; EXPRESSED IN ADULT LIVER, SIGNAL = 1.5; SWISSPROT HIT: O43615, EVALUE 9.00e-26
SKSYSSGNRKGFLSGLLDNVKQELAKNKEMKESIKKFRDEARRLEESDVLQEARRKY

SEQ ID NO: 31666 - protein, 157 aa, Homo sapiens
  MAP TO AC010979.3; EXPRESSED IN HEART, SIGNAL = 1.7; EXPRESSED IN ADULT LIVER, SIGNAL = 1.7; EXPRESSED IN HELA, SIGNAL = 2.1; EXPRESSED IN BRAIN, SIGNAL = 2.4; EXPRESSED IN BONE MARROW, SIGNAL = 2.4; SWISSPROT HIT: P23795, EVALUE 5.00e-16
MLRPQGLLWLPLLFTSVCVMLNSNVLLWITALAIKFTLIDSQAQYPVVNTNYGKIQGLRTPLPSEILGPVEQYLGVPYASPPTGERRFQPPESPSSWTGIRNATQFSAVCPQHLDERFLLHDMLPIWFTTSLDTLMTYVQDQNEDCLYLNIYVPMED

SEQ ID NO: 31667 - protein, 20 aa, Homo sapiens
  MAP TO AC010979.3; EXPRESSED IN HEART, SIGNAL = 1.7; EXPRESSED IN ADULT LIVER, SIGNAL = 1.7; EXPRESSED IN HELA, SIGNAL = 2.1; EXPRESSED IN BRAIN, SIGNAL = 2.4; EXPRESSED IN BONE MARROW, SIGNAL = 2.4; SWISSPROT HIT: Q13639, EVALUE 8.80e+00
CCVPRDCYGSLCCSPLSVSC

SEQ ID NO: 31668 - protein, 38 aa, Homo sapiens
  MAP TO AC010979.3; EXPRESSED IN HEART, SIGNAL = 1.7; EXPRESSED IN ADULT LIVER, SIGNAL = 1.7; EXPRESSED IN HELA, SIGNAL = 2.1; EXPRESSED IN BRAIN, SIGNAL = 2.4; EXPRESSED IN BONE MARROW, SIGNAL = 2.4
VASPGTAMAPFVVHLCLCHVKLQCSSVDNCSCHQVHPH

SEQ ID NO: 31669 - protein, 134 aa, Homo sapiens
  MAP TO AL022579.1; EXPRESSED IN BONE MARROW, SIGNAL = 0.9; EXPRESSED IN PLACENTA, SIGNAL = 1.8; EXPRESSED IN ADULT LIVER, SIGNAL = 1.9; EXPRESSED IN HEART, SIGNAL = 1.3; EXPRESSED IN BRAIN, SIGNAL =   1; EXPRESSED IN FETAL LIVER, SIGNAL = 1.5; SWISSPROT HIT: P31792, EVALUE 3.00e-11
MADLATATAECPICQQQKPTLNPQYGIILWGDQPVIWWQVDYIGLLPSWKRQRFVLTEINTYSRYGFSYPAPNASAKTTIRGLTECLIHHHGIPHSTASDRGTHFTAKEVQQWAHAHGIHWPYHVPHHPEAAGL

SEQ ID NO: 31670 - protein, 26 aa, Homo sapiens
  MAP TO AC007162.1; EXPRESSED IN ADULT LIVER, SIGNAL = 0.88; EXPRESSED IN LUNG, SIGNAL = 0.52; EXPRESSED IN FETAL LIVER, SIGNAL = 0.46; EXPRESSED IN BRAIN, SIGNAL = 0.85; EXPRESSED IN PLACENTA, SIGNAL = 0.83
LRPGKRGFDFTALHGLVQGSREQTAH

SEQ ID NO: 31671 - protein, 60 aa, Homo sapiens
  MAP TO AC011358.5; EXPRESSED IN ADULT LIVER, SIGNAL = 0.98; EXPRESSED IN LUNG, SIGNAL = 0.98; EXPRESSED IN BRAIN, SIGNAL = 1.1; EXPRESSED IN BONE MARROW, SIGNAL = 0.54; EXPRESSED IN PLACENTA, SIGNAL = 0.89
MVMMMMMIIMMMMMMMIMMMMMMIMMIMEKKIEEEEEETIMMLEVDSNLQNQKLRVGKDL

SEQ ID NO: 31672 - protein, 44 aa, Homo sapiens
  MAP TO AC011358.5; EXPRESSED IN ADULT LIVER, SIGNAL = 0.98; EXPRESSED IN LUNG, SIGNAL = 0.98; EXPRESSED IN BRAIN, SIGNAL = 1.1; EXPRESSED IN BONE MARROW, SIGNAL = 0.54; EXPRESSED IN PLACENTA, SIGNAL = 0.89
DGDDDDDDYNDDDDDDDNDDDDDDHDDNGKEDRGGRRGDNHDVG

SEQ ID NO: 31673 - protein, 18 aa, Homo sapiens
  MAP TO AL118558.2; EXPRESSED IN BRAIN, SIGNAL = 4.8; EXPRESSED IN BONE MARROW, SIGNAL = 3.8; EXPRESSED IN PLACENTA, SIGNAL = 3.9; EXPRESSED IN ADULT LIVER, SIGNAL = 3.5; EXPRESSED IN HEART, SIGNAL = 3.5
YRVGSPERCYKVLDQKQD

SEQ ID NO: 31674 - protein, 72 aa, Homo sapiens
  MAP TO AL118558.2; EXPRESSED IN ADULT LIVER, SIGNAL = 2.7; EXPRESSED IN HELA, SIGNAL = 6.4; EXPRESSED IN FETAL LIVER, SIGNAL = 4.8; SWISSPROT HIT: Q9JHU4, EVALUE 4.00e-37
GRQNISPDKIPWSALKTLMAQSIYGGRVDNEFDQRLLNTFLERLFTTRSFDSEFKLACKVDGHKDIQMPDGI

SEQ ID NO: 31675 - protein, 37 aa, Homo sapiens
  MAP TO AL109856.3; EXPRESSED IN ADULT LIVER, SIGNAL = 1.3; EXPRESSED IN LUNG, SIGNAL = 1.6; EXPRESSED IN FETAL LIVER, SIGNAL = 1.2; EXPRESSED IN BONE MARROW, SIGNAL = 1.3; EXPRESSED IN PLACENTA, SIGNAL = 1.7
MVPASASGELSKLSVVVEGKAGPDNSWQEREHKRGDE

SEQ ID NO: 31676 - protein, 38 aa, Homo sapiens
  MAP TO AL049856.1; EXPRESSED IN FETAL LIVER, SIGNAL = 1.9; EXPRESSED IN BONE MARROW, SIGNAL = 2.3; EXPRESSED IN PLACENTA, SIGNAL = 1.8; EXPRESSED IN ADULT LIVER, SIGNAL = 2.1; SWISSPROT HIT: P11035, EVALUE 5.90e-01
YTLEVLTCLTGYTPEVLICLIGYMPEVLIYLIGIHLRF

SEQ ID NO: 31677 - protein, 40 aa, Homo sapiens
  MAP TO AL021366.1; EXPRESSED IN PLACENTA, SIGNAL = 1.4; EXPRESSED IN HEART, SIGNAL = 1.2; EXPRESSED IN ADULT LIVER, SIGNAL = 1.9; SWISSPROT HIT: Q9Z1B8, EVALUE 5.00e-18
RGGALKKGPYARAMLGMKLSLPYGLKGLDWDAGHLSNRQQ

SEQ ID NO: 31678 - protein, 24 aa, Homo sapiens
  MAP TO AC009145.4; EXPRESSED IN ADULT LIVER, SIGNAL = 0.73; EXPRESSED IN FETAL LIVER, SIGNAL = 0.51; EXPRESSED IN BRAIN, SIGNAL = 0.61
GYGENLPKARSKWKQGHKEEGRRG

SEQ ID NO: 31679 - protein, 56 aa, Homo sapiens
  MAP TO AC008974.6; EXPRESSED IN BONE MARROW, SIGNAL = 0.87; EXPRESSED IN PLACENTA, SIGNAL = 0.55; EXPRESSED IN ADULT LIVER, SIGNAL = 0.8; SWISSPROT HIT: Q00535, EVALUE 2.80e+00
GGKHEPDPCLEPAPGRRVAMRSLPSNGELDPDVLESMASLGCFRDRERLHRELRSE

SEQ ID NO: 31680 - protein, 17 aa, Homo sapiens
  MAP TO AC008974.6; EXPRESSED IN BONE MARROW, SIGNAL = 0.87; EXPRESSED IN PLACENTA, SIGNAL = 0.55; EXPRESSED IN ADULT LIVER, SIGNAL = 0.8
AGNTSQTRAWSQPLAAG

SEQ ID NO: 31681 - protein, 55 aa, Homo sapiens
  MAP TO AC008974.6; EXPRESSED IN BONE MARROW, SIGNAL = 0.87; EXPRESSED IN PLACENTA, SIGNAL = 0.55; EXPRESSED IN ADULT LIVER, SIGNAL = 0.8; SWISSPROT HIT: Q28084, EVALUE 1.20e+00
RRETRARPVPGASPWPPGSHAEPAIQRRAGPRRPREHGITGLLQGPREAASRAAQ

SEQ ID NO: 31682 - protein, 61 aa, Homo sapiens
  MAP TO AL022069.1; EXPRESSED IN PLACENTA, SIGNAL = 0.65; EXPRESSED IN ADULT LIVER, SIGNAL = 0.62; EXPRESSED IN LUNG, SIGNAL =   1
MLFGQLASHAAISLWPGPPPWQIAGPHCHLAVAGATACPQHRLLPLSHGSWADTGCFRPEQ

SEQ ID NO: 31683 - protein, 152 aa, Homo sapiens
  MAP TO AC008456.4; EXPRESSED IN PLACENTA, SIGNAL = 0.52; EXPRESSED IN ADULT LIVER, SIGNAL = 0.68; EXPRESSED IN BRAIN, SIGNAL = 0.55; EXPRESSED IN BONE MARROW, SIGNAL = 0.84; SWISSPROT HIT: O54827, EVALUE 6.00e-33
VLIPISLYVSIELVKLGQVFFLSNDLDLYDEETDLSIQCRALNIAEDLGQIQYIFSDKTGTLTENKMVFRRCTIMGSEYSHQENGIEAPKGSIPLSKRKYPALLRNEEIKDILLALLEAVWHFHKLLPVSLWSSLSQIRAVPITCKLSFVYK

SEQ ID NO: 31684 - protein, 34 aa, Homo sapiens
  MAP TO AC010422.6; EXPRESSED IN BONE MARROW, SIGNAL = 2.5; EXPRESSED IN ADULT LIVER, SIGNAL = 1.5; EXPRESSED IN LUNG, SIGNAL =   2; EXPRESSED IN FETAL LIVER, SIGNAL = 2.1; EXPRESSED IN HELA, SIGNAL = 1.2; SWISSPROT HIT: O00754, EVALUE 9.00e-13
DLFSTFTITRLQETTLVANQLREAASRLKWTTNT

SEQ ID NO: 31685 - protein, 34 aa, Homo sapiens
  MAP TO AC010422.6; EXPRESSED IN BONE MARROW, SIGNAL = 2.5; EXPRESSED IN ADULT LIVER, SIGNAL = 1.5; EXPRESSED IN LUNG, SIGNAL =   2; EXPRESSED IN FETAL LIVER, SIGNAL = 2.1; EXPRESSED IN HELA, SIGNAL = 1.2
TCSPPSPSPACRRPRWWPTSSARQPPGSSGQQTQ

SEQ ID NO: 31686 - protein, 33 aa, Homo sapiens
  MAP TO AC010422.6; EXPRESSED IN BONE MARROW, SIGNAL = 2.5; EXPRESSED IN ADULT LIVER, SIGNAL = 1.5; EXPRESSED IN LUNG, SIGNAL =   2; EXPRESSED IN FETAL LIVER, SIGNAL = 2.1; EXPRESSED IN HELA, SIGNAL = 1.2
PVLHLHHHPPAGDHAGGQPAPRGSLQAQVDNKH

SEQ ID NO: 31687 - protein, 17 aa, Homo sapiens
  MAP TO AC008804.5; EXPRESSED IN PLACENTA, SIGNAL = 0.56; EXPRESSED IN ADULT LIVER, SIGNAL = 0.83
VSSMLNLHWAGNTMKYN

SEQ ID NO: 31688 - protein, 52 aa, Homo sapiens
  MAP TO AC007207.22; EXPRESSED IN BRAIN, SIGNAL = 0.43; EXPRESSED IN PLACENTA, SIGNAL = 0.6; EXPRESSED IN ADULT LIVER, SIGNAL = 0.71; SWISSPROT HIT: Q9UKQ2, EVALUE 1.60e+00
HHLKEVLREESEYIQYSDQGVCPEDRGQMASFQCAVRFSHCLSGLPSPERKE

SEQ ID NO: 31689 - protein, 32 aa, Homo sapiens
  MAP TO AF048727.1; EXPRESSED IN ADULT LIVER, SIGNAL = 0.78; EXPRESSED IN BRAIN, SIGNAL = 1.1; EXPRESSED IN FETAL LIVER, SIGNAL = 0.72; SWISSPROT HIT: P49454, EVALUE 3.90e+00
AQRESGICRPGGGPSPGTRHAGSRSHAFRPPE

SEQ ID NO: 31690 - protein, 33 aa, Homo sapiens
  MAP TO AF048727.1; EXPRESSED IN ADULT LIVER, SIGNAL = 0.78; EXPRESSED IN BRAIN, SIGNAL = 1.1; EXPRESSED IN FETAL LIVER, SIGNAL = 0.72
GTERKWHLQARRRALPRNPPCWLEIACLPASRT

SEQ ID NO: 31691 - protein, 68 aa, Homo sapiens
  MAP TO AC068323.6; EXPRESSED IN BONE MARROW, SIGNAL = 0.47; EXPRESSED IN PLACENTA, SIGNAL = 0.58; EXPRESSED IN ADULT LIVER, SIGNAL = 0.63; SWISSPROT HIT: Q01728, EVALUE 2.00e-05
SGELIFEPGEREATIAVNILDDTVPEKEESFKVQLKNPKGGAEIGINDSVTITILSNDDAYGIVAFAQ

SEQ ID NO: 31692 - protein, 70 aa, Homo sapiens
  MAP TO AL078640.7; EXPRESSED IN BONE MARROW, SIGNAL = 5.4; EXPRESSED IN PLACENTA, SIGNAL = 3.8; EXPRESSED IN ADULT LIVER, SIGNAL = 4.6; EXPRESSED IN BRAIN, SIGNAL =   6; EXPRESSED IN FETAL LIVER, SIGNAL = 3.8; SWISSPROT HIT: P17335, EVALUE 2.00e+00
ITSGLTAVGGGVSSTPISSGEMEAHAASAEGEWSAQKTATDQEKLVVNKAHSLRNNLNKTRKIRADYFNI

SEQ ID NO: 31693 - protein, 113 aa, Homo sapiens
  MAP TO AC008413.5; EXPRESSED IN HEART, SIGNAL =   5; EXPRESSED IN ADULT LIVER, SIGNAL = 2.8; EXPRESSED IN FETAL LIVER, SIGNAL = 2.3; EXPRESSED IN PLACENTA, SIGNAL = 2.8; SWISSPROT HIT: P47068, EVALUE 6.60e-02
PLFQEPCHTRTCTLSPLALPQLLQQAQHALALRLPHQLSACFSHSCFLSAFSPTASRSGQASPSCPESPRHPLTSKQIPPPFPSLPGQVSCDLTVAPPVPKPAPFICDLVCCS

SEQ ID NO: 31694 - protein, 66 aa, Homo sapiens
  MAP TO AC008413.5; EXPRESSED IN HEART, SIGNAL =   5; EXPRESSED IN ADULT LIVER, SIGNAL = 2.8; EXPRESSED IN FETAL LIVER, SIGNAL = 2.3; EXPRESSED IN PLACENTA, SIGNAL = 2.8; SWISSPROT HIT: P41271, EVALUE 7.10e+00
PSFPGTLPHPHLHPVPAGPPTAAAAGTARPCSALASPALCLLFSLVFSLCFLSNCQPIGSGKSILS

SEQ ID NO: 31695 - protein, 65 aa, Homo sapiens
  MAP TO AC010345.4; EXPRESSED IN HEART, SIGNAL = 1.2; EXPRESSED IN ADULT LIVER, SIGNAL = 1.7; EXPRESSED IN LUNG, SIGNAL = 0.82; EXPRESSED IN FETAL LIVER, SIGNAL = 1.2; EXPRESSED IN PLACENTA, SIGNAL = 0.97; SWISSPROT HIT: P93262, EVALUE 2.70e+00
VEKGGSRAGLRARTTHQQQPHPLGTCKKCKFWGLTPDVLKLQLKGEGLRSVFQQALQAILMSAST

SEQ ID NO: 31696 - protein, 79 aa, Homo sapiens
  MAP TO AC005569.1; EXPRESSED IN BONE MARROW, SIGNAL = 5.2; EXPRESSED IN PLACENTA, SIGNAL = 2.3; EXPRESSED IN ADULT LIVER, SIGNAL = 1.2; EXPRESSED IN FETAL LIVER, SIGNAL = 4.8
FSHYQNHHHHQNHHHHHFHHHQNRHDQHHLHRQQVLLFSVEPCYHLQGQPASQIYLRVSYLCLRLLTLHLPPQVQSAVH

SEQ ID NO: 31697 - protein, 24 aa, Homo sapiens
  MAP TO AC005569.1; EXPRESSED IN BONE MARROW, SIGNAL = 5.2; EXPRESSED IN PLACENTA, SIGNAL = 2.3; EXPRESSED IN ADULT LIVER, SIGNAL = 1.2; EXPRESSED IN FETAL LIVER, SIGNAL = 4.8
FSLSKSSSSSKSSSSSFSSSSKSS

SEQ ID NO: 31698 - protein, 24 aa, Homo sapiens
  MAP TO AL109764.2; EXPRESSED IN ADULT LIVER, SIGNAL =   5; EXPRESSED IN FETAL LIVER, SIGNAL = 5.8; EXPRESSED IN BONE MARROW, SIGNAL = 4.9; EXPRESSED IN PLACENTA, SIGNAL = 4.9
SENDTLKYAALKLKLRAPGKQQMQ

SEQ ID NO: 31699 - protein, 20 aa, Homo sapiens
  MAP TO AL109764.2; EXPRESSED IN ADULT LIVER, SIGNAL =   5; EXPRESSED IN FETAL LIVER, SIGNAL = 5.8; EXPRESSED IN BONE MARROW, SIGNAL = 4.9; EXPRESSED IN PLACENTA, SIGNAL = 4.9
IEKGSNSSAFRHKASKTIVI

SEQ ID NO: 31700 - protein, 58 aa, Homo sapiens
  MAP TO AL109797.18; EXPRESSED IN HELA, SIGNAL = 1.4; EXPRESSED IN BONE MARROW, SIGNAL = 1.6; EXPRESSED IN ADULT LIVER, SIGNAL = 1.2
AMEILKESGPGQWNGLEMNLKEDHILAILSTLTTIGLPQCKAMKRPMVISWRDHIVLG

SEQ ID NO: 31701 - protein, 87 aa, Homo sapiens
  MAP TO AL109797.18; EXPRESSED IN HELA, SIGNAL = 1.4; EXPRESSED IN BONE MARROW, SIGNAL = 1.6; EXPRESSED IN ADULT LIVER, SIGNAL = 1.2; SWISSPROT HIT: P70398, EVALUE 6.00e-40
GNGDLKRKWTWAVEWLGDELERRPYTGNPQYTYNNWSPPVQSNETSNGYFLERSHSARMTLAKACELCPEEVKKATSVQQIEMEESK

SEQ ID NO: 31702 - protein, 31 aa, Homo sapiens
  MAP TO AC016628.5; EXPRESSED IN HEART, SIGNAL = 2.8; EXPRESSED IN LUNG, SIGNAL = 1.4; EXPRESSED IN HELA, SIGNAL =   2; EXPRESSED IN BONE MARROW, SIGNAL = 2.6; EXPRESSED IN ADULT LIVER, SIGNAL = 2.6
SSFKLPDSCRKLPSFIAGTIKPQTILFWWEI

SEQ ID NO: 31703 - protein, 49 aa, Homo sapiens
  MAP TO AC008527.4; EXPRESSED IN ADULT LIVER, SIGNAL =   1; EXPRESSED IN BRAIN, SIGNAL = 1.1; SWISSPROT HIT: P28834, EVALUE 6.30e+00
MTLLRSQRHFRLARDSFMKKLTQAEVATEAKRSMLKLQDGLRNIDLPNY

SEQ ID NO: 31704 - protein, 48 aa, Homo sapiens
  MAP TO AC009320.7; EXPRESSED IN BRAIN, SIGNAL = 0.8; EXPRESSED IN PLACENTA, SIGNAL = 0.92; EXPRESSED IN HEART, SIGNAL = 0.98; EXPRESSED IN ADULT LIVER, SIGNAL = 0.77; EXPRESSED IN FETAL LIVER, SIGNAL = 0.78; SWISSPROT HIT: O67178, EVALUE 1.00e-02
ALQVAHKAEILSPLGALYYNTGRYEEALQIYQEAAALQPSQRELRLAL

SEQ ID NO: 31705 - protein, 47 aa, Homo sapiens
  MAP TO AC009320.7; EXPRESSED IN BRAIN, SIGNAL = 0.8; EXPRESSED IN PLACENTA, SIGNAL = 0.92; EXPRESSED IN HEART, SIGNAL = 0.98; EXPRESSED IN ADULT LIVER, SIGNAL = 0.77; EXPRESSED IN FETAL LIVER, SIGNAL = 0.78
PCRWHTKLRYCHLWEHCITTLADTKRLCRFTRKLQHFSLLRGSSAWH

SEQ ID NO: 31706 - protein, 115 aa, Homo sapiens
  MAP TO AC008462.5; EXPRESSED IN BONE MARROW, SIGNAL = 5.8; EXPRESSED IN ADULT LIVER, SIGNAL =   6; EXPRESSED IN LUNG, SIGNAL = 8.4; EXPRESSED IN FETAL LIVER, SIGNAL =  13; SWISSPROT HIT: P52167, EVALUE 4.00e-01
AAGMGPGWRTSARAVQKGNVGSEPPHRVPTGALPSGAVRREPLSSRPQNGRSTDSLHRAPGKAADTQHQPVKAARRGPIPCKATGAELPKAVGAHLLHQHDLDMRPGVKEDHLEL

SEQ ID NO: 31707 - protein, 26 aa, Homo sapiens
  MAP TO AC008033.8; EXPRESSED IN ADULT LIVER, SIGNAL = 8.2; EXPRESSED IN FETAL LIVER, SIGNAL =  10; EXPRESSED IN BRAIN, SIGNAL = 7.7; EXPRESSED IN BONE MARROW, SIGNAL = 6.2; EXPRESSED IN PLACENTA, SIGNAL = 9.4
FLLLPPCKKDLLPPTMILSPPQPRGT

SEQ ID NO: 31708 - protein, 57 aa, Homo sapiens
  MAP TO AD000813.1; EXPRESSED IN LUNG, SIGNAL = 2.6; EXPRESSED IN PLACENTA, SIGNAL = 2.1; EXPRESSED IN ADULT LIVER, SIGNAL = 2.5; SWISSPROT HIT: Q39190, EVALUE 1.00e-03
NGHRPAVRIWDVEEKNQVAEMLGHKYGVACVAFSPNMKHIVSMGYQHDMVLNVWDWK

SEQ ID NO: 31709 - protein, 21 aa, Homo sapiens
  MAP TO AD000813.1; EXPRESSED IN LUNG, SIGNAL = 2.6; EXPRESSED IN PLACENTA, SIGNAL = 2.1; EXPRESSED IN ADULT LIVER, SIGNAL = 2.5
MGIGLLCASGMWRRRIRWRRC

SEQ ID NO: 31710 - protein, 25 aa, Homo sapiens
  MAP TO AC007013.1; EXPRESSED IN ADULT LIVER, SIGNAL = 7.2; EXPRESSED IN BRAIN, SIGNAL = 7.4; EXPRESSED IN PLACENTA, SIGNAL = 8.4
THQSTRGFYRSGPQRGPHSCADLLV

SEQ ID NO: 31711 - protein, 25 aa, Homo sapiens
  MAP TO AC007013.1; EXPRESSED IN ADULT LIVER, SIGNAL = 7.2; EXPRESSED IN BRAIN, SIGNAL = 7.4; EXPRESSED IN PLACENTA, SIGNAL = 8.4
LINQPEGFTEVAHKEAPTLVLTCWL

SEQ ID NO: 31712 - protein, 169 aa, Homo sapiens
  MAP TO AC007788.1; EXPRESSED IN ADULT LIVER, SIGNAL =   1; EXPRESSED IN BRAIN, SIGNAL = 0.87; EXPRESSED IN HELA, SIGNAL = 0.91; SWISSPROT HIT: P10264, EVALUE 4.80e-02
PSPIHYSPSPSCHFGSSTSHFAIHSTCLSVAFFTHGCQSSSVYLCLFYSFNVPFSHSQTSLHQYVGLNLTFLKEFKDSCTQYGPTSPNVKTALQTLCGGNFASFRLGPFDISSSNPISAWRAEKGHLQAQLNQTNGILITQAQLTGSDSFSDTYAQLGFDALTRKQVTK

SEQ ID NO: 31713 - protein, 41 aa, Homo sapiens
  MAP TO AC007788.1; EXPRESSED IN ADULT LIVER, SIGNAL =   1; EXPRESSED IN BRAIN, SIGNAL = 0.87; EXPRESSED IN HELA, SIGNAL = 0.91; SWISSPROT HIT: P31902, EVALUE 4.90e+00
PSSHMDASHHQYTSASFTPSMSLSHILKLVCISMWDSILPF

SEQ ID NO: 31714 - protein, 63 aa, Homo sapiens
  MAP TO AC010499.4; EXPRESSED IN ADULT LIVER, SIGNAL = 0.59; EXPRESSED IN BONE MARROW, SIGNAL = 0.87; SWISSPROT HIT: P05672, EVALUE 9.30e-01
SGLIDADVLEKQALKNCAQAIEEHGTMNRGSKPKVLKMISRETSGNLNHQLPLVHTEETETQK

SEQ ID NO: 31715 - protein, 32 aa, Homo sapiens
  MAP TO AF172277.1; EXPRESSED IN PLACENTA, SIGNAL = 0.73; EXPRESSED IN ADULT LIVER, SIGNAL = 1.1
MCLNIIKISYLILRTLKWNGKTVGYGVTQTWL

SEQ ID NO: 31716 - protein, 81 aa, Homo sapiens
  MAP TO AC006138.1; EXPRESSED IN ADULT LIVER, SIGNAL = 1.2; SWISSPROT HIT: Q10580, EVALUE 1.00e+00
NVNKIKDFGEAAKREILSDRHAFETARRLSHDNMEEKVPWVCPRPLVLPSPLVTPGSNSQERYIQAEREKGILQELFLNKE

SEQ ID NO: 31717 - protein, 33 aa, Homo sapiens
  MAP TO AC004712.1; EXPRESSED IN HELA, SIGNAL = 0.52; EXPRESSED IN ADULT LIVER, SIGNAL = 0.48
MFWMEDQTSHISLSQSLIQNKILTLFNSMKAER

SEQ ID NO: 31718 - protein, 41 aa, Homo sapiens
  MAP TO AC006162.1; EXPRESSED IN ADULT LIVER, SIGNAL = 0.59; EXPRESSED IN HELA, SIGNAL = 0.66; SWISSPROT HIT: O59786, EVALUE 8.40e+00
MFEQLKPIEPVQKTLPWVGEVAATLQEAMKRDCWREARVKK

SEQ ID NO: 31719 - protein, 40 aa, Homo sapiens
  MAP TO AC026693.3; EXPRESSED IN PLACENTA, SIGNAL = 0.99; EXPRESSED IN ADULT LIVER, SIGNAL = 0.92
LVDDEPHAGASKDKECDQAKLPGILSMRVAEKLDLGEDPI

SEQ ID NO: 31720 - protein, 20 aa, Homo sapiens
  MAP TO AL117187.3; EXPRESSED IN BONE MARROW, SIGNAL = 2.6; EXPRESSED IN ADULT LIVER, SIGNAL = 2.1; EXPRESSED IN HEART, SIGNAL = 2.1; EXPRESSED IN PLACENTA, SIGNAL = 2.5; EXPRESSED IN LUNG, SIGNAL = 1.3; EXPRESSED IN BRAIN, SIGNAL = 3.1
MAWRCRTLRAVGGVGWLSWR

SEQ ID NO: 31721 - protein, 64 aa, Homo sapiens
  MAP TO AL117187.3; EXPRESSED IN BONE MARROW, SIGNAL = 2.6; EXPRESSED IN ADULT LIVER, SIGNAL = 2.1; EXPRESSED IN HEART, SIGNAL = 2.1; EXPRESSED IN PLACENTA, SIGNAL = 2.5; EXPRESSED IN LUNG, SIGNAL = 1.3; EXPRESSED IN BRAIN, SIGNAL = 3.1; SWISSPROT HIT: Q15149, EVALUE 1.00e-08
YGVAVQDFAGSWRSGLAFLAVIKAIDPSLVDMKQALENSTRENLEKAFSIAQDALHIPRLLEPE

SEQ ID NO: 31722 - protein, 32 aa, Homo sapiens
  MAP TO AC008625.4; EXPRESSED IN HELA, SIGNAL = 0.48; EXPRESSED IN PLACENTA, SIGNAL = 0.63; EXPRESSED IN ADULT LIVER, SIGNAL = 0.68; EXPRESSED IN LUNG, SIGNAL = 0.5; EXPRESSED IN FETAL LIVER, SIGNAL = 0.48
TQSIWESTPWSSPRGKKRRSSRREAGRGPPTR

SEQ ID NO: 31723 - protein, 107 aa, Homo sapiens
  MAP TO AC011452.5; EXPRESSED IN BONE MARROW, SIGNAL =   3; EXPRESSED IN ADULT LIVER, SIGNAL =   3; EXPRESSED IN BRAIN, SIGNAL = 1.8; EXPRESSED IN PLACENTA, SIGNAL = 3.7; SWISSPROT HIT: Q14157, EVALUE 2.30e-02
SGSRPPTPKSSPQKTRKSPQVTRGSPQKTSCSPQKTRQSPQTLKRSRVTTSLEALPTGTVLTDKSGRQWKLKSFQTRDNQGILYEGTLCPWAARDWVVSAPGQWEGT

SEQ ID NO: 31724 - protein, 21 aa, Homo sapiens
  MAP TO AC011452.5; EXPRESSED IN BONE MARROW, SIGNAL =   3; EXPRESSED IN ADULT LIVER, SIGNAL =   3; EXPRESSED IN BRAIN, SIGNAL = 1.8; EXPRESSED IN PLACENTA, SIGNAL = 3.7; SWISSPROT HIT: O00268, EVALUE 4.00e+00
APGADPQPPKAALRRPGRALR

SEQ ID NO: 31725 - protein, 24 aa, Homo sapiens
  MAP TO AC011452.5; EXPRESSED IN BONE MARROW, SIGNAL =   3; EXPRESSED IN ADULT LIVER, SIGNAL =   3; EXPRESSED IN BRAIN, SIGNAL = 1.8; EXPRESSED IN PLACENTA, SIGNAL = 3.7; SWISSPROT HIT: P22460, EVALUE 6.80e+00
LREQTPNPQKQPSEDQEEPSGDQG

SEQ ID NO: 31726 - protein, 111 aa, Homo sapiens
  MAP TO AC020945.6; EXPRESSED IN ADULT LIVER, SIGNAL = 3.7; EXPRESSED IN BRAIN, SIGNAL = 3.4; EXPRESSED IN BONE MARROW, SIGNAL = 4.7; EXPRESSED IN PLACENTA, SIGNAL =   4; SWISSPROT HIT: P09016, EVALUE 2.00e+00
VLLGVRAVPSLGYTEDPELPGLFHPVLGTPCQPPSLPEEGSPGAVYLLSKQGKSWHYQLWDYDQVRESNLQLTDFSPSRATDGRVYVVPVGGVRAGLCGQALLLTPQDCSH

SEQ ID NO: 31727 - protein, 72 aa, Homo sapiens
  MAP TO AC020945.6; EXPRESSED IN ADULT LIVER, SIGNAL = 3.7; EXPRESSED IN BRAIN, SIGNAL = 3.4; EXPRESSED IN BONE MARROW, SIGNAL = 4.7; EXPRESSED IN PLACENTA, SIGNAL =   4; SWISSPROT HIT: P55268, EVALUE 1.40e+00
GSCWVFGLCPVSATLRTLSCRACSTQCWARPANHHPCQRRAPRELSTCCPSRARVGTISCGTTTRSGRATCS

SEQ ID NO: 31728 - protein, 110 aa, Homo sapiens [sequence omitted]

SEQ ID NO: 31729 - protein, 32 aa, Homo sapiens
  MAP TO AC021092.1; EXPRESSED IN BONE MARROW, SIGNAL = 1.3; EXPRESSED IN PLACENTA, SIGNAL = 0.9; EXPRESSED IN ADULT LIVER, SIGNAL = 0.88
STVEKNHSNVKSVGKDLLRIHNFILIAESTLE

SEQ ID NO: 31730 - protein, 76 aa, Homo sapiens
  MAP TO AC006479.2; EXPRESSED IN BONE MARROW, SIGNAL = 0.78; EXPRESSED IN PLACENTA, SIGNAL = 2.2; EXPRESSED IN HEART, SIGNAL =   4; EXPRESSED IN ADULT LIVER, SIGNAL = 8.2; EXPRESSED IN FETAL LIVER, SIGNAL = 5.8; SWISSPROT HIT: P24055, EVALUE 9.00e+00
GYISSLLTLAGFATAMAAVVLCVNSFIWQTEPFLYIDTVCDRSDPVFPTTGYRWMRRSQENQWQKEECRAYMQMLR

SEQ ID NO: 31731 - protein, 22 aa, Homo sapiens
  MAP TO AC006479.2; EXPRESSED IN BONE MARROW, SIGNAL = 0.78; EXPRESSED IN PLACENTA, SIGNAL = 2.2; EXPRESSED IN HEART, SIGNAL =   4; EXPRESSED IN ADULT LIVER, SIGNAL = 8.2; EXPRESSED IN FETAL LIVER, SIGNAL = 5.8
AIYPACSPWQALLQLWLLLSSA

SEQ ID NO: 31732 - protein, 23 aa, Homo sapiens
  MAP TO AC006479.2; EXPRESSED IN BONE MARROW, SIGNAL = 0.78; EXPRESSED IN PLACENTA, SIGNAL = 2.2; EXPRESSED IN HEART, SIGNAL =   4; EXPRESSED IN ADULT LIVER, SIGNAL = 8.2; EXPRESSED IN FETAL LIVER, SIGNAL = 5.8
LYIQPAHPGRLCYSYGCCCPLRE

SEQ ID NO: 31733 - protein, 44 aa, Homo sapiens
  MAP TO AL121592.14; EXPRESSED IN LUNG, SIGNAL =   4; EXPRESSED IN FETAL LIVER, SIGNAL = 8.1; EXPRESSED IN PLACENTA, SIGNAL =   9; EXPRESSED IN ADULT LIVER, SIGNAL = 6.4; EXPRESSED IN HEART, SIGNAL = 8.1
MQTWIEDEMDELTEVGFRRWVIANSAELKEHVLIQCKEAKNLDK

SEQ ID NO: 31734 - protein, 27 aa, Homo sapiens
  MAP TO AC006275.1; EXPRESSED IN PLACENTA, SIGNAL = 2.6; EXPRESSED IN ADULT LIVER, SIGNAL = 1.5
MFSRFHSVSYGVTGPGRRHRLTCVQEV

SEQ ID NO: 31735 - protein, 25 aa, Homo sapiens
  MAP TO AL050316.15; EXPRESSED IN ADULT LIVER, SIGNAL = 0.98; EXPRESSED IN HEART, SIGNAL = 1.3; EXPRESSED IN HELA, SIGNAL = 0.79; EXPRESSED IN FETAL LIVER, SIGNAL =   1
EANDLLEVIQLIRKNPNPPKVFDLA

SEQ ID NO: 31736 - protein, 25 aa, Homo sapiens
  MAP TO AL050316.15; EXPRESSED IN ADULT LIVER, SIGNAL = 0.98; EXPRESSED IN HEART, SIGNAL = 1.3; EXPRESSED IN HELA, SIGNAL = 0.79; EXPRESSED IN FETAL LIVER, SIGNAL =   1
KQMTYLKSSSSSERTPTLPRYLTLQ

SEQ ID NO: 31737 - protein, 65 aa, Homo sapiens
  MAP TO AC010327.5; EXPRESSED IN HEART, SIGNAL = 1.4; EXPRESSED IN LUNG, SIGNAL =   1; EXPRESSED IN FETAL LIVER, SIGNAL = 1.7; EXPRESSED IN BRAIN, SIGNAL = 1.2; EXPRESSED IN PLACENTA, SIGNAL = 1.8; EXPRESSED IN ADULT LIVER, SIGNAL = 1.2
SHLDTLLEREDLSLPELLDEEDVLQECKVVNRKLLDFLLQPPHLQAMVAWVTQEPPDSGEERLRY

SEQ ID NO: 31738 - protein, 62 aa, Homo sapiens
  MAP TO AC005932.1; EXPRESSED IN HELA, SIGNAL = 0.6; EXPRESSED IN PLACENTA, SIGNAL = 0.57; EXPRESSED IN ADULT LIVER, SIGNAL = 0.58; SWISSPROT HIT: P31544, EVALUE 6.10e+00
MTSDRILQKKENQAKHQVKTAVVAEGYFVEVVIQGNSTPKGPEAGMCSAPWDSIEEAAVTEA

SEQ ID NO: 31739 - protein, 92 aa, Homo sapiens
  MAP TO AC008999.5; EXPRESSED IN ADULT LIVER, SIGNAL =  38; EXPRESSED IN HEART, SIGNAL =  94; EXPRESSED IN FETAL LIVER, SIGNAL =  36; EXPRESSED IN LUNG, SIGNAL =  17; EXPRESSED IN PLACENTA, SIGNAL =  30; SWISSPROT HIT: P06731, EVALUE 2.00e-49
EPPKPFITSNNSNPVEDEDAVALTCEPEIQNTTYLWWVNNQSLPVSPRLQLSNDNRTLTLLSVTRNDVGPYECGIQNKLSVDHSDPVILNVL

SEQ ID NO: 31740 - protein, 21 aa, Homo sapiens
  MAP TO AC008999.5; EXPRESSED IN ADULT LIVER, SIGNAL =  38; EXPRESSED IN HEART, SIGNAL =  94; EXPRESSED IN FETAL LIVER, SIGNAL =  36; EXPRESSED IN LUNG, SIGNAL =  17; EXPRESSED IN PLACENTA, SIGNAL =  30
QSHPNPSSPATTPTPWRMRML

SEQ ID NO: 31741 - protein, 17 aa, Homo sapiens
  MAP TO AC008999.5; EXPRESSED IN ADULT LIVER, SIGNAL =  38; EXPRESSED IN HEART, SIGNAL =  94; EXPRESSED IN FETAL LIVER, SIGNAL =  36; EXPRESSED IN LUNG, SIGNAL =  17; EXPRESSED IN PLACENTA, SIGNAL =  30
RATQTLHHQQQLQPRGG

SEQ ID NO: 31742 - protein, 75 aa, Homo sapiens
  MAP TO AC009318.11; EXPRESSED IN ADULT LIVER, SIGNAL = 0.59; EXPRESSED IN LUNG, SIGNAL = 1.1; SWISSPROT HIT: Q08891, EVALUE 1.00e-08
TSFRSYKRKGGIMSTIAAFYGGKSILITGATGFLGKVLMEKLFRTSPDLKVIYILVRPKAGQTLQQRVFQILDSK

SEQ ID NO: 31743 - protein, 38 aa, Homo sapiens
  MAP TO AC009318.11; EXPRESSED IN ADULT LIVER, SIGNAL = 0.59; EXPRESSED IN LUNG, SIGNAL = 1.1; SWISSPROT HIT: P49926, EVALUE 2.20e+00
EPLSGAIKEREESCPQLQLSMAASPFSSRGPQAFWAKC

SEQ ID NO: 31744 - protein, 20 aa, Homo sapiens
  MAP TO AC009509.7; EXPRESSED IN LUNG, SIGNAL = 0.81; EXPRESSED IN ADULT LIVER, SIGNAL = 0.56
LEGASSQEVVSSQGVSSQGK

SEQ ID NO: 31745 - protein, 51 aa, Homo sapiens
  MAP TO AC000361.1; EXPRESSED IN PLACENTA, SIGNAL = 0.41; EXPRESSED IN ADULT LIVER, SIGNAL = 0.35
QSGHYVKNGLEGNKNGAHLEGHCNHPDEKCSDLDRSRDRVDEGEQFQVNRD

SEQ ID NO: 31746 - protein, 34 aa, Homo sapiens
  MAP TO AC008886.4; EXPRESSED IN BONE MARROW, SIGNAL = 0.46; EXPRESSED IN PLACENTA, SIGNAL = 0.41; EXPRESSED IN ADULT LIVER, SIGNAL = 0.41; EXPRESSED IN LUNG, SIGNAL = 0.9
GILWKQNRGKKIPSLKPRCSRSLRLIHKVTPKMP

SEQ ID NO: 31747 - protein, 19 aa, Homo sapiens
  MAP TO AF201337.1; EXPRESSED IN FETAL LIVER, SIGNAL = 0.78; EXPRESSED IN ADULT LIVER, SIGNAL = 0.51
KSSKSCTQSTFNSIVQVSS

SEQ ID NO: 31748 - protein, 25 aa, Homo sapiens
  MAP TO AC009567.8; EXPRESSED IN LUNG, SIGNAL = 0.53; EXPRESSED IN ADULT LIVER, SIGNAL = 0.52
KRKPMQLHFYTLNFSVRNSPTRIVL

SEQ ID NO: 31749 - protein, 53 aa, Homo sapiens
  MAP TO AL121886.22; EXPRESSED IN PLACENTA, SIGNAL = 0.93; EXPRESSED IN ADULT LIVER, SIGNAL = 1.1; EXPRESSED IN LUNG, SIGNAL = 1.3; EXPRESSED IN BONE MARROW, SIGNAL = 1.1; EXPRESSED IN BRAIN, SIGNAL = 0.91
LLLTQTASCSSRFLMGTTWQALYLQVAIFLAFLGFFLLHDARWYWNLLSGIRW

SEQ ID NO: 31750 - protein, 61 aa, Homo sapiens
  MAP TO AC016943.7; EXPRESSED IN ADULT LIVER, SIGNAL = 0.76; EXPRESSED IN LUNG, SIGNAL = 0.51; EXPRESSED IN PLACENTA, SIGNAL = 0.81; SWISSPROT HIT: Q95207, EVALUE 7.90e+00
LKLKDGEFKEKKKVHQYFIPDFSQFITTDKKSLRLENLQEISTLELKKKSLIISSVLEVKR

SEQ ID NO: 31751 - protein, 49 aa, Homo sapiens
  MAP TO AC000388.1; EXPRESSED IN FETAL LIVER, SIGNAL = 0.56; EXPRESSED IN HELA, SIGNAL = 0.43; EXPRESSED IN ADULT LIVER, SIGNAL = 0.74; SWISSPROT HIT: P17588, EVALUE 2.80e+00
GRLLPGRGRGRGPAQLVPHHHRAAGPEVPVPAHRQLRGPGYDQYPGPSQ

SEQ ID NO: 31752 - protein, 48 aa, Homo sapiens
  MAP TO AC000388.1; EXPRESSED IN FETAL LIVER, SIGNAL = 0.56; EXPRESSED IN HELA, SIGNAL = 0.43; EXPRESSED IN ADULT LIVER, SIGNAL = 0.74
DGYYLAVGGAVAQHNWSHITTVLQDQKSQCQLIDSSEDLGMISIQGPA

SEQ ID NO: 31753 - protein, 60 aa, Homo sapiens
  MAP TO AC004035.1; EXPRESSED IN ADULT LIVER, SIGNAL = 1.1; EXPRESSED IN LUNG, SIGNAL = 0.78; EXPRESSED IN HELA, SIGNAL = 1.1; EXPRESSED IN BRAIN, SIGNAL = 1.1; EXPRESSED IN BONE MARROW, SIGNAL = 0.73; EXPRESSED IN PLACENTA, SIGNAL = 0.92; SWISSPROT HIT: P35811, EVALUE 2.10e+00
KRANEPVAYSMLKPETDSDSPSVSSKGARFVSASVEINHIMARGYDGRSSQRNSCVVINA

SEQ ID NO: 31754 - protein, 66 aa, Homo sapiens
  MAP TO AC008974.6; EXPRESSED IN BRAIN, SIGNAL = 2.6; EXPRESSED IN PLACENTA, SIGNAL = 0.7; EXPRESSED IN ADULT LIVER, SIGNAL = 0.99
IPSLSHSVLSQTSFRAEYKASGGPSVFQKPVRFQVDISSSEGPEPSPRRDGSGGGGIYSVTFTLIS

SEQ ID NO: 31755 - protein, 39 aa, Homo sapiens
  MAP TO AC008974.6; EXPRESSED IN BRAIN, SIGNAL = 2.6; EXPRESSED IN PLACENTA, SIGNAL = 0.7; EXPRESSED IN ADULT LIVER, SIGNAL = 0.99
PQPESQCAVTDQLQGRVQGQWRPLRLPKARPLPGGHQLL

SEQ ID NO: 31756 - protein, 42 aa, Homo sapiens
  MAP TO AC010320.7; EXPRESSED IN BRAIN, SIGNAL = 0.86; EXPRESSED IN HELA, SIGNAL = 0.89; EXPRESSED IN PLACENTA, SIGNAL = 1.2; EXPRESSED IN HEART, SIGNAL = 1.4; EXPRESSED IN ADULT LIVER, SIGNAL = 0.85; SWISSPROT HIT: O75346, EVALUE 3.00e-12
GPLTFRDVAIEFSQEEWKSLDPVQKALYWDVMLENYRNLVFL

SEQ ID NO: 31757 - protein, 35 aa, Homo sapiens
  MAP TO AC020923.4; EXPRESSED IN ADULT LIVER, SIGNAL = 2.2; EXPRESSED IN BRAIN, SIGNAL = 2.2; SWISSPROT HIT: P08855, EVALUE 9.00e-05
QSDKDLDDALDKLSDSLGQRQPDPDENKPMEDKVK

SEQ ID NO: 31758 - protein, 35 aa, Homo sapiens
  MAP TO AC010206.8; EXPRESSED IN PLACENTA, SIGNAL = 1.1; EXPRESSED IN HEART, SIGNAL = 1.1; EXPRESSED IN ADULT LIVER, SIGNAL = 0.87
VSFWTLETTLKVWLKDQPASKTLWNSSPVPQLLAT

SEQ ID NO: 31759 - protein, 47 aa, Homo sapiens
  MAP TO AF196968.1; EXPRESSED IN ADULT LIVER, SIGNAL = 1.4; EXPRESSED IN PLACENTA, SIGNAL = 1.7; EXPRESSED IN BRAIN, SIGNAL = 1.4; EXPRESSED IN LUNG, SIGNAL = 0.63; SWISSPROT HIT: P53211, EVALUE 8.30e+00
WVLGTEPTPVKQSWCSCFCSSVNARTPIWDTPACVPKGQLSSWPLSQ

SEQ ID NO: 31760 - protein, 47 aa, Homo sapiens
  MAP TO AF196968.1; EXPRESSED IN ADULT LIVER, SIGNAL = 1.4; EXPRESSED IN PLACENTA, SIGNAL = 1.7; EXPRESSED IN BRAIN, SIGNAL = 1.4; EXPRESSED IN LUNG, SIGNAL = 0.63
MGLGDRANTSETELVFMFLQQRERQDSHLGHTSVCTKRTAVIMASFP

SEQ ID NO: 31761 - protein, 41 aa, Homo sapiens
  MAP TO AL121594.3; EXPRESSED IN PLACENTA, SIGNAL = 0.57; EXPRESSED IN ADULT LIVER, SIGNAL = 0.73; EXPRESSED IN FETAL LIVER, SIGNAL = 0.86; SWISSPROT HIT: P92127, EVALUE 2.20e+00
PAPGTQAPPGSCSDCFRGTSRVSSALACRTHGSGASSSTEL

SEQ ID NO: 31762 - protein, 48 aa, Homo sapiens
  MAP TO AF198097.1; EXPRESSED IN ADULT LIVER, SIGNAL = 0.73
AMDNRGFQQGSFSSFQNSSSDEDLMDIPATAMDFSMRDDVPPLDREVG

SEQ ID NO: 31763 - protein, 24 aa, Homo sapiens
  MAP TO AF198097.1; EXPRESSED IN ADULT LIVER, SIGNAL = 0.73
VPWITEAFSRGVLVASRTAPVMKT

SEQ ID NO: 31764 - protein, 34 aa, Homo sapiens
  MAP TO AF129108.1; EXPRESSED IN ADULT LIVER, SIGNAL = 2.8; EXPRESSED IN BRAIN, SIGNAL = 2.5; EXPRESSED IN BONE MARROW, SIGNAL = 3.9; EXPRESSED IN PLACENTA, SIGNAL = 1.9; SWISSPROT HIT: P33834, EVALUE 5.00e+00
VCLTEGSQNVDTSAEMGKSGADQATPTGREEIGG

SEQ ID NO: 31765 - protein, 73 aa, Homo sapiens
  MAP TO AC010328.4; EXPRESSED IN PLACENTA, SIGNAL = 0.9; EXPRESSED IN ADULT LIVER, SIGNAL = 0.92; EXPRESSED IN FETAL LIVER, SIGNAL = 0.68; EXPRESSED IN BRAIN, SIGNAL =   1; SWISSPROT HIT: Q07343, EVALUE 7.70e+00
EILLSCFSLTGKCCLLNPKNRDAMGARRGKHRPPHSAEAPPPSFFPPDAVARGTRPGFRSALSFLQTRKQIAR

SEQ ID NO: 31766 - protein, 35 aa, Homo sapiens
  MAP TO AC000390.1; EXPRESSED IN ADULT LIVER, SIGNAL = 1.3; EXPRESSED IN FETAL LIVER, SIGNAL = 0.6; EXPRESSED IN PLACENTA, SIGNAL = 2.2
QSSCLRMMGNMTRPVNSIRMSPLSHFFSHKVSALV

SEQ ID NO: 31767 - protein, 24 aa, Homo sapiens
  MAP TO AC006005.1; EXPRESSED IN ADULT LIVER, SIGNAL = 0.69; EXPRESSED IN BRAIN, SIGNAL = 0.53
SGMLSKCCTKFMTSVSLSQNGIQT

SEQ ID NO: 31768 - protein, 27 aa, Homo sapiens
  MAP TO AC010393.4; EXPRESSED IN BONE MARROW, SIGNAL = 0.83; EXPRESSED IN ADULT LIVER, SIGNAL = 0.82
EQLRITHRRTHPKQGKADSRLPAFAPS

SEQ ID NO: 31769 - protein, 32 aa, Homo sapiens
  MAP TO AC010393.4; EXPRESSED IN BONE MARROW, SIGNAL = 0.83; EXPRESSED IN ADULT LIVER, SIGNAL = 0.82
TSNSGSHTGGLTQSRGRRTPGFQLLPHHDSGS

SEQ ID NO: 31770 - protein, 44 aa, Homo sapiens
  MAP TO AC008716.6; EXPRESSED IN BRAIN, SIGNAL = 0.48; EXPRESSED IN BONE MARROW, SIGNAL = 0.5; EXPRESSED IN ADULT LIVER, SIGNAL = 0.34; SWISSPROT HIT: Q28046, EVALUE 4.90e+00
PVFWNAENRDKIKSPVTNPKEVKLYKLSSKEFKISVLMKLAAYN

SEQ ID NO: 31771 - protein, 50 aa, Homo sapiens
  MAP TO AF165141.1; EXPRESSED IN BONE MARROW, SIGNAL = 0.66; EXPRESSED IN PLACENTA, SIGNAL = 1.4; EXPRESSED IN HEART, SIGNAL = 2.3; EXPRESSED IN ADULT LIVER, SIGNAL = 1.3; EXPRESSED IN HELA, SIGNAL =   2; SWISSPROT HIT: P97697, EVALUE 2.00e-23
IRSVGTAAVNMCLVATGGADAYYEMGIHCWDVAGAGIIVTEAGGVLMDVT

SEQ ID NO: 31772 - protein, 45 aa, Homo sapiens
  MAP TO AF165141.1; EXPRESSED IN BONE MARROW, SIGNAL = 0.66; EXPRESSED IN PLACENTA, SIGNAL = 1.4; EXPRESSED IN HEART, SIGNAL = 2.3; EXPRESSED IN ADULT LIVER, SIGNAL = 1.3; EXPRESSED IN HELA, SIGNAL =   2
SGVLEQQLLICALWQLAEQMHIMKWEFTAGMLQELALLLLKLVAC

SEQ ID NO: 31773 - protein, 40 aa, Homo sapiens
  MAP TO AC005582.1; EXPRESSED IN ADULT LIVER, SIGNAL = 1.2; EXPRESSED IN HEART, SIGNAL = 1.2
CHSGGGTGRVKNCLEQEACQRAAEMEEKIFGLCLMSTTNA

SEQ ID NO: 31774 - protein, 47 aa, Homo sapiens
  MAP TO AL022069.1; EXPRESSED IN BRAIN, SIGNAL = 0.94; EXPRESSED IN PLACENTA, SIGNAL = 0.76; EXPRESSED IN ADULT LIVER, SIGNAL = 0.65; SWISSPROT HIT: Q15349, EVALUE 3.00e-23
FGLSKEAIDHDKRAYSFCGTIEYMAPEVVNRRGHTQSADWWSFGVLM

SEQ ID NO: 31775 - protein, 89 aa, Homo sapiens
  MAP TO AC008795.5; EXPRESSED IN ADULT LIVER, SIGNAL =   1; SWISSPROT HIT: P40480, EVALUE 4.10e-01
HRRVIRSITAAKYREKQQVKDVQKLRKKEPKTLLPHDPTADVFVTPAEEKPIEIQWVKPEPKVDLKARKKRIYKRQRKMKQRMDSGKTK

SEQ ID NO: 31776 - protein, 35 aa, Homo sapiens
  MAP TO AC008795.5; EXPRESSED IN ADULT LIVER, SIGNAL =   1
SACHKIHHSCKIQRETASERCAKTEKERAEDSSST

SEQ ID NO: 31777 - protein, 167 aa, Homo sapiens
  MAP TO AC005605.1; EXPRESSED IN PLACENTA, SIGNAL = 0.47; EXPRESSED IN ADULT LIVER, SIGNAL = 0.41; SWISSPROT HIT: O95013, EVALUE 5.00e-39
VTAEAISWNESTSETNNSMVTEFIFLGLSDSQGLQTFLFMLFFVFYGGIVFGNLLIVITVVSDSHLHSPMYFLLANLSLIDLSLSSVTAPKMITDFFSQRKVISFKGCLVQIFLLHFFGGSEMVILIAMGFDRYIAICKPLHYTTIMCGNACVGIMAVAWGIGFLHS

SEQ ID NO: 31778 - protein, 35 aa, Homo sapiens
  MAP TO AL109767.3; EXPRESSED IN PLACENTA, SIGNAL = 5.2; EXPRESSED IN HEART, SIGNAL = 9.2; EXPRESSED IN ADULT LIVER, SIGNAL = 9.6
SVSQTPSPWNTWAADTLSRVVAVAAWGWGGAVLCR

SEQ ID NO: 31779 - protein, 59 aa, Homo sapiens
  MAP TO AC006117.1; EXPRESSED IN BONE MARROW, SIGNAL = 1.5; EXPRESSED IN PLACENTA, SIGNAL = 1.1; EXPRESSED IN HEART, SIGNAL = 1.3; EXPRESSED IN ADULT LIVER, SIGNAL = 0.76; SWISSPROT HIT: P50552, EVALUE 6.00e-13
LNVTPGIGGGEAGPLSNLIAVPNHTNSPRMKSSSSVTTSETQPCTPSSSDYSDLQRVKQ

SEQ ID NO: 31780 - protein, 63 aa, Homo sapiens
  MAP TO AF172277.1; EXPRESSED IN BONE MARROW, SIGNAL = 1.3; EXPRESSED IN PLACENTA, SIGNAL = 1.1; EXPRESSED IN ADULT LIVER, SIGNAL =   1; SWISSPROT HIT: Q01635, EVALUE 1.00e-20
TFRPAAMLVERSTDYGHNWKVFKYFAKDCATSFPNITSGQAQGVGDIVCDSKYSDIEPSTGGE

SEQ ID NO: 31781 - protein, 57 aa, Homo sapiens
  MAP TO AC010316.5; EXPRESSED IN BONE MARROW, SIGNAL = 2.9; EXPRESSED IN HEART, SIGNAL = 1.9; EXPRESSED IN ADULT LIVER, SIGNAL = 2.5; EXPRESSED IN LUNG, SIGNAL = 1.9; EXPRESSED IN BRAIN, SIGNAL =   2; EXPRESSED IN FETAL LIVER, SIGNAL = 1.7; SWISSPROT HIT: P54731, EVALUE 6.10e+00
EERNQTQVLRQQQDEAYLASLRADQEKERKKREERERKRRKEEEVQQQKLAEERRRQ

SEQ ID NO: 31782 - protein, 21 aa, Homo sapiens
  MAP TO AC011387.4; EXPRESSED IN LUNG, SIGNAL = 0.69; EXPRESSED IN ADULT LIVER, SIGNAL = 0.68
CWRGPHGKELREPSSHQEMRS

SEQ ID NO: 31783 - protein, 80 aa, Homo sapiens
  MAP TO AC008727.5; EXPRESSED IN BRAIN, SIGNAL = 0.63; EXPRESSED IN ADULT LIVER, SIGNAL = 0.78; EXPRESSED IN FETAL LIVER, SIGNAL = 0.81; EXPRESSED IN PLACENTA, SIGNAL = 0.58; SWISSPROT HIT: P26016, EVALUE 2.40e+00
DQCLFTKLPVATPEDGSFLHSGNTGSSNLHLTGGSLQPYRRMKELGFRALQTWTSMDGSTFHNRHAKGVWMTLKASDSCL

SEQ ID NO: 31784 - protein, 41 aa, Homo sapiens
  MAP TO AC000372.1; EXPRESSED IN ADULT LIVER, SIGNAL = 0.54; EXPRESSED IN HELA, SIGNAL = 0.51; EXPRESSED IN PLACENTA, SIGNAL = 0.44
FMQPRLTSDMSKPVMVPPEKDCAFLVTTSGSEWACAGRGQK

SEQ ID NO: 31785 - protein, 44 aa, Homo sapiens
  MAP TO AC025754.2; EXPRESSED IN ADULT LIVER, SIGNAL = 2.7; EXPRESSED IN PLACENTA, SIGNAL = 2.3; EXPRESSED IN BONE MARROW, SIGNAL = 1.5
MLANIPWTKISHMAKARVHMGRAVHRHECWEAWFTGDTKVTAHH

SEQ ID NO: 31786 - protein, 68 aa, Homo sapiens
  MAP TO AC025754.2; EXPRESSED IN ADULT LIVER, SIGNAL = 2.7; EXPRESSED IN PLACENTA, SIGNAL = 2.3; EXPRESSED IN BONE MARROW, SIGNAL = 1.5; SWISSPROT HIT: Q28203, EVALUE 8.60e-01
WIPRRSVPQGCTPVCKCLSISATSCLPTSHGQKLVTWPRPGSTWEGLYTGMNAGKRGSLGTQKSQPTI

SEQ ID NO: 31787 - protein, 38 aa, Homo sapiens
  MAP TO AC000127.1; EXPRESSED IN PLACENTA, SIGNAL = 0.68; EXPRESSED IN ADULT LIVER, SIGNAL =   1; EXPRESSED IN BRAIN, SIGNAL = 0.95
CLMNTCPMSAILQLSFALFKLIKLKSNLRLLFLLSHHT

SEQ ID NO: 31788 - protein, 31 aa, Homo sapiens
  MAP TO AL096870.3; EXPRESSED IN PLACENTA, SIGNAL = 0.51; EXPRESSED IN ADULT LIVER, SIGNAL = 1.5; EXPRESSED IN LUNG, SIGNAL = 1.5; EXPRESSED IN FETAL LIVER, SIGNAL = 0.72; SWISSPROT HIT: P80248, EVALUE 6.60e+00
VTSWLLTVPTSCGAMGSAVCLCGRGLCRQNC

SEQ ID NO: 31789 - protein, 49 aa, Homo sapiens
  MAP TO AL096870.3; EXPRESSED IN PLACENTA, SIGNAL = 0.51; EXPRESSED IN ADULT LIVER, SIGNAL = 1.5; EXPRESSED IN LUNG, SIGNAL = 1.5; EXPRESSED IN FETAL LIVER, SIGNAL = 0.72; SWISSPROT HIT: Q9GME3, EVALUE 9.70e-01
CDKLAADCAHELRRHGVSCVSLWPGIVQTELLKEHMAKEEVLQDPVLKQ

SEQ ID NO: 31790 - protein, 60 aa, Homo sapiens
  MAP TO AC010219.4; EXPRESSED IN BRAIN, SIGNAL = 1.6; EXPRESSED IN BONE MARROW, SIGNAL = 1.3; EXPRESSED IN HEART, SIGNAL = 1.2; EXPRESSED IN ADULT LIVER, SIGNAL = 1.6
AEQLASWVESISYLFLASVVMSTQLQSPADLGVNPLNKCMTLRNDLPPRVSVSWPVTEKK

SEQ ID NO: 31791 - protein, 130 aa, Homo sapiens
  MAP TO AC025761.3; EXPRESSED IN ADULT LIVER, SIGNAL =   2; EXPRESSED IN BRAIN, SIGNAL = 1.8; EXPRESSED IN BONE MARROW, SIGNAL =   2; SWISSPROT HIT: Q11122, EVALUE 1.00e-22
LFMVDNGADDWRIAMTYERIFFICLEILVCAIHPIPGNYTFTWTARLAFSYAPSTTTADVDIILSIPMFLRLYLIARVMLLHSKLFTDASSRSIGALNKINFNTRFVMKTLMTICPGTVLLVFSISLWII

SEQ ID NO: 31792 - protein, 70 aa, Homo sapiens
  MAP TO AC010271.5; EXPRESSED IN BONE MARROW, SIGNAL = 1.7; EXPRESSED IN HEART, SIGNAL = 1.4; EXPRESSED IN ADULT LIVER, SIGNAL = 2.1; SWISSPROT HIT: Q9QZR5, EVALUE 7.00e-15
MAELHLGWPLYPGNNEYDQVRYICETQGLPKPHLLHAACKAHHFFKRNPHPDAANPWQLKSSADYLAETK

SEQ ID NO: 31793 - protein, 48 aa, Homo sapiens
  MAP TO AC010485.4; EXPRESSED IN PLACENTA, SIGNAL = 0.72; EXPRESSED IN ADULT LIVER, SIGNAL = 0.81; SWISSPROT HIT: P54320, EVALUE 1.50e-01
TGGCSPGPSAGGWAETLPPTPGAGASVSAPTPWAAGRVSDLAVAMRSG

SEQ ID NO: 31794 - protein, 71 aa, Homo sapiens
  MAP TO AC003972.1; EXPRESSED IN BONE MARROW, SIGNAL = 2.6; EXPRESSED IN PLACENTA, SIGNAL = 3.1; EXPRESSED IN HEART, SIGNAL = 1.6; EXPRESSED IN ADULT LIVER, SIGNAL = 3.8; EXPRESSED IN HELA, SIGNAL = 3.3; SWISSPROT HIT: Q09820, EVALUE 2.00e-24
LILVGDHCQLGPVVMCKKAAKAGLSQSLFERLVVLGIRPIRLQVQYRMHPALSAFPSNIFYEGSLQNGVTA

SEQ ID NO: 31795 - protein, 70 aa, Homo sapiens
  MAP TO AC003972.1; EXPRESSED IN BONE MARROW, SIGNAL = 2.6; EXPRESSED IN PLACENTA, SIGNAL = 3.1; EXPRESSED IN HEART, SIGNAL = 1.6; EXPRESSED IN ADULT LIVER, SIGNAL = 3.8; EXPRESSED IN HELA, SIGNAL = 3.3
DPCRRPLPAGPSGDVQEGGQGRAVTVALRAPGGAGHPAHPPAGPVPDAPCTQRLPIQHLLRGLPPEWCHC

SEQ ID NO: 31796 - protein, 82 aa, Homo sapiens
  MAP TO AC010327.5; EXPRESSED IN BONE MARROW, SIGNAL = 2.2; EXPRESSED IN ADULT LIVER, SIGNAL = 2.3; EXPRESSED IN FETAL LIVER, SIGNAL = 2.4; EXPRESSED IN BRAIN, SIGNAL = 1.9; SWISSPROT HIT: P21918, EVALUE 1.50e+00
RPDVCRWLSPFILSCCVYFCLWIPEDQLSWFAALVKCLPVLCLAGFLWVMSPSGGYTQLLQGALVCSAVGDACLIWPAAFVP

SEQ ID NO: 31797 - protein, 97 aa, Homo sapiens
  MAP TO AC012000.3; EXPRESSED IN PLACENTA, SIGNAL = 1.2; EXPRESSED IN HEART, SIGNAL = 1.3; EXPRESSED IN ADULT LIVER, SIGNAL = 1.6; EXPRESSED IN BRAIN, SIGNAL = 1.2; SWISSPROT HIT: Q43130, EVALUE 3.60e+00
KKVQSEAASANVEAEASYQEDLAKIIDEGGYTGKPILNVDETALYWKKMPSRTSIAKEEKSMPGSKALKDRLTLSLGADAAGDFKLKSVPIHHSKKS

SEQ ID NO: 31798 - protein, 71 aa, Homo sapiens
  MAP TO AC004177.2; EXPRESSED IN ADULT LIVER, SIGNAL = 0.59; EXPRESSED IN HELA, SIGNAL = 0.87
SLYCLKNCSPIRIYHIVRFVAISFLVWGLPLVVLVYLPGKEYLTFAFDLLLLLSMVVSMAQPAIYFLAGYL

SEQ ID NO: 31799 - protein, 78 aa, Homo sapiens
  MAP TO AC010205.5; EXPRESSED IN ADULT LIVER, SIGNAL =   1; EXPRESSED IN BRAIN, SIGNAL = 0.92; EXPRESSED IN BONE MARROW, SIGNAL = 0.8; SWISSPROT HIT: P50502, EVALUE 1.00e-10
ANTSYEIKLDTPLLRGYAKPVPGPETGLQPLSFAHCLPTLDLRKVNELRDFVKMYKQDPSILHTKEMCFLREQVESMG

SEQ ID NO: 31800 - protein, 37 aa, Homo sapiens
  MAP TO AC008648.4; EXPRESSED IN ADULT LIVER, SIGNAL = 0.64
MLLGVLMEPQEQSACLTDAFAVSFGFFRPGTLDTDHK

SEQ ID NO: 31801 - protein, 36 aa, Homo sapiens
  MAP TO AC008648.4; EXPRESSED IN ADULT LIVER, SIGNAL = 0.64
CFWVSSWSLRNNLHASLMLLPSVLGFLDLGRLTLTT

SEQ ID NO: 31802 - protein, 24 aa, Homo sapiens
  MAP TO AC000367.1; EXPRESSED IN ADULT LIVER, SIGNAL = 0.35
SQLDCKPHEDNNHFCFAHEHVLDI

SEQ ID NO: 31803 - protein, 23 aa, Homo sapiens
  MAP TO AL031709.10; EXPRESSED IN PLACENTA, SIGNAL = 1.9; EXPRESSED IN ADULT LIVER, SIGNAL = 1.7
WSWRVEKATGWPMCPSRAPASTR

SEQ ID NO: 31804 - protein, 38 aa, Homo sapiens
  MAP TO AL031709.10; EXPRESSED IN PLACENTA, SIGNAL = 1.9; EXPRESSED IN ADULT LIVER, SIGNAL = 1.7; SWISSPROT HIT: P14314, EVALUE 9.10e-02
VELACGKSNRLAHVSEPSTCVYALTFETPLVCHPHALL

SEQ ID NO: 31805 - protein, 27 aa, Homo sapiens
  MAP TO AC008859.4; EXPRESSED IN ADULT LIVER, SIGNAL = 0.66; EXPRESSED IN FETAL LIVER, SIGNAL = 0.65
AIPANPKGMTSMAALAGQRAWRSQKTP

SEQ ID NO: 31806 - protein, 28 aa, Homo sapiens
  MAP TO AL008640.1; EXPRESSED IN PLACENTA, SIGNAL = 2.2; EXPRESSED IN ADULT LIVER, SIGNAL =   2
SPGRAALQSTLTETRAKARLEMLYASAS

SEQ ID NO: 31807 - protein, 52 aa, Homo sapiens
  MAP TO AC002450.1; EXPRESSED IN BRAIN, SIGNAL = 0.52; EXPRESSED IN ADULT LIVER, SIGNAL = 0.65; SWISSPROT HIT: Q9UJS0, EVALUE 7.00e-25
VGATAVYPIDLVKTRMQNQRSTGSFVGELMYKNSFDCFKKVLRYEGFFGLYR

SEQ ID NO: 31808 - protein, 47 aa, Homo sapiens
  MAP TO AC010524.5; EXPRESSED IN ADULT LIVER, SIGNAL = 0.85; EXPRESSED IN LUNG, SIGNAL = 0.62; EXPRESSED IN BRAIN, SIGNAL =   1; SWISSPROT HIT: P26692, EVALUE 6.30e+00
WKISWKDTKPVKAQMKMPHGFGRPMNVPRKKVPWRILWKTSPMKFQI

SEQ ID NO: 31809 - protein, 21 aa, Homo sapiens
  MAP TO AC010524.5; EXPRESSED IN ADULT LIVER, SIGNAL = 0.85; EXPRESSED IN LUNG, SIGNAL = 0.62; EXPRESSED IN BRAIN, SIGNAL =   1
WRIPWWKTLETKAQIRMPHWT

SEQ ID NO: 31810 - protein, 31 aa, Homo sapiens
  MAP TO AC010524.5; EXPRESSED IN ADULT LIVER, SIGNAL = 0.85; EXPRESSED IN LUNG, SIGNAL = 0.62; EXPRESSED IN BRAIN, SIGNAL =   1; SWISSPROT HIT: P12080, EVALUE 2.30e+00
HPTGFEGQRTCQGKSSHGGYPGGRPWKRKLR

SEQ ID NO: 31811 - protein, 99 aa, Homo sapiens
  MAP TO AC010407.4; EXPRESSED IN FETAL LIVER, SIGNAL = 0.44; EXPRESSED IN ADULT LIVER, SIGNAL = 0.64
STAWTPAGVKIPLTGTGSREILGRRGRVPGEGPTLKPGTMAQSKNLHPCFPAPMLPFPKPPMACPTPDLVPIRTQDHPAGSRRSSWTSETTIGRQRKAF

SEQ ID NO: 31812 - protein, 52 aa, Homo sapiens
  MAP TO AB022537.1; EXPRESSED IN HEART, SIGNAL = 0.92; EXPRESSED IN ADULT LIVER, SIGNAL = 0.71; EXPRESSED IN BRAIN, SIGNAL = 0.62; SWISSPROT HIT: P39904, EVALUE 3.70e+00
YPFEALFRSQHYALLDNSCREYLFICEFFVVSGPAAHDLFHAVMGRTLSMTL

SEQ ID NO: 31813 - protein, 39 aa, Homo sapiens
  MAP TO AC010511.6; EXPRESSED IN HEART, SIGNAL = 1.3; EXPRESSED IN FETAL LIVER, SIGNAL = 0.84; EXPRESSED IN ADULT LIVER, SIGNAL = 1.5
AVQREEEGHQVGLQEKQRQVEYAAVLCKVVCLKEQCPRL

SEQ ID NO: 31814 - protein, 51 aa, Homo sapiens
  MAP TO AC010511.6; EXPRESSED IN HEART, SIGNAL = 1.3; EXPRESSED IN FETAL LIVER, SIGNAL = 0.84; EXPRESSED IN ADULT LIVER, SIGNAL = 1.5
HGEVVQRHLVTISFSAALLRRSRGKRKVTRLASRRNSGRLSMQLSFARWSV

SEQ ID NO: 31815 - protein, 74 aa, Homo sapiens
  MAP TO AC000388.1; EXPRESSED IN BRAIN, SIGNAL = 1.2; EXPRESSED IN BONE MARROW, SIGNAL = 1.2; EXPRESSED IN ADULT LIVER, SIGNAL = 2.6; EXPRESSED IN PLACENTA, SIGNAL = 1.3
RFHHSLTDHPRWIRERSHESYAKNYSVVFPHDEPLAGRNMRRDPLHEVTPLQLLLGTGSEGLGRPQGSGVTEMQ

SEQ ID NO: 31816 - protein, 65 aa, Homo sapiens
  MAP TO AL121896.10; EXPRESSED IN LUNG, SIGNAL =   1; EXPRESSED IN HELA, SIGNAL = 0.82; EXPRESSED IN PLACENTA, SIGNAL = 0.67; EXPRESSED IN ADULT LIVER, SIGNAL = 0.71
KWMTYNFWACGRGKNATCRLEMTRTSENDLKHNQEGLWHGRERAMLGDTHTLAWREEEMEQKQAL

SEQ ID NO: 31817 - protein, 36 aa, Homo sapiens
  MAP TO AC000371.1; EXPRESSED IN ADULT LIVER, SIGNAL = 0.55; EXPRESSED IN BONE MARROW, SIGNAL = 0.59
MLTFKRTTCYSSSRKAFQSLAITSEKKIMTQMLKKK

SEQ ID NO: 31818 - protein, 20 aa, Homo sapiens
  MAP TO AC002105.1; EXPRESSED IN LUNG, SIGNAL = 1.1; EXPRESSED IN PLACENTA, SIGNAL = 0.65; EXPRESSED IN ADULT LIVER, SIGNAL = 0.68
MWYSQYGNEAILVRDKNKLE

SEQ ID NO: 31819 - protein, 71 aa, Homo sapiens
  MAP TO AC010521.4; EXPRESSED IN FETAL LIVER, SIGNAL = 2.5; EXPRESSED IN BRAIN, SIGNAL = 4.1; EXPRESSED IN LUNG, SIGNAL = 2.8; EXPRESSED IN BONE MARROW, SIGNAL = 4.7; EXPRESSED IN ADULT LIVER, SIGNAL = 3.7; SWISSPROT HIT: P13382, EVALUE 2.40e+00
MLSGGFEAMPGMLPTSLRPLPDTFQPVLQPQHVPPLNTFQQPVQASDGRRARQPWPQQLFRGNQDSQGSDE

SEQ ID NO: 31820 - protein, 41 aa, Homo sapiens
  MAP TO AC008536.5; EXPRESSED IN ADULT LIVER, SIGNAL = 0.94; EXPRESSED IN FETAL LIVER, SIGNAL = 0.46
AASCCHSFANYPLPCSRASAAHPALASLDICFGEAKCCPRT

SEQ ID NO: 31821 - protein, 49 aa, Homo sapiens
  MAP TO AC010186.6; EXPRESSED IN BONE MARROW, SIGNAL = 1.3; EXPRESSED IN PLACENTA, SIGNAL = 0.83; EXPRESSED IN ADULT LIVER, SIGNAL = 1.5; EXPRESSED IN LUNG, SIGNAL = 1.8
ISYVVIKCIPLIKVTGLENKDSVFYQDNSQCFMVSLLGFDCLGKLSLKR

SEQ ID NO: 31822 - protein, 26 aa, Homo sapiens
  MAP TO AL096870.3; EXPRESSED IN HEART, SIGNAL = 1.4; EXPRESSED IN ADULT LIVER, SIGNAL = 0.95
QRRRMRRALQEACCPRLRASRCVHHC

SEQ ID NO: 31823 - protein, 48 aa, Homo sapiens
  MAP TO AC006969.2; EXPRESSED IN ADULT LIVER, SIGNAL = 0.43; EXPRESSED IN BONE MARROW, SIGNAL = 0.72; SWISSPROT HIT: P41250, EVALUE 4.00e-23
LDNYGQQELADLFVNYNVKSPITGNDLSPPVSFNLMFKTFIGPGGNMP

SEQ ID NO: 31824 - protein, 26 aa, Homo sapiens
  MAP TO AC000109.1; EXPRESSED IN BONE MARROW, SIGNAL = 0.52; EXPRESSED IN ADULT LIVER, SIGNAL = 0.64
MPSRIPPEDLPEAALQFTFFKRAKGV

SEQ ID NO: 31825 - protein, 68 aa, Homo sapiens
  MAP TO AC004212.1; EXPRESSED IN PLACENTA, SIGNAL = 0.64; EXPRESSED IN ADULT LIVER, SIGNAL = 0.76; EXPRESSED IN LUNG, SIGNAL = 0.45
MPEPPTHSKGSCAARASPTSTTPCSTTPSPIDHPRAEECKHTAQDWQAAPPAAPVWGPLGEASWAPES

SEQ ID NO: 31826 - protein, 94 aa, Homo sapiens
  MAP TO AC000083.1; EXPRESSED IN ADULT LIVER, SIGNAL = 0.49; EXPRESSED IN FETAL LIVER, SIGNAL = 0.45; EXPRESSED IN BRAIN, SIGNAL = 0.4; EXPRESSED IN PLACENTA, SIGNAL = 0.9; SWISSPROT HIT: O54693, EVALUE 1.30e+00
KHDPPLSSIPCLHYKKMKDNEEREQSSDLTPSGDVSPVKPLSRSAELEFPLDEPDSMGADPGPPDEKDPLGAEAAPGALGQVKAKVEVCKDESV

SEQ ID NO: 31827 - protein, 30 aa, Homo sapiens
  MAP TO AC053467.1; EXPRESSED IN LUNG, SIGNAL = 0.6; EXPRESSED IN ADULT LIVER, SIGNAL = 0.64
RVTDAVRRRRPRTDASTRSHVQVPLIRSFF

SEQ ID NO: 31828 - protein, 24 aa, Homo sapiens
  MAP TO AC035144.2; EXPRESSED IN HELA, SIGNAL = 1.2; EXPRESSED IN PLACENTA, SIGNAL = 1.1; EXPRESSED IN BONE MARROW, SIGNAL =   1; EXPRESSED IN ADULT LIVER, SIGNAL = 0.75
CMSSWWRGRKSFRWWRGTRSFNLI

SEQ ID NO: 31829 - protein, 34 aa, Homo sapiens
  MAP TO AL080242.11; EXPRESSED IN BONE MARROW, SIGNAL = 2.2; EXPRESSED IN PLACENTA, SIGNAL = 1.7; EXPRESSED IN ADULT LIVER, SIGNAL = 3.6; EXPRESSED IN BRAIN, SIGNAL = 2.2; EXPRESSED IN LUNG, SIGNAL = 1.3
RVVCSDLVGLYQDTVLLQSAQWVRWEREKLSNTL

SEQ ID NO: 31830 - protein, 29 aa, Homo sapiens
  MAP TO AC005176.1; EXPRESSED IN ADULT LIVER, SIGNAL = 0.41; EXPRESSED IN LUNG, SIGNAL = 0.6; SWISSPROT HIT: P97400, EVALUE 4.00e-03
HVCGAWKCEGRCHNVFFKDGKQFDLSILV

SEQ ID NO: 31831 - protein, 49 aa, Homo sapiens
  MAP TO AL096870.3; EXPRESSED IN ADULT LIVER, SIGNAL = 0.66; EXPRESSED IN LUNG, SIGNAL = 3.7; SWISSPROT HIT: P26770, EVALUE 6.00e-21
EHLLLSILPAYLAREMKAEIMARLQAGQGSRPESTNNFHSLYVKRHQGV

SEQ ID NO: 31832 - protein, 37 aa, Homo sapiens
  MAP TO AL096870.3; EXPRESSED IN ADULT LIVER, SIGNAL = 0.66; EXPRESSED IN LUNG, SIGNAL = 3.7; SWISSPROT HIT: P26770, EVALUE 1.00e-14
VLYADIVGFTRLASECSPKELVLMLNELFGKFDQIAK

SEQ ID NO: 31833 - protein, 107 aa, Homo sapiens
  MAP TO AC004189.1; EXPRESSED IN ADULT LIVER, SIGNAL = 0.66; EXPRESSED IN BRAIN, SIGNAL = 0.58; SWISSPROT HIT: P38335, EVALUE 1.90e+00
EVGAHLVHKRTETCGGRAAGLKSADSKSQSQHLKSCGLAPESVLMTIMQWYVVCPGPTGKKWARSPKKREDWIFLRPLSSMGHGHLFQYIVAAHASLILSVSALLAN

SEQ ID NO: 31834 - protein, 55 aa, Homo sapiens
  MAP TO AF107256.1; EXPRESSED IN ADULT LIVER, SIGNAL = 1.2; EXPRESSED IN LUNG, SIGNAL = 1.7; EXPRESSED IN HELA, SIGNAL = 1.9
SGVGLATRSSCSNTAAQVGMRRGNGWGWGTHGWGTWQARLDPPKIGGAPWHNLLE

SEQ ID NO: 31835 - protein, 55 aa, Homo sapiens
  MAP TO AF107256.1; EXPRESSED IN ADULT LIVER, SIGNAL = 1.2; EXPRESSED IN LUNG, SIGNAL = 1.7; EXPRESSED IN HELA, SIGNAL = 1.9; SWISSPROT HIT: O08644, EVALUE 2.00e-04
KRRGTGYTEQLQQYSSPGGDEERKWVGLGNTWVGHMAGKAGSPQDWGSSLAQPSG

SEQ ID NO: 31836 - protein, 59 aa, Homo sapiens
  MAP TO AC009533.9; EXPRESSED IN ADULT LIVER, SIGNAL = 0.68; SWISSPROT HIT: O42275, EVALUE 6.10e+00
VTTNVLKFTLTAGMLLLLCMYMEPSTKSMGYSSQQERLSRTKKKFWPCLKLFGSLNSWL

SEQ ID NO: 31837 - protein, 67 aa, Homo sapiens; identical to SEQ ID NO: 31193
  MAP TO AC002097.1; EXPRESSED IN ADULT LIVER, SIGNAL = 0.68; EXPRESSED IN BRAIN, SIGNAL = 0.53; SWISSPROT HIT: P19835, EVALUE 4.00e-33

SEQ ID NO: 31838 - protein, 59 aa, Homo sapiens; identical to SEQ ID NO: 31194
  MAP TO AC002097.1; EXPRESSED IN ADULT LIVER, SIGNAL = 0.68; EXPRESSED IN BRAIN, SIGNAL = 0.53

SEQ ID NO: 31839 - protein, 139 aa, Homo sapiens
  MAP TO AC004202.1; EXPRESSED IN FETAL LIVER, SIGNAL = 0.37; EXPRESSED IN BONE MARROW, SIGNAL = 0.63; EXPRESSED IN ADULT LIVER, SIGNAL = 0.47; SWISSPROT HIT: P19474, EVALUE 5.00e-27
MASGQFVNKLQEEVICPICLDILQKPVTIDCGHNFCLKCITQIGETSCGFFKCPLCKTSVRKNAIRFNSLLRNLVEKIQALQASEVQSKRKEATCPRHQEMFHYFCEDDGKFLCFVCRESKDHKSHNVSLIEEAAQNYQ

SEQ ID NO: 31840 - protein, 20 aa, Homo sapiens
  MAP TO AC004202.1; EXPRESSED IN FETAL LIVER, SIGNAL = 0.37; EXPRESSED IN BONE MARROW, SIGNAL = 0.63; EXPRESSED IN ADULT LIVER, SIGNAL = 0.47
KQYPQWTPGLLQTWHSFLQS

SEQ ID NO: 31841 - protein, 29 aa, Homo sapiens
  MAP TO AC004202.1; EXPRESSED IN FETAL LIVER, SIGNAL = 0.37; EXPRESSED IN BONE MARROW, SIGNAL = 0.63; EXPRESSED IN ADULT LIVER, SIGNAL = 0.47
CSTISARMMGSSSVLCVVNPRTTNPIMSA

SEQ ID NO: 31842 - protein, 111 aa, Homo sapiens
  MAP TO AC004202.1; EXPRESSED IN FETAL LIVER, SIGNAL = 0.37; EXPRESSED IN BONE MARROW, SIGNAL = 0.63; EXPRESSED IN ADULT LIVER, SIGNAL = 0.47
NSIHSGLRGSYRLGTASYSLETALLFCHGQWAVCEQTARGSDLPHLPGHSAETCHHRLWAQFLPQMHHSDWGNIMWIFQMSPLQNFRKEERNQVQLAVAESGGENPSSTSL

SEQ ID NO: 31843 - protein, 86 aa, Homo sapiens
  MAP TO AC008639.6; EXPRESSED IN PLACENTA, SIGNAL = 0.69; EXPRESSED IN ADULT LIVER, SIGNAL = 0.65; SWISSPROT HIT: P71555, EVALUE 3.80e+00
TISQGWCTPPANLGQMSSSPPLDIRDNITGGVYAPCNIGSDIILSPPDIRNNITEGMCTHCDILSNVILYPLAIKNNTGGVSFPRH

SEQ ID NO: 31844 - protein, 24 aa, Homo sapiens
  MAP TO AC008639.6; EXPRESSED IN PLACENTA, SIGNAL = 0.69; EXPRESSED IN ADULT LIVER, SIGNAL = 0.65
NNITGVVYTSCEFGANVILSTFGY

SEQ ID NO: 31845 - protein, 54 aa, Homo sapiens
  MAP TO AC008964.4; EXPRESSED IN ADULT LIVER, SIGNAL = 0.53; EXPRESSED IN BONE MARROW, SIGNAL = 1.1; SWISSPROT HIT: O15117, EVALUE 1.00e-18
YDGEIRVLYSTKVTTSITSKKWGTRDLQVKPGESLEVIQTTDDTKVLCRNEEGK

SEQ ID NO: 31846 - protein, 30 aa, Homo sapiens
  MAP TO AC009990.8; EXPRESSED IN ADULT LIVER, SIGNAL = 0.44
VQGTILEPESEVFTRYQPAGALILNLPAPE

SEQ ID NO: 31847 - protein, 21 aa, Homo sapiens
  MAP TO AC009990.8; EXPRESSED IN ADULT LIVER, SIGNAL = 0.44
FKVPSWNQSLKSSPDTNLLEL

SEQ ID NO: 31848 - protein, 25 aa, Homo sapiens
  MAP TO AC004791.1; EXPRESSED IN BRAIN, SIGNAL = 0.49; EXPRESSED IN ADULT LIVER, SIGNAL = 0.42; SWISSPROT HIT: O78687, EVALUE 8.80e+00
KWTTVHAYGASSTYLATRPASRTTQ

SEQ ID NO: 31849 - protein, 24 aa, Homo sapiens
  MAP TO AC004791.1; EXPRESSED IN BRAIN, SIGNAL = 0.49; EXPRESSED IN ADULT LIVER, SIGNAL = 0.42
MDNSTRIWGQFHIFGNQTSIQDNT

SEQ ID NO: 31850 - protein, 23 aa, Homo sapiens
  MAP TO AC010379.4; EXPRESSED IN ADULT LIVER, SIGNAL = 0.9; EXPRESSED IN PLACENTA, SIGNAL = 0.54
LSIIHQTVCPGMLGKQRWLLTLP

SEQ ID NO: 31851 - protein, 77 aa, Homo sapiens
  MAP TO AC010379.4; EXPRESSED IN ADULT LIVER, SIGNAL = 0.9; EXPRESSED IN PLACENTA, SIGNAL = 0.54; SWISSPROT HIT: P01874, EVALUE 2.80e+00
IVNNPPDCVPRDAGEAEVAPDPSLASLQLQTPELPGLISCHNSIQVSNEARLFELLICQWRDFRKRVIAAKSMQGRE

SEQ ID NO: 31852 - protein, 45 aa, Homo sapiens
  MAP TO AC008727.5; EXPRESSED IN PLACENTA, SIGNAL = 0.76; EXPRESSED IN ADULT LIVER, SIGNAL = 0.8; SWISSPROT HIT: Q05001, EVALUE 7.50e-01
KELRHFLKHGILTHLKVSFSRDAPVGEEEAPAKYVQDNIQLHGQQ

SEQ ID NO: 31853 - protein, 36 aa, Homo sapiens
  MAP TO AC008979.6; EXPRESSED IN ADULT LIVER, SIGNAL = 0.87
PQMARKYPSADCTSRLFAKCSIKGKFQFCEMNAGIT

SEQ ID NO: 31854 - protein, 30 aa, Homo sapiens
  MAP TO AC008979.6; EXPRESSED IN ADULT LIVER, SIGNAL = 0.87
LKWLGNIHLQIVQAGCLQSAQSKESFNSVR

SEQ ID NO: 31855 - protein, 31 aa, Homo sapiens
  MAP TO AC007793.1; EXPRESSED IN ADULT LIVER, SIGNAL = 2.3; EXPRESSED IN FETAL LIVER, SIGNAL = 3.6; SWISSPROT HIT: P79690, EVALUE 3.90e+00
CVIVTHISAQNLRNLTLLPGPGTQMGLGHIV

SEQ ID NO: 31856 - protein, 101 aa, Homo sapiens
  MAP TO AC008795.5; EXPRESSED IN ADULT LIVER, SIGNAL = 1.6; EXPRESSED IN FETAL LIVER, SIGNAL = 0.85; SWISSPROT HIT: P53863, EVALUE 3.00e-14
VVHPFYAYWQSFCTQKNFAWKEEYDTRQASNRWEKRAMEKENKKIRDKARKEKNELVRQLVAFIRKRDKRVQAHRKLVEEQNAEKARKAEEMRRQQKLKQA

SEQ ID NO: 31857 - protein, 42 aa, Homo sapiens
  MAP TO AC008821.4; EXPRESSED IN ADULT LIVER, SIGNAL = 0.79; EXPRESSED IN FETAL LIVER, SIGNAL = 0.51; EXPRESSED IN BONE MARROW, SIGNAL = 0.4
MELPRGYSHWRIGTKGFSKSNSKGHFIGFNYTWNLSRKKKEK

SEQ ID NO: 31858 - protein, 53 aa, Homo sapiens
  MAP TO AC011358.5; EXPRESSED IN PLACENTA, SIGNAL = 0.76; EXPRESSED IN ADULT LIVER, SIGNAL = 0.59
TAVETALGLVQGIDQFQVQRTPFPRASAGSLDDHSFVRDQRIPHKVQTGLMTT

SEQ ID NO: 31859 - protein, 32 aa, Homo sapiens
  MAP TO AC011358.5; EXPRESSED IN PLACENTA, SIGNAL = 0.76; EXPRESSED IN ADULT LIVER, SIGNAL = 0.59
DCCGDCLGLGSGDRPVPGAADTIPQGICRFSR

SEQ ID NO: 31860 - protein, 36 aa, Homo sapiens
  MAP TO AC010238.4; EXPRESSED IN ADULT LIVER, SIGNAL =   1; EXPRESSED IN BRAIN, SIGNAL = 1.1; EXPRESSED IN PLACENTA, SIGNAL =   1
LVNRGHSRDHRQLAAGIAQAPCLLGVSFRTQSMGFV

SEQ ID NO: 31861 - protein, 65 aa, Homo sapiens
  MAP TO AC002097.1; EXPRESSED IN ADULT LIVER, SIGNAL = 0.68; EXPRESSED IN BRAIN, SIGNAL = 0.75; SWISSPROT HIT: P19835, EVALUE 1.00e-33
SRDLPVMIWIYGGAFLMGSGHGANFLNNYLYDGEEIATRGNVIVVTFNYRVGPLGFLSTGDANLP

SEQ ID NO: 31862 - protein, 35 aa, Homo sapiens
  MAP TO AC002097.1; EXPRESSED IN ADULT LIVER, SIGNAL = 0.68; EXPRESSED IN BRAIN, SIGNAL = 0.75
APAAQGQGTGWRQGQAGRLGSPAAPPSQSPGTCPL

SEQ ID NO: 31863 - protein, 59 aa, Homo sapiens
  MAP TO AC002097.1; EXPRESSED IN ADULT LIVER, SIGNAL = 0.68; EXPRESSED IN BRAIN, SIGNAL = 0.75; SWISSPROT HIT: P08364, EVALUE 7.20e+00
HLLHRDRGPAGDRARRGVWGHQPLPHLSLPGPARYDLDLWRRLPHGVRPWGQLPQQLPV

SEQ ID NO: 31864 - protein, 77 aa, Homo sapiens
  MAP TO AC009087.4; EXPRESSED IN BRAIN, SIGNAL =   1; EXPRESSED IN PLACENTA, SIGNAL = 1.1; EXPRESSED IN ADULT LIVER, SIGNAL = 1.1; EXPRESSED IN FETAL LIVER, SIGNAL = 0.96; SWISSPROT HIT: P31433, EVALUE 4.50e-01
IMLWRNVSLETHPTSLNMSTHQLTITVNVTSLEKSLIVSIDPDSPLLMTLYLGFQYQPNCTHFHLNITLPKDKVWQK

SEQ ID NO: 31865 - protein, 65 aa, Homo sapiens
  MAP TO AC012313.5; EXPRESSED IN ADULT LIVER, SIGNAL =   5; EXPRESSED IN FETAL LIVER, SIGNAL = 1.1; SWISSPROT HIT: O35488, EVALUE 1.00e-15
EPGLLLTKVVSQQPFVGYRGPRELSERKLVRNVRQSGDVYYNTGDVLAMDREGFLYFRDRLGDTF

SEQ ID NO: 31866 - protein, 23 aa, Homo sapiens
  MAP TO AC008390.6; EXPRESSED IN ADULT LIVER, SIGNAL = 0.91; EXPRESSED IN FETAL LIVER, SIGNAL = 1.7
VFVHAFEDRYSVVSLPDAIVSLL

SEQ ID NO: 31867 - protein, 45 aa, Homo sapiens
  MAP TO AC004790.1; EXPRESSED IN FETAL LIVER, SIGNAL = 0.5; EXPRESSED IN ADULT LIVER, SIGNAL = 0.67; EXPRESSED IN HEART, SIGNAL = 1.2
WLRGLVSGNLDIVAWSAEAWSGQWGPGPCGLVNRGLVSGTWTLWP

SEQ ID NO: 31868 - protein, 40 aa, Homo sapiens
  MAP TO AC035150.1; EXPRESSED IN LUNG, SIGNAL = 3.5; EXPRESSED IN PLACENTA, SIGNAL = 3.2; EXPRESSED IN BONE MARROW, SIGNAL = 2.6; EXPRESSED IN ADULT LIVER, SIGNAL = 2.7; EXPRESSED IN HEART, SIGNAL = 3.3; SWISSPROT HIT: P39734, EVALUE 4.50e-01
MYKRPINKGKNAQHHESSEKFKSKPQYPLHTHEDDNNKKK

SEQ ID NO: 31869 - protein, 55 aa, Homo sapiens
  MAP TO AF222685.1; EXPRESSED IN ADULT LIVER, SIGNAL = 1.3; EXPRESSED IN HEART, SIGNAL = 1.3; EXPRESSED IN BONE MARROW, SIGNAL = 1.1
PPQKLYTLPEYAAYDSASLCLHLPSLQSISYSSSQTSSDIHESLTDLSYSQSSDV

SEQ ID NO: 31870 - protein, 28 aa, Homo sapiens
  MAP TO AC005262.1; EXPRESSED IN BONE MARROW, SIGNAL = 0.87; EXPRESSED IN ADULT LIVER, SIGNAL = 0.78; EXPRESSED IN LUNG, SIGNAL = 2.1
NPRRHPCMHPVFCACTLDLRLTRGSRTK

SEQ ID NO: 31871 - protein, 39 aa, Homo sapiens
  MAP TO AC000046.5; EXPRESSED IN FETAL LIVER, SIGNAL = 0.35; EXPRESSED IN ADULT LIVER, SIGNAL = 0.46
VFLDSNHLKGKPGGVHLLDSRKQLLLLLVGSSDFLTRSM

SEQ ID NO: 31872 - protein, 38 aa, Homo sapiens
  MAP TO AJ239328.2; EXPRESSED IN ADULT LIVER, SIGNAL = 0.58; EXPRESSED IN FETAL LIVER, SIGNAL = 0.72; SWISSPROT HIT: Q9QZC4, EVALUE 1.00e+00
CLELRSKSPTPRKGPQSVRSPSRGPRPTSALPSISSTP

SEQ ID NO: 31873 - protein, 53 aa, Homo sapiens
  MAP TO AJ239328.2; EXPRESSED IN ADULT LIVER, SIGNAL = 0.58; EXPRESSED IN FETAL LIVER, SIGNAL = 0.72; SWISSPROT HIT: P57722, EVALUE 2.00e-23
CIIGRQGTKINEIRQMSGAQIKIANATEGSSERQITITGTPANISLAQYLINA

SEQ ID NO: 31874 - protein, 69 aa, Homo sapiens
  MAP TO AC009123.6; EXPRESSED IN ADULT LIVER, SIGNAL = 0.66; EXPRESSED IN HELA, SIGNAL = 2.1; EXPRESSED IN FETAL LIVER, SIGNAL =   1; SWISSPROT HIT: P56192, EVALUE 7.70e+00
AHAARGAPLLCASGRSLPREEMPLTGVGPGSCRRQIIRALCLLLLLLHAGSAKNIWKRALPARLAEKSR

SEQ ID NO: 31875 - protein, 68 aa, Homo sapiens
  MAP TO AC009123.6; EXPRESSED IN ADULT LIVER, SIGNAL = 0.66; EXPRESSED IN HELA, SIGNAL = 2.1; EXPRESSED IN FETAL LIVER, SIGNAL =   1; SWISSPROT HIT: P16911, EVALUE 9.20e-01
PRSEGGPSSVCVWKVAAQGGNAFNRRGAGQLQEADHPGSVPLATSPPRRLCQEYLETGIACEAGREIP

SEQ ID NO: 31876 - protein, 32 aa, Homo sapiens
  MAP TO AC003956.1; EXPRESSED IN ADULT LIVER, SIGNAL = 0.59; EXPRESSED IN BRAIN, SIGNAL = 0.55
IPACPDNLQMSRLTCDPNDSHLCTCRWQTPKW

SEQ ID NO: 31877 - protein, 44 aa, Homo sapiens
  MAP TO AF263284.2; EXPRESSED IN BONE MARROW, SIGNAL = 1.1; EXPRESSED IN ADULT LIVER, SIGNAL = 0.85; EXPRESSED IN HELA, SIGNAL = 3.7; SWISSPROT HIT: P46071, EVALUE 8.30e+00
MKNLRSCIRLLARHSDRNTCQGGKGRYKPRQARRRCGRNSHLST

SEQ ID NO: 31878 - protein, 26 aa, Homo sapiens
  MAP TO AC008772.5; EXPRESSED IN ADULT LIVER, SIGNAL = 0.47
IMNMPLTCEETEDRQQMEFLANIRQA

SEQ ID NO: 31879 - protein, 84 aa, Homo sapiens
  MAP TO AL118558.2; EXPRESSED IN BRAIN, SIGNAL = 9.4; EXPRESSED IN ADULT LIVER, SIGNAL = 7.1; SWISSPROT HIT: P38650, EVALUE 3.00e-40
EFQLRLRQLEKSLLQALNEVKGRILDDDTIITTLENLKREAAEVTRKVEETDIVMQEVETVSQQYLPLSTACSSIYFTMESLKQ

SEQ ID NO: 31880 - protein, 17 aa, Homo sapiens
  MAP TO AL118558.2; EXPRESSED IN BRAIN, SIGNAL = 9.4; EXPRESSED IN ADULT LIVER, SIGNAL = 7.1
GNFSSVCVSWKNLYYKL

SEQ ID NO: 31881 - protein, 26 aa, Homo sapiens
  MAP TO AL118558.2; EXPRESSED IN BRAIN, SIGNAL = 9.4; EXPRESSED IN ADULT LIVER, SIGNAL = 7.1
GISAPFASAGKISTTSSERGERAHFG

SEQ ID NO: 31882 - protein, 58 aa, Homo sapiens
  MAP TO AC002322.1; EXPRESSED IN ADULT LIVER, SIGNAL = 0.71; SWISSPROT HIT: O35348, EVALUE 1.60e+00
RHHSPIKALLSLKPSAGFLTQGSTPPSVLGLRQNPPALPGELSPGQRRRGKALELGKP

SEQ ID NO: 31883 - protein, 59 aa, Homo sapiens
  MAP TO AC002322.1; EXPRESSED IN ADULT LIVER, SIGNAL = 0.71; SWISSPROT HIT: Q60825, EVALUE 2.70e+00
QTSLTNQSSPIPEAQRRVLNTGLYSSISPGTQTEPTCPARRAEPGAAKERKGFGVGQTQ

SEQ ID NO: 31884 - protein, 56 aa, Homo sapiens
  MAP TO AC004090.24; EXPRESSED IN ADULT LIVER, SIGNAL = 0.83; EXPRESSED IN FETAL LIVER, SIGNAL = 1.1; SWISSPROT HIT: P56089, EVALUE 4.70e+00
KPFDKVLFADASCGGPALSAGHWMWSLGKVSCRKGTAHHHGTFDPWPQCQRLWPHK

SEQ ID NO: 31885 - protein, 17 aa, Homo sapiens
  MAP TO AC004144.1; EXPRESSED IN ADULT LIVER, SIGNAL = 0.69
TLLKVVYVENDIQHLQD

SEQ ID NO: 31886 - protein, 53 aa, Homo sapiens
  MAP TO AC005581.1; EXPRESSED IN BONE MARROW, SIGNAL = 0.75; EXPRESSED IN ADULT LIVER, SIGNAL = 0.45
EGGDRGAPGLALARVRAPSDTTNGTSSSKGTSHSKGQRSSSSTYHRQRRHSDF

SEQ ID NO: 31887 - protein, 53 aa, Homo sapiens
  MAP TO AC005581.1; EXPRESSED IN BONE MARROW, SIGNAL = 0.75; EXPRESSED IN ADULT LIVER, SIGNAL = 0.45; SWISSPROT HIT: Q9JL04, EVALUE 2.30e-02
RVGTGAPQGWPWHGCGRPATPPTEQVPAKAPATAKGSGVPLPPTTASAGIAIS

SEQ ID NO: 31888 - protein, 55 aa, Homo sapiens
  MAP TO AC010169.7; EXPRESSED IN BONE MARROW, SIGNAL = 0.51; EXPRESSED IN ADULT LIVER, SIGNAL = 0.47
ASWPQLDTLPAWLVLIEPTRAGALPAYVAYADVLHPDLGNRRVTPASSHGHHGFQ

SEQ ID NO: 31889 - protein, 80 aa, Homo sapiens
  MAP TO AL118558.2; EXPRESSED IN ADULT LIVER, SIGNAL = 1.3; SWISSPROT HIT: Q9JHU4, EVALUE 7.00e-42
LYRNGQRLLEKQRFQFPPSWLYIDNIEGEWGAFNDIMRRKDSAIQQQVANLQMKIVQEDRAVESRTTDLLTDWEKTKPVT

SEQ ID NO: 31890 - protein, 52 aa, Homo sapiens
  MAP TO AL118558.2; EXPRESSED IN ADULT LIVER, SIGNAL = 1.3; SWISSPROT HIT: P55066, EVALUE 1.30e+00
STAMASAYWKSKGSSSHLPGFILTTSRESGEPSMTSCGERTLPFSSRWQTCK

SEQ ID NO: 31891 - protein, 22 aa, Homo sapiens
  MAP TO AL118558.2; EXPRESSED IN ADULT LIVER, SIGNAL = 1.3
LPQWPALTGKAKVPVPTFLALY

SEQ ID NO: 31892 - protein, 61 aa, Homo sapiens
  MAP TO AC004095.1; EXPRESSED IN ADULT LIVER, SIGNAL = 0.71; EXPRESSED IN PLACENTA, SIGNAL = 0.94
SKQSKIKTMLKKIGRGRRRRRRRRRRGRGRRGRRRRRRRRRRMPLGPGPGCCPTPIFWGEY

SEQ ID NO: 31893 - protein, 94 aa, Homo sapiens
  MAP TO AC007191.1; EXPRESSED IN ADULT LIVER, SIGNAL = 0.62; EXPRESSED IN LUNG, SIGNAL = 1.5; SWISSPROT HIT: Q28120, EVALUE 4.00e-16
FLEATLRSLTAGWHVELDPFTASTPLGPVDFGNVVATLDPRAARHLTLACHYDSKLFPPGSTPFVGATDSAVPCALLLELAQALDLELSRAKKQ

SEQ ID NO: 31894 - protein, 22 aa, Homo sapiens
  MAP TO AC007191.1; EXPRESSED IN ADULT LIVER, SIGNAL = 0.62; EXPRESSED IN LUNG, SIGNAL = 1.5
GPRIRLCPVPCCWSWPKHLTWS

SEQ ID NO: 31895 - protein, 51 aa, Homo sapiens
  MAP TO AC007191.1; EXPRESSED IN ADULT LIVER, SIGNAL = 0.62; EXPRESSED IN LUNG, SIGNAL = 1.5; SWISSPROT HIT: P08121, EVALUE 1.30e+00
PGGHAAVPDSRLARGAGSLHSLNTPGASGLWQCGGHTGPKGCPSPHPCLPL

SEQ ID NO: 31896 - protein, 126 aa, Homo sapiens; identical to SEQ ID NO: 28344
  MAP TO AC008727.5; EXPRESSED IN ADULT LIVER, SIGNAL = 0.45; SWISSPROT HIT: Q05471, EVALUE 6.30e+00

SEQ ID NO: 31897 - protein, 37 aa, Homo sapiens
  MAP TO AC008985.5; EXPRESSED IN ADULT LIVER, SIGNAL = 0.85; SWISSPROT HIT: P49606, EVALUE 6.50e+00
HPPSWTGSPCSVVKDIAGSSLTMRTSWSQAPWKSTFL

SEQ ID NO: 31898 - protein, 28 aa, Homo sapiens
  MAP TO AL023495.1; EXPRESSED IN PLACENTA, SIGNAL = 0.91; EXPRESSED IN ADULT LIVER, SIGNAL = 0.92
HMGRSKAQQDIPVTLALVSNTSTSTSKY

SEQ ID NO: 31899 - protein, 76 aa, Homo sapiens
  MAP TO AC011536.5; EXPRESSED IN PLACENTA, SIGNAL =   1; EXPRESSED IN ADULT LIVER, SIGNAL = 0.5; SWISSPROT HIT: O88799, EVALUE 2.00e-15
GSDRHPLLAAMECPQNSHYELCADTCSLGCSALSAPLQCPDGCAEGCQCDSGFLYNGQACVPIQQCGCYHNGVYYE

SEQ ID NO: 31900 - protein, 75 aa, Homo sapiens
  MAP TO AC011536.5; EXPRESSED IN PLACENTA, SIGNAL =   1; EXPRESSED IN ADULT LIVER, SIGNAL = 0.5
ALIGTPSLQPWNALRTVTTSSVRTPAPWAARLSVPLCSAQMGVLRAASVTPASSTTAKPACPSSNVAATTMVSTM

SEQ ID NO: 31901 - protein, 58 aa, Homo sapiens
  MAP TO AC004264.1; EXPRESSED IN ADULT LIVER, SIGNAL = 0.69
PTSALLEGNPSVSCGACSSSAPGTRVYLAFGVCHLPPTASQQLRWRKPSSPSWGRETQ

SEQ ID NO: 31902 - protein, 30 aa, Homo sapiens
  MAP TO AC010516.4; EXPRESSED IN ADULT LIVER, SIGNAL = 0.85
LKQLRNIPLQILQEDCFESAPSKEGLNSLR

SEQ ID NO: 31903 - protein, 17 aa, Homo sapiens
  MAP TO AC016965.10; EXPRESSED IN PLACENTA, SIGNAL = 0.94; EXPRESSED IN ADULT LIVER, SIGNAL = 0.88
TSFQMEWSLSCSMIRLL

SEQ ID NO: 31904 - protein, 38 aa, Homo sapiens
  MAP TO AC013646.3; EXPRESSED IN ADULT LIVER, SIGNAL = 0.53; SWISSPROT HIT: Q21313, EVALUE 8.50e+00
GINTAPIKEEKRRDTNRKRTETQVPTKKPADVLVPLVL

SEQ ID NO: 31905 - protein, 20 aa, Homo sapiens
  MAP TO AC004144.1; EXPRESSED IN ADULT LIVER, SIGNAL =   1
SMWTPQAPSWPPAALTKASQ

SEQ ID NO: 31906 - protein, 88 aa, Homo sapiens
  MAP TO AC004144.1; EXPRESSED IN ADULT LIVER, SIGNAL =   1; SWISSPROT HIT: P43035, EVALUE 1.80e-02
VHVDPSGTFLATSCSDKSISVIDFYSGECIAKMFGHSGGCASLLGMPPHPPTPSDSEGKCSLSALFAEIITSMKFTYDCHHLITVSGD

SEQ ID NO: 31907 - protein, 49 aa, Homo sapiens
  MAP TO AB015355.1; EXPRESSED IN ADULT LIVER, SIGNAL = 1.1; EXPRESSED IN FETAL LIVER, SIGNAL = 6.1; SWISSPROT HIT: P49281, EVALUE 9.00e-23
SVSGDHGESASLGNINPAYSNPSLSQSPGDSEEYFATYFNEKISIPEEE

SEQ ID NO: 31908 - protein, 65 aa, Homo sapiens
  MAP TO AB015355.1; EXPRESSED IN ADULT LIVER, SIGNAL = 1.1; EXPRESSED IN FETAL LIVER, SIGNAL = 6.1; SWISSPROT HIT: P46569, EVALUE 7.10e-01
TVFLEIMGSLPVLVTSTLPIVIPLFHSPLGTQRSTSPLTLMRRSPFLRRRLVSGPWRRTLLSGEN

SEQ ID NO: 31909 - protein, 40 aa, Homo sapiens
  MAP TO AC010643.5; EXPRESSED IN ADULT LIVER, SIGNAL = 0.44
NRKWQLLISPTLCVGCGSGRKSSMRPVRKLSFHLKPQLGD

SEQ ID NO: 31910 - protein, 33 aa, Homo sapiens
  MAP TO AC004495.1; EXPRESSED IN PLACENTA, SIGNAL = 0.91; EXPRESSED IN ADULT LIVER, SIGNAL = 0.61
GCVAWWCFGVFIHLGPSAASLVCCRGCRECSRK

SEQ ID NO: 31911 - protein, 32 aa, Homo sapiens
  MAP TO AC004495.1; EXPRESSED IN PLACENTA, SIGNAL = 0.91; EXPRESSED IN ADULT LIVER, SIGNAL = 0.61
AAWHGGALACSFIWVLPLHPWYVAGDAENVPG

SEQ ID NO: 31912 - protein, 49 aa, Homo sapiens
  MAP TO AC002107.1; EXPRESSED IN PLACENTA, SIGNAL = 6.8; EXPRESSED IN ADULT LIVER, SIGNAL =  15; SWISSPROT HIT: P12970, EVALUE 9.00e-23
QDIQPKRDLTRFVKWPRYIRLQRQRAILYKRLKVPPAINQFTQALDRQT

SEQ ID NO: 31913 - protein, 29 aa, Homo sapiens
  MAP TO AC002107.1; EXPRESSED IN PLACENTA, SIGNAL = 6.8; EXPRESSED IN ADULT LIVER, SIGNAL =  15
TGHPAQKRPHPLCEMAPLYQVAAAESHPL

SEQ ID NO: 31914 - protein, 86 aa, Homo sapiens
  MAP TO AF004877.1; EXPRESSED IN ADULT LIVER, SIGNAL = 0.56; SWISSPROT HIT: P08123, EVALUE 1.00e-35
GPPGPPGPPGPPGVSGGGYDFGYDGDFYRADQPRSAPSLRPKDYEVDATLKSLNNQIETLLTPEGSRKNPARTCRDLRLSHPEWSS

SEQ ID NO: 31915 - protein, 39 aa, Homo sapiens
  MAP TO AC000094.3; EXPRESSED IN ADULT LIVER, SIGNAL = 1.1; EXPRESSED IN PLACENTA, SIGNAL = 3.7; SWISSPROT HIT: P05783, EVALUE 2.00e-03
MSFTTHSTTFSTNYQSLGSVQPPSYSTRLISSPAGIYAD

SEQ ID NO: 31916 - protein, 90 aa, Homo sapiens
  MAP TO AC004523.1; EXPRESSED IN ADULT LIVER, SIGNAL = 1.7; SWISSPROT HIT: P78329, EVALUE 1.00e-35
RPSEYIATILELSALVEKRSQHILQHMDFLYYLSHDGRRFHRACRLVHDFTDAVIRERRRTLPTQGIDDFFKDKAKSKTLDFIDVLLLSK

SEQ ID NO: 31917 - protein, 40 aa, Homo sapiens
  MAP TO AC008488.6; EXPRESSED IN ADULT LIVER, SIGNAL = 0.81
LFQGMGREWGTDSVQSPPPFTYPCISLLPVLAKSVSKGGR

SEQ ID NO: 31918 - protein, 72 aa, Homo sapiens
  MAP TO AC005621.1; EXPRESSED IN ADULT LIVER, SIGNAL = 0.59
NESVDCDAWRDNFPAYYFSKKLTYLYIPKRIYEYENSTKNIQAFKSTAKKKAGGIVTEYKDRTCPLKNNVYH

SEQ ID NO: 31919 - protein, 21 aa, Homo sapiens
  MAP TO AC005621.1; EXPRESSED IN ADULT LIVER, SIGNAL = 0.59
MRAWTVMPGEITSLPTTFQRN

SEQ ID NO: 31920 - protein, 32 aa, Homo sapiens
  MAP TO AC016714.2; EXPRESSED IN PLACENTA, SIGNAL = 0.54; EXPRESSED IN LUNG, SIGNAL = 0.52; EXPRESSED IN ADULT LIVER, SIGNAL = 0.57; SWISSPROT HIT: P30101, EVALUE 6.60e+00
VLMIRTGRAEKYWVDEGSSREGSTLESGTVAQ

SEQ ID NO: 31921 - protein, 75 aa, Homo sapiens
  MAP TO CHR22_96.0; EXPRESSED IN PLACENTA, SIGNAL = 0.49; EXPRESSED IN LUNG, SIGNAL = 0.46; EXPRESSED IN ADULT LIVER, SIGNAL = 0.52; SWISSPROT HIT: P38794, EVALUE 6.50e+00
SGFAGDVIRMDKCPSELGIILPEFQQLREGQQLTEPCHSVQAQRPGPPAFCHALRVILLKDPTQAHKILNENMPP

SEQ ID NO: 31922 - protein, 58 aa, Homo sapiens
  MAP TO CHR22_96.0; EXPRESSED IN PLACENTA, SIGNAL = 0.49; EXPRESSED IN LUNG, SIGNAL = 0.46; EXPRESSED IN ADULT LIVER, SIGNAL = 0.52
AGLQETSSEWINVRRSWGSSSQSFSSSEKASNSPSHATACKHSGPALLHSVMHCVSSY

SEQ ID NO: 31923 - protein, 45 aa, Homo sapiens
  MAP TO CHR22_83.0; EXPRESSED IN ADULT LIVER, SIGNAL = 0.49
HREPGRCSGDSLGTPGPGGGQAQPLHVRVHHGELQHRPRTHAYGG

SEQ ID NO: 31924 - protein, 104 aa, Homo sapiens
  MAP TO CHR22_83.0; EXPRESSED IN ADULT LIVER, SIGNAL = 0.49; SWISSPROT HIT: P15302, EVALUE 2.00e-11
TGSLAAAVETASGRQALVVGKPSPYMFECITENFSIDPARTLMVGDRLETDILFGHRCGMTTVLTLTGVSRLEEAQAYLAAGQHDLVPHYYVESIADLTEGLED

SEQ ID NO: 31925 - protein, 107 aa, Homo sapiens
  MAP TO AL136105.2; EXPRESSED IN ADULT LIVER, SIGNAL = 0.6; EXPRESSED IN PLACENTA, SIGNAL = 0.46; EXPRESSED IN LUNG, SIGNAL = 0.46; SWISSPROT HIT: P22366, EVALUE 3.40e-02
ISKDNSCKENCTCSSCLLRAPTISDLLNDQDLLDVIRIKLDPCHPTVKNWRNFASKWGMSYDELCFLEQRPQSPTLEFLLRNSQRTVGQLMELCRLYHRADVEKVLR

SEQ ID NO: 31926 - protein, 23 aa, Homo sapiens
  MAP TO AL136105.2; EXPRESSED IN ADULT LIVER, SIGNAL = 0.6; EXPRESSED IN PLACENTA, SIGNAL = 0.46; EXPRESSED IN LUNG, SIGNAL = 0.46
RSARTTPAKKTVLVPPACSGPPP

SEQ ID NO: 31927 - protein, 79 aa, Homo sapiens
  MAP TO AC020698.2; EXPRESSED IN LUNG, SIGNAL =  13; EXPRESSED IN ADULT LIVER, SIGNAL =   6; SWISSPROT HIT: P07900, EVALUE 3.00e-35
TDKNDKSVKDLVILLYETALLSSDFGLEGPQTHANRIYRMNKLGLGTDEDDPTADDTSAAVTEEMPPLEGDDDTSRMEK

SEQ ID NO: 31928 - protein, 30 aa, Homo sapiens
  MAP TO AL078585.18; EXPRESSED IN PLACENTA, SIGNAL = 0.55; EXPRESSED IN ADULT LIVER, SIGNAL = 0.59
KLKIFNHYGISIPKTMLKDLKKKNEKSILS

SEQ ID NO: 31929 - protein, 27 aa, Homo sapiens
  MAP TO AC018432.4; EXPRESSED IN PLACENTA, SIGNAL = 0.43; EXPRESSED IN LUNG, SIGNAL = 0.61; EXPRESSED IN ADULT LIVER, SIGNAL = 0.47; SWISSPROT HIT: P36035, EVALUE 1.80e+00
HEASNHTIAWLGPNPVPEMKKMTLWNP

SEQ ID NO: 31930 - protein, 72 aa, Homo sapiens
  MAP TO CHR22_179.0; EXPRESSED IN LUNG, SIGNAL = 2.1; EXPRESSED IN ADULT LIVER, SIGNAL = 1.2; SWISSPROT HIT: O43474, EVALUE 1.50e+00
RSVHGTAGLPHLPQLWGRHWLWVRVSAHEAALGGLREEVQAGVCHLPSPPGLHGHDGALQLHPDHLHDPGTF

SEQ ID NO: 31931 - protein, 28 aa, Homo sapiens
  MAP TO CHR22_87.0; EXPRESSED IN PLACENTA, SIGNAL = 0.31; EXPRESSED IN ADULT LIVER, SIGNAL = 0.32
QAVSLWFHTTQRQPWSNRHRAQPPKLRC

SEQ ID NO: 31932 - protein, 57 aa, Homo sapiens
  MAP TO CHR22_87.0; EXPRESSED IN PLACENTA, SIGNAL = 0.31; EXPRESSED IN ADULT LIVER, SIGNAL = 0.32; SWISSPROT HIT: O57474, EVALUE 2.80e+00
LTLPFSNQDGCLGDEAPCSPFSPSPSYKLSPSGSTLPNVSLGAIGTGLNPQNFAARQ

SEQ ID NO: 31933 - protein, 41 aa, Homo sapiens
  MAP TO AC023115.3; EXPRESSED IN PLACENTA, SIGNAL = 0.45; EXPRESSED IN ADULT LIVER, SIGNAL = 0.46
LRVVLSSIISTGRYKIIVTLHSSILSDMPKLSNSGESCSCQ

SEQ ID NO: 31934 - protein, 38 aa, Homo sapiens
  MAP TO AC013371.4; EXPRESSED IN PLACENTA, SIGNAL = 0.41; EXPRESSED IN ADULT LIVER, SIGNAL = 0.34
FSGEKAKDTWGDAVNREEVKVHADLASINTAKTRAVEQ

SEQ ID NO: 31935 - protein, 27 aa, Homo sapiens
  MAP TO AC013371.4; EXPRESSED IN PLACENTA, SIGNAL = 0.41; EXPRESSED IN ADULT LIVER, SIGNAL = 0.34
SLGRKQKTPGEMLSTERKSKFMQTWPQ

SEQ ID NO: 31936 - protein, 38 aa, Homo sapiens
  MAP TO AL136312.1; EXPRESSED IN LUNG, SIGNAL = 0.45; EXPRESSED IN ADULT LIVER, SIGNAL = 0.51; SWISSPROT HIT: Q03824, EVALUE 5.00e+00
KEVRKAFPEEVSTRLDLRQAEITIVRKKGKIFLDEDTA

SEQ ID NO: 31937 - protein, 26 aa, Homo sapiens
  MAP TO AJ239319.2; EXPRESSED IN ADULT LIVER, SIGNAL = 0.36
HMISVLLSSLRSIFTISLKGMLSLQT

SEQ ID NO: 31938 - protein, 30 aa, Homo sapiens
  MAP TO AC011977.3; EXPRESSED IN PLACENTA, SIGNAL = 0.32; EXPRESSED IN ADULT LIVER, SIGNAL = 0.37
AMDPNQDVNSELPEKEFRRSIKPTMEAPEK

SEQ ID NO: 31939 - protein, 79 aa, Homo sapiens
  MAP TO AC018691.5; EXPRESSED IN ADULT LIVER, SIGNAL = 0.31; SWISSPROT HIT: P31582, EVALUE 4.90e+00
IGSSTNTLSALKTAFADKETQAIYLLTDGRPDQVLTRAGNKEGLTDALKANAGNGSGGPFQLPPKICGHILPWLRDSDL

SEQ ID NO: 31940 - protein, 26 aa, Homo sapiens
  MAP TO AC011981.3; EXPRESSED IN PLACENTA, SIGNAL = 0.57; EXPRESSED IN ADULT LIVER, SIGNAL = 0.43
FAVKRTKRDEAQFMADDVMMKRKSNW

SEQ ID NO: 31941 - protein, 19 aa, Homo sapiens
  MAP TO AC000403.1; EXPRESSED IN ADULT LIVER, SIGNAL =  12; EXPRESSED IN PLACENTA, SIGNAL =  12; EXPRESSED IN BRAIN, SIGNAL =  12; EXPRESSED IN HELA, SIGNAL =  15; EXPRESSED IN HEART, SIGNAL =  13; EXPRESSED IN LUNG, SIGNAL = 7.7; EXPRESSED IN BONE MARROW, SIGNAL = 8.1; EXPRESSED IN FETAL LIVER, SIGNAL = 6.3
MWKPDSDSLSKACSRKLNL

SEQ ID NO: 31942 - protein, 84 aa, Homo sapiens
  MAP TO AL133448.4; EXPRESSED IN ADULT LIVER, SIGNAL = 1.5; EXPRESSED IN PLACENTA, SIGNAL = 1.6; EXPRESSED IN BRAIN, SIGNAL = 1.2; EXPRESSED IN HELA, SIGNAL = 0.89; EXPRESSED IN LUNG, SIGNAL = 2.3; EXPRESSED IN HEART, SIGNAL = 2.7; EXPRESSED IN BONE MARROW, SIGNAL = 2.1
PAIGCWTPMMAGGWPCASQPWTWALEMQCMCMTALGPLRAPDYCVVSPTSAMARLSLWRHCLARLLCPTTQLLGAMVVASMPPT

SEQ ID NO: 31943 - protein, 77 aa, Homo sapiens
  MAP TO AL133448.4; EXPRESSED IN ADULT LIVER, SIGNAL = 1.5; EXPRESSED IN PLACENTA, SIGNAL = 1.6; EXPRESSED IN BRAIN, SIGNAL = 1.2; EXPRESSED IN HELA, SIGNAL = 0.89; EXPRESSED IN LUNG, SIGNAL = 2.3; EXPRESSED IN HEART, SIGNAL = 2.7; EXPRESSED IN BONE MARROW, SIGNAL = 2.1
PATCLLTAATTRLSVLMEQMRDAVGIASLAISDAGTRSACMRRGCAMGSQTVRTAVMSGTAPMFCPARSLQLQSLAA

SEQ ID NO: 31944 - protein, 338 aa, Homo sapiens
  MAP TO AL133448.4; EXPRESSED IN ADULT LIVER, SIGNAL = 1.5; EXPRESSED IN PLACENTA, SIGNAL = 1.6; EXPRESSED IN BRAIN, SIGNAL = 1.2; EXPRESSED IN HELA, SIGNAL = 0.89; EXPRESSED IN LUNG, SIGNAL = 2.3; EXPRESSED IN HEART, SIGNAL = 2.7; EXPRESSED IN BONE MARROW, SIGNAL = 2.1; SWISSPROT HIT: P98158, EVALUE 4.00e-15
WLMCLQEEFQCLNHRCVSAVQRCDGVDACGDGSDEAGCSSDPFPGLTPRPVPSLPCNVTLEDFYGVFSSPGYTHLASVSHPQSCHWLLDPHDGRRLAVRFTALDLGFGDAVHVYDGPGPPESSRLLRSLTHFSNGKAVTVETLSGQAVVSYHTVAWSNGRGFNATYHVRGYCLPWDRPCGLGSGLGAGEGLGERCYSEAQRCDGSWDCADGTDEEDCPGCPPGHFPCGAAGTSGATACYLPADRCNYQTFCADGADERRCRHCQPGNFRCRDEKCVYETWVCDGQPDCADGSDEWDCSYVLPRKVITAAVIGSLVCGLLLVIALGCTCKLYAIRTQEY

SEQ ID NO: 31945 - protein, 38 aa, Homo sapiens
  MAP TO AF168787.1; EXPRESSED IN ADULT LIVER, SIGNAL = 1.4; EXPRESSED IN BRAIN, SIGNAL = 1.2; EXPRESSED IN HELA, SIGNAL = 1.8; EXPRESSED IN BONE MARROW, SIGNAL = 1.3; EXPRESSED IN LUNG, SIGNAL = 1.3; EXPRESSED IN FETAL LIVER, SIGNAL = 1.4
RTGGVSSTAAAAATPASATPRSPTILTIPTTPTSPAAR

SEQ ID NO: 31946 - protein, 221 aa, Homo sapiens
  MAP TO AL031658.11; EXPRESSED IN HELA, SIGNAL = 1.6; EXPRESSED IN ADULT LIVER, SIGNAL = 2.2; EXPRESSED IN PLACENTA, SIGNAL = 2.4; EXPRESSED IN BRAIN, SIGNAL = 2.5; EXPRESSED IN LUNG, SIGNAL = 2.2; EXPRESSED IN BONE MARROW, SIGNAL = 2.4; EXPRESSED IN FETAL LIVER, SIGNAL = 1.8; SWISSPROT HIT: P80544, EVALUE 9.00e-07
RHRQTDHQVDLASKTQTDHRTDPVSKAQTDRPPSRPSIQDTDRPPSGPSIQDTDRQTTKQTQHPRHRQTGRLPSRPSIQDTDRQTDRQTDYQADPASKTQTDHQADPASRHRQTDRQTDYQADPASKTQTDHQADPASRHRQTDRQTDYQADPASKTQTDRQTDYQADPASKTQTDRPPSRPSIQDTDRPPNRSSIQGTDRQTDRPPSTPSIQDTDRQTDH

SEQ ID NO: 31947 - protein, 154 aa, Homo sapiens
  MAP TO U66059.1; EXPRESSED IN FETAL LIVER, SIGNAL = 1.6; EXPRESSED IN LUNG, SIGNAL = 1.4; EXPRESSED IN HEART, SIGNAL = 1.7; EXPRESSED IN HELA, SIGNAL = 0.64; EXPRESSED IN ADULT LIVER, SIGNAL = 1.6; EXPRESSED IN BRAIN, SIGNAL = 1.4; SWISSPROT HIT: P04213, EVALUE 1.00e-07
HYSVGAGITDQGEVPNGYNVSRSTTEDFPLRLLSAAPSQTSVYFCASSYSTALQGRLLSAHKGREVLPSSPTQDSGMPWAEISAPGTLEPTVAPSGLDSMSLALCQVPLQASQPGLDWSQVLRCLLCCFLWSILGAFLLGWGQGFPSSYFSTHY

SEQ ID NO: 31948 - protein, 155 aa, Homo sapiens
  MAP TO AC004493.1; EXPRESSED IN LUNG, SIGNAL = 6.2; EXPRESSED IN FETAL LIVER, SIGNAL = 2.6; EXPRESSED IN ADULT LIVER, SIGNAL = 3.3; EXPRESSED IN PLACENTA, SIGNAL = 6.5; EXPRESSED IN HELA, SIGNAL = 6.8; SWISSPROT HIT: P03308, EVALUE 1.10e+00
RDLPLLAGVLERERPLRLAGVLERERPRLAGVLERERPRLAGVLERDLPLLLAGDLLRDLRRTGDRVLDLRLAGVLDRDLPLRAGVLDRDLRLVGVLDRDLRLAGVLERDLPRRAGVLERDLPLVAGDLEWDLPRLADLDLPLLWVFLLLDQPGR

SEQ ID NO: 31949 - protein, 192 aa, Homo sapiens
  MAP TO AL121889.3; EXPRESSED IN PLACENTA, SIGNAL = 2.8; EXPRESSED IN ADULT LIVER, SIGNAL = 3.2; EXPRESSED IN HELA, SIGNAL = 7.4; EXPRESSED IN LUNG, SIGNAL = 2.9; SWISSPROT HIT: P40381, EVALUE 2.60e-01
SNKFDHLTNRKPQSKELTLGNLLRMRLARLSSTPRKADLDPEMPAEGKAERKPHDCESSTVSEEDYFSSHRDELQSRKAIDAATQTEPGEEMPGLSVSEVGTQTSITTACAGTQTAVITRIASSQTTIWSRSTTTQTDMDENILFPRGTQSTEGSPVSKMSVSRSSSLKSSSSVSSQGSVASSTGSPASIRT

SEQ ID NO: 31950 - protein, 267 aa, Homo sapiens
  MAP TO AC025745.1; EXPRESSED IN ADULT LIVER, SIGNAL = 1.9; EXPRESSED IN BONE MARROW, SIGNAL = 1.6; EXPRESSED IN FETAL LIVER, SIGNAL = 1.7; EXPRESSED IN LUNG, SIGNAL = 1.4; EXPRESSED IN HELA, SIGNAL = 3.3; EXPRESSED IN BRAIN, SIGNAL = 1.5; SWISSPROT HIT: P31792, EVALUE 8.00e-51
VPPAPFHQSKPDPSPQYPLPTSLINPVVWDTTPPSLAAHHDPIIIQDPSKFPNVPQYPISLTHQKGLQPIINKLCSCSLLRPTHSPYNTPILPVKKSDGSYRLVQDLWAINQAVLPIRPVVPNPYTLLSLIPSNTTNYTAIDLKDAFFTIPLYPDSQNLFSFTWTDPETLQSQQLTWTVLPQGFRDSPHFFRQALAQDLTSLDLAPSGLLQYIDDLLLCSPSLEDAQTHTISLLNFLASKGYRVSLSKSQLSTPTVTHVGVQLSLGA

SEQ ID NO: 31951 - protein, 79 aa, Homo sapiens
  MAP TO AC007981.31; EXPRESSED IN LUNG, SIGNAL = 1.1; EXPRESSED IN FETAL LIVER, SIGNAL = 1.5; EXPRESSED IN ADULT LIVER, SIGNAL = 1.2; EXPRESSED IN HELA, SIGNAL = 1.2
RMRLLYMTSLMRTLYMTSLMRTLYTTSLMRTLYTTSLMRTLYMASLMRMLYTNSLISTLYMTLLMRTLYKTSVKKKMLP

SEQ ID NO: 31952 - protein, 38 aa, Homo sapiens
  MAP TO Z97183.1; EXPRESSED IN BRAIN, SIGNAL =   1; EXPRESSED IN HELA, SIGNAL = 1.2; EXPRESSED IN ADULT LIVER, SIGNAL = 1.2; EXPRESSED IN BONE MARROW, SIGNAL = 0.93
WSHLLCLPVGQHFPCRCRWLRPHYPCQQLQWYMCPSLR

SEQ ID NO: 31953 - protein, 395 aa, Homo sapiens
  MAP TO AC003665.1; EXPRESSED IN LUNG, SIGNAL =   5; EXPRESSED IN HEART, SIGNAL = 6.6; EXPRESSED IN BONE MARROW, SIGNAL =   7; EXPRESSED IN FETAL LIVER, SIGNAL = 7.2; EXPRESSED IN PLACENTA, SIGNAL = 8.5; EXPRESSED IN ADULT LIVER, SIGNAL = 5.3; EXPRESSED IN BRAIN, SIGNAL = 6.2; EXPRESSED IN HELA, SIGNAL = 7.3; SWISSPROT HIT: Q02447, EVALUE 1.00e-43
VPSEVPLTVPALTPPRIPAMLTAVCGSLGSQHTEAPHASPPRLDLQPLQTYQGHTSPEAGDYPSPLQPGELQSLPLGPEVDFSQGYELPGASSRVTCEDLESDSPLAPGPFSKLLQPDMSHHYESWFRPTHPGAEDGSWWDLHPGTSWMDLPHTQGALTSPGHPGALQAGLGGYVGDHQLCAPPPHPHAHHLLPAAGGQHLLGPPDGAKALEVAAPESQGLDSSLDGAARPKGSRRSVPRSSGQTVCRCPNCLEAERLGAPCGPDGGKKKHLHNCHIPGCGKAYAKTSHLKAHLRWHSGDRPFVCNWLFCGKRFTRSDELQRHLQTHTGTKKFPCAVCSRVFMRSDHLAKHMKTHEGAKEEAAGAASGEGKAGGAVEPPGGKGKREAEGSVAPSN

SEQ ID NO: 31954 - protein, 69 aa, Homo sapiens
  MAP TO AC003665.1; EXPRESSED IN LUNG, SIGNAL =   5; EXPRESSED IN HEART, SIGNAL = 6.6; EXPRESSED IN BONE MARROW, SIGNAL =   7; EXPRESSED IN FETAL LIVER, SIGNAL = 7.2; EXPRESSED IN PLACENTA, SIGNAL = 8.5; EXPRESSED IN ADULT LIVER, SIGNAL = 5.3; EXPRESSED IN BRAIN, SIGNAL = 6.2; EXPRESSED IN HELA, SIGNAL = 7.3; SWISSPROT HIT: Q02817, EVALUE 7.70e+00
ALWAASTRKRRTPPRRASTCSLSKLTRATRALRPGTTPPRCSLESCRASRWARRWTSRRAMSCQGPPRG

SEQ ID NO: 31955 - protein, 17 aa, Homo sapiens
  MAP TO AJ132410.1; EXPRESSED IN LUNG, SIGNAL = 1.6; EXPRESSED IN BONE MARROW, SIGNAL = 1.3; EXPRESSED IN ADULT LIVER, SIGNAL = 1.4; EXPRESSED IN HELA, SIGNAL =   2; EXPRESSED IN BRAIN, SIGNAL = 1.3
WISMTTWAWRPVNSSRT

SEQ ID NO: 31956 - protein, 471 aa, Homo sapiens [sequence omitted]

SEQ ID NO: 31957 - protein, 345 aa, Homo sapiens
  MAP TO AH005332.1; EXPRESSED IN ADULT LIVER, SIGNAL = 3.5; EXPRESSED IN BRAIN, SIGNAL = 3.9; EXPRESSED IN PLACENTA, SIGNAL = 5.8; EXPRESSED IN LUNG, SIGNAL = 5.2; EXPRESSED IN HEART, SIGNAL = 4.2; EXPRESSED IN BONE MARROW, SIGNAL = 3.5; EXPRESSED IN FETAL LIVER, SIGNAL = 3.3; SWISSPROT HIT: P00519, EVALUE 0.00e+00
LVKKNEEAADEVFKDIMESSPGSSPPNLTPKPLRRQVTVAPASGLPHKEEAGKGSALGTPAAAEPVTPTSKAGSGAPGGTSKGPAEESRVRRHKHSSESPGRDKGKLSRLKPAPPPPPAASAGKAGGKPSQSPSQEAAGEAVLGAKTKATSLVDAVNSDAAKPSQPGEGLKKPVLPATPKPQSAKPSGTPISPAPVPSTLPSASSALAGDQPSSTAFIPLISTRVSLRKTRQPPERIASGAITKGVVLDSTEALCLAISRNSEQMASHSAVLEAGKNLYTFCVSYVDSIQQMRNKFAFREAINKLENNLRELQICPATAGSGPAATQDFSKLLSSVKEISDIVQR

SEQ ID NO: 31958 - protein, 103 aa, Homo sapiens
  MAP TO AC009962.1; EXPRESSED IN ADULT LIVER, SIGNAL = 3.3; EXPRESSED IN PLACENTA, SIGNAL =  16; EXPRESSED IN BRAIN, SIGNAL = 0.81; EXPRESSED IN LUNG, SIGNAL = 2.6; SWISSPROT HIT: O00154, EVALUE 2.20e+00
GSQVTLVISDLVEPMDVTPHRRVHGQLCLILDSKVIGCKTGIVNLQNDAGIVHSICEDLNPQVLDGLEVMTPVSDLESLLLQVLPDFALQLPVLGLQAPHSVQ

SEQ ID NO: 31959 - protein, 68 aa, Homo sapiens
  MAP TO AC009962.1; EXPRESSED IN ADULT LIVER, SIGNAL = 3.3; EXPRESSED IN PLACENTA, SIGNAL =  16; EXPRESSED IN BRAIN, SIGNAL = 0.81; EXPRESSED IN LUNG, SIGNAL = 2.6; SWISSPROT HIT: P10495, EVALUE 1.80e-01
VPGPHATPEAGGAGHGYPGTRAPGACIDAGHAAGRPGAVVGHLDRAQEQVVGGEDGASGEAHAIQGGE

SEQ ID NO: 31960 - protein, 321 aa, Homo sapiens
  MAP TO AC000064.1; EXPRESSED IN LUNG, SIGNAL = 2.6; EXPRESSED IN BONE MARROW, SIGNAL = 3.1; EXPRESSED IN HELA, SIGNAL = 3.3; EXPRESSED IN ADULT LIVER, SIGNAL = 2.9; EXPRESSED IN PLACENTA, SIGNAL = 3.7; EXPRESSED IN BRAIN, SIGNAL = 3.8; EXPRESSED IN HEART, SIGNAL = 2.3; SWISSPROT HIT: P10272, EVALUE 5.00e-50
EVQGCAVGILTQGPGPCPVAFLSKQLDLTVLGSPSCLHAVASAALILLEALKITNYAQLTLYSSHNFQNLFSFSHLTHILSAPRLLQLYSLFVESPTITILPGPDFNLASHIILDTTPDPDDCMSLIYLTFTPFPHISFFSVPHVDHIWFTDGSSTRPDRHSPAKAGYAIESSTSIIEATALPPSTTSQQAELIALTRAFTLAKGLHVNIYTDSKYAFHILHHHAVIWAERGFLTTQGSSIINASLIKTLLKAALLPKEAGVTHCKGHQKASDPITLGNAYADKVAKEAPSVPTSVPHGQFFSFPSVIPTYSPIETSAYQS

SEQ ID NO: 31961 - protein, 155 aa, Homo sapiens
  MAP TO AC004263.1; EXPRESSED IN HEART, SIGNAL = 4.2; EXPRESSED IN LUNG, SIGNAL = 3.9; EXPRESSED IN FETAL LIVER, SIGNAL = 3.1; EXPRESSED IN ADULT LIVER, SIGNAL = 4.8; EXPRESSED IN PLACENTA, SIGNAL = 4.5; EXPRESSED IN HELA, SIGNAL = 5.6; EXPRESSED IN BRAIN, SIGNAL = 3.5; SWISSPROT HIT: P22392, EVALUE 2.00e-79
SRTTANLERTFITIRPDSMQCGLVGKIIKRFEQKGFRLVAMKFLPASEEHLKQHYIDLKDRPFFPGLVKYMNSGPVVAMVWEGLNVVKTGRVMLGETNPADSKPGTIRGDFCIQVGRNIIHGSDSVKSAEKEISLRFKPEELVDYKSCAHDWVYE

SEQ ID NO: 31962 - protein, 37 aa, Homo sapiens
  MAP TO AC004263.1; EXPRESSED IN HEART, SIGNAL = 4.2; EXPRESSED IN LUNG, SIGNAL = 3.9; EXPRESSED IN FETAL LIVER, SIGNAL = 3.1; EXPRESSED IN ADULT LIVER, SIGNAL = 4.8; EXPRESSED IN PLACENTA, SIGNAL = 4.5; EXPRESSED IN HELA, SIGNAL = 5.6; EXPRESSED IN BRAIN, SIGNAL = 3.5
RPTSSAPSSPSGRTACSAAWWARSSSASSRRGSASWP

SEQ ID NO: 31963 - protein, 42 aa, Homo sapiens
  MAP TO AP001068.1; EXPRESSED IN LUNG, SIGNAL = 1.5; EXPRESSED IN HEART, SIGNAL =   2; EXPRESSED IN FETAL LIVER, SIGNAL = 1.7; EXPRESSED IN ADULT LIVER, SIGNAL = 1.7; EXPRESSED IN PLACENTA, SIGNAL = 4.1; EXPRESSED IN BRAIN, SIGNAL = 1.5; EXPRESSED IN HELA, SIGNAL = 0.62; EXPRESSED IN BONE MARROW, SIGNAL = 1.5
WPRPPCLSAPALTPTPGRWTTAQRAAVSPPAAPPAAAPRPPP

SEQ ID NO: 31964 - protein, 163 aa, Homo sapiens
  MAP TO AC005363.1; EXPRESSED IN ADULT LIVER, SIGNAL = 1.3; EXPRESSED IN PLACENTA, SIGNAL = 1.6; EXPRESSED IN HELA, SIGNAL = 1.7; EXPRESSED IN HEART, SIGNAL = 1.7; EXPRESSED IN LUNG, SIGNAL = 1.2; SWISSPROT HIT: Q04833, EVALUE 8.90e-01
CKNADAGCIVTCPLAHRKGHQDSCPFELTACPNEGCTSQVPRGTLAEHRQHCQQGSQQRCPLGCGATLDPAERARHNCYRELHNAWSVRQERRRPLLLSLLRRVRWLDQATSVVRRELAELSNFLEEDTALLEGAPQEEAEAAPEGNVGAEVVGEPRANIPCK

SEQ ID NO: 31965 - protein, 18 aa, Homo sapiens
  MAP TO AC005363.1; EXPRESSED IN ADULT LIVER, SIGNAL = 1.3; EXPRESSED IN PLACENTA, SIGNAL = 1.6; EXPRESSED IN HELA, SIGNAL = 1.7; EXPRESSED IN HEART, SIGNAL = 1.7; EXPRESSED IN LUNG, SIGNAL = 1.2
HSDMPPGPSQGAPGLMPL

SEQ ID NO: 31966 - protein, 212 aa, Homo sapiens
  MAP TO AC004687.1; EXPRESSED IN ADULT LIVER, SIGNAL =   2; EXPRESSED IN BRAIN, SIGNAL = 1.7; EXPRESSED IN HELA, SIGNAL = 2.6; EXPRESSED IN BONE MARROW, SIGNAL = 1.8; EXPRESSED IN LUNG, SIGNAL =   2; EXPRESSED IN HEART, SIGNAL = 1.8; EXPRESSED IN FETAL LIVER, SIGNAL = 1.9; SWISSPROT HIT: P55144, EVALUE 4.80e+00
GDSFSQSLGPSRSYQEPGRRLHLIRQHPGHAHYHLPAAYLLGPSRSAVARPPRPGPFLPSQEPGMGPRHHRFPRAAHPRAPGEQQRLAGAQHPYAQGWGLSHLQSTSQHPAACPVPLRRARPPDSSGSGESYCTERSGYLADGPASDSSSGPCHGSSSDSVVNCTDISLQGVHGSSSTFCSSLSSDFDPLVYCSPKGDPQRVDMQPSVTSRP

SEQ ID NO: 31967 - protein, 55 aa, Homo sapiens
  MAP TO AC004687.1; EXPRESSED IN ADULT LIVER, SIGNAL =   2; EXPRESSED IN BRAIN, SIGNAL = 1.7; EXPRESSED IN HELA, SIGNAL = 2.6; EXPRESSED IN BONE MARROW, SIGNAL = 1.8; EXPRESSED IN LUNG, SIGNAL =   2; EXPRESSED IN HEART, SIGNAL = 1.8; EXPRESSED IN FETAL LIVER, SIGNAL = 1.9; SWISSPROT HIT: Q9WUL6, EVALUE 1.60e+00
ASPLPQSCTSPGSRRAAAPGRSPAPLCTRLGTEPPPIHLTAPCCLPSAPTPGQAP

SEQ ID NO: 31968 - protein, 259 aa, Homo sapiens
  MAP TO AC005263.1; EXPRESSED IN ADULT LIVER, SIGNAL = 2.5; EXPRESSED IN BRAIN, SIGNAL = 2.5; EXPRESSED IN HELA, SIGNAL = 3.8; EXPRESSED IN HEART, SIGNAL = 2.5; EXPRESSED IN BONE MARROW, SIGNAL = 3.3; EXPRESSED IN LUNG, SIGNAL = 3.1; EXPRESSED IN FETAL LIVER, SIGNAL =   2
FFLQFHFKMEKPPAPPSLPAGPPGVKRPPPPLMNGLPPRPPLPESLPPPPPGGLPLPPMPPTGPAPSGPPGPPQLPPPAPGVHPPAPVVHPPASGVHPPAPGVHPPAPGVHPPAPGVHPPTSGVHPPAPGVHPPAPGVHPPAPGVHPPAPGVHPPAPGVHPPPSAGVHPQAPGVHPAAPAVHPQAPGVHPPAPGMHPQAPGVHPQPPGVHPSAPGVHPQPPGVHPSNPGVHPPTPMPPMLRPPLPSEGPGNIPPPPPTN

SEQ ID NO: 31969 - protein, 24 aa, Homo sapiens
  MAP TO AC005263.1; EXPRESSED IN ADULT LIVER, SIGNAL = 2.5; EXPRESSED IN BRAIN, SIGNAL = 2.5; EXPRESSED IN HELA, SIGNAL = 3.8; EXPRESSED IN HEART, SIGNAL = 2.5; EXPRESSED IN BONE MARROW, SIGNAL = 3.3; EXPRESSED IN LUNG, SIGNAL = 3.1; EXPRESSED IN FETAL LIVER, SIGNAL =   2
SSSSSTLRWRSPRLHPASLLAPLG

SEQ ID NO: 31970 - protein, 228 aa, Homo sapiens
  MAP TO AL132777.2; EXPRESSED IN PLACENTA, SIGNAL = 4.6; EXPRESSED IN BRAIN, SIGNAL = 2.2; EXPRESSED IN HELA, SIGNAL = 1.9; EXPRESSED IN BONE MARROW, SIGNAL = 2.5; EXPRESSED IN LUNG, SIGNAL = 2.4; EXPRESSED IN HEART, SIGNAL = 2.6; EXPRESSED IN FETAL LIVER, SIGNAL = 2.6; EXPRESSED IN ADULT LIVER, SIGNAL = 2.7; SWISSPROT HIT: Q9UIU6, EVALUE 1.00e-92
ELDGNPSTEDESSKGHEDLSPHPLSSSSDGITNLSLSSHMEPVYMQQIGNAKISLSSSGVLLNGSLVPASTSPVFLNGNSFIQGPSGVILNGLNVGNTQAVALNPPKMSSNIVSNGISMTDILGSTSQDVKEFKVLQSSANSATTTSYSPSVPVSFPGLIPSTEVKREGIQTVASQDGGSVVTFTTPVQINQYGIVQIPNSGANSQFLNGSIGFSPLQLPPVSVAASQ

SEQ ID NO: 31971 - protein, 574 aa, Homo sapiens
  MAP TO AL137784.2; EXPRESSED IN PLACENTA, SIGNAL = 1.7; EXPRESSED IN HELA, SIGNAL = 0.92; EXPRESSED IN BRAIN, SIGNAL = 1.7; EXPRESSED IN HEART, SIGNAL = 1.9; EXPRESSED IN BONE MARROW, SIGNAL = 1.8; EXPRESSED IN LUNG, SIGNAL = 1.5; EXPRESSED IN ADULT LIVER, SIGNAL = 1.7; SWISSPROT HIT: Q13360, EVALUE 3.00e-15
EERYICWYCWRTFRYPNSLKAHLRFHCVFSGGGGGAFLHHEHAARQGAVPAADGLGLSPKPPAPDFAAPSQAGTLRPHPLGPPPVQACGAREGIKREASSAPSATSPTPGKWGQPKKGKEQLDRALDMSGAARGQGHFLGIVGGSSAGVGSLAFYPGVRSAFKPAGLARAAAAAHGDPYREESSSKQGAGLALGRLLGGGRACGRPGSGENSAAGGAGHHHHHHAHHHHHPKCLLAGDPPPPPPPGLPCSGALRGFPLLSVPPEEASAFKHVERAPPAAAALPGARYAQLPPAPGLPLERCALPPLDPGGLKAYPGGECSHLPAVMPAFTVYNGELLYGSPATTAYYPLKLHFGGLLKYPESISYFSGPAAAALSPAELGSLASIDREIAMHNQQLSEMAAGKGRGRLDSGTLPPAVAAAGGTGGGGSGGSGAGKPKTGHLCLYCGKLYSRKYGLKIHMRTHTGYKPLKCKVCLRPFGDPSNLNKHIRLHAEGNTPYRCEFCGKVLVRRRDLERHVKSRHPGQSLLAKAGDGPGAEPGYPPEPGDPKSDDSDVDVCFTDDQSDPEVGGGGERDL

SEQ ID NO: 31972 - protein, 56 aa, Homo sapiens
  MAP TO AL137784.2; EXPRESSED IN PLACENTA, SIGNAL = 1.7; EXPRESSED IN HELA, SIGNAL = 0.92; EXPRESSED IN BRAIN, SIGNAL = 1.7; EXPRESSED IN HEART, SIGNAL = 1.9; EXPRESSED IN BONE MARROW, SIGNAL = 1.8; EXPRESSED IN LUNG, SIGNAL = 1.5; EXPRESSED IN ADULT LIVER, SIGNAL = 1.7; SWISSPROT HIT: Q24742, EVALUE 2.10e+00
GRSATSAGTAGGRLDTPTALRHTCVSTACSAAVEAAPSCTTNTRLAKAPSQRLMAS

SEQ ID NO: 31973 - protein, 43 aa, Homo sapiens
  MAP TO AL137784.2; EXPRESSED IN PLACENTA, SIGNAL = 1.7; EXPRESSED IN HELA, SIGNAL = 0.92; EXPRESSED IN BRAIN, SIGNAL = 1.7; EXPRESSED IN HEART, SIGNAL = 1.9; EXPRESSED IN BONE MARROW, SIGNAL = 1.8; EXPRESSED IN LUNG, SIGNAL = 1.5; EXPRESSED IN ADULT LIVER, SIGNAL = 1.7
FRPAVRGRASSARPLPRPRPPRRPQASGGSPRRARSSWTVPWT

SEQ ID NO: 31974 - protein, 19 aa, Homo sapiens
  MAP TO AC005218.1; EXPRESSED IN LUNG, SIGNAL = 7.4; EXPRESSED IN ADULT LIVER, SIGNAL = 4.3; EXPRESSED IN BRAIN, SIGNAL = 7.4; EXPRESSED IN HELA, SIGNAL = 9.5; EXPRESSED IN HEART, SIGNAL = 9.4; EXPRESSED IN BONE MARROW, SIGNAL =  27
DPHRAQLQLYHHGRAGNRV

SEQ ID NO: 31975 - protein, 67 aa, Homo sapiens
  MAP TO AL080312.4; EXPRESSED IN BRAIN, SIGNAL = 0.99; EXPRESSED IN HELA, SIGNAL = 1.6; EXPRESSED IN ADULT LIVER, SIGNAL = 1.4; EXPRESSED IN BONE MARROW, SIGNAL =   1; EXPRESSED IN LUNG, SIGNAL = 1.2; EXPRESSED IN HEART, SIGNAL = 1.2; SWISSPROT HIT: P52479, EVALUE 3.70e+00
CTPWWCFLQTPVNGIFGLRAHKLTWQLGVPESECLALRCTSLIPQVDAPQRDNLQVGLPSGGFPSDG

SEQ ID NO: 31976 - protein, 150 aa, Homo sapiens
  MAP TO AL080312.4; EXPRESSED IN BRAIN, SIGNAL = 0.99; EXPRESSED IN HELA, SIGNAL = 1.6; EXPRESSED IN ADULT LIVER, SIGNAL = 1.4; EXPRESSED IN BONE MARROW, SIGNAL =   1; EXPRESSED IN LUNG, SIGNAL = 1.2; EXPRESSED IN HEART, SIGNAL = 1.2; SWISSPROT HIT: P13993, EVALUE 2.00e-15
MDSPQVDAPQVDSPQVDAPQVDSPQVDSPQVDAPQVDSPQVDAPQVDSPQVNAPQVCVPQVDAPQVDSPQVDSPQVDSPQVDSPQVDSHQVDTPQVDSPQVCAPQVDSPQVESPQVESPQVDTHQVDSHQVSVPQVDAPQVDTHQVDTPQ

SEQ ID NO: 31977 - protein, 161 aa, Homo sapiens
  MAP TO AL121889.3; EXPRESSED IN HELA, SIGNAL = 1.4; EXPRESSED IN ADULT LIVER, SIGNAL = 1.2; EXPRESSED IN BRAIN, SIGNAL = 1.1; EXPRESSED IN LUNG, SIGNAL = 1.2; EXPRESSED IN BONE MARROW, SIGNAL = 1.3
MALLSEGLDEVPAACLSPCGPPNPTELFSESRRLALEELVAGGPEAFAAFLRRERLARFLNPDEVHAILRAAERPGEEGAAAAAAAEDSFGSSHDCSSGTYFPEQSDLEPPLLELGWPAFYQGAYRGATRVETHFQPRGAGEGGPYGCKDALRQQLRSARE

SEQ ID NO: 31978 - protein, 206 aa, Homo sapiens
  MAP TO M63796.1; EXPRESSED IN ADULT LIVER, SIGNAL = 1.7; EXPRESSED IN BRAIN, SIGNAL =   2; EXPRESSED IN HELA, SIGNAL = 1.3; EXPRESSED IN BONE MARROW, SIGNAL = 2.1; EXPRESSED IN LUNG, SIGNAL = 1.8; EXPRESSED IN HEART, SIGNAL = 2.3; SWISSPROT HIT: Q9CD58, EVALUE 6.20e+00
LRKSSVAAPLRRRCNKPYWTDDGGDPSGPDGPLTPAIQRISGFREYIFRKKTSSSVFCSAHVEIFPSFSCRSGVEQCLPPRSRTSWALPDDALPLWIHVVCNLVRAARATGLPEVWVPGWRSPRPAVRVRVDGVRRVRWWKEKGASERVRAEKEAYLQAGLAKSVHSQWANGNSNGERVILWGATRGEQGAPRGWIGEIEVAPGEQ

SEQ ID NO: 31979 - protein, 199 aa, Homo sapiens
  MAP TO AC004584.1; EXPRESSED IN LUNG, SIGNAL = 1.8; EXPRESSED IN BONE MARROW, SIGNAL = 1.6; EXPRESSED IN FETAL LIVER, SIGNAL = 1.4; EXPRESSED IN ADULT LIVER, SIGNAL = 1.8; EXPRESSED IN BRAIN, SIGNAL = 1.3; EXPRESSED IN HELA, SIGNAL = 0.34; SWISSPROT HIT: Q14258, EVALUE 1.00e-113
MAELCPLAEELSCSICLEPFKEPVTTPCGHNFCGSCLNETWAVQGSPYLCPQCRAVYQARPQLHKNTVLCNVVEQFLQADLAREPPADVWTPPARASAPSPNAQVACDHCLKEAAVKTCLVCMASFCQEHLQPHFDSPAFQDHPLQPPVRDLLRRKCSQHNRLREFFCPEHSECICHICLVEHKTCSPASLSQASADLE

SEQ ID NO: 31980 - protein, 30 aa, Homo sapiens
  MAP TO AC004584.1; EXPRESSED IN LUNG, SIGNAL = 1.8; EXPRESSED IN BONE MARROW, SIGNAL = 1.6; EXPRESSED IN FETAL LIVER, SIGNAL = 1.4; EXPRESSED IN ADULT LIVER, SIGNAL = 1.8; EXPRESSED IN BRAIN, SIGNAL = 1.3; EXPRESSED IN HELA, SIGNAL = 0.34
WPRSCRAPSAWSPSRSRSPLRAATTSAGRA

SEQ ID NO: 31981 - protein, 194 aa, Homo sapiens
  MAP TO AL109808.2; EXPRESSED IN HEART, SIGNAL = 7.2; EXPRESSED IN BONE MARROW, SIGNAL = 2.3; EXPRESSED IN ADULT LIVER, SIGNAL = 2.3; EXPRESSED IN BRAIN, SIGNAL =  15; EXPRESSED IN HELA, SIGNAL = 3.5; SWISSPROT HIT: P04156, EVALUE 9.00e-59
LFVATWSDLGLCKKRPKPGGWNTGGSRYPGQGSPGGNRYPPQGGGGWGQPHGGGWGQPHGGGWGQPHGGGWGQPHGGGWGQGGGTHSQWNKPSKPKTNMKHMAGAAAAGAVVGGLGGYMLGSAMSRPIIHFGSDYEDRYYRENMHRYPNQVYYRPMDEYSNQNNFVHDCVNITIKQHTVTTTTKGENFTETDVK

SEQ ID NO: 31982 - protein, 2338 aa, Homo sapiens
  MAP TO Z68873.1; EXPRESSED IN PLACENTA, SIGNAL = 3.5; EXPRESSED IN BRAIN, SIGNAL = 2.2; EXPRESSED IN BONE MARROW, SIGNAL = 2.4; EXPRESSED IN FETAL LIVER, SIGNAL =   2; EXPRESSED IN LUNG, SIGNAL = 2.2; EXPRESSED IN HEART, SIGNAL = 2.1; EXPRESSED IN ADULT LIVER, SIGNAL = 2.5; EXPRESSED IN HELA, SIGNAL = 2.7; SWISSPROT HIT: P05790, EVALUE 6.00e-23
PPPEAAVVAFEWLKTSTLTGLHPQLPLSLPQPECALPYLVRAFSRGDYMGRIQEVGWVTAGLVIWAGTCYYIYKFTKGRAQSVRTLARNGSTVKMETVVGVQSQTLAINEAEIKTKPQVEIGAETGARSGPRAEVETKATAIAIHRANSQAKAMVGAEPETQSESKVVAGTLVMTEAVTLTEVKAKAREVAMKEAVTQTDAEAGKIVKKEAVTQTKAKAWALVAKTEAKREAMTQTKAETHILAEKETEINRVMVTQSETLAVPREVAKMGATNKTGIVDETKTRALEETVSVAKTQSEARPGATVDARGNPNGMSREVAGVDMKSCAQSQAVTKIQGDDMPGTGVEDMGNCKTMSRAESGADTRASAQPQIFAKTQTEAIPGAKIDAGGNTNAMCKVGAGADVRACIQPQTVAKKQAEVTSGARVDGRGNTNVISKAITGADMRAAAQPQAVASTHAEAMSDAKVKNRGNPNAMTKAGAKANLRANSQVEALPDARDKSRGNPNVMAKVGDGTDMLSCTQPQLVASVQADTLSDGKIKVRGNVNTMPKEGAGVDMKAQGMAQSQGEALPNTRGKARGKAKAKCKTGPGMDMKTCTQPQAGVKTPAEALLDSRVDGRGNPNATSKAGTKADQRVCGQPLVVANPQGEALPGAKNKVKGNPHTVLKVGAGEGTTDSAQPEAVVSFQGEALLGTKNKVKGNPNVVLKAEVGEGAMGTAQLQIMASSKGEALLDSKNKVKGNSNAVSKAGAGTDTTGSVQPQIVANSQGEVLPGAKNKIRGNPTTVPNSGVGPYTTDSARLQAVANSQGEVLPGAKNKVKANLNAVSKAEAGMGATGSVQPQAVANSHCETLPGAKNKVRGNWNAVSKAGAGMDTRGSAQPQAVANSQGEVLPGAKNKVKGNPNVVSKAGAREDTVGSTQPQVLASSQRETLPGARNKVKGNSNVVSKAGAREDTMGSAQPQVVANSQRETLPGARNKVKGNSNAISKAEAGAGIMGSVQVQVVASFQGEVLPGAKNKVRGNSNAVPKAEAGADTVGSAQPQAVANSQSETLLGARNKVKGNTIAVPKAGTGAGTRHSAQPQIVAGSQGETLPGARDKSMSTSEAEATAEDEAYAKPEAEAMPTSESEGGSGTQACRKTQPNIHDYYWNGIGVEDWIAAERWIKFRFQTMDGDWENSVSWADDENEASIGSWSGASDKAGIIRSWAVACDETSVKSWAGARAENVVGIGTWARAGEQASGGLWAGGQTSEGTWAGDKASGGAWTGAENQASGGSWALAGNQAIGELWAAGQASDGSWPGGQASGVSWVGEEAIGGSWTGAENQASEGSWAGAGAGNMSSVSYWAGVVDQAGGGSWAGTSDQSGGGSKPRFEDQASGEGSWAGAGGQASGGSMLGPEDQSSGRSWADTADQASGGSRLGHVDQSSGGAWAGTLDQSGGGSKPRFENQTTEEGSWAGAGGQAGGGSKVGPEDQSSGRSWANSGDQISGGFLVGIVDQANGGSWTGAGHPASVGPKPIFEDQVSGRGSWADAREQVVGDSRLGLRDQSSGDSWADTGDQASGWFCVCPGSQTNGGSWGGASGQDVGGSRPGPTNQSSAGSWDSPGSQVSGSCWTGAGAVDQAGGCSKPGFEDQAIGGGFWPGAGDQTGGGSRPGSEDQSSGIGSWGVAGGQVLGGARPGPADQSSGGSWAGTGNQSSGRSWIGPGDQAVDCSKPEFEDQACGGGSWAGAGSQASGESWAGSRPGNEAIGGSRMGSEDQATGGSWARSEDQASGRFQVSFEVEANEGFWFGPGAEAVIGSWCWTEEKADIVSRPDDKDEATTASRSGAGEEAMICSRIEAENKASSGSWIRSEEVAYMGSCVGAEAGAGAEAGAGAEAGAGAGAEAGAEAGAGAGAGPGTESGAGIWSWDGDATTVESRLGAGEEAGVESWTLARNVGEDELSRESSPDIEEISLRSLFWAESENSNTFRSKSGKDASFESGAGDNTSIKDKFEAAGGVDIGSWFCAGNENTSEDKSAPKAKAKKSSESRGIYPYMVPGAGMGSWDGAMIWSETKFAHQSEASFPVEDESRKQTRTGEKTRPWSCRCKHEANMDPRDLEKLICMIEMTEDPSVHEIANNALYNSADYSYSHEVVRNVGGISVIESLLNNPYPSVRQKALNALNNISVAAENHRKVKTYLNQVCEDTVTYPLNSNVQLAGLRLIRHLTITSEYQHMVTNYISEFLRLLTVGSGETKDHVLGMLLNFSKNPSMTKDLLIANAPTSLINIFSKKETKENILNALSLFENINYHFKRRAKAFTQDKFSKNSLYFLFQRPKACAKKLRALAAECNDPEVKERVELLISKL

SEQ ID NO: 31983 - protein, 248 aa, Homo sapiens
  MAP TO D16583.1; EXPRESSED IN HEART, SIGNAL = 2.1; EXPRESSED IN BONE MARROW, SIGNAL = 2.4; EXPRESSED IN LUNG, SIGNAL =   2; EXPRESSED IN ADULT LIVER, SIGNAL = 2.1; EXPRESSED IN BRAIN, SIGNAL = 2.1; EXPRESSED IN HELA, SIGNAL = 2.3; EXPRESSED IN PLACENTA, SIGNAL = 3.6; SWISSPROT HIT: P19113, EVALUE 0.00e+00
GPNCLTENVLKEIAKAGRLFLIPATIQDKLIIRFTVTSQFTTRDDILRDWNLIRDAATLILSQHCTSQPSPRVGNLISQIRGARAWACGTSLQSVSGAGDDPVQARKIIKQPQRVGAGPMKRENGLHLETLLDPVDDCFSEEAPDATKHKLSSFLFSYLSVQTKKKTVRSLSCNSVPVSAQKPLPTEASVKNGGSSRVRIFSRFPEDMMMLKKSAFKKLIKFYSVPSFPECSSQCGLQLPCCPLQAMV

SEQ ID NO: 31984 - protein, 239 aa, Homo sapiens
  MAP TO AC008468.4; EXPRESSED IN BONE MARROW, SIGNAL = 1.3; EXPRESSED IN FETAL LIVER, SIGNAL = 1.2; EXPRESSED IN LUNG, SIGNAL = 1.3; EXPRESSED IN HEART, SIGNAL = 1.3; EXPRESSED IN ADULT LIVER, SIGNAL = 1.2; EXPRESSED IN BRAIN, SIGNAL = 2.6; SWISSPROT HIT: Q9UN73, EVALUE 1.00e-123
PPLGSNVTLQVFVLDENDNAPALLAPRVGGTGGAVSELVPRSLGAGQVVAKVRAVDADSGYNAWLSYELQPPASSARFPFRVGLYTGEISTTRVLDEADSPRHRLLVLVKDHGEPALTATATVLVSLVESGQAPKASSRASVGAAGPEAALVDVNVYLIIAICAVSSLLVLTLLLYTALRCSAPPTEGACTADKPTLVCSSAVGSWSYSQQRRQRVCSGEGPPKMDLMAFSPSLSPCPI

SEQ ID NO: 31985 - protein, 742 aa, Homo sapiens [sequence omitted]

SEQ ID NO: 31986 - protein, 156 aa, Homo sapiens
  MAP TO AC005618.1; EXPRESSED IN PLACENTA, SIGNAL = 1.5; EXPRESSED IN HELA, SIGNAL = 2.6; EXPRESSED IN ADULT LIVER, SIGNAL = 1.5; EXPRESSED IN BRAIN, SIGNAL = 1.7; EXPRESSED IN HEART, SIGNAL = 1.8; EXPRESSED IN FETAL LIVER, SIGNAL = 1.6; EXPRESSED IN LUNG, SIGNAL = 1.6; EXPRESSED IN BONE MARROW, SIGNAL = 1.6; SWISSPROT HIT: Q9UN66, EVALUE 3.00e-31
GSTGVELAPRSADSGYLVTKVVAVDRDSGQNAWLSYSLLKSSEPGLFAVGLHTGEVRTARALLDRDALKQRLVVVVQDHGQPPLSATVTLTVAVADSIPDVLADLGSLKPSADPDDSGLTLYLVVAVAAVSCVFLAFVTVLLALKLRRWHKSRLLH

SEQ ID NO: 31987 - protein, 227 aa, Homo sapiens
  MAP TO AC008101.15; EXPRESSED IN LUNG, SIGNAL = 3.4; EXPRESSED IN PLACENTA, SIGNAL = 4.2; EXPRESSED IN HELA, SIGNAL = 8.9; EXPRESSED IN ADULT LIVER, SIGNAL =   2; SWISSPROT HIT: Q9NY65, EVALUE 1.00e-123
TDACSGLQGFLIFHSFGGGTGSGFTSLLMERLSLDYGKKSKLEFAIYPAPQVSTAVVEPYNSILTTHTTLEHSDCAFMVDNEAIYDICRRNLDIERPTYTNLNRLISQIVSSITASLRFDGALNVDLTEFQTNLVPYPRIHFPLVTYAPIISAEKAYHEQLSVAEITSSCFEPNSQMVKCDPRHGKYMACCMLYRGDVVPKDVNVAIAAIKTKRTIQFVDWCPTGFK

SEQ ID NO: 31988 - protein, 71 aa, Homo sapiens
  MAP TO AC008101.15; EXPRESSED IN LUNG, SIGNAL = 3.4; EXPRESSED IN PLACENTA, SIGNAL = 4.2; EXPRESSED IN HELA, SIGNAL = 8.9; EXPRESSED IN ADULT LIVER, SIGNAL =   2; SWISSPROT HIT: Q9WU42, EVALUE 3.90e-01
QFWWGHWLRLHFSADGTPLPGLWQEIQAGVCHLPSPPGLYCSGGALQLHPDHPHHTGTFRLCFHGGQRSHL

SEQ ID NO: 31989 - protein, 71 aa, Homo sapiens
  MAP TO Z97653.12; EXPRESSED IN HEART, SIGNAL =   2; EXPRESSED IN LUNG, SIGNAL = 2.2; EXPRESSED IN BONE MARROW, SIGNAL = 0.95; EXPRESSED IN ADULT LIVER, SIGNAL = 2.2; EXPRESSED IN HELA, SIGNAL = 0.46; EXPRESSED IN PLACENTA, SIGNAL = 1.5; SWISSPROT HIT: Q03132, EVALUE 2.60e+00
GCCCPPLPPSPVPPEPGAHLEACVRDGGALEAHGFDTLLGERIVVNELTDVQVGDANQAEALEASGGKTLQ

SEQ ID NO: 31990 - protein, 198 aa, Homo sapiens
  MAP TO AL157858.2; EXPRESSED IN ADULT LIVER, SIGNAL = 1.4; EXPRESSED IN HELA, SIGNAL = 1.4; EXPRESSED IN BRAIN, SIGNAL = 2.6; EXPRESSED IN HEART, SIGNAL = 1.8; EXPRESSED IN BONE MARROW, SIGNAL = 1.4; EXPRESSED IN LUNG, SIGNAL = 1.5; EXPRESSED IN FETAL LIVER, SIGNAL =   1
ILTFNTTITSITSITITTIVNRTITTTITLTITIITTIISIITAATITIATSITPLPPASPLPPSPHYHQHHHYHHHPITTSITTTTTTPLPPASPLPPPPHYHQHHHYHHHPITTSITTTTTTPLPPASPLPPPPHYHQHHHYHHHPITTSITTTTTTPLPPASPLPPSPHYHQHHHYHHHPITTSITTSTICFITF

SEQ ID NO: 31991 - protein, 184 aa, Homo sapiens
  MAP TO AL022238.1; EXPRESSED IN HELA, SIGNAL = 0.33; EXPRESSED IN BRAIN, SIGNAL = 1.4; EXPRESSED IN ADULT LIVER, SIGNAL = 1.4; EXPRESSED IN BONE MARROW, SIGNAL = 1.1; EXPRESSED IN LUNG, SIGNAL = 1.2; EXPRESSED IN HEART, SIGNAL = 1.4; SWISSPROT HIT: Q62419, EVALUE 2.10e-01
VVRRRTQRRKSTITALLFGESSASARQCGHAGVCPHAHVDVELPPRGPGVGCGHHGSLGLLGEDDLEALKAKNIKQTELVADLREAILRVARHFQCTDPKNCSVVSRQLPGLLPNTALTPPTPLVGLCSLWQELTPDYSMESHQRDHENYVACSRSHRRRAKALLDFERHDDDELGFRKNDIIT

SEQ ID NO: 31992 - protein, 43 aa, Homo sapiens
  MAP TO AC008481.4; EXPRESSED IN LUNG, SIGNAL = 2.1; EXPRESSED IN ADULT LIVER, SIGNAL = 2.4; EXPRESSED IN BRAIN, SIGNAL = 2.1; EXPRESSED IN HELA, SIGNAL = 0.92; EXPRESSED IN HEART, SIGNAL = 2.2; EXPRESSED IN BONE MARROW, SIGNAL = 2.1
GNGLVAGSSDSSSSGSASDSEESPEGQPVKAAAAAAAATPTSP

SEQ ID NO: 31993 - protein, 72 aa, Homo sapiens
  MAP TO AC008481.4; EXPRESSED IN LUNG, SIGNAL = 2.1; EXPRESSED IN ADULT LIVER, SIGNAL = 2.4; EXPRESSED IN BRAIN, SIGNAL = 2.1; EXPRESSED IN HELA, SIGNAL = 0.92; EXPRESSED IN HEART, SIGNAL = 2.2; EXPRESSED IN BONE MARROW, SIGNAL = 2.1; SWISSPROT HIT: P17111, EVALUE 8.20e-02
VIIIAGPGYDALTAEGIHLNMAAGSGVPGSGLGEEVPCAMMEGVAAYTQTEPEGSQPSTMDATAVAGIETKK

SEQ ID NO: 31994 - protein, 132 aa, Homo sapiens
  MAP TO AC008481.4; EXPRESSED IN LUNG, SIGNAL = 2.1; EXPRESSED IN ADULT LIVER, SIGNAL = 2.4; EXPRESSED IN BRAIN, SIGNAL = 2.1; EXPRESSED IN HELA, SIGNAL = 0.92; EXPRESSED IN HEART, SIGNAL = 2.2; EXPRESSED IN BONE MARROW, SIGNAL = 2.1; SWISSPROT HIT: P55875, EVALUE 3.00e+00
WAMGWWLAALTHPALALPLTLRSLLRASRSRLRQRQRQRRPPARWAAAGSSLRRACTFPLTSTTWKAWPSRVPRCAPTQQAMGLKPWRQWCACRCLCKWVRAPAPSLRTCPRRPWVRWWPAAPCQAWCPAHR

SEQ ID NO: 31995 - protein, 292 aa, Homo sapiens
  MAP TO AC007920.18; EXPRESSED IN ADULT LIVER, SIGNAL = 2.6; EXPRESSED IN BRAIN, SIGNAL = 1.2; EXPRESSED IN BONE MARROW, SIGNAL = 1.1; EXPRESSED IN LUNG, SIGNAL = 1.1; EXPRESSED IN HEART, SIGNAL = 1.6; EXPRESSED IN HELA, SIGNAL = 1.1; SWISSPROT HIT: O00187, EVALUE 2.00e-41
CGQPSRSLPSLVKRIIGGRNAEPGLFPWQALIVVEDTSRVPNDKWFGSGALLSASWILTAAHVLRSQRRDTTVIPVSKEHVTVYLGLHDVRDKSGAVNSSAARVVLHPDFNIQNYNHDIALVQLQEPVPLGPHVMPVCLPRLEPEGPAPHMLGLVAGWGISNPNVTVDEIISSGTRTLSDVLQYVKLPVVPHAECKTSYESRSGNYSVTENMFCAGYYEGGKDTCLGDSGGAFVIFDDLSQRWVVQGLVSWGGPEECGSKQVYGVYTKVSNYVDWVWEQMGLPQSVVEPQVE

SEQ ID NO: 31996 - protein, 31 aa, Homo sapiens
  MAP TO AC007920.18; EXPRESSED IN ADULT LIVER, SIGNAL = 2.6; EXPRESSED IN BRAIN, SIGNAL = 1.2; EXPRESSED IN BONE MARROW, SIGNAL = 1.1; EXPRESSED IN LUNG, SIGNAL = 1.1; EXPRESSED IN HEART, SIGNAL = 1.6; EXPRESSED IN HELA, SIGNAL = 1.1
SVVSPPAPCQAWSRGSLGAEMLSLASSRGRP

SEQ ID NO: 31997 - protein, 21 aa, Homo sapiens
  MAP TO AC007920.18; EXPRESSED IN ADULT LIVER, SIGNAL = 2.6; EXPRESSED IN BRAIN, SIGNAL = 1.2; EXPRESSED IN BONE MARROW, SIGNAL = 1.1; EXPRESSED IN LUNG, SIGNAL = 1.1; EXPRESSED IN HEART, SIGNAL = 1.6; EXPRESSED IN HELA, SIGNAL = 1.1
VWSALPLPAKPGQEDHWGPKC

SEQ ID NO: 31998 - protein, 163 aa, Homo sapiens
  MAP TO AP001697.1; EXPRESSED IN ADULT LIVER, SIGNAL = 1.5; EXPRESSED IN PLACENTA, SIGNAL = 3.3; EXPRESSED IN BRAIN, SIGNAL = 1.4; EXPRESSED IN HEART, SIGNAL = 1.3; EXPRESSED IN LUNG, SIGNAL = 1.4; EXPRESSED IN BONE MARROW, SIGNAL = 1.4; EXPRESSED IN HELA, SIGNAL = 0.91; SWISSPROT HIT: P26808, EVALUE 8.00e-12
PVLRLCTCATLNPATLLPDNEEKIEHNCQQIIAQTYTARGDLLEVPLTDPDLNLYTDGSSFAEKGLQKAVYAVVLQNRRALELLITERGGTFLFLGEECCYYVNQFGIITKKVKEIQDRIQRRTEELKKHWTLGPPQPMDALDSPLLRTSSSYISTPLWTLYL

SEQ ID NO: 31999 - protein, 158 aa, Homo sapiens
  MAP TO Z94055.1; EXPRESSED IN PLACENTA, SIGNAL = 1.8; EXPRESSED IN BRAIN, SIGNAL = 1.9; EXPRESSED IN HELA, SIGNAL =   4; EXPRESSED IN ADULT LIVER, SIGNAL = 1.7; EXPRESSED IN FETAL LIVER, SIGNAL =   2; EXPRESSED IN LUNG, SIGNAL = 1.7; EXPRESSED IN BONE MARROW, SIGNAL = 1.8; SWISSPROT HIT: P10039, EVALUE 1.00e-57
QLDYIPHCSGHGNFSFESCGCICNEGWFGKNCSEPYCPLGCSSRGVCVDGQCICDSEYSGDDCSELRCPTDCSSRGLCVDGECVCEEPYTGEDCRELRCPGDCSGKGRCANGTCLCEEGYVGEDCGQRQCLNACSGRGQCEEGLCVCEEGYQGPDCSA

SEQ ID NO: 32000 - protein, 33 aa, Homo sapiens
  MAP TO Z94055.1; EXPRESSED IN PLACENTA, SIGNAL = 1.8; EXPRESSED IN BRAIN, SIGNAL = 1.9; EXPRESSED IN HELA, SIGNAL =   4; EXPRESSED IN ADULT LIVER, SIGNAL = 1.7; EXPRESSED IN FETAL LIVER, SIGNAL =   2; EXPRESSED IN LUNG, SIGNAL = 1.7; EXPRESSED IN BONE MARROW, SIGNAL = 1.8
PNSGAQQTAAPGGSAWTGSVSVKSPTLARTAGN

SEQ ID NO: 32001 - protein, 109 aa, Homo sapiens
  MAP TO AF051976.2; EXPRESSED IN PLACENTA, SIGNAL = 3.8; EXPRESSED IN ADULT LIVER, SIGNAL =   3; EXPRESSED IN BRAIN, SIGNAL = 5.2; EXPRESSED IN HELA, SIGNAL = 2.9; EXPRESSED IN LUNG, SIGNAL = 3.3; EXPRESSED IN HEART, SIGNAL =   8; EXPRESSED IN BONE MARROW, SIGNAL = 3.5; SWISSPROT HIT: O60437, EVALUE 3.80e-01
MAAASGYTDLREKLKSMTSRDNYKAGSREAAAAAAAAVAAAAAAAAAAEPYPVSGAKRKYQEDSDPERSDYEEQQLQKEEEARKVKSGIRQMRLFSQDECAKIEARIDE

SEQ ID NO: 32002 - protein, 166 aa, Homo sapiens
  MAP TO AL133543.2; EXPRESSED IN FETAL LIVER, SIGNAL = 1.3; EXPRESSED IN LUNG, SIGNAL = 1.3; EXPRESSED IN ADULT LIVER, SIGNAL = 1.4; EXPRESSED IN PLACENTA, SIGNAL = 2.2; EXPRESSED IN BRAIN, SIGNAL =   1; EXPRESSED IN HELA, SIGNAL = 2.2; EXPRESSED IN BONE MARROW, SIGNAL =   1; SWISSPROT HIT: P15924, EVALUE 2.00e-81
LKNTKIEVLEEELRLARDANSENCNKNKFLDQNLQKYQAECSQFKAKLASLEELKRQAELDGKSAKQNLDKCYGQIKELNEKITRLTYEIEDEKRRRKSVEDRFDQQKNDYDQLQKARQCEKENLGWQKLESEKAIKEKEYEIERLRVLLQEEGTRKREYENELAK

SEQ ID NO: 32003 - protein, 253 aa, Homo sapiens
  MAP TO AC007957.34; EXPRESSED IN PLACENTA, SIGNAL = 3.8; EXPRESSED IN HELA, SIGNAL = 1.6; EXPRESSED IN FETAL LIVER, SIGNAL = 1.5; EXPRESSED IN ADULT LIVER, SIGNAL = 1.3; EXPRESSED IN BRAIN, SIGNAL = 1.3; EXPRESSED IN BONE MARROW, SIGNAL = 1.3; EXPRESSED IN HEART, SIGNAL = 1.5; EXPRESSED IN LUNG, SIGNAL = 1.2; SWISSPROT HIT: Q15149, EVALUE 2.10e-02
MAKDSPSPLGASPKKPGCSSPAAAVLENQRRELEKLRAELEAERAGWRAERRRFAARERQLREEAERERRQLADRLRSKWEAQRSRELRQLQEEMQREREAEIRQLLRWKEAEQRQLQQLLHRERDGVVRQARELQRQLAEELVNRGHCSRPGASEVSAAQCRCRLQEVLAQLRWQTDGEQAARIRYLQAALEVERQLFLKYILAHFRGHPALSGSPDPQAVHSLEEPLPQTSSGSCHAPKPACQLGSLDSLS

SEQ ID NO: 32004 - protein, 138 aa, Homo sapiens
  MAP TO AC007957.34; EXPRESSED IN PLACENTA, SIGNAL = 3.8; EXPRESSED IN HELA, SIGNAL = 1.6; EXPRESSED IN FETAL LIVER, SIGNAL = 1.5; EXPRESSED IN ADULT LIVER, SIGNAL = 1.3; EXPRESSED IN BRAIN, SIGNAL = 1.3; EXPRESSED IN BONE MARROW, SIGNAL = 1.3; EXPRESSED IN HEART, SIGNAL = 1.5; EXPRESSED IN LUNG, SIGNAL = 1.2; SWISSPROT HIT: O06794, EVALUE 2.00e-01
PAPWARRPRSRAAPARRRQCWRTRGGSWRSYGRSWRRSGQAGGRNGGASLPGSASCVRRPSGSGGSWLTVCAPSGRHSAAGSCGSCKRRCSGNARPRSGSCCAGRRPSSGSCSSCCTGSAMAWCAKPGSCSASWPRSW

SEQ ID NO: 32005 - protein, 53 aa, Homo sapiens
  MAP TO AC007957.34; EXPRESSED IN PLACENTA, SIGNAL = 3.8; EXPRESSED IN HELA, SIGNAL = 1.6; EXPRESSED IN FETAL LIVER, SIGNAL = 1.5; EXPRESSED IN ADULT LIVER, SIGNAL = 1.3; EXPRESSED IN BRAIN, SIGNAL = 1.3; EXPRESSED IN BONE MARROW, SIGNAL = 1.3; EXPRESSED IN HEART, SIGNAL = 1.5; EXPRESSED IN LUNG, SIGNAL = 1.2
FAGRLTASRRRASAICRRRWRWSASSSSSTSWRTSAGTRLCRDHRTPKLCIPW

SEQ ID NO: 32006 - protein, 165 aa, Homo sapiens
  MAP TO AC004597.1; EXPRESSED IN ADULT LIVER, SIGNAL = 1.2; EXPRESSED IN BRAIN, SIGNAL = 0.97; EXPRESSED IN HELA, SIGNAL = 2.8; EXPRESSED IN LUNG, SIGNAL = 0.98; EXPRESSED IN HEART, SIGNAL = 1.6; SWISSPROT HIT: O60403, EVALUE 1.00e-81
SEILYTVAIIPRMLADLLSTQRSIAFLACASQMFFSFSFGFTHSFLLTVMGYDRYVAICHPLRYNVLMSPRGCACLVGCSWAGGSVMGMVVTSAIFQLTFCGSHEIQHFLCHVPPLLKLACGNNVPAVALGVGLVCIMALLGCFLLILLSYAFIVADILKIPSAE

SEQ ID NO: 32007 - protein, 144 aa, Homo sapiens
  MAP TO AL160314.1; EXPRESSED IN ADULT LIVER, SIGNAL = 2.2; EXPRESSED IN BRAIN, SIGNAL = 2.1; EXPRESSED IN HELA, SIGNAL = 3.3; EXPRESSED IN BONE MARROW, SIGNAL = 2.1; EXPRESSED IN FETAL LIVER, SIGNAL = 2.3; EXPRESSED IN HEART, SIGNAL = 2.1; EXPRESSED IN LUNG, SIGNAL =   2; SWISSPROT HIT: Q03400, EVALUE 1.20e-01
RNAHYGQDDVRIGIGHEDYAAEDDHGRKHKIHQLDGSGVCTGQGQQGSTVTEEVVNDIGATEGQLGDEDGWKEHRQEASHPREYNGPNADRRSHDGGVPQGAADGGITVIGHDRQQEELNCAQEKVEIALGDTSGKGDGFIPRS

SEQ ID NO: 32008 - protein, 55 aa, Homo sapiens
  MAP TO AP001712.1; EXPRESSED IN ADULT LIVER, SIGNAL = 1.9; EXPRESSED IN HELA, SIGNAL = 1.6; EXPRESSED IN PLACENTA, SIGNAL = 1.9; EXPRESSED IN BRAIN, SIGNAL = 1.7; EXPRESSED IN HEART, SIGNAL =   2; EXPRESSED IN BONE MARROW, SIGNAL = 1.9
SIPPRSIPSRSIPSRSTPSRSTPSRSSPFGSTPSRSTVSRSTPSRSTVSRSTPSK

SEQ ID NO: 32009 - protein, 74 aa, Homo sapiens
  MAP TO AL050330.9; EXPRESSED IN ADULT LIVER, SIGNAL = 3.6; EXPRESSED IN PLACENTA, SIGNAL = 5.5; EXPRESSED IN BRAIN, SIGNAL = 2.3; EXPRESSED IN HELA, SIGNAL = 0.94; EXPRESSED IN LUNG, SIGNAL = 4.8; EXPRESSED IN HEART, SIGNAL = 3.6; EXPRESSED IN BONE MARROW, SIGNAL = 3.2; EXPRESSED IN FETAL LIVER, SIGNAL = 2.5; SWISSPROT HIT: Q00976, EVALUE 4.70e+00
PSSLFLRTRGVCSVLKSRGICQTTLRDLNGVTVSLAVKTSHQGDITGRWKWGTEKSGILGYVVRTWRGKKVGSK

SEQ ID NO: 32010 - protein, 149 aa, Homo sapiens
  MAP TO AL030996.1; EXPRESSED IN LUNG, SIGNAL = 1.8; EXPRESSED IN BONE MARROW, SIGNAL = 1.8; EXPRESSED IN ADULT LIVER, SIGNAL = 1.4; EXPRESSED IN BRAIN, SIGNAL =  31; EXPRESSED IN HELA, SIGNAL = 2.4; EXPRESSED IN PLACENTA, SIGNAL =   2; SWISSPROT HIT: P04350, EVALUE 4.00e-44
HLPPTPLQLPTLTPPPPHPPSAPPPCRRSCTCRPASVAARSGPSFGRLSVTNMGIDPTGTYYRDSDLQPERINVYYNEARGGNYVPRAVLVDLEPSTMDSILSGPFGQIFRPDNFVFGQSRAGNNWVKGHYTEGTELVGTVLDVVQKEA

SEQ ID NO: 32011 - protein, 73 aa, Homo sapiens
  MAP TO AL135785.2; EXPRESSED IN BONE MARROW, SIGNAL = 2.2; EXPRESSED IN FETAL LIVER, SIGNAL = 2.4; EXPRESSED IN LUNG, SIGNAL =   2; EXPRESSED IN BRAIN, SIGNAL = 1.8; EXPRESSED IN ADULT LIVER, SIGNAL = 7.6; EXPRESSED IN PLACENTA, SIGNAL = 2.2; SWISSPROT HIT: P30837, EVALUE 2.00e-34
SVSMLRFLAPRLLSLQGRTARYSSAAALPSPILNPDIPYNQLFINNEWQDAVSKKTFPTVNPTTGEVIGHVAE

SEQ ID NO: 32012 - protein, 266 aa, Homo sapiens
  MAP TO AL135785.2; EXPRESSED IN BONE MARROW, SIGNAL = 2.2; EXPRESSED IN FETAL LIVER, SIGNAL = 2.4; EXPRESSED IN LUNG, SIGNAL =   2; EXPRESSED IN BRAIN, SIGNAL = 1.8; EXPRESSED IN ADULT LIVER, SIGNAL = 7.6; EXPRESSED IN PLACENTA, SIGNAL = 2.2; SWISSPROT HIT: P30837, EVALUE 0.00e+00
GAAIAQHVDVDKVAFTGSTEVGHLIQKAAGDSNLKRVTLELGGKSPSIVLADADMEHAVEQCHEALFFNMGQCCCAGSRTFVEESIYNEFLERTVEKAKQRKVGNPFELDTQQGPQVDKEQFERVLGYIQLGQKEGAKLLCGGERFGERGFFIKPTVFGGVQDDMRIAKEEIFGPVQPLFKFKKIEEVVERANNTRYGLAAAVFTRDLDKAMYFTQALQAGTVWVNTYNIVTCHTPFGGFKESGNGRELGEDGLKAYTEVKTVTIK

SEQ ID NO: 32013 - protein, 32 aa, Homo sapiens
  MAP TO AL135785.2; EXPRESSED IN BONE MARROW, SIGNAL = 2.2; EXPRESSED IN FETAL LIVER, SIGNAL = 2.4; EXPRESSED IN LUNG, SIGNAL =   2; EXPRESSED IN BRAIN, SIGNAL = 1.8; EXPRESSED IN ADULT LIVER, SIGNAL = 7.6; EXPRESSED IN PLACENTA, SIGNAL = 2.2; SWISSPROT HIT: P33585, EVALUE 5.10e+00
VSACCASWHPGCLASRAGPPATPRQQPSQAPF

SEQ ID NO: 32014 - protein, 841 aa, Homo sapiens
  MAP TO AC005175.1; EXPRESSED IN BRAIN, SIGNAL = 1.2; EXPRESSED IN HELA, SIGNAL = 2.4; EXPRESSED IN ADULT LIVER, SIGNAL = 1.5; EXPRESSED IN BONE MARROW, SIGNAL = 1.6; EXPRESSED IN LUNG, SIGNAL = 1.7; EXPRESSED IN HEART, SIGNAL =   2; SWISSPROT HIT: P08640, EVALUE 2.00e-32
MSFETMPSTETKPCSRTQACSEAKPSSRTQMSSETMPSSRTQMGSETMPSSRTQMGSETEPSSRTQMGSETEPSSKTQMGSETMPSSRTQMGSETEPSSRTQMGSETEPSSRTQMGSETMPSSRTQMGSETKPSSRTQMSSETMPSSRTQMSSETEPSIETKPCSRVQASSETKPSSRTQISSETKPSIETKPCSRIQATSEAKPSSRTQVSPETKPSSRTQISSETNPSIETKPCSRTQATSEAKPSSRTQIRSETKPCSEAQASSETKHISRIQLSPDNKPNSGTQTHFKTQTSLETNPSSRIQASSETKPCWKTQADSGTLDSSTMQPHLDTRSSSGTPVNFGTHVRFMKQPSSGTPVSSGFRDSSQIKSYSRTQTSSETQVHTAAQSRSQPQLHPSAHPHPAAQSSSSDDSSSETEPSSRTSPSATTRPNSRIQTSSGTPSILEARPSSSTQLGAKPHSPCTMQLSSRMQFTSRTQTNFKAWPSSRAQSSPSTAPSSGTQLSSGAQAGSEIPASSKTQTAAETQPSSRIQLSSGVQSSPGTQAIAAIELSSTALSSSDSRSSSRTQRCPGARPASGTQFASKTLPGSRYQLQTTAPDSSGIQLDFGKQSSSESQLSFGTQPSSGTQISSRIQASSGSQLSSGTQLISGAQPSSRTQTSSGNQLSSGTQTTARIQLSPGAHLSSRTQSSPETRLSSEAQSSSGTQFSSGIQFGSETQTGSRIQPDSGAQLSSRTQSSSETGLSSETQTGSRIQPSPGAHLSSGTQPVSGTQSSSRTHTSSRIWLSPGNGICPQTPGLDPRIQLEAPAPAQPQPPGPSPRDPTPAPSKDPQPLPQPHDQ

SEQ ID NO: 32015 - protein, 35 aa, Homo sapiens
  MAP TO AC011536.5; EXPRESSED IN LUNG, SIGNAL = 1.7; EXPRESSED IN PLACENTA, SIGNAL = 1.7; EXPRESSED IN BRAIN, SIGNAL = 1.1; EXPRESSED IN HELA, SIGNAL = 2.3; EXPRESSED IN ADULT LIVER, SIGNAL = 1.2; EXPRESSED IN BONE MARROW, SIGNAL = 1.2; EXPRESSED IN FETAL LIVER, SIGNAL = 1.4
NEHRGSQAVSYTRSVTLQIYNHSLTLSARWPRKLQ

SEQ ID NO: 32016 - protein, 72 aa, Homo sapiens
  MAP TO AC011536.5; EXPRESSED IN LUNG, SIGNAL = 1.7; EXPRESSED IN PLACENTA, SIGNAL = 1.7; EXPRESSED IN BRAIN, SIGNAL = 1.1; EXPRESSED IN HELA, SIGNAL = 2.3; EXPRESSED IN ADULT LIVER, SIGNAL = 1.2; EXPRESSED IN BONE MARROW, SIGNAL = 1.2; EXPRESSED IN FETAL LIVER, SIGNAL = 1.4; SWISSPROT HIT: O88799, EVALUE 2.00e-09
ITCPENSHYEVCGPPCPASCPSPAPLTTPAVCEGPCVEGCQCDAGFVLSADRCVPLNNGCGCWANGTYHEAG

SEQ ID NO: 32017 - protein, 18 aa, Homo sapiens
  MAP TO AC011536.5; EXPRESSED IN LUNG, SIGNAL = 1.7; EXPRESSED IN PLACENTA, SIGNAL = 1.7; EXPRESSED IN BRAIN, SIGNAL = 1.1; EXPRESSED IN HELA, SIGNAL = 2.3; EXPRESSED IN ADULT LIVER, SIGNAL = 1.2; EXPRESSED IN BONE MARROW, SIGNAL = 1.2; EXPRESSED IN FETAL LIVER, SIGNAL = 1.4
PYVRAPVWRAASATRVSC

SEQ ID NO: 32018 - protein, 36 aa, Homo sapiens
  MAP TO AC011536.5; EXPRESSED IN LUNG, SIGNAL = 1.7; EXPRESSED IN PLACENTA, SIGNAL = 1.7; EXPRESSED IN BRAIN, SIGNAL = 1.1; EXPRESSED IN HELA, SIGNAL = 2.3; EXPRESSED IN ADULT LIVER, SIGNAL = 1.2; EXPRESSED IN BONE MARROW, SIGNAL = 1.2; EXPRESSED IN FETAL LIVER, SIGNAL = 1.4
TAASPSAQLSARRGVTPITSLWMGTDSISKAPASTC

SEQ ID NO: 32019 - protein, 430 aa, Homo sapiens
  MAP TO AC007066.4; EXPRESSED IN ADULT LIVER, SIGNAL = 2.2; EXPRESSED IN BONE MARROW, SIGNAL = 2.7; EXPRESSED IN FETAL LIVER, SIGNAL = 2.8; EXPRESSED IN LUNG, SIGNAL = 2.3; EXPRESSED IN HEART, SIGNAL = 2.1; EXPRESSED IN PLACENTA, SIGNAL = 2.1; EXPRESSED IN BRAIN, SIGNAL = 2.1; EXPRESSED IN HELA, SIGNAL = 3.4; SWISSPROT HIT: Q28151, EVALUE 9.00e-23
MSERSDLLHFKFENYGDSMLQKMNKLREENKFCDVTVLIDDIEVQGHKIVFAAGSPFLRDQFLLNDSREVKISILQSSEVGRQLLLSCYSGVLEFPEMELVNYLTAASFLQMSHIVERCTQALWKFIKPKQPMDSKEGCEPQSASPQSKEQQGDARGSPKQDSPCIHPSEDSMDMEDSDIQIVKVESIGDVSEVRSKKDQNQFISSEPTALHSSEPQHSLINSTVENRVSEIEQNHLHNYALSYTGSDNIIMASKDVFGPNIRGVDKGLQWHHQCPKCTRVFRHLENYANHLKMHKLFMCLLCGKTFTQKGNLHRHMRVHAGIKPFQCKICGKTFSQKCSLQDHLNLHSGDKPHKCNYCDMVFAHKPVLRKHLKQLHGKNSFDNANERNVQDLTVDFDSFACTTVTDSKGCQPQPDATQVLDAGKLAQAV

SEQ ID NO: 32020 - protein, 245 aa, Homo sapiens
  MAP TO AC008857.4; EXPRESSED IN PLACENTA, SIGNAL = 1.4; EXPRESSED IN HELA, SIGNAL = 2.4; EXPRESSED IN ADULT LIVER, SIGNAL = 1.4; SWISSPROT HIT: P40189, EVALUE 1.00e-118
HNFNSKDQMYSDGNFTDVSVVEIEANDKKPFPEDLKSLDLFKKEKINTEGHSSGIGGSSCMSSSRPSISSSDENESSQNTSSTVQYSTVVHSGYRHQVPSVQVFSRSESTQPLLDSEERPEDLQLVDHVDGGDGILPRQQYFKQNCSQHESSPDISHFERSKQVSSVNEEDFVRLKQQISDHISQSCGSGQMKMFQEVSAADAFGPGTEGQVERFETVGMEAATDEGMPKSYLPQTVRQGGYMPQ

SEQ ID NO: 32021 - protein, 17 aa, Homo sapiens
  MAP TO AC008857.4; EXPRESSED IN PLACENTA, SIGNAL = 1.4; EXPRESSED IN HELA, SIGNAL = 2.4; EXPRESSED IN ADULT LIVER, SIGNAL = 1.4
TILIQKIKCIQMAISLM

SEQ ID NO: 32022 - protein, 192 aa, Homo sapiens
  MAP TO AL031658.10; EXPRESSED IN HEART, SIGNAL =   2; EXPRESSED IN BONE MARROW, SIGNAL = 1.7; EXPRESSED IN LUNG, SIGNAL = 1.7; EXPRESSED IN ADULT LIVER, SIGNAL =   2; EXPRESSED IN BRAIN, SIGNAL = 2.2; EXPRESSED IN HELA, SIGNAL = 1.5; EXPRESSED IN PLACENTA, SIGNAL =   2; SWISSPROT HIT: P51811, EVALUE 2.00e-05
LSTSASLVSLAWTLASYQKVLRDSRDDKRPLSYKGAVAQVLWHLFSIAARGLAFALFASVYKLYFGIFIVAHWCVMTFWVIQGETDFCMSKWEEIIYNMVVGIIYIFCWFNVKEGRSRRRMTLYHCIVLLENAALTGFWYSSRNFSTDFYSLIMVCVVASSFALGIFFMCVYYCLLHPNGPMLGPQAPGCIF

SEQ ID NO: 32023 - protein, 485 aa, Homo sapiens
  MAP TO AC016630.5; EXPRESSED IN ADULT LIVER, SIGNAL = 1.4; EXPRESSED IN HELA, SIGNAL = 0.65; EXPRESSED IN BRAIN, SIGNAL = 1.6; EXPRESSED IN BONE MARROW, SIGNAL = 1.6; SWISSPROT HIT: P28698, EVALUE 0.00e+00
MNGPLVYAGFALQLGSISAGPGSVSPHLHVPWDLGMAGLSGQIQSPSREGGFAHALLLPSDLRSEQDPTDEDPCRGVGPALITTRWRSPRGRSRGRPSTGGGVVRGGRCDVCGKVFSQRSNLLRHQKIHTGERPFVCSECGRSFSRSSHLLRHQLTHTEERPFVCGDCGQGFVRSARLEEHRRVHTGEQPFRCAECGQSFRQRSNLLQHQRIHGDPPGPGAKPPAPPGAPEPPGPFPCSECRESFARRAVLLEHQAVHTGDKSFGCVECGERFGRRSVLLQHRRVHSGERPFACAECGQSFRQRSNLTQHRRIHTGERPFACAECGKAFRQRPTLTQHLRVHTGEKPFACPECGQRFSQRLKLTRHQRTHTGEKPYHCGECGLGFTQVSRLTEHQRIHTGERPFACPECGQSFRQHANLTQHRRIHTGERPYACPECGKAFRQRPTLTQHLRTHRREKPFACQDCGRRFHQSTKLIQHQRVHSAE

SEQ ID NO: 32024 - protein, 310 aa, Homo sapiens
  MAP TO AL035665.25; EXPRESSED IN ADULT LIVER, SIGNAL = 3.8; EXPRESSED IN LUNG, SIGNAL = 2.4; EXPRESSED IN HEART, SIGNAL = 1.6; EXPRESSED IN BONE MARROW, SIGNAL = 1.4; EXPRESSED IN PLACENTA, SIGNAL = 1.7; SWISSPROT HIT: P54842, EVALUE 1.00e-120
SPLAMEYVNDFDLLKFDVKKEPLGRAERPGRPCTRLQPAGSVSSTPLSTPCSSVPSSPSFSPTEQKTHLEDLYWMASNYQQMNPEALNLTPEDAVEALIGSHPVPQPLQSFDSFRGAHHHHHHHHPHPHHAYPGAGVAHDELGPHAHPHHHHHHQASPPPSSAASPAQQLPTSHPGPGPHATASATAAGGNGSVEDRFSDDQLVSMSVRELNRHLRGFTKDEVIRLKQKRRTLKNRGYAQSCRYKRVQQKHHLENEKTQLIQQVEQLKQEVSRLARERDAYKVKCEKLANSGFREAGSTSDSPSSPEFFL

SEQ ID NO: 32025 - protein, 51 aa, Homo sapiens
  MAP TO AL035665.25; EXPRESSED IN ADULT LIVER, SIGNAL = 3.8; EXPRESSED IN LUNG, SIGNAL = 2.4; EXPRESSED IN HEART, SIGNAL = 1.6; EXPRESSED IN BONE MARROW, SIGNAL = 1.4; EXPRESSED IN PLACENTA, SIGNAL = 1.7; SWISSPROT HIT: Q9Z798, EVALUE 8.20e+00
QPAGHGVCQRLRPAQVRREEGATGARGASGQALHTPAASRLGVLHTAQHSV

SEQ ID NO: 32026 - protein, 149 aa, Homo sapiens
  MAP TO AC022336.12; EXPRESSED IN FETAL LIVER, SIGNAL = 4.9; EXPRESSED IN ADULT LIVER, SIGNAL = 3.5; EXPRESSED IN PLACENTA, SIGNAL =   3; EXPRESSED IN BRAIN, SIGNAL = 3.5; EXPRESSED IN HELA, SIGNAL =   8; EXPRESSED IN BONE MARROW, SIGNAL = 4.7; EXPRESSED IN LUNG, SIGNAL = 3.8; EXPRESSED IN HEART, SIGNAL = 3.5; SWISSPROT HIT: P11172, EVALUE 3.00e-79
MLEILEQQKKVDAETVGRVKRFIQENVFVAANHNGSPLSIKEAPKELSFGARAELPRIHPVASKLLRLMQKKETNLCLSADVSLARELLQLADALGPSICMLKTHVDILNDFTLDVMKELITLAKCHEFLIFEDRKFADIGNTVKKQYE

SEQ ID NO: 32027 - protein, 40 aa, Homo sapiens
  MAP TO AL137225.7; EXPRESSED IN HELA, SIGNAL = 5.7; EXPRESSED IN ADULT LIVER, SIGNAL = 4.7; EXPRESSED IN PLACENTA, SIGNAL = 8.8; EXPRESSED IN HEART, SIGNAL = 5.3; EXPRESSED IN BONE MARROW, SIGNAL = 5.8; EXPRESSED IN LUNG, SIGNAL = 4.4
WLFPLRRPVPRTPPLPSTWPFLRSPVPKRPLLPRRPPFLL

SEQ ID NO: 32028 - protein, 154 aa, Homo sapiens
  MAP TO AF025422.1; EXPRESSED IN ADULT LIVER, SIGNAL = 2.2; EXPRESSED IN PLACENTA, SIGNAL =   2; EXPRESSED IN HELA, SIGNAL = 2.2; EXPRESSED IN BONE MARROW, SIGNAL = 2.3; EXPRESSED IN LUNG, SIGNAL =   2; EXPRESSED IN HEART, SIGNAL = 2.2; EXPRESSED IN FETAL LIVER, SIGNAL = 2.2; SWISSPROT HIT: P10241, EVALUE 8.10e-01
GCTQEGDPINVRSVGRHLVEVQTCLSIRGSTLERNHINAASVGRASVTAQCFKSIRGCTQGRSPTPAASVAKASVPSLHCTNTSTFTLEKSPTAVASVERDSAAAPTSAVIRRHTPARGPTSVTSVAKVSVTTRTFKLTREFTWGSICTNVTCV

SEQ ID NO: 32029 - protein, 745 aa, Homo sapiens
  MAP TO AF025422.1; EXPRESSED IN ADULT LIVER, SIGNAL = 2.2; EXPRESSED IN PLACENTA, SIGNAL =   2; EXPRESSED IN HELA, SIGNAL = 2.2; EXPRESSED IN BONE MARROW, SIGNAL = 2.3; EXPRESSED IN LUNG, SIGNAL =   2; EXPRESSED IN HEART, SIGNAL = 2.2; EXPRESSED IN FETAL LIVER, SIGNAL = 2.2; SWISSPROT HIT: Q9UJW7, EVALUE 0.00e+00
DKNGKDTEYIQDEELRFFSHKELSSCKIWEEVAGELPGSQDCRVNLQGKDFQFSEDAAPHQGWEGASTPCFPIENFLDSLQGDGLIGLENQQFPAWRAIRPIPIQGSWAKAFVNQLGDVQERCKNLDTEDTVYKCNWDDDSFCWISCHVDHRFPEIDKPCGCNKCRKDCIKNSVLHRINPGENGLKSNEYRNGFRDDADLPPHPRVPLKEKLCQYDEFSEGLRHSAHLNRHQRVPTGEKSVKSLERGRGVRQNTHIRNHPRAPVGDMPYRCDVCGKGFRYKSVLLIHQGVHTGRRPYKCEECGKAFGRSSNLLVHQRVHTGEKPYKCSECGKGFSYSSVLQVHQRLHTGEKPYTCSECGKGFCAKSALHKHQHIHPGEKPYSCGECGKGFSCSSHLSSHQKTHTGERPYQCDKCGKGFSHNSYLQAHQRVHMGQHLYKCNVCGKSFSYSSGLLMHQRLHTGEKPYKCECGKSFGRSSDLHIHQRVHTGEKPYKCSECGKGFRRNSDLHSHQRVHTGERPYVCDVCGKGFIYSSDLLIHQRVHTGEKPYKCAECGKGFSYSSGLLIHQRVHTGEKPYRCQECGKGFRCTSSLHKHQRVHTGKKPYTCDQCGKGFSYGSNLRTHQRLHTGEKPYTCCECGKGFRYGSGLLSHKRVHTGEKPYRCHVCGKGYSQSSHLQGHQRVHTGEKPYKCEECGKGFGRNSCLHVHQRVHTGEKPYTCGVCGKGFSYTSGLRNHQRVHLGENPYK

SEQ ID NO: 32030 - protein, 83 aa, Homo sapiens
  MAP TO AC005015.2; EXPRESSED IN ADULT LIVER, SIGNAL = 2.2; EXPRESSED IN HELA, SIGNAL = 0.21; EXPRESSED IN PLACENTA, SIGNAL =   4; EXPRESSED IN BONE MARROW, SIGNAL = 1.8; EXPRESSED IN FETAL LIVER, SIGNAL =   2; EXPRESSED IN LUNG, SIGNAL = 2.5; EXPRESSED IN HEART, SIGNAL = 2.9; SWISSPROT HIT: P56722, EVALUE 2.20e+00
KEWVSQAGPCPSPLRVPTLPSPGGSSFAKWGGAGEGREAGPRAQYCPHSPARGPPGAGPFRPASQSRCLRGWIPTRCQSSRSC

SEQ ID NO: 32031 - protein, 165 aa, Homo sapiens
  MAP TO AP000536.1; EXPRESSED IN ADULT LIVER, SIGNAL = 1.8; EXPRESSED IN PLACENTA, SIGNAL = 2.6; EXPRESSED IN HELA, SIGNAL = 3.2; EXPRESSED IN LUNG, SIGNAL = 1.7; EXPRESSED IN FETAL LIVER, SIGNAL =   2; SWISSPROT HIT: P18175, EVALUE 9.00e-05
VMESYVRDQPSEPSSSVLDSFLRHKHSEPRSSVLESYMRDKHPEPSSGVLESFVREKLSDPQSSVLESYVTEKHSKPSSRVLVSYMRGKHSDHHSSVLESYVRDKHSDPRSCVLQSYEREKHSEPSSSVLESFVTDKHSDPCSSVLESYVRDKYSNLHISVLDFY

SEQ ID NO: 32032 - protein, 235 aa, Homo sapiens
  MAP TO AC015478.3; EXPRESSED IN ADULT LIVER, SIGNAL = 2.5; EXPRESSED IN HELA, SIGNAL =   1; EXPRESSED IN HEART, SIGNAL = 2.8; EXPRESSED IN BRAIN, SIGNAL = 2.4; EXPRESSED IN PLACENTA, SIGNAL = 5.8; EXPRESSED IN FETAL LIVER, SIGNAL = 3.9; EXPRESSED IN BONE MARROW, SIGNAL = 2.5; EXPRESSED IN LUNG, SIGNAL = 2.7
  unsure 216
MANICGTPEGGHERPCHGGGSSALGYGGLEPPLGPPTIKQGPRHFLHLLVPFLSWEERMVGPASWSCWGRVGNEVLSHSPSLHSAWATSLIGSRGEWSCDDNDDDGGGDDKHDDGHGNASDGGGDGGGGDGCGGDGGGSDDGGSGDDCGDGGGSDSDGGDGCRGDGVVGGSGDGDGGGGDSGSALDGGDGVGGDSHGSSIGGGGGGGNGDVGLSGXGPISVGGAGHSCFLCEIVI

SEQ ID NO: 32033 - protein, 236 aa, Homo sapiens [sequence omitted]

SEQ ID NO: 32034 - protein, 781 aa, Homo sapiens
  MAP TO AP001747.1; EXPRESSED IN ADULT LIVER, SIGNAL = 1.4; EXPRESSED IN HELA, SIGNAL = 1.1; EXPRESSED IN LUNG, SIGNAL = 1.2; EXPRESSED IN BONE MARROW, SIGNAL = 1.2; EXPRESSED IN FETAL LIVER, SIGNAL = 1.4; SWISSPROT HIT: P24856, EVALUE 6.00e-76
AFPLTCTEPPFPFTSTQAFPLTCTEPPAPFTSTQAFPLTCTEPAAPFTSTQAFPLTCTEPPAPFISTQAFPLTCTEPPFPFTSTQAFPLTCTEPPAPFTSTQAFPLTCTEPPFPFTSTQAFPLTCTEPPFPFISMQAFPLTCTEPPAPFTSTQAFPLTCTEPPAPFTSTQAFPLTCTEPPARFTSTQAFPLTCTEPPAPFTSTQAFPLTCTEPPAPFTSTQAFPLTCTEPPAPFTSTQAFPLTCTEPPFPFISTQAFPLTCTEPAAPFTSTQALPLTCTEPAAPFTSTQAFPLTCTEPPFPFISTQAFPLTCTEPPFPFISTQAFPLTCTEPPAPFTSTQAFPLTCTEPPFPFISTQAFPLTCTEPPAPFTSTQAFPLTCTEPPFPFISTQAFPLTCTGPAAPFTSTQAFPLTCTEPPFPFISTQAFPLTCTEPPFPFISTQAFPLTCTEPPAPFTSTQAFPLTCTEPPFPFISTQAFPLTCTEPPAPFTSTQAFPLTCTEPPFPFISTQAFPLTCTEPPAPFTSTQAFPLTCTEPPFPFISTQAFPLTCTEPPFPFISTQAFPLTCTEPPFPFISTQAFPLTCTEPPAPFTSTQAFPLTCTEPPFPFISTQAFPLTCTEPPAPFTSTQAFPLTCTEPPFPFISTQAFPLTCTEPPAPFTSTQAFPLTCTEPPFPFISTQAFPLTCTEPPFPFISTQAFPLTCTEPPFPFISTQAFPLTCTEPPAPFISTQAFPLTCTGPAAPFTSTHAFPLTCTGPATLFISMPAFSSCLFNPEASLALA

SEQ ID NO: 32035 - protein, 981 aa, Homo sapiens
  MAP TO AP001747.1; EXPRESSED IN ADULT LIVER, SIGNAL = 1.4; EXPRESSED IN HELA, SIGNAL = 1.1; EXPRESSED IN LUNG, SIGNAL = 1.2; EXPRESSED IN BONE MARROW, SIGNAL = 1.2; EXPRESSED IN FETAL LIVER, SIGNAL = 1.4
RFPLPAPSLHSRLYPRRRFPLPAPSLPPRLHPRRRFPLPAPSLPPRLHPRRRFPLPAPSLPPRLHPRRRFPLPAPSLPPRLHPRRRFPLPAPSLPPRLHPRRRFPLPTPSLPPRLHPRRRFPLPAPSLPPRLHPRRRFPLPAPSLPPRLHPRRRFPLPAPSLPPRLHPRRRFPLPAPSLPPRLHPRRRFPLPAPSLPPRLYPRRRFPLPAPSLHSRLHPRRRFPLPAPSLPPRLHPRRRFPLPAPSLPPRLHPRRRFPLPAPSLPPRLYPRRRFPLPAPSLHSRLHPRRRFPLPAPSLPPRLHPRRRFPLPAPSLHSRLHPRRRFPLPAPSLHSRLYPCRRFPLPAPSLPPRLHPRRRFPLPAPSLPPRLHPRRRFPLPAPSLPPGLHPRRRFPLPAPSLPPRLHPRRRFPLPAPSLPPRLHPRRRFPLPAPSLPPRLHPRRRFPLPAPSLHSRLYPRRRFPLPAPSLPPRLHPRRRCPLPAPSLPPRLHPRRRFPLPAPSLHSRLYPRRRFPLPAPSLHSRLYPRRRFPLPAPSLPPRLHPRRRFPLPAPSLHSRLYPRRRFPLPAPSLPPRLHPRRRFPLPAPSLHSRLYPRRRFPLPAPGLPPRLHPRRRFPLPAPSLHSRLYPRRRFPLPAPSLHSRLYPRRRFPLPAPSLPPRLHPRRRFPLPAPSLHSRLYPRRRFPLPAPSLPPRLHPRRRFPLPAPSLHSRLYPRRRFPLPAPSLPPRLHPRRRFPLPAPSLHSRLYPRRRFPLPAPSLHSRLYPRRRFPLPAPSLHSRLYPRRRFPLPAPSLPPRLHPRRRFPLPAPSLHSRLYPRRRFPLPAPSLPPRLHPRRRFPLPAPSLHSRLYPRRRFPLPAPSLPPRLHPRRRFPLPAPSLHSRLYPRRRFPLPAPSLHSRLYPRRRFPLPAPSLHSRLYPRRRFPLPAPSLPPRLYPRRRFPLPAPGLPPRLHPRMRFPLPALGLPPCLYLCLRFPLAFSIQRPH

SEQ ID NO: 32036 - protein, 182 aa, Homo sapiens
  MAP TO AC008103.27; EXPRESSED IN PLACENTA, SIGNAL = 1.8; EXPRESSED IN ADULT LIVER, SIGNAL = 1.9; EXPRESSED IN BRAIN, SIGNAL = 1.5; EXPRESSED IN HELA, SIGNAL = 1.3; EXPRESSED IN LUNG, SIGNAL = 1.6; EXPRESSED IN HEART, SIGNAL = 1.7; EXPRESSED IN BONE MARROW, SIGNAL = 1.7; EXPRESSED IN FETAL LIVER, SIGNAL = 1.5; SWISSPROT HIT: P10266, EVALUE 1.00e-97
TDLVEWSFLPHSTVKTFTLYLDQMATLIGQTRLRIIKLCGNDQDKIVVPLTKEQVRQAFINSGAWQIGLANFVGIIDNHYPKTKIFQFLKLTTWILPKITRREPLENALTVFTDGSSNGKAAYTGPKERVIKTPYQSAQRAELVAVITVLQDFDQPINIISDSAYVVQATRDVETALIKYSM

SEQ ID NO: 32037 - protein, 474 aa, Homo sapiens
  MAP TO AL136179.15; EXPRESSED IN ADULT LIVER, SIGNAL = 3.2; EXPRESSED IN PLACENTA, SIGNAL = 5.6; EXPRESSED IN BRAIN, SIGNAL =   3; EXPRESSED IN LUNG, SIGNAL = 3.9; EXPRESSED IN HEART, SIGNAL = 3.4; EXPRESSED IN FETAL LIVER, SIGNAL = 4.2; EXPRESSED IN BONE MARROW, SIGNAL = 3.4; SWISSPROT HIT: Q06945, EVALUE 1.00e-125
MVQQTNNAENTEALLAGESSDSGAGLELGIASSPTPGSTASTGGKADDPSWCKTPSGHIKRPMNAFMVWSQIERRKIMEQSPDMHNAEISKRLGKRWKLLKDSDKIPFIREAERLRLKHMADYPDYKYRPRKKVKSGNANSSSSAAASSKPGEKGDKVGGSGGGGHGGGGGGGSSNAGGGGGGASGGGANSKPAQKKSCGSKVAGGAGGGVSKPHAKLILAGGGGGGKAAAAAAASFAAEQAGAAALLPLGAAADHHSLYKARTPSASASASSAASASAALAAPGKHLAEKKVKRVYLFGGLGTSSSPVGGVGAGADPSDPLGLYEEEGAGCSPDAPSLSGRSSAASSPAAGRSPADHRGYASLRAASPAPSSAPSHASSSASSHSSSSSSSGSSSSDDEFEDDLLDLNPSSNFESMSLGSFSSSSALDRDLDFNFEPGSGSHFEFPDYCTPEVSEMISGDWLESSISNLVFTY

SEQ ID NO: 32038 - protein, 62 aa, Homo sapiens
  MAP TO AL136179.15; EXPRESSED IN ADULT LIVER, SIGNAL = 3.2; EXPRESSED IN PLACENTA, SIGNAL = 5.6; EXPRESSED IN BRAIN, SIGNAL =   3; EXPRESSED IN LUNG, SIGNAL = 3.9; EXPRESSED IN HEART, SIGNAL = 3.4; EXPRESSED IN FETAL LIVER, SIGNAL = 4.2; EXPRESSED IN BONE MARROW, SIGNAL = 3.4
WCSKPTMPRTRKRCWPARARTRAPASSWESPPPPRPAPPPPRAARPTTRAGARPRVGTSSDP

SEQ ID NO: 32039 - protein, 120 aa, Homo sapiens
  MAP TO AL136179.15; EXPRESSED IN ADULT LIVER, SIGNAL = 3.2; EXPRESSED IN PLACENTA, SIGNAL = 5.6; EXPRESSED IN BRAIN, SIGNAL =   3; EXPRESSED IN LUNG, SIGNAL = 3.9; EXPRESSED IN HEART, SIGNAL = 3.4; EXPRESSED IN FETAL LIVER, SIGNAL = 4.2; EXPRESSED IN BONE MARROW, SIGNAL = 3.4; SWISSPROT HIT: Q01617, EVALUE 9.20e-01
GAANQQCREHGSAAGRRELGLGRRPRAGNRLLPHARLHRLHGRQGRRPELVQDPEWAHQATHERLHGVVADRAAQDHGAVARHAQRRDLQAAGQTLEAAQRQRQDPFHSRGGAAAPQAHG

SEQ ID NO: 32040 - protein, 49 aa, Homo sapiens
  MAP TO AC000099.1; EXPRESSED IN HELA, SIGNAL = 0.24; EXPRESSED IN ADULT LIVER, SIGNAL = 1.6; EXPRESSED IN PLACENTA, SIGNAL = 1.4; EXPRESSED IN BRAIN, SIGNAL = 1.3; EXPRESSED IN LUNG, SIGNAL = 1.3; EXPRESSED IN BONE MARROW, SIGNAL = 1.2; EXPRESSED IN FETAL LIVER, SIGNAL = 1.4; SWISSPROT HIT: O00222, EVALUE 3.00e-10
ALIEKDASDVKCANGDPPIFTKPDKISGVIGAAASSVSIMVANILRLFK

SEQ ID NO: 32041 - protein, 192 aa, Homo sapiens
  MAP TO AC007956.5; EXPRESSED IN LUNG, SIGNAL = 1.9; EXPRESSED IN HELA, SIGNAL = 4.4; EXPRESSED IN ADULT LIVER, SIGNAL = 2.2; SWISSPROT HIT: P49752, EVALUE 3.00e-85
VKDVKAAQSNENLSDSQQEPPKSEVSEGPVEPSNWDQNVQSMETQIDKAQAVTQPVPLANKPVPAQSTFPSKTGGMEGGTAVATSSLTADNDFKPVGIGLPHSENNQDKGLPRPDNRDNRLEGNRGNSSSYRGPGQSRMEDTRDKGLVNRGRGQAISRGPGLVKQEDFRDKMMGRREDSREKMNRGEGSRDR

SEQ ID NO: 32042 - protein, 26 aa, Homo sapiens
  MAP TO AC007956.5; EXPRESSED IN LUNG, SIGNAL = 1.9; EXPRESSED IN HELA, SIGNAL = 4.4; EXPRESSED IN ADULT LIVER, SIGNAL = 2.2
LKEIAPMGQDPDMKVTQQRALKASGE

SEQ ID NO: 32043 - protein, 274 aa, Homo sapiens
  MAP TO AC000080.2; EXPRESSED IN FETAL LIVER, SIGNAL = 2.2; EXPRESSED IN HELA, SIGNAL = 1.8; EXPRESSED IN ADULT LIVER, SIGNAL = 2.3; EXPRESSED IN LUNG, SIGNAL =   2; EXPRESSED IN BONE MARROW, SIGNAL = 2.4; SWISSPROT HIT: P10263, EVALUE 3.00e-14
MENMVTLFRAVEEHCPWFPEKGTLDVELWDHVGAKFRELVPTGNYVPVTVWGDWALVRAILMTYQSRDTLQLPQFSESGHPLPLPQLSSPTRPSLSAQPLPLPTPPPPDDTEDSISNSSDFGLTSPPDDLISFHEEPTLVAPAAPTQTAQDHIYANSSLSKPLQSLPPEPSKLQFTCNSAGPPPSTTAPHPPIILVPQPVTLPSTQPASLYPSSCRDTPATLVVQDWASNHQYASASSAPPMPLSHTLIPVRPRQSQFLLSIHTFPVTSMPTLS

SEQ ID NO: 32044 - protein, 63 aa, Homo sapiens
  MAP TO AL353999.2; EXPRESSED IN PLACENTA, SIGNAL = 3.1; EXPRESSED IN BONE MARROW, SIGNAL = 1.9; EXPRESSED IN LUNG, SIGNAL = 1.8; EXPRESSED IN HEART, SIGNAL = 1.7; EXPRESSED IN ADULT LIVER, SIGNAL = 1.9; EXPRESSED IN BRAIN, SIGNAL = 2.1; EXPRESSED IN HELA, SIGNAL = 0.34
PGCHLYRGRSHLRLWLAQEAGTLGRDARPRAFGGRSAVCQAERTVTSPRLLRRLLRRPGAPGS

SEQ ID NO: 32045 - protein, 225 aa, Homo sapiens
  MAP TO AL353999.2; EXPRESSED IN PLACENTA, SIGNAL = 3.1; EXPRESSED IN BONE MARROW, SIGNAL = 1.9; EXPRESSED IN LUNG, SIGNAL = 1.8; EXPRESSED IN HEART, SIGNAL = 1.7; EXPRESSED IN ADULT LIVER, SIGNAL = 1.9; EXPRESSED IN BRAIN, SIGNAL = 2.1; EXPRESSED IN HELA, SIGNAL = 0.34
SRNSGKRCASTGIRRPERCVPGREDSDVAAAAAAAAKKTRSPRVLSRRPPPSDREEEEKEEEEEEEEEEEEQEEEEEEEEEEEEEEEEEEEEEEEAGGEGAKPPPPGSSRSCGNGRAPPRSASSGRKQYRRLQPEGCGGAAPRGGAAHVRLERDHKPKSQAQCKRLITVTCCCDESDHSGLSSYPSFSPVEKAPKSVGISVQRLPLQLPLQIIYLKLLCSVPGLE

SEQ ID NO: 32046 - protein, 58 aa, Homo sapiens
  MAP TO AL022578.1; EXPRESSED IN PLACENTA, SIGNAL = 2.7; EXPRESSED IN BRAIN, SIGNAL = 2.2; EXPRESSED IN HELA, SIGNAL = 2.7; EXPRESSED IN ADULT LIVER, SIGNAL = 1.7; EXPRESSED IN BONE MARROW, SIGNAL = 3.6; EXPRESSED IN LUNG, SIGNAL = 3.7; EXPRESSED IN HEART, SIGNAL =   3; SWISSPROT HIT: Q9Y6W5, EVALUE 6.00e-22
DDGTEALKFYTDPSYFFDLWKKKMLQDTRDIMKEKRKHRKEKKDNPNRGNVNPRKIKT

SEQ ID NO: 32047 - protein, 473 aa, Homo sapiens
  MAP TO AC008626.5; EXPRESSED IN LUNG, SIGNAL =   2; EXPRESSED IN PLACENTA, SIGNAL = 6.8; EXPRESSED IN HELA, SIGNAL = 3.3; EXPRESSED IN BRAIN, SIGNAL = 2.7; EXPRESSED IN ADULT LIVER, SIGNAL = 1.6; SWISSPROT HIT: Q03923, EVALUE 0.00e+00
MDECKVHEECYNGLNQCLRTTQSKILQCDKYVKVFHKFSNSNRYKIRHTGKKPFKCKECEKSFCMLSHLAQHKRIHTREKPYKCKECGKAYNEASNLSTHKRIHTGKKPYKCEQCGKAFNRLSHLTTHKIIHTGKKPYICEDCGKAFNQSANLTTHKRIHTGEKPYKCEESGKAFSQSSTLTTHKIIHAGEKPYKYEECGKSFNQSSTLTTRKIIHTGEKFCKCEEWGKAFSRLSHLTTHKRIHSGEKPYKCEECGKAFKQSSTLTTHKRIHSGEKFYKCEVCSKAFSRFSHLTTHKRIHSGEKPYKCEECGKAFNLSSHLTTHKIIHTGEKPYKCEECGKAFNLSSHLTTHKIIHTGEKPYKCEECGKAFNQSSTLSKHKVIHTGEKPYKCGECGKAFNQSSHLTTHKIIHTGEKPYKCEECGKAFNNSSILNRHKMIHTGEKFYKPESCDNACDNISNISKHKRNCAGEKT

SEQ ID NO: 32048 - protein, 17 aa, Homo sapiens
  MAP TO AC008626.5; EXPRESSED IN LUNG, SIGNAL =   2; EXPRESSED IN PLACENTA, SIGNAL = 6.8; EXPRESSED IN HELA, SIGNAL = 3.3; EXPRESSED IN BRAIN, SIGNAL = 2.7; EXPRESSED IN ADULT LIVER, SIGNAL = 1.6
WMSVRCTKNVTMDLTSV

SEQ ID NO: 32049 - protein, 189 aa, Homo sapiens
  MAP TO AC010328.4; EXPRESSED IN LUNG, SIGNAL =   2; EXPRESSED IN BONE MARROW, SIGNAL = 2.4; EXPRESSED IN PLACENTA, SIGNAL = 3.4; EXPRESSED IN HELA, SIGNAL = 1.8; EXPRESSED IN ADULT LIVER, SIGNAL = 2.3; EXPRESSED IN FETAL LIVER, SIGNAL = 2.3; EXPRESSED IN HEART, SIGNAL = 2.3; SWISSPROT HIT: P17098, EVALUE 3.00e-08
LSRNCVIKELAPQQEGNPGEVFHTVTLEQHEKHDIEEFCFREIKKKIHDFDCQWRDDERNCNKVTTAPKENLTCRRDQRDRRGIGNKSIKHQLGLSFLPHPHELQQFQAEGKIYECNHVEKSVNHGSSVSPPQIISSTIKTHVSNKYGTDFICSSLLTQEQKSCIREKPYRYIECDKALNHGSHMTVRQ

SEQ ID NO: 32050 - protein, 96 aa, Homo sapiens
  MAP TO AC010328.4; EXPRESSED IN LUNG, SIGNAL =   2; EXPRESSED IN BONE MARROW, SIGNAL = 2.4; EXPRESSED IN PLACENTA, SIGNAL = 3.4; EXPRESSED IN HELA, SIGNAL = 1.8; EXPRESSED IN ADULT LIVER, SIGNAL = 2.3; EXPRESSED IN FETAL LIVER, SIGNAL = 2.3; EXPRESSED IN HEART, SIGNAL = 2.3; SWISSPROT HIT: Q14589, EVALUE 9.00e-36
VIHTGEKPYKCNQCGKGFSVHSSLTTHQVIHTGEKPYKCNECGKSFSVRPNLTRHQIIHTGKKPYKCSDCGKSFSVRPNLFRHQIIHTKEKPYKRN

SEQ ID NO: 32051 - protein, 238 aa, Homo sapiens
  MAP TO AC006486.1; EXPRESSED IN ADULT LIVER, SIGNAL = 1.5; EXPRESSED IN BONE MARROW, SIGNAL = 1.6; SWISSPROT HIT: Q50634, EVALUE 7.50e-02
GQAPLLAPGQVGVSPVPSPQLPPACAAPGGPVITAFYSGSPAPTSSAPLAQPSQAPPSLVYTVATSTTPPAATILPKGPPAPATATPAPTSPFPSATGRCQINPEQSELGDPGDGLQSGLAQQTIFSPLAGSMTYSLVAPKAQRPSPKAPQKVKAAIASIPVGSFEAGASGRPGPAPRQPLEPGPVREPTAPESELEGQPTPPAPPPLPETWTPTARSSPPLPPPAEERTSAKGPETM

SEQ ID NO: 32052 - protein, 22 aa, Homo sapiens
  MAP TO AC006486.1; EXPRESSED IN ADULT LIVER, SIGNAL = 1.5; EXPRESSED IN BONE MARROW, SIGNAL = 1.6
GAAPHCPHLLRSGPAPRALRPW

SEQ ID NO: 32053 - protein, 497 aa, Homo sapiens [sequence omitted]

SEQ ID NO: 32054 - protein, 166 aa, Homo sapiens
  MAP TO AC005630.1; EXPRESSED IN HELA, SIGNAL = 0.48; EXPRESSED IN ADULT LIVER, SIGNAL = 1.2; EXPRESSED IN BRAIN, SIGNAL = 1.4; EXPRESSED IN BONE MARROW, SIGNAL = 1.1; EXPRESSED IN HEART, SIGNAL =   2; EXPRESSED IN FETAL LIVER, SIGNAL = 1.1; EXPRESSED IN LUNG, SIGNAL = 1.6; SWISSPROT HIT: Q00657, EVALUE 4.00e-64
ADHGWIPLQVSDGQHQAITVLEVQALEPYLCVANGSGLMVPQGGQGTINMAELHLGTNLNICSRDEAHYHVTDSPHWGQLLQATQPATAFSQQDLLVGAVPYGHNGSLSSRNTLAFSMDVGPVHTDATLQVTIALEGPVAPLKLAQHKKIYIFQGEAAEIRRDQLE

SEQ ID NO: 32055 - protein, 120 aa, Homo sapiens
  MAP TO AC005630.1; EXPRESSED IN HELA, SIGNAL = 0.48; EXPRESSED IN ADULT LIVER, SIGNAL = 1.2; EXPRESSED IN BRAIN, SIGNAL = 1.4; EXPRESSED IN BONE MARROW, SIGNAL = 1.1; EXPRESSED IN HEART, SIGNAL =   2; EXPRESSED IN FETAL LIVER, SIGNAL = 1.1; EXPRESSED IN LUNG, SIGNAL = 1.6
PMGSTRPSRCWRCRPWSLTSVWPMAPASWFLKEARVPSTWPSSTWAPTSTSAVGMRPTTTSQTALTGDSCSKPLSQPQPSLSRTCWLGLFPMATMAASAPATPWPSQWMWDQCTQMPPYK

SEQ ID NO: 32056 - protein, 219 aa, Homo sapiens
  MAP TO AC026717.3; EXPRESSED IN BRAIN, SIGNAL =  16; EXPRESSED IN HELA, SIGNAL =  23; EXPRESSED IN ADULT LIVER, SIGNAL = 6.8; EXPRESSED IN LUNG, SIGNAL =  20; EXPRESSED IN HEART, SIGNAL = 9.8; SWISSPROT HIT: P29751, EVALUE 3.00e-94
LHSTAETASALRAQSLAFAAPLPVHTCHQLTMDDDITALVIDNGSGMCKASFTGDNAARAVFPSIVGHPRHQGVMVGMGQKDSYVGDEAQSKRGILTLKYPIEHGIVTNWDDMEKIWHHTFYNELRVAPEEQPMLLFEAPLNPRANCKKMTQIIFETFNTPAMYLAIQTMLSLYASGRTTGIVLDSSDGVTHTVPIYEGYALPNAILLLDLAGRDLTTS

SEQ ID NO: 32057 - protein, 74 aa, Homo sapiens
  MAP TO AC026717.3; EXPRESSED IN BRAIN, SIGNAL =  16; EXPRESSED IN HELA, SIGNAL =  23; EXPRESSED IN ADULT LIVER, SIGNAL = 6.8; EXPRESSED IN LUNG, SIGNAL =  20; EXPRESSED IN HEART, SIGNAL = 9.8; SWISSPROT HIT: P98089, EVALUE 1.70e-02
IYIPPPRLHPPCEHRASPSLLHCQSTPATSSPWMMISPRSSLTTAPACARPASRATMPPGQSSPPSLGTPGTRA

SEQ ID NO: 32058 - protein, 383 aa, Homo sapiens
  MAP TO AF134576.1; EXPRESSED IN ADULT LIVER, SIGNAL = 1.7; EXPRESSED IN PLACENTA, SIGNAL = 4.1; EXPRESSED IN BRAIN, SIGNAL = 1.4; EXPRESSED IN LUNG, SIGNAL = 1.6; EXPRESSED IN HEART, SIGNAL = 1.9; EXPRESSED IN FETAL LIVER, SIGNAL = 2.3; EXPRESSED IN BONE MARROW, SIGNAL = 1.8; SWISSPROT HIT: P43363, EVALUE 0.00e+00
LWVPIAQVLPTLPPATLIRVIMPRAPKRQRCMPEEDLQSQSETQGLEGAQAPLAVEEDASSSTSTSSSFPSSFPSSSSSSSSSCYPLIPSTPEEVSADDETPNPPQSAQIACSSPSVVASLPLDQSDEGSSSQKEESPSTLQVLPDSESLPRSEIDEKVTDLVQFLLFKYQMKEPITKAEILESVIKNYEDHFPLLFSEASECMLLVFGIDVKEVDPTGHSFVLVTSLGLTYDGMLSDVQSMPKTGILILILSIIFIEGYCTPEEVIWEALNMMGLYDGMEHLIYGEPRKLLTQDWVQENYLEYRQVPGSDPARYEFLWGPRAHAEIRKMSLLKFLAKVNGSDPRSFPLWYEEALKDEEERAQDRIATTDDTTAMASASSSAT

SEQ ID NO: 32059 - protein, 151 aa, Homo sapiens
  MAP TO AC010683.1; EXPRESSED IN LUNG, SIGNAL = 1.3; EXPRESSED IN FETAL LIVER, SIGNAL = 1.8; EXPRESSED IN BRAIN, SIGNAL = 1.3; EXPRESSED IN HELA, SIGNAL = 0.85; EXPRESSED IN ADULT LIVER, SIGNAL = 1.4; EXPRESSED IN HEART, SIGNAL = 1.5; EXPRESSED IN BONE MARROW, SIGNAL = 1.5; SWISSPROT HIT: P25806, EVALUE 3.70e+00
APSHSRALVEMYKEICVVFTLVNTTPVLQLTDQGVILTLKSYYLRNTFCKAIAAIDSDSSNGSGQSKLITIWKGLTILNVIKNICDSWEEVKIATLAGVRKKLNLILINDFEGFKMSVEEVTANVVKIARELELEVEPKDVTELLQSHDKT

SEQ ID NO: 32060 - protein, 26 aa, Homo sapiens
  MAP TO AC010683.1; EXPRESSED IN LUNG, SIGNAL = 1.3; EXPRESSED IN FETAL LIVER, SIGNAL = 1.8; EXPRESSED IN BRAIN, SIGNAL = 1.3; EXPRESSED IN HELA, SIGNAL = 0.85; EXPRESSED IN ADULT LIVER, SIGNAL = 1.4; EXPRESSED IN HEART, SIGNAL = 1.5; EXPRESSED IN BONE MARROW, SIGNAL = 1.5
WRCTRRSVLFSRLLTQHLFFSLQIKE

SEQ ID NO: 32061 - protein, 226 aa, Homo sapiens
  MAP TO AC004186.1; EXPRESSED IN HEART, SIGNAL = 2.3; EXPRESSED IN BONE MARROW, SIGNAL =   2; EXPRESSED IN LUNG, SIGNAL = 1.9; EXPRESSED IN PLACENTA, SIGNAL = 1.5; EXPRESSED IN BRAIN, SIGNAL = 1.8; EXPRESSED IN HELA, SIGNAL = 0.99; EXPRESSED IN ADULT LIVER, SIGNAL = 2.3; SWISSPROT HIT: Q02084, EVALUE 4.00e-14
SVTLDPQSASGYLQLSEDWKCVTYTSLYKSAYLHPQQFDCEPGVLGSKGFTWGKVYWEVEVEREGWSEDEEEGDEEEEGEEEEEEEEAGYGDGYDDWETDEDEESLGDEEEEEEEEEEEVLESCMVGVARDSVKRKGDLSLRPEDGVWALRLSSSGIWANTSPEAELFPALRPRRVGIALDYEGGTVTFTNAESQELIYTFTATFTRRLVPFLWLKWPGTRLLLRP

SEQ ID NO: 32062 - protein, 216 aa, Homo sapiens
  MAP TO AL050330.9; EXPRESSED IN HELA, SIGNAL = 0.75; EXPRESSED IN ADULT LIVER, SIGNAL = 1.8; EXPRESSED IN LUNG, SIGNAL = 2.1; EXPRESSED IN HEART, SIGNAL = 2.2; EXPRESSED IN BONE MARROW, SIGNAL = 2.2; EXPRESSED IN PLACENTA, SIGNAL = 1.7; EXPRESSED IN BRAIN, SIGNAL = 1.5; SWISSPROT HIT: P18892, EVALUE 1.00e-44
DQRSVQRAEEPHDLPDNPERFEWRYCVLGCESFMSERHYWEVEVGDRKEWHIGVCSKNVERKKVWVKMTPENGYWTMGLTDGNKYRALTEPRTNLKLPEPPRKVGVILDYETGHISFYNATDGSHIYTFLHASSSEPLYPVFRILTLEPTALTVCPIPKVESSPDPDLVPDHSLEIPLTPGLANESGEPQAEVTSLLLPAQPGAKGLTLHNSQSEP

SEQ ID NO: 32063 - protein, 52 aa, Homo sapiens
  MAP TO AL050330.9; EXPRESSED IN HELA, SIGNAL = 0.75; EXPRESSED IN ADULT LIVER, SIGNAL = 1.8; EXPRESSED IN LUNG, SIGNAL = 2.1; EXPRESSED IN HEART, SIGNAL = 2.2; EXPRESSED IN BONE MARROW, SIGNAL = 2.2; EXPRESSED IN PLACENTA, SIGNAL = 1.7; EXPRESSED IN BRAIN, SIGNAL = 1.5
RGVYSVLRSPMTYQTTLRDLNGVTVCLAVKASCQRDTTGRWKWGTEKSGILG

SEQ ID NO: 32064 - protein, 31 aa, Homo sapiens
  MAP TO AL050330.9; EXPRESSED IN HELA, SIGNAL = 0.75; EXPRESSED IN ADULT LIVER, SIGNAL = 1.8; EXPRESSED IN LUNG, SIGNAL = 2.1; EXPRESSED IN HEART, SIGNAL = 2.2; EXPRESSED IN BONE MARROW, SIGNAL = 2.2; EXPRESSED IN PLACENTA, SIGNAL = 1.7; EXPRESSED IN BRAIN, SIGNAL = 1.5
ISRSTMPRMDLISTHFCTPLPLSLCILYSEF

SEQ ID NO: 32065 - protein, 242 aa, Homo sapiens
  MAP TO AC002123.1; EXPRESSED IN ADULT LIVER, SIGNAL = 1.9; EXPRESSED IN BRAIN, SIGNAL = 1.9; EXPRESSED IN BONE MARROW, SIGNAL = 2.3; EXPRESSED IN LUNG, SIGNAL = 2.1; EXPRESSED IN FETAL LIVER, SIGNAL = 2.1; EXPRESSED IN PLACENTA, SIGNAL = 1.8; SWISSPROT HIT: Q06068, EVALUE 1.10e+00
QSAAHGSKGNFDFQVLLFKKCFHKAIAAIDSDYCDGSGQSKFEAFWKGFTHLDVIKNTCDSWKEVKVSTLTGVLKLIPKLMDDFEGFKASAKEVMADMVKIVGELEFEVEPEDATELLQCHDQTLAVEELLLTNEHRKWSLERESTPGKNAVTIIETTTKDLEYCINLFDKAVAGFEGIDSNFERGSLGKMLSNSIACFREIFHERESQSMQQTSLLSHFKKFPQPAQPSATTLMINQQPST

SEQ ID NO: 32066 - protein, 191 aa, Homo sapiens
  MAP TO AC011330.4; EXPRESSED IN ADULT LIVER, SIGNAL = 1.2; EXPRESSED IN PLACENTA, SIGNAL = 2.3; EXPRESSED IN HELA, SIGNAL =   2; EXPRESSED IN HEART, SIGNAL = 1.4; EXPRESSED IN BONE MARROW, SIGNAL = 1.6; EXPRESSED IN LUNG, SIGNAL = 1.3; EXPRESSED IN FETAL LIVER, SIGNAL = 1.7; SWISSPROT HIT: O75593, EVALUE 3.30e+00
FLSGSPPPPPALLHCLSTGVPLPRASQPSAHISPRQRRAITVEALCENHLGPAPPYSISNFSIHLLCQHTKPATPQPHPSTTAICQTAVWYAVSWAPGAQGWLQACHDQFPDEFLDAICSNLSFSALSGSNRRLVKRLCAGLLPPPTSCPEGLPPVPLTPDIFWGCFLENETLWAERLCGEASLQAVPPSN

SEQ ID NO: 32067 - protein, 218 aa, Homo sapiens
  MAP TO AL022319.2; EXPRESSED IN ADULT LIVER, SIGNAL = 2.1; EXPRESSED IN BRAIN, SIGNAL = 2.5; EXPRESSED IN PLACENTA, SIGNAL = 4.4; EXPRESSED IN HEART, SIGNAL = 2.5; EXPRESSED IN BONE MARROW, SIGNAL = 2.3; EXPRESSED IN FETAL LIVER, SIGNAL = 2.7
SRTPGRPVPRRSPPPEPARPGPLQPAGAAGASAQPQQRGLHQPGLHPPRLHGPLGRGGPRWRGRRGRGQRALGDPQQPLAHLPLLPAAPAASPRPHARQEVQQHQQPGRPRPPPRRRPGPRPGPEPLVGRGPQQGPPRPGTAAHGPGPLGAPAATAPRRAGAGRRRQQEEEMRVAGAPGRPPPAPSHLLYLRSQEQTAILRPHLGSRRARRAQAPDSR

SEQ ID NO: 32068 - protein, 34 aa, Homo sapiens
  MAP TO AL022319.2; EXPRESSED IN ADULT LIVER, SIGNAL = 2.1; EXPRESSED IN BRAIN, SIGNAL = 2.5; EXPRESSED IN PLACENTA, SIGNAL = 4.4; EXPRESSED IN HEART, SIGNAL = 2.5; EXPRESSED IN BONE MARROW, SIGNAL = 2.3; EXPRESSED IN FETAL LIVER, SIGNAL = 2.7
PGPRAGLSPAARRRLSLRGRGLFSLRGLRAHQRS

SEQ ID NO: 32069 - protein, 29 aa, Homo sapiens
  MAP TO AL022319.2; EXPRESSED IN ADULT LIVER, SIGNAL = 2.1; EXPRESSED IN BRAIN, SIGNAL = 2.5; EXPRESSED IN PLACENTA, SIGNAL = 4.4; EXPRESSED IN HEART, SIGNAL = 2.5; EXPRESSED IN BONE MARROW, SIGNAL = 2.3; EXPRESSED IN FETAL LIVER, SIGNAL = 2.7
PMGLGPLAPPPQPLPGELEPGDAASKRKR

SEQ ID NO: 32070 - protein, 453 aa, Homo sapiens
  MAP TO AL133543.2; EXPRESSED IN LUNG, SIGNAL = 1.4; EXPRESSED IN ADULT LIVER, SIGNAL = 1.5; EXPRESSED IN BRAIN, SIGNAL = 0.97; EXPRESSED IN HELA, SIGNAL = 1.9; SWISSPROT HIT: P15924, EVALUE 0.00e+00
ASNRIQESKNQCTQVVQERESLLVKIKVLEQDKARLQRLEDELNRAKSTLEAETRVKQRLECEKQQIQNDLNQWKTQYSRKEEAIRKIESEREKSEREKNSLRSEIERLQAEIKRIEERCRRKLEDSTRETQSQLETERSRYQREIDKLRQRPYGSHRETQTECEWTVDTSKLVFDGLRKKVTAMQLYECQLIDKTTLDKLLKGKKSVEEVASEIQPFLRGAGSIAGASASPKEKYSLVEAKRKKLISPESTVMLLEAQAATGGIIDPHRNEKLTVDSAIARDLIDFDDRQQIYAAEKAITGFDDPFSGKTVSVSEAIKKNLIDRETGMRLLEAQIASGGVVDPVNSVFLPKDVALARGLIDRDLYRSLNDPRDSQKNFVDPVTKKKVSYVQLKERCRIEPHTGLLLLSVQKRSMSFQGIRQPVTVTELVDSGILRPSTVNELESGQISYDEV

SEQ ID NO: 32071 - protein, 176 aa, Homo sapiens
  MAP TO AL022067.1; EXPRESSED IN HELA, SIGNAL = 0.41; EXPRESSED IN ADULT LIVER, SIGNAL = 2.5; EXPRESSED IN PLACENTA, SIGNAL = 2.1; EXPRESSED IN HEART, SIGNAL = 2.4; EXPRESSED IN BRAIN, SIGNAL = 2.3; EXPRESSED IN BONE MARROW, SIGNAL = 2.5; EXPRESSED IN LUNG, SIGNAL = 2.5; SWISSPROT HIT: P41183, EVALUE 2.00e-17
VCHKRFSSTSNLKTHLRLHSGEKPYQCKVCPAKFTQFVHLKLHKRLHTRERPHKCSQCHKNYIHLCSLKVHLKGNCAAAPAPGLPLEDLTRINEEIEKFDISDNADRLEDVEDDISVISVVEKEILAVVRKEKEETGLKVSLQRNMGNGLLSSGCSLYESSDLPLMKLPPSNPLPL

SEQ ID NO: 32072 - protein, 296 aa, Homo sapiens
  MAP TO AC007308.13; EXPRESSED IN FETAL LIVER, SIGNAL = 1.6; EXPRESSED IN ADULT LIVER, SIGNAL = 2.6; EXPRESSED IN HELA, SIGNAL = 0.35; SWISSPROT HIT: P05546, EVALUE 0.00e+00
MKHSLNALLIFLIITSAWGGSKGPLDQLEKGGETAQSADPQWEQLNNKNLSMPLLPADFHKENTVTNDWIPEGEEDDDYLDLEKIFSEDDDYIDIVDSLSVSPTDSDVSAGNILQLFHGKSRIQRLNILNAKFAFNLYRVLKDQVNTFDNIFIAPVGISTAMGMISLGLKGETHEQVHSILHFKDFVNASSKYEITTIHNLFRKLTHRLFRRNFGYTLRSVNDLYIQKQFPILLDFKTKVREYYFAEAQIADFSDPAFISKTNNHIMKLTKGLIKDALENIDPATQMMILNCIYFK

SEQ ID NO: 32073 - protein, 210 aa, Homo sapiens
  MAP TO AL031864.1; EXPRESSED IN ADULT LIVER, SIGNAL = 2.6; EXPRESSED IN PLACENTA, SIGNAL = 3.8; EXPRESSED IN HEART, SIGNAL = 2.9; SWISSPROT HIT: Q10711, EVALUE 1.00e-04
RPQMSFLKMDMTQMEFPDASFQVVLDKGTLDAVLTDEEEKTLQQVDRMLAEVGRVLQVGGRYLCISLAQAHILKKAVGHFSREGWMVRVHQVANSQDQVLEAEPQFSLPVFAFIMTKFRPVPGSALQIFELCAQEQRKPVRLESAERLAEAVQERQQYAWLCSQLRRKARLGSVSLDLCDGDTGEPRYTLHVVDSPTVKPSRDNHFAIFI

SEQ ID NO: 32074 - protein, 188 aa, Homo sapiens
  MAP TO AL022067.1; EXPRESSED IN ADULT LIVER, SIGNAL = 2.4; EXPRESSED IN BONE MARROW, SIGNAL = 2.2; EXPRESSED IN LUNG, SIGNAL = 2.6; EXPRESSED IN FETAL LIVER, SIGNAL = 1.9; EXPRESSED IN PLACENTA, SIGNAL = 3.3; EXPRESSED IN HELA, SIGNAL = 0.44; SWISSPROT HIT: P10272, EVALUE 3.00e-38
EGINLEDWATEGQYGRAKNARPVQVKLKDSASFPHQRQYPLRPEAQQGLQKIKDLKAQGLVKACNSPYNNPTLGVQKPSGQWRLVQDLRIINEVTVPLYLAVPNPYILLSQIPEEAEWFTDLDLKDAFFCIPVHPDSQFLFAFEDPSNPMSQLTWTVSPQGFRDSPHLFGQALAQDLSRFSYLGTLVL

SEQ ID NO: 32075 - protein, 209 aa, Homo sapiens
  MAP TO AC002994.2; EXPRESSED IN PLACENTA, SIGNAL = 3.5; EXPRESSED IN BRAIN, SIGNAL = 2.4; EXPRESSED IN ADULT LIVER, SIGNAL = 2.1; EXPRESSED IN HELA, SIGNAL = 5.8; EXPRESSED IN LUNG, SIGNAL = 3.4; EXPRESSED IN HEART, SIGNAL = 3.1; EXPRESSED IN FETAL LIVER, SIGNAL = 1.4; SWISSPROT HIT: P38879, EVALUE 5.00e-13
ETVPATEQELPQSQAETGSGTASDSGESVPGIEEQDSTQTTTQKAWLVAAAEIDEEPVGKAKQSRSEKRARKAMSKLGLLQVTGVTRVTIWKSKNILFVITKLDVYKSPASDAYIVFGEAKIQDLSQQAQLAAAEKFRVQGEAVGNIQENTQTPTVQEESEEEEVDETGVEVKDVKLVMSQANVSRAKAVRALKNNSNDIVNAIMELTV

SEQ ID NO: 32076 - protein, 236 aa, Homo sapiens
  MAP TO Z98050.1; EXPRESSED IN LUNG, SIGNAL = 3.5; EXPRESSED IN ADULT LIVER, SIGNAL = 3.2; EXPRESSED IN PLACENTA, SIGNAL = 4.6; EXPRESSED IN HEART, SIGNAL = 2.9; EXPRESSED IN BRAIN, SIGNAL = 3.3; EXPRESSED IN BONE MARROW, SIGNAL = 3.5; EXPRESSED IN FETAL LIVER, SIGNAL = 3.3; SWISSPROT HIT: P15822, EVALUE 1.00e-125
SPSSVRLPPAAAEHSPQTAAGMPSVASPHPDPQEQKQQITLQPTPGLPSPHTHLFSHLPLHSQQQSRTPYNMVPVGGIHVVPAGLTYSTFVPLQAGPVQLTIPAVSVVHRTLGTHRNTVTEVSGTTNPAGVAELSSVVPCIPIGQIRVPGLQNLSTPGLQSLPSLSMETVNIVGLANTNMAPQVHPPGLALNAVGLQVLTANPSSQSSPAPQAHIPGLQILNIALPTLIPSVSQVA

SEQ ID NO: 32077 - protein, 156 aa, Homo sapiens
  MAP TO AC006256.1; EXPRESSED IN PLACENTA, SIGNAL = 5.3; EXPRESSED IN BRAIN, SIGNAL = 4.7; EXPRESSED IN HELA, SIGNAL =   9; EXPRESSED IN ADULT LIVER, SIGNAL = 4.6; EXPRESSED IN FETAL LIVER, SIGNAL = 6.3; EXPRESSED IN LUNG, SIGNAL = 4.8; EXPRESSED IN HEART, SIGNAL = 4.9; SWISSPROT HIT: P10272, EVALUE 4.00e-03
LAIMSPCSGCCRLNNFRGPKITNYAQLTLYSSHNFQNLFSSSHLRHIRSASWLLQLYSLFVESPTITIVPGPDFNPASHIIPDTTPDPHDHISLIHLTFTRFPHICFFPGPHTDHTEFTDGSSNFPTHQAQGFAPAQDWQIDFTHMPQVRKQKYLL

SEQ ID NO: 32078 - protein, 241 aa, Homo sapiens
  MAP TO AC000029.17; EXPRESSED IN LUNG, SIGNAL =   2; EXPRESSED IN FETAL LIVER, SIGNAL = 1.6; EXPRESSED IN PLACENTA, SIGNAL = 2.3; EXPRESSED IN ADULT LIVER, SIGNAL = 1.9; EXPRESSED IN HELA, SIGNAL = 0.36; SWISSPROT HIT: P19086, EVALUE 1.00e-122
MGCRQSSEEKEAARRSRRIDRHLRSESQRQRREIKLLLLGTSNSGKSTIVKQMKIIHSGGFNLEACKEYKPLIIYNAIDSLTRIIRALAALRIDFHNPDRAYDAVQLFALTGPAESKGEITPELLGVMRRLWADPGAQACFSRSSEYHLEDNAAYYLNDLERIAAADYIPTVEDILRSRDMTTGIVENKFTFKELTFKMVDVGGQRSERKKWIHCFEGVTAIIFCVELSGYDLKLYEDNQT

SEQ ID NO: 32079 - protein, 30 aa, Homo sapiens
  MAP TO AC000029.17; EXPRESSED IN LUNG, SIGNAL =   2; EXPRESSED IN FETAL LIVER, SIGNAL = 1.6; EXPRESSED IN PLACENTA, SIGNAL = 2.3; EXPRESSED IN ADULT LIVER, SIGNAL = 1.9; EXPRESSED IN HELA, SIGNAL = 0.36
RAPCLGPLLPDHGMSAKLRGKRSSPAVPEN

SEQ ID NO: 32080 - protein, 185 aa, Homo sapiens
  MAP TO AC006205.7; EXPRESSED IN ADULT LIVER, SIGNAL = 1.2; EXPRESSED IN BRAIN, SIGNAL = 0.89; EXPRESSED IN HELA, SIGNAL = 0.53; EXPRESSED IN LUNG, SIGNAL = 1.2; EXPRESSED IN HEART, SIGNAL = 1.6; EXPRESSED IN BONE MARROW, SIGNAL = 1.3; SWISSPROT HIT: P16139, EVALUE 2.80e-01
RTSHIPVQQPEKRKQKPSPEPSQDSPHSDKWPPGHPVKNLPQMRGPRPRPAGDSPRKTQWLNQVESYIAEQRRGDRMRPQAPGRGWHGEEEVVAAAGQEGQVEGEEEGEEEEEEEDMSEVFEYVPVFDPVVNWDQTFSARNLDFQALRTDWIDLSCNTSGNLLLPEQEALEVTRVFLKKLNQRSR

SEQ ID NO: 32081 - protein, 37 aa, Homo sapiens
  MAP TO AC006205.7; EXPRESSED IN ADULT LIVER, SIGNAL = 1.2; EXPRESSED IN BRAIN, SIGNAL = 0.89; EXPRESSED IN HELA, SIGNAL = 0.53; EXPRESSED IN LUNG, SIGNAL = 1.2; EXPRESSED IN HEART, SIGNAL = 1.6; EXPRESSED IN BONE MARROW, SIGNAL = 1.3
GGPATFQCSSQRRGSKNPALSPAKIHLIPTSGLLGTL

SEQ ID NO: 32082 - protein, 204 aa, Homo sapiens
  MAP TO AC006445.10; EXPRESSED IN BRAIN, SIGNAL = 1.6; EXPRESSED IN HELA, SIGNAL = 2.8; EXPRESSED IN ADULT LIVER, SIGNAL = 1.3; EXPRESSED IN LUNG, SIGNAL = 1.5; EXPRESSED IN FETAL LIVER, SIGNAL = 1.4; SWISSPROT HIT: P41891, EVALUE 1.00e-03
VPTPGPSANVANDAMSILETITSLNQEASAARASTETSNAKTSERASKKLPSQPTTDTSTDKERTSEDMADKEKSTADSGGEGLETAPKSEEFSDLPCPVEEIKNYTKEHNNLILLNKDVQQESSEQKNKSTDKGEKKPDSNEKGERKKEKKEKTEKKFDHSKKSEDTQKVKDEKQAKEKEVESLKLPSEKNSNKAKTVEGTKE

SEQ ID NO: 32083 - protein, 207 aa, Homo sapiens
  MAP TO AL136295.2; EXPRESSED IN PLACENTA, SIGNAL = 2.6; EXPRESSED IN ADULT LIVER, SIGNAL = 2.1; EXPRESSED IN BRAIN, SIGNAL = 1.6; EXPRESSED IN HELA, SIGNAL = 1.8; EXPRESSED IN BONE MARROW, SIGNAL = 2.1; EXPRESSED IN LUNG, SIGNAL = 2.2; EXPRESSED IN HEART, SIGNAL = 2.1; SWISSPROT HIT: O15321, EVALUE 1.00e-102
VEQLRQAIEELYYFEFVVDDLPIRGFVGYMEESGFLPHSHKIGLWTHLDFHLEFHGDRIIFANVSVRDVKPHSLDGLRPDEFLGLTHTYSVRWSETSVERRSDRRRGDDGGFFPRTLEIHWLSIINSMVLVFLLVGFVAVILMRVLRNDLARYNLDEETTSAGSGDDFDQGDNGWKIIHTDVFRFPPYRGLLCAVLGVGAQFLALGT

SEQ ID NO: 32084 - protein, 17 aa, Homo sapiens
  MAP TO AL136295.2; EXPRESSED IN PLACENTA, SIGNAL = 2.6; EXPRESSED IN ADULT LIVER, SIGNAL = 2.1; EXPRESSED IN BRAIN, SIGNAL = 1.6; EXPRESSED IN HELA, SIGNAL = 1.8; EXPRESSED IN BONE MARROW, SIGNAL = 2.1; EXPRESSED IN LUNG, SIGNAL = 2.2; EXPRESSED IN HEART, SIGNAL = 2.1
WSSCARPLKNCTTLNLW

SEQ ID NO: 32085 - protein, 51 aa, Homo sapiens
  MAP TO AL136295.2; EXPRESSED IN PLACENTA, SIGNAL = 2.6; EXPRESSED IN ADULT LIVER, SIGNAL = 2.1; EXPRESSED IN BRAIN, SIGNAL = 1.6; EXPRESSED IN HELA, SIGNAL = 1.8; EXPRESSED IN BONE MARROW, SIGNAL = 2.1; EXPRESSED IN LUNG, SIGNAL = 2.2; EXPRESSED IN HEART, SIGNAL = 2.1
CAGLRLQWSVGVTGAVVTMVVSFLEHWKSIGCPSSTPWCLCFYWWVLWLSF

SEQ ID NO: 32086 - protein, 18 aa, Homo sapiens
  MAP TO AC004172.1; EXPRESSED IN FETAL LIVER, SIGNAL = 2.1; EXPRESSED IN BRAIN, SIGNAL = 2.4; EXPRESSED IN ADULT LIVER, SIGNAL = 2.4; EXPRESSED IN HELA, SIGNAL = 7.5; EXPRESSED IN LUNG, SIGNAL = 2.4; EXPRESSED IN HEART, SIGNAL =   2
CQKERRPRRRRWLQPLLS

SEQ ID NO: 32087 - protein, 42 aa, Homo sapiens
  MAP TO AL163636.2; EXPRESSED IN ADULT LIVER, SIGNAL = 1.6; EXPRESSED IN HELA, SIGNAL = 0.73
GSAEDPFIASAFAADPAGAGAGPALLWPGWHVPAIPAATRAP

SEQ ID NO: 32088 - protein, 351 aa, Homo sapiens
  MAP TO L39891.1; EXPRESSED IN ADULT LIVER, SIGNAL = 2.2; EXPRESSED IN PLACENTA, SIGNAL = 4.4; EXPRESSED IN BRAIN, SIGNAL =  11; EXPRESSED IN HEART, SIGNAL = 4.4; EXPRESSED IN BONE MARROW, SIGNAL = 2.6; EXPRESSED IN LUNG, SIGNAL = 3.9; SWISSPROT HIT: P98161, EVALUE 5.00e-99
NLSGNPFECDCGLAWLPRWAEEQQVRVVQPEAATCAGPGSLAGQPLLGIPLLDSGCGECRWVGPALSFPARWDLGPADTGQGSGRPLWGGPPGQGNSMGACECGGRMWGRGVEPGGAEPGVQWLPLLGEEYVACLPDNSSGTVAAVSFSAAHEGLLQPEACSAFCFSTGQGLAALSEQGWCLCGAAQPSSASFACLSLCSGPPPPPAPTCRGPTLLQHVFPASPGATLVGPHGPLASGQLAAFHIAAPLPVTATRWDFGDGSAEVDAAGPAASHRYVLPGRYHVTAVLALGAGSALLGTDVQVEAAPAALELVCPSSVQSDESLDLSIQNRGGSGLEAAYSIVALGEEPAR

SEQ ID NO: 32089 - protein, 31 aa, Homo sapiens
  MAP TO AL121907.2; EXPRESSED IN ADULT LIVER, SIGNAL =   2; EXPRESSED IN BONE MARROW, SIGNAL = 1.9; EXPRESSED IN FETAL LIVER, SIGNAL = 1.3; EXPRESSED IN LUNG, SIGNAL = 1.9
RREGAGGLQHLAQLLGRPRAEVHLCRFPRCP

SEQ ID NO: 32090 - protein, 309 aa, Homo sapiens
  MAP TO AL121907.2; EXPRESSED IN ADULT LIVER, SIGNAL =   2; EXPRESSED IN BONE MARROW, SIGNAL = 1.9; EXPRESSED IN FETAL LIVER, SIGNAL = 1.3; EXPRESSED IN LUNG, SIGNAL = 1.9; SWISSPROT HIT: P42694, EVALUE 7.00e-48
TRAVLRGSSAGHTVGALADSTEAPSKKPMSSSPSRSAADIYIREYFHSHVSGGHPEATPLRVMYTDRPLSQTDPVTLQYCCLTDDRQAFRPPTRAELARHRVVVTTTSQARELRVPVGFFSHILIDEAAQMLECEALTPLAYASHGTRLVLAGDHMQVTPRLFSVARARAAEHTLLHRLFLCYQQETHEVARQSRLVFHENYRCTDAIVSFISRHFYVAKGNPIHARGKVPPHPRHYPLMFCHVAGSPDRDMSMASWLNLAEIAQVVEKVQEAYNTWPSCWGGREQRCICVVSHGAQVSPASPGQPPTA

SEQ ID NO: 32091 - protein, 153 aa, Homo sapiens
  MAP TO AC007263.3; EXPRESSED IN ADULT LIVER, SIGNAL = 2.3; EXPRESSED IN HELA, SIGNAL = 1.7; EXPRESSED IN LUNG, SIGNAL = 3.1; EXPRESSED IN FETAL LIVER, SIGNAL = 1.9
VVEMVVEVVVEMVVVVVVVVVVVEMVVEVVVEMVVVVVEMVVEVVVVVEMVVVVVVVEMVVVVVVEVVVEMVVVVVVEMVVVVVEMVVVVVVVVEEEVVELVLEVVVVVVEEEEVVVVLEVVVVEVVVEEEEEVVVVLEVVVVEVVLEVVVVV

SEQ ID NO: 32092 - protein, 51 aa, Homo sapiens
  MAP TO AL022067.1; EXPRESSED IN ADULT LIVER, SIGNAL = 2.2; EXPRESSED IN PLACENTA, SIGNAL = 2.1; EXPRESSED IN BRAIN, SIGNAL = 1.9; EXPRESSED IN HELA, SIGNAL = 0.35; EXPRESSED IN BONE MARROW, SIGNAL = 2.1; EXPRESSED IN LUNG, SIGNAL = 2.7; EXPRESSED IN HEART, SIGNAL = 2.6; SWISSPROT HIT: P39768, EVALUE 4.30e-01
TPPKERTSTVLTFHPSHQKRTSMTLEDVGAPKCPSTLGSFTPSGPLCQKTF

SEQ ID NO: 32093 - protein, 103 aa, Homo sapiens
  MAP TO AC020757.2; EXPRESSED IN ADULT LIVER, SIGNAL = 1.6; EXPRESSED IN BRAIN, SIGNAL = 1.1; EXPRESSED IN BONE MARROW, SIGNAL = 1.2; EXPRESSED IN PLACENTA, SIGNAL = 1.6; EXPRESSED IN HELA, SIGNAL = 0.51; SWISSPROT HIT: P39210, EVALUE 3.00e-07
MAGWWPALSRAARRHPWPTNVLLYGSLVSAGDALQQRLQGREANWRQTRRVATLVVTFHANFNYVWLRLLERALPGRAPHALLAKLLCDQVVGAPIAVSAFYV

SEQ ID NO: 32094 - protein, 18 aa, Homo sapiens
  MAP TO AC020757.2; EXPRESSED IN ADULT LIVER, SIGNAL = 1.6; EXPRESSED IN BRAIN, SIGNAL = 1.1; EXPRESSED IN BONE MARROW, SIGNAL = 1.2; EXPRESSED IN PLACENTA, SIGNAL = 1.6; EXPRESSED IN HELA, SIGNAL = 0.51
LEGADAGAGCCSAVAAGG

SEQ ID NO: 32095 - protein, 171 aa, Homo sapiens
  MAP TO AH005332.1; EXPRESSED IN ADULT LIVER, SIGNAL = 2.2; EXPRESSED IN HELA, SIGNAL =   2; EXPRESSED IN LUNG, SIGNAL = 2.4; SWISSPROT HIT: P00519, EVALUE 8.00e-74
PLDHEPAVSPLLPRKERGPPEGGLNEDERLLPKDKKTNLFSALIKKKKKTAPTPPKRSSSFREMDGQPERRGAGEEEGRDISNGALAFTPLDTADPAKSPKPSNGAGVPNGALRESGGSGFRSPHLWKKSSTLTSSRLATGEEEGGGSSSKRFLRSCSASCVPHGAKDTEW

SEQ ID NO: 32096 - protein, 18 aa, Homo sapiens
  MAP TO AH005332.1; EXPRESSED IN ADULT LIVER, SIGNAL = 2.2; EXPRESSED IN HELA, SIGNAL =   2; EXPRESSED IN LUNG, SIGNAL = 2.4
CSSGTLPPGFKRFSSVSL

SEQ ID NO: 32097 - protein, 116 aa, Homo sapiens
  MAP TO AL121966.2; EXPRESSED IN ADULT LIVER, SIGNAL = 2.4; EXPRESSED IN HELA, SIGNAL = 3.7; EXPRESSED IN BONE MARROW, SIGNAL = 2.4; EXPRESSED IN LUNG, SIGNAL = 2.1; EXPRESSED IN FETAL LIVER, SIGNAL = 2.3; EXPRESSED IN BRAIN, SIGNAL = 2.4; SWISSPROT HIT: Q61772, EVALUE 8.00e-66
WEEISGLDENYTPIRTYQVCQVMEPNQNNWLRTNWISKGNAQRIFVELKFTLRDCNSLPGVLGTCKETFNLYYYETDYDTGRNIRENLYVKIDTIAADESFTQGDLGERKMKLNTE

SEQ ID NO: 32098 - protein, 48 aa, Homo sapiens
  MAP TO AL121966.2; EXPRESSED IN ADULT LIVER, SIGNAL = 2.4; EXPRESSED IN HELA, SIGNAL = 3.7; EXPRESSED IN BONE MARROW, SIGNAL = 2.4; EXPRESSED IN LUNG, SIGNAL = 2.1; EXPRESSED IN FETAL LIVER, SIGNAL = 2.3; EXPRESSED IN BRAIN, SIGNAL = 2.4; SWISSPROT HIT: Q15375, EVALUE 3.00e-24
VRGTCVSSAEEEAENAPRMHCSAEGEWLVPIGKCICKAGYQQKGDTCE

SEQ ID NO: 32099 - protein, 45 aa, Homo sapiens
  MAP TO AL121966.2; EXPRESSED IN ADULT LIVER, SIGNAL = 2.4; EXPRESSED IN HELA, SIGNAL = 3.7; EXPRESSED IN BONE MARROW, SIGNAL = 2.4; EXPRESSED IN LUNG, SIGNAL = 2.1; EXPRESSED IN FETAL LIVER, SIGNAL = 2.3; EXPRESSED IN BRAIN, SIGNAL = 2.4
GKKLVVWMRTIPRYEHTRCAKSWSPTKTTGCGLTGFPKAMHKGFL

SEQ ID NO: 32100 - protein, 241 aa, Homo sapiens
  MAP TO AC005604.1; EXPRESSED IN PLACENTA, SIGNAL = 3.5; EXPRESSED IN BRAIN, SIGNAL = 1.6; EXPRESSED IN FETAL LIVER, SIGNAL = 2.2; EXPRESSED IN LUNG, SIGNAL = 1.5; EXPRESSED IN HEART, SIGNAL =   2; EXPRESSED IN BONE MARROW, SIGNAL = 1.9; EXPRESSED IN ADULT LIVER, SIGNAL = 1.6; SWISSPROT HIT: O95013, EVALUE 6.00e-67
VTAEAISWNESTSETNNSMVTEFIFLGLSDSQELQTFLFMLFFVFYGGIVFGNLLIVITVVSDSHLHSPMYFLLANLSLIDLSLSSVTAPKMITDFFSQRKVISFKGCLVQIFLLHFFGGSEMVILIAMGFDRYIAICKPLHYTTIMCGNACVGIMAVAWGIGFLHSVSQLAFAVHLPFCGPNEVDSFYCDLPRVIKLACTDTYRLDIMVIANSGVLTVCSFVLLIISYTIILMTIQHCPL

SEQ ID NO: 32101 - protein, 128 aa, Homo sapiens
  MAP TO AC007101.1; EXPRESSED IN BRAIN, SIGNAL = 1.2; EXPRESSED IN LUNG, SIGNAL = 1.2; EXPRESSED IN BONE MARROW, SIGNAL = 1.2; EXPRESSED IN ADULT LIVER, SIGNAL = 1.2; EXPRESSED IN PLACENTA, SIGNAL = 1.5; EXPRESSED IN HELA, SIGNAL = 0.8; SWISSPROT HIT: P15241, EVALUE 6.00e-63
MSCLYSRLSAPCGVRAFSCISACGPRPGRCCITAAPYRGVSCFRGLTGGFGSHSVCGGFRAGSCGRSFGYRSGGVCGPSPPCIATVSVNESLLTPLNLEIDPNAQCVKQEEKEQIKSLNSRFAAFMDK

SEQ ID NO: 32102 - protein, 102 aa, Homo sapiens
  MAP TO AC007101.1; EXPRESSED IN BRAIN, SIGNAL = 1.2; EXPRESSED IN LUNG, SIGNAL = 1.2; EXPRESSED IN BONE MARROW, SIGNAL = 1.2; EXPRESSED IN ADULT LIVER, SIGNAL = 1.2; EXPRESSED IN PLACENTA, SIGNAL = 1.5; EXPRESSED IN HELA, SIGNAL = 0.8
TPASAPPAGSAPSAASRPAGPGPAAAASPPPPTAASPASAASPEASAATACAGASAPAPADAASATAPGACADPAPHASPPCRSTRASSRPSTWRSTPTHSA

SEQ ID NO: 32103 - protein, 36 aa, Homo sapiens
  MAP TO AC004476.1; EXPRESSED IN ADULT LIVER, SIGNAL = 1.2; EXPRESSED IN HELA, SIGNAL = 1.9; EXPRESSED IN LUNG, SIGNAL = 1.2; SWISSPROT HIT: Q9P2N7, EVALUE 7.00e-05
AMFTGGMREASQDVIELKGVSARGLRHIIDFAYSAE

SEQ ID NO: 32104 - protein, 420 aa, Homo sapiens
  MAP TO AC004476.1; EXPRESSED IN ADULT LIVER, SIGNAL = 1.2; EXPRESSED IN HELA, SIGNAL = 1.9; EXPRESSED IN LUNG, SIGNAL = 1.2; SWISSPROT HIT: Q9P2N7, EVALUE 4.00e-92
IAEEEDFLRLPLERLVFFLQSNRLQSCAEIDLFRAAVRWLQHDPARRPRASHVLCHIRFPLMQSSELVDSVQTLDIMVEDVLCRQYLLEAFNYQVLPFRQHEMQSPRTAVRSDVPSLVTFGGTPYTDSDRSVSSKVYQLPEPGARHFRELTEMEVGCSHTCVAVLDNFVYVAGGQHLQYRSGEGAVDACYRYDPHLNRWLRLQAMQESRIQFQLNVLCGMVYATGGRNRAGSLASVERYCPRRNEWGYACSLKRRTWGHAGAASGGRLYISGGYGISVEDKKALHCYDPVADQWEFKAPMSEPRVLHAMVGAGGRIYALGGRMDHVDRCFDVLAVEYYVPETDQWTSVSPMRAGQSEAGCCLLERKIYIVGGYNWRLNNVTGIVQVYNTDTDEWERDLHFPESFAGIACAPVLLPRAGTR

SEQ ID NO: 32105 - protein, 341 aa, Homo sapiens
  MAP TO AL121829.12; EXPRESSED IN ADULT LIVER, SIGNAL = 3.4; EXPRESSED IN PLACENTA, SIGNAL = 3.2; EXPRESSED IN HEART, SIGNAL = 3.5; EXPRESSED IN LUNG, SIGNAL = 3.5; EXPRESSED IN HELA, SIGNAL = 3.9; EXPRESSED IN BRAIN, SIGNAL =   3; EXPRESSED IN BONE MARROW, SIGNAL = 4.2; EXPRESSED IN FETAL LIVER, SIGNAL = 3.4; SWISSPROT HIT: P48193, EVALUE 8.50e+00
MPQPRGGQPAWQLTPSPPPSSRIMSTHVAGLGLDKMKLGNPQSFLDQEEADDQQLLEPEAWKTYTERRNALREFLTSDLSPHLLKRHHARMQLLRKCSYYIEVLPKHLALGDQNPLVLPSALFQLIDPWKFQRMKKVGTAQTKIQLLLLGDLLEQLDHGRAELDALLRSPDPRPFLADWALVERRLADVSAVMDSFLTMMVPGRLHVKHRLVSDVSATKIPHIWLMLSTKMPVVFDRKASAAHQDWARLRWFVTIQPATSEQYELRFRLLDPRTQQECAQCGVIPVAACTFDVRNLLPNRSYKFTIKRAETSTLVYEPWRDSLTLHTKPEPLEGPALSHSV

SEQ ID NO: 32106 - protein, 30 aa, Homo sapiens
  MAP TO AC004409.1; EXPRESSED IN BRAIN, SIGNAL =  18; EXPRESSED IN HELA, SIGNAL =  14; EXPRESSED IN ADULT LIVER, SIGNAL =  17; EXPRESSED IN PLACENTA, SIGNAL =  23; EXPRESSED IN BONE MARROW, SIGNAL =  22; EXPRESSED IN LUNG, SIGNAL =  19; EXPRESSED IN HEART, SIGNAL =  21; EXPRESSED IN FETAL LIVER, SIGNAL =  20
YWKRCLEKWMLEENTGRRICLLLFLVHKMF

SEQ ID NO: 32107 - protein, 318 aa, Homo sapiens
  MAP TO AC004409.1; EXPRESSED IN BRAIN, SIGNAL =  18; EXPRESSED IN HELA, SIGNAL =  14; EXPRESSED IN ADULT LIVER, SIGNAL =  17; EXPRESSED IN PLACENTA, SIGNAL =  23; EXPRESSED IN BONE MARROW, SIGNAL =  22; EXPRESSED IN LUNG, SIGNAL =  19; EXPRESSED IN HEART, SIGNAL =  21; EXPRESSED IN FETAL LIVER, SIGNAL =  20; SWISSPROT HIT: P42566, EVALUE 1.00e-04
ILEEVPGEMDARRKHWKENMFTPFFSAQDVLEETSEPESSSEQTTADSSKGMEEIYNLSSRKFQEESKFKRKKYIFQLNEIEQEQNLRENKRNISKNETDTNSASYESSNVDVTTEESFNSTEDNSTCSTDNLPALLRQDIRKKFMERMSPKLCLNLLNEELEELNMKYRKIEEEFENAEKELLHYKKEIFTKPLNFQETETDASKSDYELQALRNDLSEKATNVKNLSEQLQQAKEVIHKLNLENRNLKEAVRKLKHQTEVGNVLLKEEMKSYYELEMAKIRGELSVIKNELRTEKTLQARNNRALELLRKYYASSM

SEQ ID NO: 32108 - protein, 60 aa, Homo sapiens
  MAP TO AC008132.26; EXPRESSED IN ADULT LIVER, SIGNAL = 1.4; EXPRESSED IN HELA, SIGNAL = 0.33; EXPRESSED IN HEART, SIGNAL = 1.6
SRAAGGGSRCKRELAHSSAQLPCVPQNLYLAQVVWPWQPGGIQQGPGLCLPSQHEQSRLL

SEQ ID NO: 32109 - protein, 212 aa, Homo sapiens
  MAP TO AL121907.2; EXPRESSED IN ADULT LIVER, SIGNAL = 1.6; EXPRESSED IN PLACENTA, SIGNAL = 1.8; EXPRESSED IN HELA, SIGNAL = 0.33; EXPRESSED IN BRAIN, SIGNAL = 1.8; EXPRESSED IN BONE MARROW, SIGNAL = 2.1; EXPRESSED IN FETAL LIVER, SIGNAL = 1.6; SWISSPROT HIT: P45755, EVALUE 8.70e-01
LEQQCDEHRRRAKELKHKSQHLSNVLMTLTPVSLPPPVKRPRLARATSGPAAMASQVLTQSAQLALGPGVPVPQLTSVPLGKVVSTLPSTVLGKGSLQAPPASSPASPLLGGYTVLASSGSTYPSTVEIHPDASSLTVLSTAAVQDGSTVFKVVSPLQLLTLPGLGPTLQNVAQASPGSSTIVTVPAGAAPGPEEHTATIEVAAMAEDHERK

SEQ ID NO: 32110 - protein, 902 aa, Homo sapiens
  MAP TO AC022515.2; EXPRESSED IN BONE MARROW, SIGNAL = 2.2; EXPRESSED IN LUNG, SIGNAL =   2; EXPRESSED IN HEART, SIGNAL = 2.5; EXPRESSED IN FETAL LIVER, SIGNAL = 2.5; EXPRESSED IN ADULT LIVER, SIGNAL = 2.2; EXPRESSED IN PLACENTA, SIGNAL = 2.5; EXPRESSED IN BRAIN, SIGNAL = 2.1; SWISSPROT HIT: Q05481, EVALUE 1.00e-90
QGLAAAMTEESEETVLYIEHRYVCSECNQLYGSLEEVLMHQNSHVPQQHFELVGVADPGVTVATDTASGTGLYQTLVQESQYQCLECGQLLMSPSQLLEHQELHLKMMAPQEAVPAEPSPKAPPLSSSTIHYECVDCKALFASQELWLNHRQTHLRATPTKAPAPVVLGSPVVLGPPVGQARVAVEHSYRKAEEGGEGATVPSAAATTTEVVTEVELLLYKCSECSQLFQLPADFLEHQATHFPAPVPESQEPALQQEVQASSPAEVPVSQPDPLPASDHSYELRNGEAIGRDRRGRRARRNNSGEAGGAATQELFCSACDQLFLSPHQLQQHLRSHREGVFKCPLCSRVFPSPSSLDQHLGDHSSESHFLCVDCGLAFGTEALLLAHRRAHTPNPLHSCPCGKTFVNLTKFLYHRRTHGVGGVPLPTTPVPPEEPVIGFPEPAPAETGEPEAPEPPVSEETSAGPAAPGTYRCLLCSREFGKALQLTRHQRFVHRLERRHKCSICGKMFKKKSHVRNHLRTHTGERPFPCPDCSKPFNSPANLARHRLTHTGERPYRCGDCGKAFTQSSTLRQHRLVHAQHFPYRCQECGVRFHRPYRLLMHRYHHTGEYPYKCRECPRSFLLRRLLEVHQLVVHAGRQPHRCPSCGAAFPSSLRLREHRCAAAAAQAPRRFECGTCGKKVGSAARLQAHEAAHAAAGPGEVLAKEPPAPRAPRATRAPVASPAALGSTATASPAAPARRRGLECSECKKLFSTETSLQVHRRIHTGERPYPCPDCGKAFRQSTHLKDHRRLHTGERPFACEVCGKAFAISMRLAEHRRIHTGERPYSCPDCGKSYRSFSNLWKHRKTHQQQHQAAVRQQLAEAEAAVGLAVMETAVEALPLVEAIEIYPLAEAEGVQISG

SEQ ID NO: 32111 - protein, 111 aa, Homo sapiens
  MAP TO AC005020.1; EXPRESSED IN ADULT LIVER, SIGNAL = 2.8; EXPRESSED IN PLACENTA, SIGNAL = 2.9; EXPRESSED IN HELA, SIGNAL = 3.2; EXPRESSED IN LUNG, SIGNAL = 3.2; EXPRESSED IN BRAIN, SIGNAL = 2.8; EXPRESSED IN BONE MARROW, SIGNAL = 3.6; EXPRESSED IN HEART, SIGNAL = 3.1; EXPRESSED IN FETAL LIVER, SIGNAL =   3; SWISSPROT HIT: Q63627, EVALUE 5.70e+00
MDSLVSDQPLPFAEPLPAHLAPIWLLASVGTPVHRQIGIPAEALATLAGVGLLPGVRPPVHLQVLPAAEALPAVPALVGLLPSVAALVHLQVVSLAEGFPALAAHVGPLSQ

SEQ ID NO: 32112 - protein, 71 aa, Homo sapiens
  MAP TO AC003038.1; EXPRESSED IN ADULT LIVER, SIGNAL = 1.2; EXPRESSED IN BRAIN, SIGNAL = 1.2; EXPRESSED IN HELA, SIGNAL = 1.4; EXPRESSED IN BONE MARROW, SIGNAL = 1.4; EXPRESSED IN HEART, SIGNAL = 1.2
CSVTSRSLWPALAPRRCQHTSPASATSANRTRPAASSRPRRGPTPSSSLPGSWPLQVTRAFCSSPSMPCRC

SEQ ID NO: 32113 - protein, 191 aa, Homo sapiens
  MAP TO AC003038.1; EXPRESSED IN ADULT LIVER, SIGNAL = 1.2; EXPRESSED IN BRAIN, SIGNAL = 1.2; EXPRESSED IN HELA, SIGNAL = 1.4; EXPRESSED IN BONE MARROW, SIGNAL = 1.4; EXPRESSED IN HEART, SIGNAL = 1.2; SWISSPROT HIT: P30999, EVALUE 3.20e+00
MLSDLQESVASSRPQEVSAYLTRFCDQCKQDKACRFLAAQKGAYPIIFTAWKLATAGDQGLLLQSLNALSVLTDGQPDLLDAQGLQLLVATLTQNADEADLTCSGIRCVRHACLKHEQNRQDLVKAGVLPLLTGAITHHGHHTDVVREACWALRVMTFDDDIRVPFGHAHNHAKMIVQENKGLKVLIEATK

SEQ ID NO: 32114 - protein, 617 aa, Homo sapiens
  MAP TO AC000025.2; EXPRESSED IN LUNG, SIGNAL = 1.1; EXPRESSED IN BONE MARROW, SIGNAL = 1.6; EXPRESSED IN HELA, SIGNAL = 1.2; EXPRESSED IN ADULT LIVER, SIGNAL = 1.2; EXPRESSED IN FETAL LIVER, SIGNAL = 1.2; SWISSPROT HIT: P12036, EVALUE 5.00e-33
KLLEGEECRIGFGPIPFSLPEGLPKIPSVSTHIKVKSEEKIKVVEKSEKETVIVEEQTEETQVTEEVTEEEEKEAKEEEGKEEEGGEEEEAEGGEEETKSPPAEEAASPEKEAKSPVKEEAKSPAEAKSPEKEEAKSPAEVKSPEKAKSPAKEEAKSPPEAKSPEKEEAKSPAEVKSPEKAKSPAKEEAKSPAEAKSPEKAKSPVKEEAKSPAEAKSPVKEEAKSPAEVKSPEKAKSPTKEEAKSPEKAKSPEKEEAKSPEKAKSPVKAEAKSPEKAKSPVKAEAKSPEKAKSPVKEEAKSPEKAKSPVKEEAKSPEKAKSPVKEEAKTPEKAKSPVKEEAKSPEKAKSPEKAKTLDVKSPEAKTPAKEEARSPADKFPEKAKSPVKEEVKSPEKAKSPLKADAKAPEKEIPKKEEVKSPVKEEEKPQEVKVKEPPKKAEEEKAPATPKTEEKKDSKKEEAPKKEAPKPKVEEKKEPAVEKPKESKVEAKKEEAEDKKKVPTPEKEAPAKVEVKEDAKPKEKTEVAKKEPDDAKAKEPSKPAEKKEAAPEKKDTKEEKAKKPEEKPKTEAKAKEDDKTLSKEPSKPKAEKAEKSSSTDQKDSKPPEKATEDKAAKGK

SEQ ID NO: 32115 - protein, 30 aa, Homo sapiens
  MAP TO AL031033.5; EXPRESSED IN LUNG, SIGNAL = 1.6; EXPRESSED IN BONE MARROW, SIGNAL =   2; EXPRESSED IN ADULT LIVER, SIGNAL = 1.6
MEDYEQELCGVEDDFHNQFAAELEVLAELE

SEQ ID NO: 32116 - protein, 183 aa, Homo sapiens
  MAP TO AL031033.5; EXPRESSED IN LUNG, SIGNAL = 1.6; EXPRESSED IN BONE MARROW, SIGNAL =   2; EXPRESSED IN ADULT LIVER, SIGNAL = 1.6
PAPTPTPRPTCCRAVQSRPPMPCPAPAPAARPRAGDPETLEAPLRTPGSASALHRCARSPAPPPGPPPARPRRGRAAAAANGELPRTGRGGCGAGTRPAHPSRSPASATPTNGARRRARRLLIGGARHARGGQCATAAAAREVRSGSSGSRTVWRTTSRSCAASRMISTTSSRPSWRCWQSWK

SEQ ID NO: 32117 - protein, 190 aa, Homo sapiens
  MAP TO AP000503.1; EXPRESSED IN ADULT LIVER, SIGNAL =   2; EXPRESSED IN HELA, SIGNAL = 3.9; EXPRESSED IN BRAIN, SIGNAL = 2.1; EXPRESSED IN HEART, SIGNAL =   2; EXPRESSED IN BONE MARROW, SIGNAL = 2.3; EXPRESSED IN LUNG, SIGNAL = 1.8; SWISSPROT HIT: P26640, EVALUE 2.00e-39
CSWKDPEAEAALELALSITRAVRSLRADYNLTRIRPDCEPQAPMSAPSHCPLSLLWDPVSGSDCLVSCLHGARPHLSPSLAGFLEVADEATGALASAVSGYVQALASAGVVAVLALGAPAPQGCAVALASDRCSIHLQLQGLVDPARELGKLQAKRVEAQRQAQRLRERRAASGYPVKVPLEVQEADEAK

SEQ ID NO: 32118 - protein, 27 aa, Homo sapiens
  MAP TO AP000503.1; EXPRESSED IN ADULT LIVER, SIGNAL =   2; EXPRESSED IN HELA, SIGNAL = 3.9; EXPRESSED IN BRAIN, SIGNAL = 2.1; EXPRESSED IN HEART, SIGNAL =   2; EXPRESSED IN BONE MARROW, SIGNAL = 2.3; EXPRESSED IN LUNG, SIGNAL = 1.8; SWISSPROT HIT: P29400, EVALUE 3.00e+00
HGRPGIGGVGLRAGPGQRRCGGCSGPG

SEQ ID NO: 32119 - protein, 369 aa, Homo sapiens
  MAP TO AJ003147.1; EXPRESSED IN ADULT LIVER, SIGNAL = 1.8; EXPRESSED IN PLACENTA, SIGNAL = 2.3; EXPRESSED IN HELA, SIGNAL = 2.7; EXPRESSED IN BRAIN, SIGNAL = 1.8; EXPRESSED IN HEART, SIGNAL = 2.4; EXPRESSED IN BONE MARROW, SIGNAL = 1.6; EXPRESSED IN FETAL LIVER, SIGNAL = 1.5; SWISSPROT HIT: O95201, EVALUE 0.00e+00
GSSSLAGNDFLFPGAVEVGQRVQTSSVAALGNVKPFRTRAGRVQWGVPQCAQEAACGRSSGPAKDSGQPAEPDRTPDAAPPDPSPTEPQEYRVPEKPNEEEKGAPESGEEGLAPDSEVGRKSYRCEQCGKGFSWHSHLVTHRRTHTGEKPYACTDCGKRFGRSSHLIQHQIIHTGEKPYTCPACRKSFSHHSTLIQHQRIHTGEKPYVCDRCAKRFTRRSDLVTHQGTHTGAKPHKCPICAKCFTQSSALVTHQRTHTGVKPYPCPECGKCFSQRSNLIAHNRTHTGEKPYHCLDCGKSFSHSSHLTAHQRTHRGVRPYACPLCGKSFSRRSNLHRHEKIHTTGPKALAMLMLGAAAAGALATPPPAPT

SEQ ID NO: 32120 - protein, 149 aa, Homo sapiens
  MAP TO AL109612.7; EXPRESSED IN BONE MARROW, SIGNAL = 1.2; EXPRESSED IN FETAL LIVER, SIGNAL = 1.1; EXPRESSED IN ADULT LIVER, SIGNAL = 1.5; EXPRESSED IN HELA, SIGNAL = 0.94; SWISSPROT HIT: Q61483, EVALUE 8.00e-09
INLMNVSETSFVGCVQNTTTEDQLLFGCRLKGMHTVNSKWLSVGTHYFITVMASGPSPCPLGLRLNVTVKQQFCQESLSSEFCSGHGKCLSEAWSKTYSCHCQPPFSGKYCQELDACSFKPCKNNGSCINKRENWDEQAYECVCHPPFT

SEQ ID NO: 32121 - protein, 63 aa, Homo sapiens
  MAP TO AC021092.1; EXPRESSED IN ADULT LIVER, SIGNAL = 3.2; EXPRESSED IN PLACENTA, SIGNAL = 2.6; EXPRESSED IN HELA, SIGNAL = 6.6; EXPRESSED IN LUNG, SIGNAL = 2.8; EXPRESSED IN BONE MARROW, SIGNAL = 3.2; EXPRESSED IN FETAL LIVER, SIGNAL = 2.8; SWISSPROT HIT: Q9UK10, EVALUE 2.00e-31
GKIQMEMETVSESGTHEGLFSHQTWEQISSDLTRFQDSMVNSFQFSKQDDMPCQVDAGLSIIH

SEQ ID NO: 32122 - protein, 32 aa, Homo sapiens
  MAP TO AC021092.1; EXPRESSED IN ADULT LIVER, SIGNAL = 3.2; EXPRESSED IN PLACENTA, SIGNAL = 2.6; EXPRESSED IN HELA, SIGNAL = 6.6; EXPRESSED IN LUNG, SIGNAL = 2.8; EXPRESSED IN BONE MARROW, SIGNAL = 3.2; EXPRESSED IN FETAL LIVER, SIGNAL = 2.8
EARSKWRWRLFQNQEHMKACSVIKPGNKFQVT

SEQ ID NO: 32123 - protein, 25 aa, Homo sapiens
  MAP TO Z69720.1; EXPRESSED IN BONE MARROW, SIGNAL = 1.6; EXPRESSED IN HELA, SIGNAL = 0.93; EXPRESSED IN ADULT LIVER, SIGNAL = 1.4; EXPRESSED IN BRAIN, SIGNAL = 1.3; EXPRESSED IN LUNG, SIGNAL = 1.3; EXPRESSED IN HEART, SIGNAL =   2
CLRISGLPAQALTPSSHHPISRKAS

SEQ ID NO: 32124 - protein, 220 aa, Homo sapiens
  MAP TO Z69720.1; EXPRESSED IN BONE MARROW, SIGNAL = 1.6; EXPRESSED IN HELA, SIGNAL = 0.93; EXPRESSED IN ADULT LIVER, SIGNAL = 1.4; EXPRESSED IN BRAIN, SIGNAL = 1.3; EXPRESSED IN LUNG, SIGNAL = 1.3; EXPRESSED IN HEART, SIGNAL =   2; SWISSPROT HIT: P51525, EVALUE 2.00e-08
EGLLNAPHTDPFFPPPYLREGLLNAPHTDPFFPPPYLREGLLNAPHTDPFFPPPYLREALLNAPGADPFFPPPYLREGLLNAPGADPFFPPPYLREGLLNAPRADPFFPPPYLQEALLNAPRADPFFPPPYLREALLNAPHAGPFFPPPYLREGLLNAPHAGPFFPPPYLREALLNAPHAGPFFPPPYLREALLNAPRADPFFPPPYLREALLNAPPASI

SEQ ID NO: 32125 - protein, 51 aa, Homo sapiens
  MAP TO AL035425.11; EXPRESSED IN LUNG, SIGNAL = 2.3; EXPRESSED IN BONE MARROW, SIGNAL = 2.5; EXPRESSED IN FETAL LIVER, SIGNAL = 2.4; EXPRESSED IN ADULT LIVER, SIGNAL = 2.1; EXPRESSED IN PLACENTA, SIGNAL = 2.6; EXPRESSED IN HELA, SIGNAL = 2.6; EXPRESSED IN BRAIN, SIGNAL = 2.3
MSAVGVPEERSGVVTTAARAAAAAAAAPLSLLVAWSRVKEQLAMVMHDGFK

SEQ ID NO: 32126 - protein, 274 aa, Homo sapiens
  MAP TO AB003151.1; EXPRESSED IN PLACENTA, SIGNAL = 6.3; EXPRESSED IN HELA, SIGNAL = 9.1; EXPRESSED IN ADULT LIVER, SIGNAL = 5.8; EXPRESSED IN BRAIN, SIGNAL = 5.5; EXPRESSED IN BONE MARROW, SIGNAL = 4.9; EXPRESSED IN LUNG, SIGNAL = 4.7; EXPRESSED IN HEART, SIGNAL = 7.8; SWISSPROT HIT: Q9Y316, EVALUE 0.00e+00
PQLNAQLEGWLSQVQSTKRPARAIIAPHAGYTYCGSCAAHAYKQVDPSITRRIFILGPSHHVPLSRCALSSVDIYRTPLYDLRIDQKIYGELWKTGMFERMSLQTDEDERSIEMHLPYTAKAMESHKDEFTIIPLLVGALSQKNRNSELFSKYLADPSNLFVVSSDFCHWGQRFRHSYYDESQGEICRSIEHLDKMGMSIIEQLDPVSFSNYLKKYHNTICGRHPIGVLLNAITELQKNGMNMSFSFLNYAQSSQCRNWQDSSVSYAAGALTVH

SEQ ID NO: 32127 - protein, 184 aa, Homo sapiens
  MAP TO AC008103.7; EXPRESSED IN ADULT LIVER, SIGNAL = 6.2; EXPRESSED IN HELA, SIGNAL =  13; EXPRESSED IN LUNG, SIGNAL = 5.7; EXPRESSED IN BONE MARROW, SIGNAL = 6.7; EXPRESSED IN FETAL LIVER, SIGNAL = 5.8; SWISSPROT HIT: P10266, EVALUE 8.00e-99
QNTDLVEWSFLPHSTVKTFTLYLDQMATLIGQTRLRIIKLCGNDQDKIVVPLTKEQVRQAFINSGAWQIGLANFVGIIDNHYPKTKIFQFLKLTTWILPKITRREPLENALTVFTDGSSNGKAAYTGPKERVIKTPYQSAQRAELVAVITVLQDFDQPINIISDSAYVVQATRDVETALIKYSM

SEQ ID NO: 32128 - protein, 116 aa, Homo sapiens
  MAP TO AF186193.1; EXPRESSED IN BRAIN, SIGNAL = 1.7; EXPRESSED IN HELA, SIGNAL =   1; EXPRESSED IN ADULT LIVER, SIGNAL = 1.6; EXPRESSED IN BONE MARROW, SIGNAL = 1.9; EXPRESSED IN FETAL LIVER, SIGNAL = 2.3; SWISSPROT HIT: P33533, EVALUE 4.00e+00
PGRQDCRAPCGGASPGGTLWGGTLHHPTRMAVLRTGQINPPTPGLGSTPPPQGFCRKTWAGLWGTQPPATGACAARRSDTTRCFSGTRSSTPAPSPSSAQSAGRPSSKAPSCCGTS

SEQ ID NO: 32129 - protein, 32 aa, Homo sapiens
  MAP TO AC004761.1; EXPRESSED IN LUNG, SIGNAL = 1.7; EXPRESSED IN HEART, SIGNAL = 1.7; EXPRESSED IN ADULT LIVER, SIGNAL = 1.6; EXPRESSED IN BRAIN, SIGNAL = 1.8; EXPRESSED IN HELA, SIGNAL = 2.1; EXPRESSED IN FETAL LIVER, SIGNAL = 2.2
VEATLELGNRQRLEQFGGIRRRQENVGKFGTS

SEQ ID NO: 32130 - protein, 168 aa, Homo sapiens
  MAP TO AL121774.3; EXPRESSED IN BONE MARROW, SIGNAL = 5.4; EXPRESSED IN ADULT LIVER, SIGNAL = 3.4; EXPRESSED IN PLACENTA, SIGNAL = 3.5; EXPRESSED IN HELA, SIGNAL = 7.6; EXPRESSED IN BRAIN, SIGNAL = 3.8; EXPRESSED IN HEART, SIGNAL = 4.3; EXPRESSED IN LUNG, SIGNAL = 4.2; EXPRESSED IN FETAL LIVER, SIGNAL = 4.6; SWISSPROT HIT: P11277, EVALUE 6.00e-93
YQPCDPQVIQDRISHLEQCFEELSNMAAGRKAQLEQSKRLWKFFWEMDEAESWIKEKEQIYSSLDYGKDLTSVLILQRKHKAFEDELRGLDAHLEQIFQEAHGMVARKQFGHPQIEARIKEVSAQWDQLKDLAAFCKKNLQDAENFFQFQGDADDLKAWLQDAHRLLS

SEQ ID NO: 32131 - protein, 70 aa, Homo sapiens
  MAP TO AL121774.3; EXPRESSED IN BONE MARROW, SIGNAL = 5.4; EXPRESSED IN ADULT LIVER, SIGNAL = 3.4; EXPRESSED IN PLACENTA, SIGNAL = 3.5; EXPRESSED IN HELA, SIGNAL = 7.6; EXPRESSED IN BRAIN, SIGNAL = 3.8; EXPRESSED IN HEART, SIGNAL = 4.3; EXPRESSED IN LUNG, SIGNAL = 4.2; EXPRESSED IN FETAL LIVER, SIGNAL = 4.6; SWISSPROT HIT: P11277, EVALUE 3.00e-35
VTHRLQALRELYQQVVAQADLRQQRLQEALDLYTVFGETDACELWMGEKEKWLAEMEMPDTLEDLEVVQH

SEQ ID NO: 32132 - protein, 22 aa, Homo sapiens
  MAP TO AL121774.3; EXPRESSED IN BONE MARROW, SIGNAL = 5.4; EXPRESSED IN ADULT LIVER, SIGNAL = 3.4; EXPRESSED IN PLACENTA, SIGNAL = 3.5; EXPRESSED IN HELA, SIGNAL = 7.6; EXPRESSED IN BRAIN, SIGNAL = 3.8; EXPRESSED IN HEART, SIGNAL = 4.3; EXPRESSED IN LUNG, SIGNAL = 4.2; EXPRESSED IN FETAL LIVER, SIGNAL = 4.6
GSWAEGPTGAVQTTLEVLLGDG

SEQ ID NO: 32133 - protein, 355 aa, Homo sapiens
  MAP TO AC020667.3; EXPRESSED IN PLACENTA, SIGNAL = 4.5; EXPRESSED IN HELA, SIGNAL = 2.4; EXPRESSED IN BRAIN, SIGNAL = 1.4; EXPRESSED IN BONE MARROW, SIGNAL = 2.1; EXPRESSED IN ADULT LIVER, SIGNAL = 2.2; SWISSPROT HIT: P42223, EVALUE 6.00e-01
HPSPEPPALFPHPPHTPDPLACSPPPPKGFTAPPLRDSTLITPSHCDSVALPLGTVPQSLSPHEDLVASVPAISGLGGSNSHVSASSRWQETARTSCAFNSSVQQDPLSRHPPETCQMEAGSLFLLSSDGQNVVGIQVTETAKVNIWEEKENVGSFTNQMTPEKHLNSLGNLAKSLDAEQDTTNPKPFWNMGENSKQLPGPQKCSDPRLLQESFWKNYSQLFWGLPSLHSESLVANAWVTDRSYTLQSPPFLFNEMSNVCPIQRETTMSPLLFQAQPLSHRQPFISSTPQFLPTPMAQAEAQAHLQSSFPVLSPAFPSLIKNTGVACPASQNKVQALSLPETQHPEWPLLRKQLE

SEQ ID NO: 32134 - protein, 40 aa, Homo sapiens
  MAP TO AC020667.3; EXPRESSED IN PLACENTA, SIGNAL = 4.5; EXPRESSED IN HELA, SIGNAL = 2.4; EXPRESSED IN BRAIN, SIGNAL = 1.4; EXPRESSED IN BONE MARROW, SIGNAL = 2.1; EXPRESSED IN ADULT LIVER, SIGNAL = 2.2
NTPHPSHLHFSLTHHTPLILWPALRLLQKASLLLPCGTPH

SEQ ID NO: 32135 - protein, 233 aa, Homo sapiens
  MAP TO AL138848.2; EXPRESSED IN LUNG, SIGNAL = 9.3; EXPRESSED IN HEART, SIGNAL =  17; EXPRESSED IN PLACENTA, SIGNAL =  14; EXPRESSED IN BRAIN, SIGNAL = 6.5; EXPRESSED IN ADULT LIVER, SIGNAL = 9.7; EXPRESSED IN HELA, SIGNAL =  24; SWISSPROT HIT: P15880, EVALUE 1.00e-123
MPVTKLGCLVKDMKIKSLEEIYLFSLPIKESEIIDFFLGASLKDEVLKIMPVQTQTRAGQRTRFKAFVAIGDYNGHVGLGVKCSKEVATAIHGAIILAKLSIVPVRRGYWGNKIGKPHTVPCKVTGRCGSALVHLIPVPRGTGIVSAPVPKKLLMMAGIDDCCTSAWGCTATLGNFAKATFDAISKTYSYLTPDLWKETVFTKSPDQEFTDHLIKAHARVSVQRTQAPAVATT

SEQ ID NO: 32136 - protein, 51 aa, Homo sapiens
  MAP TO AL138848.2; EXPRESSED IN LUNG, SIGNAL = 9.3; EXPRESSED IN HEART, SIGNAL =  17; EXPRESSED IN PLACENTA, SIGNAL =  14; EXPRESSED IN BRAIN, SIGNAL = 6.5; EXPRESSED IN ADULT LIVER, SIGNAL = 9.7; EXPRESSED IN HELA, SIGNAL =  24
WGTAVASAEVSAVASGAGVAAVDGAGAEAAELAEARPRIRSGCPSPSWAAW

SEQ ID NO: 32137 - protein, 180 aa, Homo sapiens
  MAP TO U75931.1; EXPRESSED IN BONE MARROW, SIGNAL = 1.5; EXPRESSED IN LUNG, SIGNAL = 1.4; EXPRESSED IN BRAIN, SIGNAL = 1.2; EXPRESSED IN HELA, SIGNAL = 1.3; EXPRESSED IN ADULT LIVER, SIGNAL = 1.4
EEEEGEREEEGERRRRKEKEGGRRGRRKKEEEEGERRRRRKEKEGGGGRRKKEEEEGERRRRRKEKEGGGGRRKKEEEEGERRRRRKEKEGGGGRRKKEEEEGERRRRRKEKEGGGRRKKEEEEGERRRRKEKGGGGRRKKEEEGGERRRRRKEKEEGGERRRRRRKEKEEGGGERRRRR

SEQ ID NO: 32138 - protein, 375 aa, Homo sapiens
  MAP TO AJ011930.1; EXPRESSED IN BRAIN, SIGNAL = 1.6; EXPRESSED IN HELA, SIGNAL = 2.7; EXPRESSED IN ADULT LIVER, SIGNAL = 1.4; EXPRESSED IN LUNG, SIGNAL = 1.5; EXPRESSED IN HEART, SIGNAL = 1.7; EXPRESSED IN BONE MARROW, SIGNAL = 1.7; SWISSPROT HIT: P02440, EVALUE 2.00e-03
MAASTMSVCSSDLSYGSRVCLPGSCDSCSDSWQVDDCPESCCEPPCCAPSCCAPAPCLSLVCTPVSRVSSPCCPVTCEPSPCQSGCTSSCTPSCCQQSSCQLACCASSPCQQACCMPVCCKTVCCKPVYCVPVCSGDSSCCQQSSCQSACCTSSPCQQACCVPICCKPVCSGISSSCCQQSSCVSCVSSPCCQAVCEPSPCQSGCISSCTPSCCQQSSCQPACCTSSPCQQACCVPVCCKPVCCVPTCSDDSGSCCQPACCTSSQSQQGCCVPVCCKPVCCVPVCSGASSSCCQQSSCQPACCTTSCCRPSSSVSLLCRPVCRPTCCVPVPSCCAPTSSCQASCCRPASCVSLLCRPACSRPACCGPTSTQKSSC

SEQ ID NO: 32139 - protein, 155 aa, Homo sapiens
  MAP TO AL009049.1; EXPRESSED IN PLACENTA, SIGNAL = 2.1; EXPRESSED IN HELA, SIGNAL =   3; EXPRESSED IN HEART, SIGNAL = 1.4; EXPRESSED IN LUNG, SIGNAL = 1.6; EXPRESSED IN BONE MARROW, SIGNAL = 1.7; EXPRESSED IN FETAL LIVER, SIGNAL = 1.7; EXPRESSED IN ADULT LIVER, SIGNAL = 1.3; SWISSPROT HIT: P15265, EVALUE 2.00e-07
MCSLPRMCPLPRMCPLPRMCSLPRMCSLPRMCPLPRMCSLPRMCPLPRMCSLPRMCSLPRMCPLPRMCSLPRMCPLPRMCSLPRMCPLPRMCSLPRMCSLPRMCPLPRMCPLPRMCPLPQMCPLPRMCSLPRMCSLPRMCSLPQRCSLSQVCSLS

SEQ ID NO: 32140 - protein, 374 aa, Homo sapiens
  MAP TO AL133392.1; EXPRESSED IN ADULT LIVER, SIGNAL = 1.7; EXPRESSED IN PLACENTA, SIGNAL = 1.7; EXPRESSED IN BRAIN, SIGNAL = 1.2; EXPRESSED IN HELA, SIGNAL = 1.1; EXPRESSED IN LUNG, SIGNAL = 1.9; EXPRESSED IN HEART, SIGNAL = 1.7; EXPRESSED IN BONE MARROW, SIGNAL =   2; EXPRESSED IN FETAL LIVER, SIGNAL = 1.2; SWISSPROT HIT: P32927, EVALUE 0.00e+00
VFPVGFGDSEVSPLTIEDPKHVCDPPSGPDTTPAASDLPTEQPPSPQPGPPAASHTPEKQASSFDFNGPYLGPPHSRSLPDILGQPEPPQEGGSQKSPPPGSLEYLCLPAGGQVQLVPLAQAMGPGQAVEVERRPSQGAAGSPSLESGGGPAPPALGPRVGGQDQKDSPVAIPMSSGDTEDPGVASGYVSSADLVFTPNSGASSVSLVPSLGLPSDQTPSLCPGLASGPPGAPGPVKSGFEGYVELPPIEGRSPRSPRNNPVPPEAKSPVLNPGERPADVSPTSPQPEGLLVLQQVGDYCFLPGLGPGPLSLRSKPSSPGPGPEIKNLDQAFQVKKPPGQAVPQVPVIQLFKALKQQDYLSLPPWEVNKPGEVC

SEQ ID NO: 32141 - protein, 195 aa, Homo sapiens
  MAP TO AC003110.1; EXPRESSED IN LUNG, SIGNAL =   2; EXPRESSED IN HEART, SIGNAL = 1.8; EXPRESSED IN ADULT LIVER, SIGNAL = 1.8; EXPRESSED IN BRAIN, SIGNAL = 2.5; EXPRESSED IN HELA, SIGNAL = 3.5; EXPRESSED IN BONE MARROW, SIGNAL = 2.1; EXPRESSED IN FETAL LIVER, SIGNAL =   2; SWISSPROT HIT: P55066, EVALUE 4.00e-44
HHPTSQHGDLETPSSGDEGEILSAEGPPVRELEPTLEEEEVVTPDFQEPLVSSGEEETLILEEKQESQQTLSPTPGDPMLASWPTGEVWLSTVAPSPSDMGAGTAASSHTEVAPTDPMPRRRGRFKGLNGRYFQQQEPEPGLQGGMEASAQPPTSEAAVNQMEPPLAMAVTEMLGSGQSRSPWADLTNEVDMPGA

SEQ ID NO: 32142 - protein, 305 aa, Homo sapiens
  MAP TO Z82216.1; EXPRESSED IN ADULT LIVER, SIGNAL = 1.2; EXPRESSED IN HELA, SIGNAL = 2.9; EXPRESSED IN LUNG, SIGNAL = 1.3; EXPRESSED IN HEART, SIGNAL = 1.6; SWISSPROT HIT: O62836, EVALUE 0.00e+00
VIIGPDGQPLTVYPCHICTKKFKSRGFLKRHMKNHPDHLMRKKYQCTDCDFTTNKKVSFHNHLESHKLINKVDKTHEFTEYTRRYREASPLSSNKLILRDKEPKMHKCKYCDYETAEQGLLNRHLLAVHSKNFPHVCVECGKGFRHPSELKKHMRTHTGEKPYQCQYCIFRCADQSNLKTHIKSKHGNNLPYKCEHCPQAFGDERELQRHLDLFQGHKTHQCPHCDHKSTNSSDLKRHIISVHTKDFPHKCEVCDKGFHRPSELKKHSDIHKGRKIHQCRHCDFKTSDPFILSGHILSVHTKDQP

SEQ ID NO: 32143 - protein, 63 aa, Homo sapiens
  MAP TO Z98883.3; EXPRESSED IN ADULT LIVER, SIGNAL = 1.8; EXPRESSED IN HELA, SIGNAL = 0.8; EXPRESSED IN BONE MARROW, SIGNAL = 4.5; EXPRESSED IN LUNG, SIGNAL = 1.7; EXPRESSED IN HEART, SIGNAL = 2.1; EXPRESSED IN PLACENTA, SIGNAL = 1.9; SWISSPROT HIT: O43451, EVALUE 2.00e-03
KRQTHSPEGGAGTGPRGAPGPETRDAPGPETRGAPGPETRGAPGPETRGAPGPETRGAPGPET

SEQ ID NO: 32144 - protein, 35 aa, Homo sapiens
  MAP TO AC002988.1; EXPRESSED IN BRAIN, SIGNAL = 2.6; EXPRESSED IN FETAL LIVER, SIGNAL = 3.4; EXPRESSED IN HEART, SIGNAL = 2.6; EXPRESSED IN BONE MARROW, SIGNAL = 2.8; EXPRESSED IN LUNG, SIGNAL = 2.5; EXPRESSED IN ADULT LIVER, SIGNAL = 2.6; EXPRESSED IN PLACENTA, SIGNAL = 4.5
MSAKDRLERKKYMGVWRWESEIVARMMSRFPSTVT

SEQ ID NO: 32145 - protein, 50 aa, Homo sapiens
  MAP TO AP001759.1; EXPRESSED IN FETAL LIVER, SIGNAL = 1.4; EXPRESSED IN BONE MARROW, SIGNAL = 1.2; EXPRESSED IN HELA, SIGNAL = 1.3; EXPRESSED IN BRAIN, SIGNAL =   1; EXPRESSED IN ADULT LIVER, SIGNAL = 1.7; SWISSPROT HIT: P12110, EVALUE 8.00e-24
KTDCPIHVYFVLDTSESVTMQSPTDILLFHMKQFVPQFISQLQNEFYLDQ

SEQ ID NO: 32146 - protein, 44 aa, Homo sapiens
  MAP TO AP001759.1; EXPRESSED IN FETAL LIVER, SIGNAL = 1.4; EXPRESSED IN BONE MARROW, SIGNAL = 1.2; EXPRESSED IN HELA, SIGNAL = 1.3; EXPRESSED IN BRAIN, SIGNAL =   1; EXPRESSED IN ADULT LIVER, SIGNAL = 1.7; SWISSPROT HIT: P12110, EVALUE 8.00e-19
NLKEQGLRDIASTPHELYRNDYATMLPDSTEIDQDTINRIIKVM

SEQ ID NO: 32147 - protein, 36 aa, Homo sapiens
  MAP TO AP001759.1; EXPRESSED IN FETAL LIVER, SIGNAL = 1.4; EXPRESSED IN BONE MARROW, SIGNAL = 1.2; EXPRESSED IN HELA, SIGNAL = 1.3; EXPRESSED IN BRAIN, SIGNAL =   1; EXPRESSED IN ADULT LIVER, SIGNAL = 1.7
SCAPQRRPTAPSTCTSCWTPRRASPCSPPRTSCSST

SEQ ID NO: 32148 - protein, 63 aa, Homo sapiens
  MAP TO AP001759.1; EXPRESSED IN FETAL LIVER, SIGNAL = 1.4; EXPRESSED IN BONE MARROW, SIGNAL = 1.2; EXPRESSED IN HELA, SIGNAL = 1.3; EXPRESSED IN BRAIN, SIGNAL =   1; EXPRESSED IN ADULT LIVER, SIGNAL = 1.7; SWISSPROT HIT: P07566, EVALUE 3.20e-01
EDRLPHPRVLRAGHLGERHHAVPHGHPALPHEAVRAAVHQPAAERVLPGPGGAELALRRPALL

SEQ ID NO: 32149 - protein, 170 aa, Homo sapiens
  MAP TO AC004927.2; EXPRESSED IN ADULT LIVER, SIGNAL = 2.3; EXPRESSED IN PLACENTA, SIGNAL = 3.4; EXPRESSED IN BRAIN, SIGNAL = 2.1; EXPRESSED IN HEART, SIGNAL =   4; EXPRESSED IN BONE MARROW, SIGNAL = 2.2; EXPRESSED IN FETAL LIVER, SIGNAL = 1.7; EXPRESSED IN HELA, SIGNAL = 1.4; EXPRESSED IN LUNG, SIGNAL = 2.4
SARGWLGSGPRSACGRLPLPPVHSSSELHRRPPRAPWLDGSRRGRRLRGGPLLRTSLPDCAERASSRRSQLSERDFLGAPSPSRRCHRPSSVPPRAPRPSPPLLSSPAPGRPSGGAVPRRDIDSCCSPRGSSPRLPPAAFLAGGRGGNCTAPRPPRSCRFQDCAMAGKGH

SEQ ID NO: 32150 - protein, 43 aa, Homo sapiens
  MAP TO AC006501.5; EXPRESSED IN ADULT LIVER, SIGNAL =   2; EXPRESSED IN HELA, SIGNAL = 1.7; EXPRESSED IN BRAIN, SIGNAL = 1.6; EXPRESSED IN FETAL LIVER, SIGNAL = 2.7; EXPRESSED IN BONE MARROW, SIGNAL = 1.7; EXPRESSED IN LUNG, SIGNAL =   2; SWISSPROT HIT: P33349, EVALUE 8.40e+00
DFPDNKDIHSDLHAYVQHRVHSSQDILSNISLNGKADATLIGK

SEQ ID NO: 32151 - protein, 96 aa, Homo sapiens
  MAP TO AC006501.5; EXPRESSED IN ADULT LIVER, SIGNAL =   2; EXPRESSED IN HELA, SIGNAL = 1.7; EXPRESSED IN BRAIN, SIGNAL = 1.6; EXPRESSED IN FETAL LIVER, SIGNAL = 2.7; EXPRESSED IN BONE MARROW, SIGNAL = 1.7; EXPRESSED IN LUNG, SIGNAL =   2; SWISSPROT HIT: Q23445, EVALUE 4.70e+00
CNMKFMTQSAFERALPILNVALASLHPMTDEQIFQAINAGHIQGEQGWEDFQQRMDALSCFLIKRRDKTRMFCHPSFREWLVWRADGENTAFLCEP

SEQ ID NO: 32152 - protein, 30 aa, Homo sapiens
  MAP TO AC006501.5; EXPRESSED IN ADULT LIVER, SIGNAL =   2; EXPRESSED IN HELA, SIGNAL = 1.7; EXPRESSED IN BRAIN, SIGNAL = 1.6; EXPRESSED IN FETAL LIVER, SIGNAL = 2.7; EXPRESSED IN BONE MARROW, SIGNAL = 1.7; EXPRESSED IN LUNG, SIGNAL =   2
SQTTKTSTVTCTPTSSTGCTAARTSSATSP

SEQ ID NO: 32153 - protein, 400 aa, Homo sapiens
  MAP TO AC009086.5; EXPRESSED IN HEART, SIGNAL = 1.7; EXPRESSED IN LUNG, SIGNAL = 1.7; EXPRESSED IN BONE MARROW, SIGNAL = 3.2; EXPRESSED IN FETAL LIVER, SIGNAL = 1.7; EXPRESSED IN HELA, SIGNAL = 1.5; EXPRESSED IN ADULT LIVER, SIGNAL = 1.4; SWISSPROT HIT: P16150, EVALUE 0.00e+00
MATLLLLLGVLVVSPDALGSTTAVQTPTSGEPLVSTSEPLSSKMYTTSITSDPKADSTGDQTSALPPSTSINEGSPLWTSIGASTGSPLPEPTTYQEVSIKMSSVPQETPHATSHPAVPITANSLGSHTVTGGTITTNSPETSSRTSGAPVTTAASSLETSRGTSGPPLTMATVSLETSKGTSGPPVTMATDSLETSTGTTGPPVTMTTGSLEPSSGASGPQVSSVKLSTMMSPTTSTNASTVPFRNPDENSRGMLPVAVLVALLAVIVLVALLLLWRRRQKRRTGALVLSRGGKRNGVVDAWAGPAQVPEEGAVTVTVGGSGGDKGSGFPDGEGSSRRPTLTTFFGRRKSRQGSLAMEELKSGSGPSLKGEEEPLVASEDGAVDAPAPDEPEGGDGAAP

SEQ ID NO: 32154 - protein, 297 aa, Homo sapiens
  MAP TO AL078611.1; EXPRESSED IN HELA, SIGNAL = 0.5; EXPRESSED IN ADULT LIVER, SIGNAL = 1.2; EXPRESSED IN HEART, SIGNAL = 1.3; EXPRESSED IN LUNG, SIGNAL = 0.98; EXPRESSED IN BONE MARROW, SIGNAL =   1; SWISSPROT HIT: Q13563, EVALUE 5.00e-10
MQRIHDQIVRIRGTRMYQPLTEDEIRIFKRKKRIKRRALLFLSYILTHFIFLALLLILIVLLRHTDCFYYNQFIRDRFSMDLATVTKLEDIYRWLNSVLLPLLHNDLNPTFLPESSSKILGLPLMRQVRAKSSEKMCLPAEKFVQNSIRREIHCHPKYGIDPEDTKNYSGFWNEVDKQAIDESTNGFTYKPQGTQWLYYSYGLLHTYGSGGYALYFFPEQQRFNSTLRLKELQESNWLDEKTWAVVLELTTFNPDINLFCSISVIFEVSQLGVVNTSISLHSFSLADFDRKASAEIY

SEQ ID NO: 32155 - protein, 179 aa, Homo sapiens
  MAP TO AL078611.1; EXPRESSED IN HELA, SIGNAL = 0.5; EXPRESSED IN ADULT LIVER, SIGNAL = 1.2; EXPRESSED IN HEART, SIGNAL = 1.3; EXPRESSED IN LUNG, SIGNAL = 0.98; EXPRESSED IN BONE MARROW, SIGNAL =   1; SWISSPROT HIT: O35245, EVALUE 7.00e-07
KHFLATGIIRFYLSNPEDFIPFHAVSQVDHIMRIILGFLLFLTILKTLRYSRFFYDVRLAQRAIQAALPGICHMAFVVSVYFFVYMAFGYLVFGQHEWNYSNLIHSTQTVFSYCVSAFQNTEFSNNRILGVLFLSSFMLVMICVLINLFQAVILSAYEEMKQPVYEEPSDEVEAMTYLC

SEQ ID NO: 32156 - protein, 313 aa, Homo sapiens
  MAP TO AC005618.1; EXPRESSED IN BONE MARROW, SIGNAL = 1.3; EXPRESSED IN ADULT LIVER, SIGNAL = 1.3; EXPRESSED IN PLACENTA, SIGNAL = 1.5; EXPRESSED IN BRAIN, SIGNAL = 1.4; EXPRESSED IN HELA, SIGNAL = 0.7; EXPRESSED IN LUNG, SIGNAL = 1.4; EXPRESSED IN HEART, SIGNAL = 1.7; SWISSPROT HIT: Q9Y5I4, EVALUE 2.00e-67
MGGSCAQRRRAGPRQVLFPLLLPLFYPTLCEPIRYSIPEELAKGSVVGNLAKDLGLSVLDVSARELRVSAEKLHFSVDAQSGDLLVKDRIDREQICKERRRCELQLEAVVENPLNIFHVIVVIEDVNDHAPQFRKDEINLEISESVSLGMGTILESAEDPDISMNSLSKYQLSPNEYFSLVEKDNPDGGKYPELVLQKTLDRETQSAHHLVLTALDGGDPPRSGTAQIRILVIDANDNPPVFSQDVYRVSLREDVPPGTSILRVKATDQDEGINSEITYSFFGVADKAQHVFSLDYTTGNILTQQPLDFEEVE

SEQ ID NO: 32157 - protein, 255 aa, Homo sapiens
  MAP TO AC008103.27; EXPRESSED IN LUNG, SIGNAL = 1.5; EXPRESSED IN FETAL LIVER, SIGNAL = 1.3; EXPRESSED IN ADULT LIVER, SIGNAL = 1.5; EXPRESSED IN PLACENTA, SIGNAL = 2.4; EXPRESSED IN HELA, SIGNAL = 1.9; EXPRESSED IN HEART, SIGNAL = 1.5; EXPRESSED IN BONE MARROW, SIGNAL = 1.6; SWISSPROT HIT: P10264, EVALUE 0.00e+00
QNEAIEQVRAICLRAWEKIQDPGSACPSFNTVRQGSKEPYPDFVARLQDVAQKSIADEKARKVIVELMAYENANPECQSAIKPLKGKVPAGSDVISEYVKACDGIGGAMHKAMLMAQAITGVVLGGQVRTFGGKCYNCGQIGHLKKNCPVLNKQNITIQATTTGREPPDLCPRCKKGKHWASQCRSKFDKNGQPLSGNEQRGQPQAPQQTGAFPIQPFVPQGFQGQQPPLSQVFQGISQLPQYNNCPLPQAAVQQ

SEQ ID NO: 32158 - protein, 358 aa, Homo sapiens
  MAP TO AJ010770.1; EXPRESSED IN BONE MARROW, SIGNAL = 1.2; EXPRESSED IN LUNG, SIGNAL = 1.2; EXPRESSED IN FETAL LIVER, SIGNAL = 1.2; EXPRESSED IN HEART, SIGNAL = 1.5; EXPRESSED IN ADULT LIVER, SIGNAL = 1.3; EXPRESSED IN PLACENTA, SIGNAL = 1.4; EXPRESSED IN BRAIN, SIGNAL = 1.2; EXPRESSED IN HELA, SIGNAL = 1.7; SWISSPROT HIT: Q99996, EVALUE 0.00e+00
VIEEKNELIRDLETQIECLMSDQECVKRNREEEIEQLNEVIEKLQQELANIGQKTSMNAHSLSEEADSLKHQLDVVIAEKLALEQQVETANEEMTFMKNVLKETNFKMNQLTQELFSLKRERESVEKIQSIPENSVNVAIDHLSKDKPELEVVLTEDALKSLENQTYFKSFEENGKGSIINLETRLLQLESTVSAKDLELTQCYKQIKDMQEQGQFETEMLQKKIVNLQKIVEEKVAAALVSQIQLEAVQEYAKFCQDNQTISSEPERTNIQNLNQLREDELGSDISALTLRISELESQVVEMHTSLILEKEQVEIAEKNVLEKEKKLLELQKLLEGNEKKQREKEKKRSPQDVEVLK

SEQ ID NO: 32159 - protein, 128 aa, Homo sapiens
  MAP TO AC012064.1; EXPRESSED IN BRAIN, SIGNAL = 1.1; EXPRESSED IN HELA, SIGNAL = 0.47; EXPRESSED IN ADULT LIVER, SIGNAL = 1.3; EXPRESSED IN PLACENTA, SIGNAL = 1.6; EXPRESSED IN BONE MARROW, SIGNAL = 1.1; EXPRESSED IN HEART, SIGNAL = 2.2; EXPRESSED IN FETAL LIVER, SIGNAL = 0.92; SWISSPROT HIT: Q00657, EVALUE 1.00e-48
DLTFRVSNGLQASPPAMLKVVAVQLAIQIHRSTGLHLAQGSAMPILPTNLLVETSAVGQDVTVLFRVTGGLPFRELQKQGAGGVEDAEWWVTQAFHQQDVEQGHVRYLSTDPQHYTEDTVENLDLQVQ

SEQ ID NO: 32160 - protein, 23 aa, Homo sapiens
  MAP TO AC012064.1; EXPRESSED IN BRAIN, SIGNAL = 1.1; EXPRESSED IN HELA, SIGNAL = 0.47; EXPRESSED IN ADULT LIVER, SIGNAL = 1.3; EXPRESSED IN PLACENTA, SIGNAL = 1.6; EXPRESSED IN BONE MARROW, SIGNAL = 1.1; EXPRESSED IN HEART, SIGNAL = 2.2; EXPRESSED IN FETAL LIVER, SIGNAL = 0.92
TARPASSTMALRTPLTSWCWRCQ

SEQ ID NO: 32161 - protein, 70 aa, Homo sapiens
  MAP TO AC005950.1; EXPRESSED IN ADULT LIVER, SIGNAL = 1.8; EXPRESSED IN PLACENTA, SIGNAL = 4.2; EXPRESSED IN BRAIN, SIGNAL = 2.5; EXPRESSED IN HELA, SIGNAL = 2.5; EXPRESSED IN BONE MARROW, SIGNAL = 2.1; EXPRESSED IN HEART, SIGNAL = 3.1; EXPRESSED IN FETAL LIVER, SIGNAL = 1.9
AGQSGAGPGRGGAVRGSPEIRGPDSFLIAAPLALAAAVPAAGRPEIPECSWSARGSWPRCPWFAPCSALS

SEQ ID NO: 32162 - protein, 198 aa, Homo sapiens
  MAP TO AC000384.1; EXPRESSED IN BRAIN, SIGNAL = 2.8; EXPRESSED IN HELA, SIGNAL = 5.5; EXPRESSED IN ADULT LIVER, SIGNAL = 3.4; EXPRESSED IN PLACENTA, SIGNAL = 1.8; EXPRESSED IN BONE MARROW, SIGNAL = 3.3; EXPRESSED IN HEART, SIGNAL = 2.3; EXPRESSED IN LUNG, SIGNAL =   3; EXPRESSED IN FETAL LIVER, SIGNAL = 3.1; SWISSPROT HIT: Q9RPF4, EVALUE 3.00e-01
VVPRVFGRMVGKSREAVAQAMVLEMFREEDYYNDDVLDQMGASILGVEGPRRHPDEPPEDEVFELFPMFMGGLLSAHNRAVLAQLGCPIKNLDALENAQAIKKKLGKLGRQVLPPSELLDHLFFHYEFQNQRFSAEVLSSLRQLNLAGVRMTPVKCTVVAAVLGSGRHALDEVNLASCQLDPAGLRTLLPVFLRARKL

SEQ ID NO: 32163 - protein, 21 aa, Homo sapiens
  MAP TO AC000384.1; EXPRESSED IN BRAIN, SIGNAL = 2.8; EXPRESSED IN HELA, SIGNAL = 5.5; EXPRESSED IN ADULT LIVER, SIGNAL = 3.4; EXPRESSED IN PLACENTA, SIGNAL = 1.8; EXPRESSED IN BONE MARROW, SIGNAL = 3.3; EXPRESSED IN HEART, SIGNAL = 2.3; EXPRESSED IN LUNG, SIGNAL =   3; EXPRESSED IN FETAL LIVER, SIGNAL = 3.1
PGGGGSGHGAGDVSRGGLLQR

SEQ ID NO: 32164 - protein, 175 aa, Homo sapiens
  MAP TO AC004687.1; EXPRESSED IN BRAIN, SIGNAL = 2.3; EXPRESSED IN HELA, SIGNAL = 1.4; EXPRESSED IN ADULT LIVER, SIGNAL = 1.2; EXPRESSED IN BONE MARROW, SIGNAL = 1.3; EXPRESSED IN HEART, SIGNAL = 1.7; SWISSPROT HIT: O15016, EVALUE 2.50e-01
IMEVASPTAGSVLVELSQLQLLQVCREVVVRTMSPHGESADSIPAPITPALAPASLPARVSCPSPHPSPEARAPLASASPGPGDPSSPLQHPAPLGTQEPPGAPPASPSREMAKGSHEDPPAPCSQVPCLGRGEQVQAGRGTWAWVLPQCSLFQEEAGAAVLGTSEERTASTSTL

SEQ ID NO: 32165 - protein, 19 aa, Homo sapiens
  MAP TO AC004687.1; EXPRESSED IN BRAIN, SIGNAL = 2.3; EXPRESSED IN HELA, SIGNAL = 1.4; EXPRESSED IN ADULT LIVER, SIGNAL = 1.2; EXPRESSED IN BONE MARROW, SIGNAL = 1.3; EXPRESSED IN HEART, SIGNAL = 1.7
HGRQCTGGVVPAAAAAGVS

SEQ ID NO: 32166 - protein, 54 aa, Homo sapiens
  MAP TO AJ011930.1; EXPRESSED IN ADULT LIVER, SIGNAL = 1.3; EXPRESSED IN HELA, SIGNAL = 1.5; EXPRESSED IN BONE MARROW, SIGNAL = 1.4; EXPRESSED IN LUNG, SIGNAL = 1.2
AAAGLAGGGRGTTGGDGHAAGGLAHRVAEEGHGGGGSAAGGGAASRLAARLLAA

SEQ ID NO: 32167 - protein, 55 aa, Homo sapiens
  MAP TO Z97986.3; EXPRESSED IN HELA, SIGNAL = 2.1; EXPRESSED IN ADULT LIVER, SIGNAL = 1.5; EXPRESSED IN HEART, SIGNAL = 1.8; EXPRESSED IN BRAIN, SIGNAL = 2.2; EXPRESSED IN LUNG, SIGNAL = 1.6; EXPRESSED IN BONE MARROW, SIGNAL = 1.8; SWISSPROT HIT: O02491, EVALUE 2.50e-01
CRGRRAHAAWAQGRGRGLGSPRSHTTSRGPGANPTTTNASSAPSPAWRSHTSTTT

SEQ ID NO: 32168 - protein, 360 aa, Homo sapiens
  MAP TO Z97986.3; EXPRESSED IN HELA, SIGNAL = 2.1; EXPRESSED IN ADULT LIVER, SIGNAL = 1.5; EXPRESSED IN HEART, SIGNAL = 1.8; EXPRESSED IN BRAIN, SIGNAL = 2.2; EXPRESSED IN LUNG, SIGNAL = 1.6; EXPRESSED IN BONE MARROW, SIGNAL = 1.8; SWISSPROT HIT: P05143, EVALUE 3.00e-06
MSREAGSCRVGTGARARSRKPKKPHYIPRPWGKPYNYKCFQCPFTCLEKSHLYNHMKYSLCKDSLSLLLDSPDWACRRGSTTPRPHAPTPDRPGESDPGRQPQGARPTGAAPAPDLVVADIHSLHCGGGPKSRAKGSPGPPPPVARATRKGPGPSGLLPESWKPGMGGDPRGVGAGDMASAGPEGSVPCYPPPAPGEFPEAHSLHLSLLGVNYPLSPGLFSYLGPSLAAAAHVPFLASASPLLPPATAFPAVQPPQRPTPAPRLYYPLLLEHTLGLPAGKAALAKAPVSPRSPSGTPAPGLLKVPVPGLGPWPRVTPRDPGQEGELERAAQSDPRRRLSLGSRLELPKASPSLTRFCSRS

SEQ ID NO: 32169 - protein, 157 aa, Homo sapiens
  MAP TO AL138499.1; EXPRESSED IN HELA, SIGNAL = 1.9; EXPRESSED IN ADULT LIVER, SIGNAL = 1.5; EXPRESSED IN BONE MARROW, SIGNAL = 1.1; EXPRESSED IN HEART, SIGNAL =   2; EXPRESSED IN FETAL LIVER, SIGNAL = 1.4; SWISSPROT HIT: Q91062, EVALUE 3.00e+00
ITVIFLFFWLFMKETLYDEVLAKQKREQKLIPTKTDKKKAEKKKNKKKEIQNGNLHESDSESVPRDFKLSDALAVEDDQVAPVPLNVVETSSSVRERKKKEKKQKPVLEEQVIKESDASKIPGKKVEPVPVTKQPTPPSEAAASKKKPGQKKSKNGS

SEQ ID NO: 32170 - protein, 22 aa, Homo sapiens
  MAP TO AL138499.1; EXPRESSED IN HELA, SIGNAL = 1.9; EXPRESSED IN ADULT LIVER, SIGNAL = 1.5; EXPRESSED IN BONE MARROW, SIGNAL = 1.1; EXPRESSED IN HEART, SIGNAL =   2; EXPRESSED IN FETAL LIVER, SIGNAL = 1.4
ITLTKVPWSFMSQHILLFLFLQ

SEQ ID NO: 32171 - protein, 154 aa, Homo sapiens
  MAP TO AC008770.3; EXPRESSED IN BRAIN, SIGNAL = 2.2; EXPRESSED IN ADULT LIVER, SIGNAL = 2.1; EXPRESSED IN BONE MARROW, SIGNAL = 2.7; EXPRESSED IN LUNG, SIGNAL = 2.1; EXPRESSED IN FETAL LIVER, SIGNAL = 2.8; EXPRESSED IN HEART, SIGNAL = 2.2; EXPRESSED IN HELA, SIGNAL = 3.5; SWISSPROT HIT: P17024, EVALUE 2.00e-56
RMHSGERPYECKTCGKGFYSAKSFQRHEKTHSGEKPYKCKQCGKAFTRSGSFRYHERTHTGEKPYECKQCGKAFRSAPNLQLHGRTHTGEKPYQCKECGKAFRSASQLRIHRRIHTGEKPYECKKCGKAFRYVQNFRFHERTQTHKNALWRKTL

SEQ ID NO: 32172 - protein, 48 aa, Homo sapiens
  MAP TO AL359218.1; EXPRESSED IN ADULT LIVER, SIGNAL = 1.9; EXPRESSED IN PLACENTA, SIGNAL = 2.1; EXPRESSED IN HELA, SIGNAL = 4.4; EXPRESSED IN BRAIN, SIGNAL = 2.1; EXPRESSED IN HEART, SIGNAL = 2.3; EXPRESSED IN LUNG, SIGNAL = 2.1; EXPRESSED IN BONE MARROW, SIGNAL = 2.3; EXPRESSED IN FETAL LIVER, SIGNAL = 2.1; SWISSPROT HIT: P53801, EVALUE 2.80e+00
WTHRTIPWCQNLCCMDSALHDIFKIFSLYFSLGSMWPLCWVTFSFWSL

SEQ ID NO: 32173 - protein, 319 aa, Homo sapiens
  MAP TO AL359218.1; EXPRESSED IN ADULT LIVER, SIGNAL = 1.9; EXPRESSED IN PLACENTA, SIGNAL = 2.1; EXPRESSED IN HELA, SIGNAL = 4.4; EXPRESSED IN BRAIN, SIGNAL = 2.1; EXPRESSED IN HEART, SIGNAL = 2.3; EXPRESSED IN LUNG, SIGNAL = 2.1; EXPRESSED IN BONE MARROW, SIGNAL = 2.3; EXPRESSED IN FETAL LIVER, SIGNAL = 2.1; SWISSPROT HIT: O95013, EVALUE 1.00e-81
YKQSLKPEAMDPQNYSLVSEFVLHGLCTSRHLQNFFFIFFFGVYVAIMLGNLLILVTVISDPCLHSSPMYFLLGNLAFLDMWLASFATPKMIRDFLSDQKLISFGGCMAQIFFLHFTGGAEMVLLVSMAYDRYVAICKPLHYMTLMSWQTCIRLVLASWVVGFVHSISQVAFTVNLPYCGPNEVDSFFCDLPLVIKLACMDTYVLGIIMISDSGLLSLSCFLLLLISYTVILLAIRQRAAGSTSKALSTCSAHIMVVTLFFGPCIFVYVRPFSRFSVDKLLSVFYTIFTPLLNPIIYTLRNEEMKAAMKKLQNRRVTFQ

SEQ ID NO: 32174 - protein, 171 aa, Homo sapiens
  MAP TO AL355073.2; EXPRESSED IN ADULT LIVER, SIGNAL = 1.5; EXPRESSED IN BRAIN, SIGNAL = 1.8; EXPRESSED IN BONE MARROW, SIGNAL = 2.2; EXPRESSED IN LUNG, SIGNAL = 1.7; EXPRESSED IN PLACENTA, SIGNAL = 1.8; EXPRESSED IN HELA, SIGNAL = 2.8; SWISSPROT HIT: Q12986, EVALUE 1.70e+00
VESETNVLQDGSLIDLCGATLLWRTADGLFHTPTQKHIEALRQEINAARPQCPVGLNTLAFPSINRKEVVEEKQPWAYLSCGHVHGYHNWGHRSDTEANERECPMCRTVGPYVPLWLGCEAGFYVDAGPPTHAFTPCGHVCSEKSAKYWSQIPLPHGTHAFHAACPFCATQ

SEQ ID NO: 32175 - protein, 37 aa, Homo sapiens
  MAP TO AL355073.2; EXPRESSED IN ADULT LIVER, SIGNAL = 1.5; EXPRESSED IN BRAIN, SIGNAL = 1.8; EXPRESSED IN BONE MARROW, SIGNAL = 2.2; EXPRESSED IN LUNG, SIGNAL = 1.7; EXPRESSED IN PLACENTA, SIGNAL = 1.8; EXPRESSED IN HELA, SIGNAL = 2.8; SWISSPROT HIT: P94044, EVALUE 8.50e+00
WKVRPTSCRTAPSLTCVGPLSSGEQQMGFFILQLRST

SEQ ID NO: 32176 - protein, 67 aa, Homo sapiens
  MAP TO AL022068.2; EXPRESSED IN ADULT LIVER, SIGNAL = 6.5; EXPRESSED IN BRAIN, SIGNAL =   1; EXPRESSED IN HELA, SIGNAL = 6.3; EXPRESSED IN LUNG, SIGNAL = 7.6; EXPRESSED IN HEART, SIGNAL = 1.4; EXPRESSED IN BONE MARROW, SIGNAL = 1.4; SWISSPROT HIT: P31280, EVALUE 7.00e-01
STMPVLLLMTLESSMRQSWPCASLWRATSMGSTRSLMTPMSSMAAAGDRDRSSQGGAVLHEEEPRRG

SEQ ID NO: 32177 - protein, 165 aa, Homo sapiens
  MAP TO AL022068.2; EXPRESSED IN ADULT LIVER, SIGNAL = 6.5; EXPRESSED IN BRAIN, SIGNAL =   1; EXPRESSED IN HELA, SIGNAL = 6.3; EXPRESSED IN LUNG, SIGNAL = 7.6; EXPRESSED IN HEART, SIGNAL = 1.4; EXPRESSED IN BONE MARROW, SIGNAL = 1.4; SWISSPROT HIT: P05783, EVALUE 2.00e-51
DVRVPLHQPPGRHKFRGPGAGMARGLGGMGGIQNKKETTQSLNDSLAVRVRSLETENRKLESKIREHLEKKGPQVRDWSHYFKTIEDLRAQIFANTVDNVRIFLQIDNARLAADDFRVKYETELAMRQSVESDIYGLHKVIDDTNVINGCSWRQRSKLSRRSCSS

SEQ ID NO: 32178 - protein, 89 aa, Homo sapiens
  MAP TO AC008403.3; EXPRESSED IN ADULT LIVER, SIGNAL = 3.4; EXPRESSED IN PLACENTA, SIGNAL = 3.1; EXPRESSED IN HELA, SIGNAL = 3.1; EXPRESSED IN BONE MARROW, SIGNAL = 3.1; EXPRESSED IN LUNG, SIGNAL = 2.8
MARRRQQLQAGAVPTVPGGRTAARGQVVPAPGAPAPELVDRPVAAGRRPEALGIRVREVGEPPGLQAAQRRAAQALRVLRVRRRRLEIE

SEQ ID NO: 32179 - protein, 339 aa, Homo sapiens
  MAP TO AC016326.4; EXPRESSED IN ADULT LIVER, SIGNAL =   2; EXPRESSED IN HELA, SIGNAL = 1.9; EXPRESSED IN LUNG, SIGNAL =   2; EXPRESSED IN FETAL LIVER, SIGNAL = 1.7; EXPRESSED IN BRAIN, SIGNAL = 2.5; SWISSPROT HIT: P38889, EVALUE 1.00e-03
VTYEAHKEYLAKMYEEYQRQEEENIKKGKKGNVSTISGLSSQTTGAKGGMEIREIEDLSQSQSPESETDYPVSTDTRDLLMSTKVSDDILGNSDRPGSGVHVEVHDLLVDIKAEKVEATEVKLDDMDLSPETLVGGENGALVEVESLLDNVYSAAVEKLQNNVHGSVGIIKKNEEKDNGPLITLADEKEDLPNSSTSFLFDKIPKQEEKLLPELSSNHIIPNIQDTQVHLGVSDDLGLLAHMTGSVDLTCTSSIIEEKEFKIHTTSDGMSSISERDLASSTKGLEYAEMTATTLETESSSSKIVPNIDAGSIISDTERSDDGKESGKEIRKIQTTTTTQ

SEQ ID NO: 32180 - protein, 17 aa, Homo sapiens
  MAP TO AC016326.4; EXPRESSED IN ADULT LIVER, SIGNAL =   2; EXPRESSED IN HELA, SIGNAL = 1.9; EXPRESSED IN LUNG, SIGNAL =   2; EXPRESSED IN FETAL LIVER, SIGNAL = 1.7; EXPRESSED IN BRAIN, SIGNAL = 2.5
CFLYLFLRSLMKLIRNT

SEQ ID NO: 32181 - protein, 234 aa, Homo sapiens
  MAP TO AC006487.7; EXPRESSED IN LUNG, SIGNAL = 1.5; EXPRESSED IN ADULT LIVER, SIGNAL = 1.2; EXPRESSED IN HELA, SIGNAL = 0.5; EXPRESSED IN HEART, SIGNAL = 1.9; EXPRESSED IN FETAL LIVER, SIGNAL = 1.2; SWISSPROT HIT: Q9Z2N5, EVALUE 1.00e-128
VICGQDDGPPGSEDPERDDHEGQPRPRVPRKRGHISPKSRPMANSTLLGLLAPPGEAWGILGQPPNRPNHSPPPSAKVKKIFGWGDFYSNIKTVALNLLVTGKIVDHGNGTFSVHFQHNATGQGNISISLVPPSKAVEFHQEQQIFIEAKASKIFNCRMEWEKVERGRRTSLCTHDPAKICSRDHAQSSATWSCSQPFKVVCVYIAFYSTDYRLVQKVCPDYNYHSDTPYYPSG

SEQ ID NO: 32182 - protein, 22 aa, Homo sapiens
  MAP TO AC006487.7; EXPRESSED IN LUNG, SIGNAL = 1.5; EXPRESSED IN ADULT LIVER, SIGNAL = 1.2; EXPRESSED IN HELA, SIGNAL = 0.5; EXPRESSED IN HEART, SIGNAL = 1.9; EXPRESSED IN FETAL LIVER, SIGNAL = 1.2
LHRLLQHGLSAGPEGVPRLQLP

SEQ ID NO: 32183 - protein, 326 aa, Homo sapiens
  MAP TO AC004775.1; EXPRESSED IN HELA, SIGNAL = 0.94; EXPRESSED IN ADULT LIVER, SIGNAL = 3.2; EXPRESSED IN BONE MARROW, SIGNAL = 0.92; EXPRESSED IN LUNG, SIGNAL = 1.2; SWISSPROT HIT: Q01613, EVALUE 7.00e-12
MEALGPGGDRASPASSTSSLDLWHLSMRADSAYSSFSAASGGPEPRTQSPGTDLLPYLDWDYVRVVWGGPGPAPPDAALCTSPRPRPAVAARSGPQPTEVPGTPGPLNRQATPLLYALAAEAEAAAQAAEPPSPPASRAAYRQRLQGAQRRVLRETSFQRKELRMSLPARLRPTVPARPPATHPRSASLSHPGGEGEPARSRAPAPGTAGRGPLANQQRKWCFSEPGKLDRVGRGGGPARECLGEACSSSGLPGPEPLEFQHPALAKFEDHEVGWLPETQPQGSMNLDSGSLKLGDAFRPASRSRSASGEVLGSWGGSGGTIPIVQ

SEQ ID NO: 32184 - protein, 151 aa, Homo sapiens
  MAP TO AL022718.1; EXPRESSED IN LUNG, SIGNAL = 1.4; EXPRESSED IN BONE MARROW, SIGNAL = 1.5; EXPRESSED IN FETAL LIVER, SIGNAL = 1.3; EXPRESSED IN HELA, SIGNAL = 1.5; EXPRESSED IN ADULT LIVER, SIGNAL = 1.4; EXPRESSED IN PLACENTA, SIGNAL = 1.6; EXPRESSED IN BRAIN, SIGNAL = 1.5; SWISSPROT HIT: P10569, EVALUE 2.00e-04
LPVACSGLPGGDGPSVVPEKLHPGGRFQNPSGVIPLRRQQKPQPGRRFREVPKNAPPRGQWVPQPAVRESPGDSPTGEQRMPLPGRRYRRTPGDGSPGEQRETKSERRSKEGPEDAHPGVSQEPQIRRSRGAPGDGPPGRQQKLQPGRMFR

SEQ ID NO: 32185 - protein, 803 aa, Homo sapiens
  MAP TO Z99130.1; EXPRESSED IN ADULT LIVER, SIGNAL = 3.4; EXPRESSED IN LUNG, SIGNAL =   2; EXPRESSED IN BONE MARROW, SIGNAL = 2.7; EXPRESSED IN FETAL LIVER, SIGNAL = 3.2; EXPRESSED IN HEART, SIGNAL = 4.1; EXPRESSED IN PLACENTA, SIGNAL = 3.9; EXPRESSED IN HELA, SIGNAL = 1.7; SWISSPROT HIT: P98169, EVALUE 0.00e+00
MEIPKLLPARGTLQGGGGGGIPAGGGRVHRGPDSPAGQVPTRRLLLLRGPQDGGPGRRREEASTASRGPGPSLLAPRTDQPSGGGGGGGDDFFLVLLDPVGGDVETAGSGQAAGPVLREEAEEGPGLQGGESGANPAGPTALGPRCLSAVPTPAPISAPGPAAAFAGTVTIHNQDLLLRFENGVLTLATPPPHAWEPGAAPAQQPGCLIAPQAGFPHAAHPGDCPELPPDLLLAEPAEPAPAPAPEEEAEGPAAALGPRGPLGSGPGVVLYLCPEAQCGQTFAKKHQLKVHLLTHSSSQGQRPFKCPLGGCGWTFTTSYKLKRHLQSHDKLRPFGCPAEGCGKSFTTVYNLKAHMKGHEQENSFKCEVCEESFPTQAKLSAHQRSHFEPERPYQCAFSGCKKTFITVSALFSHNRAHFREQELFSCSFPGCSKQYDKACRLKIHLRSHTGERPFLCDFDGCGWNFTSMSKLLRHKRKHDDDRRFMCPVEGCGKSFTRAEHLKGHSITHLGTKPFVCPVAGCCARFSARSSLYIHSKKHLQDVDTWKSRCPISSCNKLFTSKHSMKTHMVKRHKVGQDLLAQLEAANSLTPSSELTSQRQNDLSDAEIVSLFSDVPDSTSAALLDTALVNSGILTIDVASVSSTLAGHLPANNNNSVGQAVDPPSLMATSDPPQSLDTSLFFGTAATGFQQSSLNMDEVSSVSVGPLGSLDSLAMKNSSPEPQALTPSSKLTVDTDALTPSSTLCENSVSELLTPTKAEWNVHPDSDFFGQEGETQFGFPNAAGNHGSQKETDLITVTGSSFLV

SEQ ID NO: 32186 - protein, 45 aa, Homo sapiens
  MAP TO AF235096.1; EXPRESSED IN BRAIN, SIGNAL =   2; EXPRESSED IN ADULT LIVER, SIGNAL = 1.8; EXPRESSED IN BONE MARROW, SIGNAL =   2; EXPRESSED IN LUNG, SIGNAL = 1.9
MAEALYSRVGSLARLCHWPVCLLYSRTSLVVCWLSFLPPKRMRKS

SEQ ID NO: 32187 - protein, 120 aa, Homo sapiens
  MAP TO AC002094.1; EXPRESSED IN PLACENTA, SIGNAL = 1.6; EXPRESSED IN HELA, SIGNAL = 3.1; EXPRESSED IN ADULT LIVER, SIGNAL = 1.8; EXPRESSED IN BONE MARROW, SIGNAL = 1.8; EXPRESSED IN HEART, SIGNAL = 1.6; EXPRESSED IN LUNG, SIGNAL = 1.7; EXPRESSED IN FETAL LIVER, SIGNAL = 1.7; EXPRESSED IN BRAIN, SIGNAL = 1.8; SWISSPROT HIT: O60309, EVALUE 1.00e-32
MQLTIATEPTAEVGTSPVYQEGTAQLSGPVNDVEPSATQHGGPPLPPESLEEAGPLPVQQETSVQSPEPIKDQNPSAAQQEAEHPQTPEEVESSLTQQEAPAQTPELLNEVVAQSPEHHE

SEQ ID NO: 32188 - protein, 26 aa, Homo sapiens
  MAP TO AC002094.1; EXPRESSED IN PLACENTA, SIGNAL = 1.6; EXPRESSED IN HELA, SIGNAL = 3.1; EXPRESSED IN ADULT LIVER, SIGNAL = 1.8; EXPRESSED IN BONE MARROW, SIGNAL = 1.8; EXPRESSED IN HEART, SIGNAL = 1.6; EXPRESSED IN LUNG, SIGNAL = 1.7; EXPRESSED IN FETAL LIVER, SIGNAL = 1.7; EXPRESSED IN BRAIN, SIGNAL = 1.8
QSLLQRWELLQSTKRVQLSSQGQLMM

SEQ ID NO: 32189 - protein, 215 aa, Homo sapiens
  MAP TO AL139195.2; EXPRESSED IN ADULT LIVER, SIGNAL = 1.5; EXPRESSED IN PLACENTA, SIGNAL = 2.1; EXPRESSED IN BRAIN, SIGNAL = 1.3; EXPRESSED IN HELA, SIGNAL = 1.7; EXPRESSED IN BONE MARROW, SIGNAL = 1.3; EXPRESSED IN LUNG, SIGNAL = 1.1; EXPRESSED IN HEART, SIGNAL = 1.4; EXPRESSED IN FETAL LIVER, SIGNAL = 1.3; SWISSPROT HIT: Q58508, EVALUE 8.60e-02
RYPTVEKRARVFNGASYVPVPEDGPFLKALLFELRLLDDDKDFVESRDSCSRINKTSIYGLLIGGEELWPVVAFLKNDMIYACVPLVEQTLSPRPPLISVSGVSQGFEFLFGIQDFLYSGQKNDSELNTKLSQLPDLLLQACPFGTLLDANLQNSLDNTNFASVTQPQKQPAWKTGTYKGKPQVSISITEKVKSMQYDKQGIADTWQVVGTVTCK

SEQ ID NO: 32190 - protein, 57 aa, Homo sapiens
  MAP TO AL161781.2; EXPRESSED IN ADULT LIVER, SIGNAL = 1.7; EXPRESSED IN BONE MARROW, SIGNAL = 1.4; EXPRESSED IN LUNG, SIGNAL = 1.4; EXPRESSED IN HEART, SIGNAL = 1.6; EXPRESSED IN FETAL LIVER, SIGNAL = 1.4
PASTAGQRATITTTSRRRRREGEDQWKDDLAEEDQQQGRSPPPSPRAPATLRPCCPR

SEQ ID NO: 32191 - protein, 290 aa, Homo sapiens
  MAP TO AC013584.3; EXPRESSED IN ADULT LIVER, SIGNAL =   3; EXPRESSED IN PLACENTA, SIGNAL = 5.7; EXPRESSED IN HELA, SIGNAL = 0.79; EXPRESSED IN BRAIN, SIGNAL = 2.6; EXPRESSED IN HEART, SIGNAL = 3.8; EXPRESSED IN BONE MARROW, SIGNAL =   3; EXPRESSED IN FETAL LIVER, SIGNAL = 4.3; SWISSPROT HIT: P54259, EVALUE 1.00e+00
LKMQWTPEHAQWPEQHFDITSTTRSPAHKVEAYRGHLQRTYQYAWANDDISALTASNLLKKYAEKYSGILEGPVDRPVLSNYSDTPSGLVNGRKNESEPWQPSLNSEAVYPMNCVPDVITASKAGVSSALPPADVSASIGSSPGVASNLTEPSYSSSTCGSHTVPSLHAGLPSQEYAPGYNGSYLHSTYSSQPAPALPSPHPSPLHSSGLLQPPPPPPPPPALVPGYNGTSNLSSYSYPSASYPPQTAVGSGYSPGGAPPPPSAYLPSGIPAPTPLPPTTVPGYTYQGHG

SEQ ID NO: 32192 - protein, 181 aa, Homo sapiens
  MAP TO AL157736.2; EXPRESSED IN BRAIN, SIGNAL = 1.8; EXPRESSED IN HELA, SIGNAL = 1.6; EXPRESSED IN ADULT LIVER, SIGNAL = 1.4; EXPRESSED IN LUNG, SIGNAL = 1.7; EXPRESSED IN BONE MARROW, SIGNAL = 1.3; EXPRESSED IN FETAL LIVER, SIGNAL = 1.5; SWISSPROT HIT: O00409, EVALUE 6.00e-96
MGPVMPPSKKPESSGISVSSGLSQCYGGSGFSKALQEDDDLDFSLPDIRLEEGAMEDEELTNLNWLHESKNLLKSFGESVLRSVSPVQDLDDDTPPSPAHSDMPYDARQNPNCKPPYSFSCLIFMAIEDSPTKRLPVKDIYNWILEHFPYFANAPTGWKNSVRHNLSLNKCFKKVDKERSQ

SEQ ID NO: 32193 - protein, 152 aa, Homo sapiens
  MAP TO AC004923.2; EXPRESSED IN LUNG, SIGNAL =   4; EXPRESSED IN FETAL LIVER, SIGNAL = 5.2; EXPRESSED IN ADULT LIVER, SIGNAL = 4.2; EXPRESSED IN PLACENTA, SIGNAL = 6.8; EXPRESSED IN HELA, SIGNAL =   3; SWISSPROT HIT: P78423, EVALUE 5.90e-02
TQEPSWLHPVDSAQELQVELPASSSLCTHTPQPLGGRWDWAPWSRGRCSSGRLGPHRSPWRGEAQEWQAAGPKPCPTWRQLRPSEKPSTAAAGPVAKLLTARGWQGHPAAPSAGPPSPPPPRTPAGRQVLGSAPVLAHASPSTPPCKLREPA

SEQ ID NO: 32194 - protein, 398 aa, Homo sapiens
  MAP TO AC009487.1; EXPRESSED IN ADULT LIVER, SIGNAL =   2; EXPRESSED IN PLACENTA, SIGNAL = 1.8; EXPRESSED IN BRAIN, SIGNAL = 1.7; EXPRESSED IN HELA, SIGNAL = 1.3; EXPRESSED IN BONE MARROW, SIGNAL = 2.4; EXPRESSED IN FETAL LIVER, SIGNAL = 2.4; EXPRESSED IN LUNG, SIGNAL =   2; SWISSPROT HIT: P43554, EVALUE 1.60e-02
LNQTLKINVMNDRDPRLRERSLARNSILDQYGKILPRVHRKLAIERAKPYHLSTSSVFRLVSRPKPLSAVPKQVVTGTVLTRSVFINNVLSKIGEVWASKEPINSTTPFNSSKIEEPSPIVYSLPAPELPEAFFGTPISKASQKISRLLDLVVQPVPRPSQCSEFIQQSSMKSPLYLVSRSLPSSSQLKGSPQAISRASELHLLETPLVVNKAKSLAMSVTTSGFSEFTPQSILRSTLRSTPLASPSPSPGRSPQRLKETRISFVEEDVHPKWIPGAADDSKLEVFTTPKKCAVPVETEWLKSKDRTTSFFLNSPEKEHQEMDVGSQSLEKLDVSKGNSSVSITSDETTLEYQDALSPEDLEETVFTASKPKSSSTALTTNVTEQTEKDGDKDVFASE

SEQ ID NO: 32195 - protein, 29 aa, Homo sapiens
  MAP TO AC009487.1; EXPRESSED IN ADULT LIVER, SIGNAL =   2; EXPRESSED IN PLACENTA, SIGNAL = 1.8; EXPRESSED IN BRAIN, SIGNAL = 1.7; EXPRESSED IN HELA, SIGNAL = 1.3; EXPRESSED IN BONE MARROW, SIGNAL = 2.4; EXPRESSED IN FETAL LIVER, SIGNAL = 2.4; EXPRESSED IN LUNG, SIGNAL =   2
AMLSFTSLFCFLVGAWLKPGIFCGNIAIG

SEQ ID NO: 32196 - protein, 215 aa, Homo sapiens
  MAP TO AL035669.27; EXPRESSED IN LUNG, SIGNAL =   2; EXPRESSED IN BONE MARROW, SIGNAL = 1.7; EXPRESSED IN FETAL LIVER, SIGNAL = 3.3; EXPRESSED IN ADULT LIVER, SIGNAL =   2; EXPRESSED IN HELA, SIGNAL = 3.8; EXPRESSED IN BRAIN, SIGNAL = 1.8
MSGPGPREPPPEAGAAGGEAAVEGAGGGDAALGEPGLSFTTTDLSLVEMTEVEYTQLQHILCSHMEAAADGELETRLNSALLAAAGPGAGAGGFAAGGQGGAAPVYPVLCPSALAADAPCLGHIDFQELRMMLLSEAGAAEKTSGGGDGARARADGAAKEGAGAAAAAAGPDGAPEARAKPAVRVRLEDRFNSIPAEPPPAPRGPEPPEPGGALN

SEQ ID NO: 32197 - protein, 56 aa, Homo sapiens
  MAP TO AL035669.27; EXPRESSED IN LUNG, SIGNAL =   2; EXPRESSED IN BONE MARROW, SIGNAL = 1.7; EXPRESSED IN FETAL LIVER, SIGNAL = 3.3; EXPRESSED IN ADULT LIVER, SIGNAL =   2; EXPRESSED IN HELA, SIGNAL = 3.8; EXPRESSED IN BRAIN, SIGNAL = 1.8
RRGRRRGGRRGRGRRGRGAGRAGAELHDHRPEPGGDDGGGVHAAAAHPLLAHGGGG

SEQ ID NO: 32198 - protein, 800 aa, Homo sapiens
  MAP TO AC007663.28; EXPRESSED IN PLACENTA, SIGNAL = 3.6; EXPRESSED IN BRAIN, SIGNAL = 4.2; EXPRESSED IN HELA, SIGNAL = 2.3; EXPRESSED IN BONE MARROW, SIGNAL = 4.3; EXPRESSED IN HEART, SIGNAL = 2.9; EXPRESSED IN ADULT LIVER, SIGNAL = 2.3
ITTTTTTITITATTTATMTTTTITTTTTITTTTTITTTTTTTITTTTTTITITTTTTTITITTTITTTTTTTTITITTTTITTTTTTTTTITTTTTTTTTITTTTTITITTTITTTTITITTTITITTTTTTTTITTTTTITTTITITTTTTTTTITTTTTTTIITTTTTTTTITTTTTTITTTTTTITATTTTTTITTTTTTITATTTTTTITTTTTITTTTTITTTTTTTITTTTTTTITTTTTITTTTTITTTTTTTTITTTTTTTITTTTTTITTTTTTTTITTTTTTITITTTITTTTTITTTTITITTTTTITTTTTITTTTTTTTTITTTTTTTITTTTTTITTTTTTTITTTTTTITITTTITTTTTITTTTITITTTTTTTITTTITTITTTITTTTITTTITTTTITTTTTTTITITSTTTTTTITTTTTTTITITSTTTTTTITTTTTTTITITSTTTTTTITTTTTTRTTITTTTTTTITTTITTTTTTITTTTTTTITTTTTITITTTTTTTITTTTTTITITTTTTITTTTTTTITTTTTITITSTTTTAITTTTTTITITTTTPPLPPSPPPPPSLPPPPPPSLPPPPSPSLPPPPLPSLPPPPPSPSLPPPPPPSPSLPPPPPPPSLPPPPPSLPPPPSLPPSPPSLSPPSLPLPPPPPSLPPPPPSLPPLPPPPPSPPPPPSLPPPPPAPPPSLPPSPPQPPSPPPSSEPPPSPSLPPPPPSPPPPSPSLSPPPSPSLPSPSPSPPPPPSPSLSPPPSPSLPSPSPSPSPSPSPHLHHYGRCD

SEQ ID NO: 32199 - protein, 195 aa, Homo sapiens
  MAP TO AC010680.2; EXPRESSED IN LUNG, SIGNAL = 1.4; EXPRESSED IN ADULT LIVER, SIGNAL = 1.4; EXPRESSED IN HELA, SIGNAL = 1.8; EXPRESSED IN BRAIN, SIGNAL = 1.3; SWISSPROT HIT: Q14324, EVALUE 5.00e-24
APTIVLDPTIKDGLTIKAGDTIVLNAISILGKPLPKSSWSKAGKDIRPSDITQITSTPTSSMLTIKYATRKDAGEYTITATNPFGTKVEHVKVTVLDVPGPPGPVEISNVSAEKATLTWTPPLEDGGSPIKSYILEKRETSRLLWTVVSEDIQSCRHVATKLIQGNEYIFRVSAVNHYGKGEPVQSEPVKMVDRF

SEQ ID NO: 32200 - protein, 188 aa, Homo sapiens
  MAP TO AL117339.3; EXPRESSED IN ADULT LIVER, SIGNAL = 3.4; EXPRESSED IN PLACENTA, SIGNAL = 2.4; EXPRESSED IN HELA, SIGNAL = 3.8; EXPRESSED IN BRAIN, SIGNAL = 3.3; EXPRESSED IN HEART, SIGNAL = 5.5; EXPRESSED IN LUNG, SIGNAL = 5.2; EXPRESSED IN BONE MARROW, SIGNAL = 6.5; SWISSPROT HIT: P29295, EVALUE 3.70e-01
MYPMSIDESIHLQRWDKYSNKMLCMQKGDPEVYEELFSYFCPKFLSPVVPNYDNVHPNYHKEPFLQQPKVFSDEVQQQAQLSTIRSFLKLYTTMPVAKLAGFLDLTEQEFRIQLPVFKHKLKNLVWTSSITTLDDEFQSASEVDFYIDKDMIHIMDTKVARRYGNFFIRQIHRFEELNRTLKKMGQRP

SEQ ID NO: 32201 - protein, 329 aa, Homo sapiens
  MAP TO AL049870.3; EXPRESSED IN PLACENTA, SIGNAL = 3.1; EXPRESSED IN ADULT LIVER, SIGNAL = 1.9; EXPRESSED IN HELA, SIGNAL = 2.2; EXPRESSED IN HEART, SIGNAL = 2.2; EXPRESSED IN LUNG, SIGNAL = 2.1; EXPRESSED IN FETAL LIVER, SIGNAL = 1.9; SWISSPROT HIT: Q09543, EVALUE 2.00e-03
ELHSRLLDQEDYKNRTQAVEELKQVLGKFNPSSTPHSSLVGFISLLYNLLDDSNFKVVHGTLEVLHLLVIRLGEQVQQFLGPVIAASVKVLADNKLVIKQEYMKIFLKLMKEVGPQQVLCLLLEHLKHKHSRVREEVVNICICSLLTYPSEDFDLPKLSFDLAPALVDSKRRVRQAALEAFAVLASSMGSGKTSILFKAVDTVELQDNGDGVMNAVQARLARKTLPRLTEQGFVEYAVLMPSSAGGRSNHLAHGADTDWLLAGNRTQSAHCHCGDHVRDSMHIYGSYSPTICTRRVLSAGKGKNKLPWENEQPGIMGENQTSTSKDIEQ

SEQ ID NO: 32202 - protein, 221 aa, Homo sapiens
  MAP TO AP001669.1; EXPRESSED IN BONE MARROW, SIGNAL = 4.3; EXPRESSED IN ADULT LIVER, SIGNAL =   4; EXPRESSED IN LUNG, SIGNAL = 3.4; EXPRESSED IN HEART, SIGNAL = 3.3; SWISSPROT HIT: P03355, EVALUE 1.00e-31
LHLIATLLPKPKPPFRLPLISPHLNPQVWDMSTPSLATDHMPLTIPLKPNHPYPTQCQYPIPQQALKGLKPVITRLLQHGLLKPINSPYNSPISPVLKPDVAYRLVQDLRLINKIVLPIHPVVPNPYTLLFSIHPSTIHYSVLDLKHAFFTIPLHPSSQPLFTFSWTDPDTHQAQQMTWAVLMQVFTDGPYYFSQAQISSSSVTSLDIIKTHVLSLLTMSG

SEQ ID NO: 32203 - protein, 193 aa, Homo sapiens
  MAP TO AL022101.1; EXPRESSED IN ADULT LIVER, SIGNAL = 2.1; EXPRESSED IN BRAIN, SIGNAL = 1.9; EXPRESSED IN HELA, SIGNAL = 2.5; EXPRESSED IN BONE MARROW, SIGNAL = 2.3; EXPRESSED IN LUNG, SIGNAL = 2.2; EXPRESSED IN HEART, SIGNAL = 2.5; SWISSPROT HIT: O60813, EVALUE 1.00e-103
RWKLQVLDLQDVCENFWMVWSEAMAHGCFLNAKRNKTPVQDCPRMRERQPLTVFVELWLKNRTLDEYLTCLLLWVKQRRDLLHLCCKKLKILGMPFRNIRSILKMVNLDCIQEVEVNCKWILPILTQFTPYLGHLRNLQKLVLSHMDVSRYVSPEQKKEIVTQFTTQFLKLRCLQKLYMNSVSFLEGHLDQLL

SEQ ID NO: 32204 - protein, 23 aa, Homo sapiens
  MAP TO AL034450.1; EXPRESSED IN BRAIN, SIGNAL = 1.3; EXPRESSED IN ADULT LIVER, SIGNAL = 1.6; EXPRESSED IN PLACENTA, SIGNAL = 1.6; EXPRESSED IN HELA, SIGNAL =   2; EXPRESSED IN LUNG, SIGNAL = 1.6; EXPRESSED IN FETAL LIVER, SIGNAL = 1.5
VKEKDKEDEEEEEEEEEKKEEGE

SEQ ID NO: 32205 - protein, 44 aa, Homo sapiens
  MAP TO AL034450.1; EXPRESSED IN BRAIN, SIGNAL = 1.3; EXPRESSED IN ADULT LIVER, SIGNAL = 1.6; EXPRESSED IN PLACENTA, SIGNAL = 1.6; EXPRESSED IN HELA, SIGNAL =   2; EXPRESSED IN LUNG, SIGNAL = 1.6; EXPRESSED IN FETAL LIVER, SIGNAL = 1.5
GTIQSGWLKVTTRNQRARCLLMPSLRRHAEKNIRRKTQRSLSIL

SEQ ID NO: 32206 - protein, 245 aa, Homo sapiens
  MAP TO AC007326.28; EXPRESSED IN PLACENTA, SIGNAL = 1.9; EXPRESSED IN LUNG, SIGNAL = 1.7; EXPRESSED IN BONE MARROW, SIGNAL = 1.6; EXPRESSED IN FETAL LIVER, SIGNAL = 1.6; EXPRESSED IN ADULT LIVER, SIGNAL = 1.7; EXPRESSED IN BRAIN, SIGNAL = 1.3; EXPRESSED IN HELA, SIGNAL = 1.4; SWISSPROT HIT: P10263, EVALUE 7.00e-69
WNDWAIIKAALEPFQTEEDSVSVSDAPGSCLIDCNEKTRKKSQKETESLHCEYVAEPVMAQSTQNVDYNQLQEVIYPETLKLEGKGPELVGPSESKPRGTSPLPAGQVPVTLQPQKQVKENKTQPPVAYQYWPPAELQYRPPPESQYGYPGMPPAPQGRAPYPQPPTRRLNPTAPPSRQGSELHEIIDKSRKEGDTEAWQFPVTLEPMPPGEGAQEGEPPTVEARYKSFSIKMLKDMKEGVKQYG

SEQ ID NO: 32207 - protein, 23 aa, Homo sapiens
  MAP TO AC011538.5; EXPRESSED IN ADULT LIVER, SIGNAL = 1.2; EXPRESSED IN BONE MARROW, SIGNAL = 0.95; EXPRESSED IN LUNG, SIGNAL = 1.2; EXPRESSED IN FETAL LIVER, SIGNAL = 0.98; EXPRESSED IN BRAIN, SIGNAL = 0.84
CVLILLKTFGQSRAWKILFKKQY

SEQ ID NO: 32208 - protein, 17 aa, Homo sapiens
  MAP TO AC011538.5; EXPRESSED IN ADULT LIVER, SIGNAL = 1.2; EXPRESSED IN BONE MARROW, SIGNAL = 0.95; EXPRESSED IN LUNG, SIGNAL = 1.2; EXPRESSED IN FETAL LIVER, SIGNAL = 0.98; EXPRESSED IN BRAIN, SIGNAL = 0.84
GRFFSKSNTEKIWKIWT

SEQ ID NO: 32209 - protein, 236 aa, Homo sapiens
  MAP TO AL009182.12; EXPRESSED IN HEART, SIGNAL = 1.6; EXPRESSED IN FETAL LIVER, SIGNAL = 1.2; EXPRESSED IN ADULT LIVER, SIGNAL = 1.2; EXPRESSED IN PLACENTA, SIGNAL = 1.7; EXPRESSED IN HELA, SIGNAL = 1.5; SWISSPROT HIT: P35540, EVALUE 2.90e-01
NEESDVKPPDWPNPMNATSQFPQPQHFDSFGLRLPRDITELPEWSEGYPFYMAMGFPGYDLSADDIAGKFQFSRGMRRSYDAGFKLMVVEYAESTNNCQAAKQFGVLEKNVRDWRKVKPQLQNAHAMRRAFRGPKNGRFALVDQRVAEYVRYMQAKGDPITREAMQLKALEIAQEMNIPEKGFKASLGWCRRMMRRYDLSLRHKVPVPQHLPEDLTEKLVTYQRSVLALRRAHDYE

SEQ ID NO: 32210 - protein, 24 aa, Homo sapiens
  MAP TO AL163204.2; EXPRESSED IN ADULT LIVER, SIGNAL = 1.4; EXPRESSED IN BRAIN, SIGNAL = 1.6; EXPRESSED IN BONE MARROW, SIGNAL = 1.3
MEGAPPLWARTTWTWCGACCAAGP

SEQ ID NO: 32211 - protein, 190 aa, Homo sapiens
  MAP TO AL163204.2; EXPRESSED IN ADULT LIVER, SIGNAL = 1.4; EXPRESSED IN BRAIN, SIGNAL = 1.6; EXPRESSED IN BONE MARROW, SIGNAL = 1.3; SWISSPROT HIT: P17221, EVALUE 8.00e-12
GGEGDGEGWLPPVWALILCLPLPLRPAHGLAEARTKDLRTAVYNAARDGKGAAAPEAAQQPEPGGTGRADWLGGRRGDAAAHRRLLRPPGRGGVPGGPVRRERGGRWLGALRWRDHGGCAAAVGADHLDVVRSLLRRGASVNCTTRTNSTPLRAACFEGLLEVVRYLVGEHQANLEVANRHGHMCLMISC

SEQ ID NO: 32212 - protein, 19 aa, Homo sapiens
  MAP TO AP001760.1; EXPRESSED IN HEART, SIGNAL = 1.7; EXPRESSED IN BONE MARROW, SIGNAL = 1.9; EXPRESSED IN LUNG, SIGNAL = 1.7; EXPRESSED IN ADULT LIVER, SIGNAL = 2.1; EXPRESSED IN BRAIN, SIGNAL = 1.7; EXPRESSED IN HELA, SIGNAL = 1.1
SCGRLWRHSVLRAVDSAWH

SEQ ID NO: 32213 - protein, 229 aa, Homo sapiens
  MAP TO AP001760.1; EXPRESSED IN HEART, SIGNAL = 1.7; EXPRESSED IN BONE MARROW, SIGNAL = 1.9; EXPRESSED IN LUNG, SIGNAL = 1.7; EXPRESSED IN ADULT LIVER, SIGNAL = 2.1; EXPRESSED IN BRAIN, SIGNAL = 1.7; EXPRESSED IN HELA, SIGNAL = 1.1; SWISSPROT HIT: O95613, EVALUE 1.00e-106
ELRASLETQRAQSSRLCVALKHEQTAKDNLQKELRIEHSRCEALLAQERSQLSELQKDLAAEKSRTLELSEALRHERLLTEQLSQRTQEACVHQDTQAHHALLQKLKEEKSRVVDLQAMLEKVQQQALHSQQQLEAEAQKHCEALRREKEVSATLKSTVEALHTQKRELRCSLEREREKPAWLQAELEQSHPRLKEQEGRKAARRSAEARQSPAAAEQWRKWQRDKEKL

SEQ ID NO: 32214 - protein, 177 aa, Homo sapiens
  MAP TO AC006445.10; EXPRESSED IN HELA, SIGNAL = 0.85; EXPRESSED IN ADULT LIVER, SIGNAL = 1.2; EXPRESSED IN BRAIN, SIGNAL = 1.3; EXPRESSED IN HEART, SIGNAL = 1.2; EXPRESSED IN LUNG, SIGNAL = 1.1; EXPRESSED IN BONE MARROW, SIGNAL = 1.3; EXPRESSED IN FETAL LIVER, SIGNAL = 1.3; SWISSPROT HIT: P78367, EVALUE 2.00e-47
DRSPRTEDDGVGPRGAHVSALCSGAGGGGGSGPAGVAEEEEEPAAPKPRKKRSRAAFSHAQVFELERRFNHQRYLSGPERADLAASLKLTETQVKIWFQNRRYKTKRRQMAADLLASAPAAKKVAVKVLVRDDQRQYLPGEVLRPPSLLPLQPSYYYPYYCLPGWALSTCAAAAGTQ

SEQ ID NO: 32215 - protein, 62 aa, Homo sapiens
  MAP TO AC006445.10; EXPRESSED IN HELA, SIGNAL = 0.85; EXPRESSED IN ADULT LIVER, SIGNAL = 1.2; EXPRESSED IN BRAIN, SIGNAL = 1.3; EXPRESSED IN HEART, SIGNAL = 1.2; EXPRESSED IN LUNG, SIGNAL = 1.1; EXPRESSED IN BONE MARROW, SIGNAL = 1.3; EXPRESSED IN FETAL LIVER, SIGNAL = 1.3
GRRCWPQRCTRVRAVQRGRRRGRQRAGRRRGGGGGAGGAQATQEALAGRFLPRAGLRAGAPL

SEQ ID NO: 32216 - protein, 329 aa, Homo sapiens
  MAP TO AC010609.5; EXPRESSED IN FETAL LIVER, SIGNAL = 2.5; EXPRESSED IN PLACENTA, SIGNAL = 2.5; EXPRESSED IN BRAIN, SIGNAL = 3.1; EXPRESSED IN ADULT LIVER, SIGNAL = 3.6; EXPRESSED IN HELA, SIGNAL = 6.1; EXPRESSED IN LUNG, SIGNAL = 3.7; EXPRESSED IN BONE MARROW, SIGNAL = 3.7; SWISSPROT HIT: P26368, EVALUE 1.00e-03
AAELHREGDQSETGLYKPCDVSAATSSAYAGGEGIQHASHGTASAASPSTSTPGAAEGGAARTAGGMAVAGTATGPRTDVAIAGAAMSPATGAMSIATTKSAGPGQVTTALAGAAIKNPGENESSKSMAGAANISSEGISLALVGAASTSLEGTSTSMAGAASLSQDSSLSAAFAGSITTSKCAAERTEGPAVGPLISTLQSEGYMSERDGSQKVSQPSAEVWNENKERREKKDRHPSRKSSHHRKAGESHRRRAGDKNQKASSHRSASGHKNTRDDKKEKGYSNVRGKRHGSSRKSSTHSSTKKESRTTQELGKNQSASSTGALQKKA

SEQ ID NO: 32217 - protein, 566 aa, Homo sapiens
  MAP TO AL160231.1; EXPRESSED IN ADULT LIVER, SIGNAL = 1.5; EXPRESSED IN PLACENTA, SIGNAL = 1.5; EXPRESSED IN BRAIN, SIGNAL = 1.2; EXPRESSED IN HELA, SIGNAL = 1.8; EXPRESSED IN LUNG, SIGNAL = 1.5; SWISSPROT HIT: Q01101, EVALUE 1.00e-68
MPRGFLVKRTKRTGGLYRVRLAERVFPLLGPQGAPPFLEEAPSASLPGAERATPPTREEPGKGLTAEAAREQSGSPCRAAGVSPGTGGREGAEWRAGGREGPGPSPSPSPSPAKPAGAELRRAFLERCLSSPVSAESFPGGAAAVAAFSCSVAPAAAPTPGEQFLLPLRAPFPEPALQPDPAPLSAALQSLKRAAGGERRGKAPTDCASGPAAAGIKKPKAMRKLSFADEVTTSPVLGLKIKEEEPGAPSRGLGGSRTPLGEFICQLCKEQYADPFALAQHRCSRIVRVEYRCPECDKVFSCPANLASHRRWHKPRPAAANAATVSSADGKPPSSSSSSSRDSGAIASFLAEGKENSRIERTADQHPQARDSSGADQHPDSAPRQGLQVLTHPEPPLPQGPYTEGVLGRRVPVPGSTSGGRGSEIFVCPYCHKKFRRQAYLRKHLSTHEAGSARALAPGFGSERGAPLAFACPLCGAHFPTADIREKHRLWHAVREELLLPALAGAPPETSGPSGPSDGSAQQIFSCKHCPSTFFSSPGLTRHINKCHPSESRQVLLLQMPLRPGC

SEQ ID NO: 32218 - protein, 133 aa, Homo sapiens
  MAP TO AL049870.3; EXPRESSED IN ADULT LIVER, SIGNAL = 2.1; EXPRESSED IN BRAIN, SIGNAL = 1.8; EXPRESSED IN HELA, SIGNAL = 1.1; EXPRESSED IN BONE MARROW, SIGNAL = 1.5; EXPRESSED IN LUNG, SIGNAL = 1.8; EXPRESSED IN HEART, SIGNAL = 1.6; EXPRESSED IN FETAL LIVER, SIGNAL = 1.6
VSLREENPALRKDALQILHICLKRSPGEVLRTLIQQGLESTDARLRASTALLLPILLTTEDLLLGLDLTEVIISLARKLGDQETEEESETAFSALQQIGERLGQDRFQSYISRLPSALRRHYNRRLESQFGSQ

SEQ ID NO: 32219 - protein, 73 aa, Homo sapiens
  MAP TO AL132988.3; EXPRESSED IN ADULT LIVER, SIGNAL = 1.9; EXPRESSED IN HELA, SIGNAL = 0.5; EXPRESSED IN LUNG, SIGNAL = 1.5; EXPRESSED IN FETAL LIVER, SIGNAL = 2.1; SWISSPROT HIT: Q13023, EVALUE 2.00e-35
ESIESGPLSDILSDEESSMPLAGMKKYADEKSERASSSEKNESHSATKSALIQKLMQDIQHQDNYEAIWEKIE

SEQ ID NO: 32220 - protein, 73 aa, Homo sapiens
  MAP TO AL132988.3; EXPRESSED IN ADULT LIVER, SIGNAL = 1.9; EXPRESSED IN HELA, SIGNAL = 0.5; EXPRESSED IN LUNG, SIGNAL = 1.5; EXPRESSED IN FETAL LIVER, SIGNAL = 2.1
IREVGMPNCNCSQKHPVHQLLLRAVNPLLAQTTSCLRCHFFQNTKAKKVKPPLQVTSLGMVRLWRPGMALMNT

SEQ ID NO: 32221 - protein, 784 aa, Homo sapiens
  MAP TO AL109823.6; EXPRESSED IN LUNG, SIGNAL = 1.8; EXPRESSED IN FETAL LIVER, SIGNAL = 1.9; EXPRESSED IN ADULT LIVER, SIGNAL = 1.9; EXPRESSED IN HELA, SIGNAL = 1.7; EXPRESSED IN PLACENTA, SIGNAL =   2; SWISSPROT HIT: Q9ZDE6, EVALUE 4.20e+00
LTKTQTVENVEHLQTRLQAVSDSALQELQQYILFPLRFTLKTPGPKRERLIQSVVECLTFVLSSTCVKEQELLQELFSELSACLYSPSSQKPAAVSEELKLAVIQGLSTLMHSAYGDIILTFYEPSILPRLGFAVSLLLGLAEQEKSKQIKIAALKCLQVLLLQCDCQDHPRSLDELEQKQLGDLFASFLPGISTALTRLITGDFKQGHSIVVSSLKIFYKTVSFIMADEQLKRISKVQAKPAVEHRVAELMVYREADWVKKTGDKLTILIKKIIECVSVHPHWKVRLELVELVEDLLLKCSQSLVECAGPLLKALVGLVNDESPEIQAQCNKVLRHFADQKVVVGNKALADILSESLHSLATSLPRLMNSQDDQGKFSTLSLLLGYLKLLGPKINFVLNSVAHLQRLSKALIQVLELDVADIKIVEERRWNSDDLNASPKTSATQPWNRIQRRYFRFFTDERIFMLLRQVCQLLGYYGNLYLLVDHFMELYHQSVVYRKQAAMILNELVTGAAGLEVEDLHEKHIKTNPEELREIVTSILEEYTSQENWYLVTCLETEEMGEELMMEHPGLQAITSGEHTCQVTSFLAFSKPSPTICSMNSNIWQICIQLEGIGQFAYALGKDFCLLLMSALYPVLEKAGDQTLLISQVATSTMMDVCRACGYDSLQHLINQNSDYLVNGISLNLRHLALHPHTPKVLEVMLRNSDANLLPLVADVVQDVLATLDQFYDKRAASFVSVLHALMAALGTLRALFNADVWGTGLSLLVCLASFFALFVVMLWRTF

SEQ ID NO: 32222 - protein, 26 aa, Homo sapiens
  MAP TO AL109823.6; EXPRESSED IN LUNG, SIGNAL = 1.8; EXPRESSED IN FETAL LIVER, SIGNAL = 1.9; EXPRESSED IN ADULT LIVER, SIGNAL = 1.9; EXPRESSED IN HELA, SIGNAL = 1.7; EXPRESSED IN PLACENTA, SIGNAL =   2
YVQSVFSSQRPRQWRMWSICRHDYKL

SEQ ID NO: 32223 - protein, 47 aa, Homo sapiens
  MAP TO AC027307.3; EXPRESSED IN ADULT LIVER, SIGNAL = 1.7; EXPRESSED IN PLACENTA, SIGNAL = 2.5; EXPRESSED IN HELA, SIGNAL = 2.2; EXPRESSED IN FETAL LIVER, SIGNAL = 2.1
MVAAAGTVRSSARKSKSKPKSQSSGAAVPTGAPGPSAPKAKPPLPEP

SEQ ID NO: 32224 - protein, 57 aa, Homo sapiens
  MAP TO AC027307.3; EXPRESSED IN ADULT LIVER, SIGNAL = 1.7; EXPRESSED IN PLACENTA, SIGNAL = 2.5; EXPRESSED IN HELA, SIGNAL = 2.2; EXPRESSED IN FETAL LIVER, SIGNAL = 2.1; SWISSPROT HIT: P55652, EVALUE 5.60e-01
SRQTSVPLAWKSLSGPASVKAPVRSVMCASISSRARSTFSGIPVTANTGSLSRPGVT

SEQ ID NO: 32225 - protein, 27 aa, Homo sapiens
  MAP TO AC027307.3; EXPRESSED IN ADULT LIVER, SIGNAL = 1.7; EXPRESSED IN PLACENTA, SIGNAL = 2.5; EXPRESSED IN HELA, SIGNAL = 2.2; EXPRESSED IN FETAL LIVER, SIGNAL = 2.1
ISRLAISTSSFRPVTMKTGSSPRTGVL

SEQ ID NO: 32226 - protein, 626 aa, Homo sapiens
  MAP TO AC024167.1; EXPRESSED IN ADULT LIVER, SIGNAL = 1.5; EXPRESSED IN PLACENTA, SIGNAL = 1.5; EXPRESSED IN HELA, SIGNAL = 2.7; EXPRESSED IN LUNG, SIGNAL = 1.8; EXPRESSED IN HEART, SIGNAL = 2.4; EXPRESSED IN FETAL LIVER, SIGNAL = 2.8; EXPRESSED IN BRAIN, SIGNAL = 2.4; SWISSPROT HIT: O75325, EVALUE 0.00e+00
SNNIAKTVDELQQLFNLTELDFSQNNFTNIKEVGLANLTQLTTLHLEENQITEMTDYCLQDLSNLQELYINHNQISTISAHAFAGLKNLLRLHLNSNKLKVIDSRWFDSTPNLEILMIGENPVIGILDMNFKPLANLRSLVLAGMYLTDIPGNALVGLDSLESLSFYDNKLVKVPQLALQKVPNLKFLDLNKNPIHKIQEGDFKNMLRLKELGINNMGELVSVDRYALDNLPELTKLEATNNPKLSYIHRLAFRSVPALESLMLNNNALNAIYQKTVESLPNLREISIHSNPLRCDCVIHWINSNKTNIRFMEPLSMFCAMPPEYKGHQVKEVLIQDSSEQCLPMISHDSFPNRLNVDIGTTVFLDCRAMAEPEPEIYWVTPIGNKITVETLSDKYKLSSEGTLEISNIQIEDSGRYTCVAQNVQGADTRVATIKVNGTLLDGTQVLKIYVKQTESHSILVSWKVNSNVMTSNLKWSSATMKIDNPHITYTARVPVDVHEYNLTHLQPSTDYEVCLTVSNIHQQTQKSCVNVTTKNAAFAVDISDQETSTALAAVMGSMFAVISLASIAVYFAKRFKRKNYHHSLKKYMQKTSSIPLNELYPPLINLWEGDSEKDKDGSADTKPTQ

SEQ ID NO: 32227 - protein, 50 aa, Homo sapiens
  MAP TO L31948.1; EXPRESSED IN PLACENTA, SIGNAL = 1.8; EXPRESSED IN BRAIN, SIGNAL = 1.3; EXPRESSED IN ADULT LIVER, SIGNAL = 1.3; EXPRESSED IN LUNG, SIGNAL = 1.4
ASSHQAMWLLLPPLLLLLPLLPASSQVRSTERIFPLSCHLPTFCASPNPH

SEQ ID NO: 32228 - protein, 347 aa, Homo sapiens
  MAP TO L31948.1; EXPRESSED IN PLACENTA, SIGNAL = 1.8; EXPRESSED IN BRAIN, SIGNAL = 1.3; EXPRESSED IN ADULT LIVER, SIGNAL = 1.3; EXPRESSED IN LUNG, SIGNAL = 1.4; SWISSPROT HIT: Q09472, EVALUE 2.70e-01
VQEQVTSKCSRIKASPPSSKHLMPPRTGLLQNNLSPGMIPLTRHQSCEGMGVISPTLGKRQGIFTSSPQCPILSHSGQTPLGRLDSVCQHMQSPKATPPEVPLPGFCPSSLGTQSLSPHQLRRPSVPRMPTAFNNAAWVTAAAAVTTAVSGKTPLSQVDNSVQQHSPSGQACLQRPSDWEAQVPAAMGTQVPLANNPSFSLLGSQSLRQSPVQGPVPVANTTKFLQQGMASFSPLSPIQGIEPPSYVAAAATAAAASAVAASQFPGPFDRTDIPPELPPADFLRQPQPPLNDLISSPDCNEVDFIEALLKGSCVSPDEDWVCNLRLIDDILEQHAAAQNATAQNSGQ

SEQ ID NO: 32229 - protein, 196 aa, Homo sapiens
  MAP TO AL121778.2; EXPRESSED IN BRAIN, SIGNAL = 1.8; EXPRESSED IN ADULT LIVER, SIGNAL = 6.8; EXPRESSED IN PLACENTA, SIGNAL = 5.5; EXPRESSED IN BONE MARROW, SIGNAL =  11; EXPRESSED IN LUNG, SIGNAL = 8.2; EXPRESSED IN HEART, SIGNAL = 6.4; SWISSPROT HIT: P15880, EVALUE 1.00e-82
PGGPGMGNRGGFRGGFGSGIRGRGRGRGRGRGQGRGAREGKPEDKEWMPVTKLGRLVKDMKIKSLEEIYLFSLPIKESEIIDFFLGTSLKDEVLKIMPVQKQTRAGQRTRFKVFVAIGDYNGHVGLGVKCSKEVATAIRGAIILAKLSIVPVCRGYWGNKIGKPHTVPCKVTGRCGSVLVRLIPAPRGTGIVSAPV

SEQ ID NO: 32230 - protein, 253 aa, Homo sapiens
  MAP TO AC012578.5; EXPRESSED IN BRAIN, SIGNAL = 2.4; EXPRESSED IN ADULT LIVER, SIGNAL = 2.8; EXPRESSED IN PLACENTA, SIGNAL = 1.9; EXPRESSED IN LUNG, SIGNAL = 2.6; EXPRESSED IN BONE MARROW, SIGNAL = 2.4; EXPRESSED IN FETAL LIVER, SIGNAL = 2.2; SWISSPROT HIT: P11994, EVALUE 9.00e-11
LCFWTSEPLTDISSRAPESPLQTGISSRPPESPLRTGISSRPHESPLQTGISSRPPESPLQTGISSRPPESPLQTGISSRPPESSLQTGISSRSPESPLQTGISSRPPESSLQTGISSRSPESPLQTGISSRPHESPLQTGISSRPPESPLQTGISSRPPESSLQTGISSRSLESPLQKGISSRPHESPLQTGISSRPPESSLQTGISSRPPESPLQTGISSRPPESPLQTGISSRPPESPLQTGISSRPPES

SEQ ID NO: 32231 - protein, 18 aa, Homo sapiens
  MAP TO AL135960.1; EXPRESSED IN ADULT LIVER, SIGNAL = 2.6; EXPRESSED IN PLACENTA, SIGNAL = 4.4; EXPRESSED IN BRAIN, SIGNAL = 2.5; EXPRESSED IN HELA, SIGNAL = 2.2; EXPRESSED IN BONE MARROW, SIGNAL = 3.1; EXPRESSED IN LUNG, SIGNAL = 2.3; EXPRESSED IN HEART, SIGNAL = 2.8; EXPRESSED IN FETAL LIVER, SIGNAL = 2.3
WLTTLCLSVCWHASAQKQ

SEQ ID NO: 32232 - protein, 261 aa, Homo sapiens
  MAP TO AL135960.1; EXPRESSED IN ADULT LIVER, SIGNAL = 2.6; EXPRESSED IN PLACENTA, SIGNAL = 4.4; EXPRESSED IN BRAIN, SIGNAL = 2.5; EXPRESSED IN HELA, SIGNAL = 2.2; EXPRESSED IN BONE MARROW, SIGNAL = 3.1; EXPRESSED IN LUNG, SIGNAL = 2.3; EXPRESSED IN HEART, SIGNAL = 2.8; EXPRESSED IN FETAL LIVER, SIGNAL = 2.3; SWISSPROT HIT: P32604, EVALUE 5.30e-01
VLACISPEAVISGLNCMSFANVGMSGLSPNGVDLSMEANAIALKYLNENQLSQLSVTRSNQNNCDPFSLLHINTDRSTVGLSLISPNNMSFATKKYMKRYGLLQSSDNSEDEEEPPDNADSKSEYLLNQNLRSIPEQLGGQKEPSKNDHEIINCSNCESVGTNADTPVLRNITNEVLQTKAKQQLTEKPAFLVKNLKPSPAVNLRTGKAEFTQHPEKENEGDITIFPESLQPSETLKQMNSMNSVGTFLDVKRLRQLPKLF

SEQ ID NO: 32233 - protein, 163 aa, Homo sapiens
  MAP TO AC000384.1; EXPRESSED IN ADULT LIVER, SIGNAL = 1.4; EXPRESSED IN BRAIN, SIGNAL = 1.4; EXPRESSED IN HELA, SIGNAL = 2.6; EXPRESSED IN LUNG, SIGNAL = 1.6; EXPRESSED IN HEART, SIGNAL = 1.8; EXPRESSED IN FETAL LIVER, SIGNAL = 1.9; SWISSPROT HIT: P33076, EVALUE 3.60e-02
MSYFAHPEELALEHQPPQAGLPPLALSQLFNPDACGRRVQTVVLYGTVGTGKSTLVRKMVLDWCYGRLPAFELLIPFSCEDVSSVGRAPASMCQLVAQRYTPLKEVLPLMAAAGSHLLFVLHGLEHLNLDFRLAGTGLCSDPEEPQEPAAIIVNLLRKYMLPQ

SEQ ID NO: 32234 - protein, 115 aa, Homo sapiens
  MAP TO AB003151.1; EXPRESSED IN ADULT LIVER, SIGNAL =  13; EXPRESSED IN HELA, SIGNAL =  29; EXPRESSED IN BONE MARROW, SIGNAL =  14; EXPRESSED IN HEART, SIGNAL =   6; EXPRESSED IN LUNG, SIGNAL =  12; EXPRESSED IN PLACENTA, SIGNAL = 6.3; EXPRESSED IN BRAIN, SIGNAL = 6.9; SWISSPROT HIT: Q9ZFC5, EVALUE 7.90e+00
DKATQKVDALVRQVIVRGGIVLDRFAVLSKVALVNLTDLLVDLSVVMVAFLPSTCHGEGHMVRMPCPNPGHLAQASVGLVGQLLGVPTTGDPFVAFALGHPDDVDHLVQPKRLVH

SEQ ID NO: 32235 - protein, 54 aa, Homo sapiens
  MAP TO AC026805.3; EXPRESSED IN ADULT LIVER, SIGNAL = 1.3; EXPRESSED IN BRAIN, SIGNAL = 1.7; EXPRESSED IN HELA, SIGNAL = 1.8; EXPRESSED IN LUNG, SIGNAL = 1.2; SWISSPROT HIT: P17678, EVALUE 3.60e+00
KSNRRIKSQPSPCGSSGPVRCESRTCWPAGRPCITKWTRTSAGRLPTRGTCGQT

SEQ ID NO: 32236 - protein, 269 aa, Homo sapiens
  MAP TO AC026805.3; EXPRESSED IN ADULT LIVER, SIGNAL = 1.3; EXPRESSED IN BRAIN, SIGNAL = 1.7; EXPRESSED IN HELA, SIGNAL = 1.8; EXPRESSED IN LUNG, SIGNAL = 1.2; SWISSPROT HIT: O00555, EVALUE 1.00e-118
KEQQKNQKPAKSVWEQRTSEMRKQNLLASREALYNEMDPDERWKAAYTRHLRPDMKTHLDRPLVVDPQENRNNNTNKSRAAEPTVDQRLGQQRAEDFLRKQARYHDRARDPSGSAGLDARRPWAGSQEAELSREGPYGRESDHHAREGSLEQPGFWEGEAERGKAGDPHRRHVHRQGGSRESRSGSPRTGADGEHRRHRAHRRPGEEGPEDKAERRARHREGSRPARGGEGEGEGPDGGERRRRHRHGAPATYEGDARREDKERRHRRR

SEQ ID NO: 32237 - protein, 259 aa, Homo sapiens
  MAP TO AL022157.1; EXPRESSED IN HELA, SIGNAL = 1.1; EXPRESSED IN ADULT LIVER, SIGNAL = 1.2; EXPRESSED IN LUNG, SIGNAL = 1.2; SWISSPROT HIT: Q99865, EVALUE 1.00e-124
GMKTPNAQEAEGQQTRAAAGRATGSANMTKKKVSQKKQRGRPSSQPRRNIVGCRISHGWKEGDEPITQWKGTVLDQVPINPSLYLVKYDGIDCVYGLELHRDERVLSLKILSDRVASSHISDANLANTIIGKAVEHMFEGEHGSKDEWRGMVLAQAPIMKAWFYITYEKDPVLYMYQLLDDYKEGDLRIMPESSESPPTEREPGGVVDGLIGKHVEYTKEDGSKRIGMVIHQVEAKPSVYFIKFDDDFHIYVYDLVKKS

SEQ ID NO: 32238 - protein, 29 aa, Homo sapiens
  MAP TO AL022157.1; EXPRESSED IN HELA, SIGNAL = 1.1; EXPRESSED IN ADULT LIVER, SIGNAL = 1.2; EXPRESSED IN LUNG, SIGNAL = 1.2
PKEAERPTFIPAPQEHRGLQNFSWMEGRR

SEQ ID NO: 32239 - protein, 176 aa, Homo sapiens
  MAP TO AC020647.9; EXPRESSED IN HELA, SIGNAL =  14; EXPRESSED IN ADULT LIVER, SIGNAL =   4; EXPRESSED IN PLACENTA, SIGNAL = 8.2; EXPRESSED IN LUNG, SIGNAL = 3.3; SWISSPROT HIT: P15289, EVALUE 8.40e+00
GSLDVQGQLDIHQLLVYTQLLCHVLLGPLQGGLQLQQLGVGILNGQLPALLGICDGGLQGSPLAFEALDLSLEPADILVHLGDVSLCTPQVIPVLPGQHLQVLILDLVHAVSLSPAAVGDLLILGLDLSDDVVHVQGVAAVYGQHHRRVRDQGLQLPDLLFMQLPEEVDLISQPFQ

SEQ ID NO: 32240 - protein, 163 aa, Homo sapiens
  MAP TO AL021392.5; EXPRESSED IN ADULT LIVER, SIGNAL = 1.9; EXPRESSED IN HELA, SIGNAL = 0.63; EXPRESSED IN BONE MARROW, SIGNAL = 1.8; EXPRESSED IN PLACENTA, SIGNAL = 1.8; EXPRESSED IN BRAIN, SIGNAL = 1.8; SWISSPROT HIT: P05790, EVALUE 6.00e-05
RIKLHVTTHVTTHCQGWTFQPSPPGMGPGYTSSLRLHRGRGALRDTAPGTGPGYASSLCLHRGRGALRDTLPGMGPGYASSLRLHRGRGALRDTPPGMGPGYASSLRLHRGRGALRDTPPGMGPGYASSLRLHRGRGALHGHMGSPRTALKSAPLYTRVTSSQ

SEQ ID NO: 32241 - protein, 154 aa, Homo sapiens
  MAP TO K02402.1; EXPRESSED IN HELA, SIGNAL = 4.2; EXPRESSED IN BONE MARROW, SIGNAL =   2; EXPRESSED IN LUNG, SIGNAL = 1.8; EXPRESSED IN HEART, SIGNAL = 1.7; EXPRESSED IN PLACENTA, SIGNAL = 1.4; EXPRESSED IN ADULT LIVER, SIGNAL = 3.2; SWISSPROT HIT: P00740, EVALUE 4.00e-89
EHNIEETEHTEQKRNVIRIIPHHNYNAAINKYNHDIALLELDEPLVLNSYVTPICIADKEYTNIFLKFGSGYVSGWGRVFHKGRSALVLQYLRVPLVDRATCLRSTKFTIYNNMFCAGFHEGGRDSCQGDSGGPHVTEVEGTSFLTGIISWGEE

SEQ ID NO: 32242 - protein, 185 aa, Homo sapiens
  MAP TO AL133551.4; EXPRESSED IN BONE MARROW, SIGNAL = 1.4; EXPRESSED IN ADULT LIVER, SIGNAL = 1.5; EXPRESSED IN BRAIN, SIGNAL = 1.1; EXPRESSED IN HELA, SIGNAL =   3; SWISSPROT HIT: O59923, EVALUE 9.00e-05
SIPHEVPQILINREPLPHLHFDVELLGDCDVIINELCHRLGGEYAKLCCNPVKLSEITEKPPRTQKELAYLSELPPTPLHVSEDSSSPERTSPPDSSVIVTLLDQAAKSNDDLDVSESKGCMEEKPQEVQTSRNVESIAEQMENPDLKNVGSSTGEKNERTSVAGTVRKCWPNRVAKEQISRRLD

SEQ ID NO: 32243 - protein, 18 aa, Homo sapiens
  MAP TO Z68868.1; EXPRESSED IN HELA, SIGNAL = 1.1; EXPRESSED IN ADULT LIVER, SIGNAL = 1.3; EXPRESSED IN BRAIN, SIGNAL = 1.1; EXPRESSED IN BONE MARROW, SIGNAL = 0.93; SWISSPROT HIT: P52742, EVALUE 1.00e-03
ECNDCSKAFSHSLSLTKH

SEQ ID NO: 32244 - protein, 197 aa, Homo sapiens
  MAP TO AC002039.1; EXPRESSED IN HEART, SIGNAL = 1.7; EXPRESSED IN BONE MARROW, SIGNAL = 1.4; EXPRESSED IN LUNG, SIGNAL = 1.4; EXPRESSED IN FETAL LIVER, SIGNAL = 1.4; EXPRESSED IN BRAIN, SIGNAL = 2.7; EXPRESSED IN HELA, SIGNAL = 0.48; EXPRESSED IN ADULT LIVER, SIGNAL = 1.3; SWISSPROT HIT: P98161, EVALUE 3.00e-90
VTLHGQDVLMLPGDLVGLQHDAGPGALPHCSPAPGHPGPQAPYLSANASSWLPHLPAQLEGTWACPACALRLLAATEQLTVLLGLRPNPGLRLPGRYEVRAEVGNGVSRHNLSCSFDVVSPVAGLRVIYPAPRDGRLYVPTNGSASVLQVDSGASATATARWPGGSVSARFENACPALVATFVPGCPWETNDTLFSV

SEQ ID NO: 32245 - protein, 146 aa, Homo sapiens
  MAP TO D86996.1; EXPRESSED IN BONE MARROW, SIGNAL = 1.2; EXPRESSED IN LUNG, SIGNAL = 1.2; EXPRESSED IN ADULT LIVER, SIGNAL = 1.2; EXPRESSED IN BRAIN, SIGNAL = 1.2
GPPGPAPPSTLPSPWSTAVHGVAGGRMLQLHQLLEDGVTKDAAHVLRLIAREWGLGLVEVHIKQGGLTDTAGVGGHPHAVGVLEAVRYHVALVAGHLPLGARGGVQHQHPALTFHALADAQHAQRVLAGGVRTLVAAHAWREKGAL

SEQ ID NO: 32246 - protein, 167 aa, Homo sapiens
  MAP TO AP000354.1; EXPRESSED IN LUNG, SIGNAL = 1.2; EXPRESSED IN HEART, SIGNAL = 1.2; EXPRESSED IN FETAL LIVER, SIGNAL = 1.3; EXPRESSED IN HELA, SIGNAL = 2.2; EXPRESSED IN ADULT LIVER, SIGNAL = 1.5; EXPRESSED IN PLACENTA, SIGNAL = 2.3; SWISSPROT HIT: O29032, EVALUE 2.70e+00
FLSTSFLSPTPFSAHSNLTFVPTSVLIALTKITSNLHVTECTPTPSPVCLQFRNKIFTSDFSSALSLSLPGPHLSLGISKGSQIKCVHVSSFHNPPHLSYLCMWYLLPFYLHIHLSASLLILLHQRALESVSLTLAPLCQLDKVQTPYPGVCLRDSRLPELAPLAYL

SEQ ID NO: 32247 - protein, 197 aa, Homo sapiens
  MAP TO AC005412.5; EXPRESSED IN BRAIN, SIGNAL = 2.4; EXPRESSED IN HELA, SIGNAL = 0.8; EXPRESSED IN ADULT LIVER, SIGNAL = 1.6; EXPRESSED IN BONE MARROW, SIGNAL = 1.8; EXPRESSED IN HEART, SIGNAL = 1.7; EXPRESSED IN LUNG, SIGNAL = 1.6; SWISSPROT HIT: P53668, EVALUE 1.20e-02
SEHSAAPSPQVEVRTLEGQLVQHPGPGIPRPGHRSRAPELVTKKFPVDLRLPPVVPLPPPTLRELELQRRPTGDFGFSLRRTTMLDRGPEGQACRRVVHFAEPGAGTKDLALGLVPGDRLVEINGHNVESKSRDEIVEMIRQSGDSVRLKVQPIPELSELSRSWLRSGEGPRREPSDVSASLGTWAKQGWGMWAPPA

SEQ ID NO: 32248 - protein, 289 aa, Homo sapiens
  MAP TO AL136528.9; EXPRESSED IN BRAIN, SIGNAL = 1.6; EXPRESSED IN ADULT LIVER, SIGNAL = 2.1; EXPRESSED IN HELA, SIGNAL = 1.3; EXPRESSED IN BONE MARROW, SIGNAL = 1.6; EXPRESSED IN FETAL LIVER, SIGNAL = 1.5; EXPRESSED IN LUNG, SIGNAL =   2; EXPRESSED IN HEART, SIGNAL = 1.6; SWISSPROT HIT: P17437, EVALUE 5.00e-35
CPGLSGATGSPSEGATPCPGLSGAAGSPSEGATPCPGLSGAAGSPSEGATPCPGLSGAAGSPSEGATPCPGLSGAAGSPSEGATPCPGLSGAAGSPSEGATPCPGLSGAAGSPSEGATPCPGLSGAAGSPSEGATPCPGLSGAAGSPSEGATPCPGLSGAAGSPSEGATPCPGLSGAAGSPSEGATPCPGLSGAAGSPSEGATPCPGLSGAAGSPSEGATPCPGLSGAAGSPSEGATPCPGLSGAAGSPSEGATPCPGLSGAAGSPSEGATPFRGLVGPLSPLAKAPPH

SEQ ID NO: 32249 - protein, 160 aa, Homo sapiens
  MAP TO AC002326.1; EXPRESSED IN HELA, SIGNAL = 1.6; EXPRESSED IN ADULT LIVER, SIGNAL = 2.2; EXPRESSED IN LUNG, SIGNAL =   2; EXPRESSED IN HEART, SIGNAL = 1.7; EXPRESSED IN FETAL LIVER, SIGNAL = 1.5; SWISSPROT HIT: P54253, EVALUE 2.00e-72
QHLVIPGTQPLLIPVGSTDMEASGAAPAIVTSSPQFAAVPHTFVTTALPKSENFNPEALVTQAAYPAMVQAQIHLPVVQSVASPAAAPPTLPPYFMKGSIIQLANGELKKVEDLKTEDFIQSAEISNDLKIDSSTVERIEDSHSPGVAVIQFAVGEHRAQ

SEQ ID NO: 32250 - protein, 156 aa, Homo sapiens
  MAP TO AC006070.1; EXPRESSED IN LUNG, SIGNAL = 1.2; EXPRESSED IN FETAL LIVER, SIGNAL = 1.3; EXPRESSED IN HELA, SIGNAL = 0.72; EXPRESSED IN ADULT LIVER, SIGNAL = 1.6; EXPRESSED IN BONE MARROW, SIGNAL = 1.1; SWISSPROT HIT: P26371, EVALUE 6.10e+00
MVNSCCGSVCSDQGCGLENCCRPSYCQTTCCRTTCCRPSCCVSSCCRPQCCQTTCCRTTCCHPSCCVSSCCRPQCCQSVCCQPTCCRPQCCQTTCCRTTCCRPSCCRPQCCQSVCCQPTCCCPSYCVSSCCRPQCCQTTCCRTTCCRPSCCVSRCY

SEQ ID NO: 32251 - protein, 221 aa, Homo sapiens
  MAP TO AL136528.9; EXPRESSED IN BRAIN, SIGNAL = 1.6; EXPRESSED IN ADULT LIVER, SIGNAL = 2.1; EXPRESSED IN HELA, SIGNAL = 1.3; EXPRESSED IN BONE MARROW, SIGNAL = 1.6; EXPRESSED IN FETAL LIVER, SIGNAL = 1.5; EXPRESSED IN LUNG, SIGNAL =   2; EXPRESSED IN HEART, SIGNAL = 1.6; SWISSPROT HIT: P78332, EVALUE 2.60e-02
MSGAQRGRWVPFRRRDPMSGAQRGRWVPFRRRDPMSGAQRGRWVPFRRRDPMSGAQRGRWVPFRRRDPMSGAQRGRWVPFRRRDPMSGAQRGRWVPFRRRDPMSGAQRGRWVPFRRRDPMSGAQRGRWVPFRRRDPMSGAQRGRWVPFRRRDPMSGAQRGRWVPFRRRDPMSGAQRGRWVPFRRRDPMSGAQRGRWVPFRRRDPISGVSGAAESTCEGATP

SEQ ID NO: 32252 - protein, 267 aa, Homo sapiens
  MAP TO AP000510.1; EXPRESSED IN LUNG, SIGNAL = 2.7; EXPRESSED IN ADULT LIVER, SIGNAL = 2.8; EXPRESSED IN HELA, SIGNAL = 4.8; EXPRESSED IN BRAIN, SIGNAL = 2.6; EXPRESSED IN HEART, SIGNAL = 2.9; EXPRESSED IN FETAL LIVER, SIGNAL = 3.2; SWISSPROT HIT: Q95211, EVALUE 5.30e-02
LFARSIGVVEEKVSQNLGTNLPQLGQPSSTGPSNSEHPQPALDPRSNDLARVPLKLSVPASDGFPPAGGSAVQRWPPSWGLPAMDSWPPEDPWQMMAAAAEDRLGEALPEELSYLSSAAALAPGSGPLPGESSPDATGLSPKASLLHQDSESRRLPRSNSLGAGGKILSQRPPWSLIHRVLPDHPWGTLNPSVSWGGGGPGTGWGTRPMPHPEGIWGINNQPPGTSWGNINRYPGGSWGNINRYPGGSWGNINRYPGGSWGNIHLYP

SEQ ID NO: 32253 - protein, 309 aa, Homo sapiens
  MAP TO AL136105.2; EXPRESSED IN ADULT LIVER, SIGNAL = 2.4; EXPRESSED IN HELA, SIGNAL = 7.7; EXPRESSED IN BONE MARROW, SIGNAL = 2.6; EXPRESSED IN HEART, SIGNAL = 2.5; EXPRESSED IN LUNG, SIGNAL = 2.2; EXPRESSED IN BRAIN, SIGNAL = 2.4; SWISSPROT HIT: P06733, EVALUE 0.00e+00
KKLNVTEQEKIDKLMIEMDGTENKSKFGANAILGVSLAACKASAVEKGVPLYHHIADLSGNSKVILPVPVFNVINGSSHAVTKLAMQEFMVLPVGAANFREAMPIGAEVYHSLKNVIKEKYGKDATGVGDGGAFAPNILENKEGLELLKTAIGKAGYTDKVIVSMDVEASEFFRSGKYDLEFKFLDDPTRYISPDCLADLYKSFIKNYPVVSTEDPFDQDDWGAWQKFTASAGIQVVEDDLRVTNPKRTASAVNEKKCNCLLLKVNQIRSVTESLQACKLAQANGWCVMVPHHSGETENTFITDLVVGL

SEQ ID NO: 32254 - protein, 46 aa, Homo sapiens
  MAP TO AL136105.2; EXPRESSED IN ADULT LIVER, SIGNAL = 2.4; EXPRESSED IN HELA, SIGNAL = 7.7; EXPRESSED IN BONE MARROW, SIGNAL = 2.6; EXPRESSED IN HEART, SIGNAL = 2.5; EXPRESSED IN LUNG, SIGNAL = 2.2; EXPRESSED IN BRAIN, SIGNAL = 2.4
CLFSRSMPGSSLTLVGIPLLRLISSPQKVSSELLCPVVLQLVSMRS

SEQ ID NO: 32255 - protein, 47 aa, Homo sapiens
  MAP TO AC004174.1; EXPRESSED IN LUNG, SIGNAL = 1.2; EXPRESSED IN ADULT LIVER, SIGNAL = 1.4; EXPRESSED IN HELA, SIGNAL = 1.2; EXPRESSED IN PLACENTA, SIGNAL = 1.6; EXPRESSED IN BRAIN, SIGNAL = 1.3; EXPRESSED IN BONE MARROW, SIGNAL = 1.3
KLGRSTWKLSPQETKLLLNLSSLASMTSLNCISCFLLYSLLSMSSSS

SEQ ID NO: 32256 - protein, 25 aa, Homo sapiens
  MAP TO AC004174.1; EXPRESSED IN LUNG, SIGNAL = 1.2; EXPRESSED IN ADULT LIVER, SIGNAL = 1.4; EXPRESSED IN HELA, SIGNAL = 1.2; EXPRESSED IN PLACENTA, SIGNAL = 1.6; EXPRESSED IN BRAIN, SIGNAL = 1.3; EXPRESSED IN BONE MARROW, SIGNAL = 1.3
LNAYCWLSWHMTATWQFATHSTTHS

SEQ ID NO: 32257 - protein, 297 aa, Homo sapiens
  MAP TO AC004174.1; EXPRESSED IN LUNG, SIGNAL = 1.2; EXPRESSED IN ADULT LIVER, SIGNAL = 1.4; EXPRESSED IN HELA, SIGNAL = 1.2; EXPRESSED IN PLACENTA, SIGNAL = 1.6; EXPRESSED IN BRAIN, SIGNAL = 1.3; EXPRESSED IN BONE MARROW, SIGNAL = 1.3; SWISSPROT HIT: Q9GZK7, EVALUE 0.00e+00
MEIVSTGNETITEFVLLGFYDIPELHFLFFIVFTAVYVFIIIGNMLIIVAVVSSQRLHKPMYIFLANLSFLDILYTSAVMPKMLEGFLQEATISVAGCLLQFFIFGSLATAECLLLAVMAYDRYLAICYPLHYPLLMGPRRYMGLVVTTWLSGFVVDGLVVALVAQLRFCGPNHIDQFYCDFMLFVGLACSDPRVAQVTTLILSVFCLTIPFGLILTSYARIVVAVLRVPAGASRRRAFSTCSSHLAVVTTFYGTLMIFYVAPSAVHSQLLSKVFSLLYTVVTPLFNPVIYTMRNKE

SEQ ID NO: 32258 - protein, 164 aa, Homo sapiens
  MAP TO AL132795.12; EXPRESSED IN HELA, SIGNAL = 2.1; EXPRESSED IN PLACENTA, SIGNAL = 1.5; EXPRESSED IN BRAIN, SIGNAL = 1.3; EXPRESSED IN ADULT LIVER, SIGNAL = 1.6; EXPRESSED IN FETAL LIVER, SIGNAL = 1.7; EXPRESSED IN HEART, SIGNAL = 1.5; EXPRESSED IN LUNG, SIGNAL = 1.7; EXPRESSED IN BONE MARROW, SIGNAL = 1.5; SWISSPROT HIT: Q01656, EVALUE 5.00e-21
EVEFREGEDEEEVEEEDVAEERDNGESEAHEDEEDELPKSFYKAPQAIPKEESRTGANKYVYFVCNEPGRPWVKLPPVIPAQIVIARKIKKFFTGRLDAPIISYPPFPGNESNYLRAQIARISAGTHVSPLGFYQFGEEEGEEEEEAEGGRNSFEENPDFEGIQ

SEQ ID NO: 32259 - protein, 556 aa, Homo sapiens
  MAP TO AL136109.1; EXPRESSED IN ADULT LIVER, SIGNAL = 3.5; EXPRESSED IN HELA, SIGNAL = 5.2; EXPRESSED IN PLACENTA, SIGNAL = 3.1; EXPRESSED IN BRAIN, SIGNAL = 3.6; EXPRESSED IN FETAL LIVER, SIGNAL = 4.3; SWISSPROT HIT: O18326, EVALUE 7.00e-05
ERRQKLMEEIRELKELQDEGRSARLQCPQCVFGTNCPKTFVQHAKTHEKDKRYYCCEECNFMAVTENELECHRGIAHGAVVKCPMVTSDIAQRKTQKKTFMKDSVVGSSKKSATYICKMCPFTTSAKSVLKKHTEYLHSSSCVDSFGSPLGLDKRKNDILEEPVDSDSTKTLTKQQSTTFPKNSALKQDVKRTFGSTSQSSSFSKIHKRPHRIQKARKSIAQSGVNMCNQNSSPHKNVTIKSSVDQKPKYFHQAAKEKSNAKANSHYLYRHKYENYRMIKKSGESYPVHFKKEEASSLNSLHLFSSSSNSHNNFISDPHKPDAKRPESFKDHRRVAVKRVIKESKKESSVGGEDLDSYPDFLHKMTVVVLQKLNSAEKKDSYETEDESSWDNVELGDYTTQAIEDETYSDINQEHVNLFPLFKSKVEGQEPGENATLSYDQNDGFYFEYYEDTGSNNFLHEIHDPQHLETADASLSKHSSVFHWTDLSLEKKSCPYCPATFETGVGLSNHVRGHLHRAGLSYEARHVVSPEQIATSDKMQHFKRTGTGTPVKRVRK

SEQ ID NO: 32260 - protein, 175 aa, Homo sapiens
  MAP TO AC008701.5; EXPRESSED IN ADULT LIVER, SIGNAL = 2.5; EXPRESSED IN BRAIN, SIGNAL =   2; EXPRESSED IN HELA, SIGNAL = 0.86; EXPRESSED IN BONE MARROW, SIGNAL = 2.2; EXPRESSED IN LUNG, SIGNAL = 2.5; SWISSPROT HIT: P97874, EVALUE 1.30e+00
KGTKARREVTRGPLTLSLGPRFCNTSLPVALRISTPAGAGEAGAGSLLSSRPWPLRGVSPSIPGRLPDPRSLPWPLRGVFAPRCPTLRASKSSVLLSKAPSTLQNMPPYFCRGTWSVVPGLARYTGRSSSWELSQPLRPEAMVQARKRPAGFSSPEAERAAAGSVRRATVTVAGG

SEQ ID NO: 32261 - protein, 30 aa, Homo sapiens
  MAP TO AC002401.1; EXPRESSED IN LUNG, SIGNAL =   2; EXPRESSED IN FETAL LIVER, SIGNAL = 1.9; EXPRESSED IN ADULT LIVER, SIGNAL = 1.6; EXPRESSED IN HELA, SIGNAL =   2; EXPRESSED IN PLACENTA, SIGNAL = 1.6; EXPRESSED IN HEART, SIGNAL = 2.8; SWISSPROT HIT: P03386, EVALUE 1.70e+00
MPRPRKSDAPQGSSPRSTEWPLPGRPPSPG

SEQ ID NO: 32262 - protein, 161 aa, Homo sapiens
  MAP TO AL050348.19; EXPRESSED IN HEART, SIGNAL =   5; EXPRESSED IN BONE MARROW, SIGNAL = 4.3; EXPRESSED IN LUNG, SIGNAL = 4.7; EXPRESSED IN ADULT LIVER, SIGNAL = 4.9; EXPRESSED IN BRAIN, SIGNAL = 3.9; EXPRESSED IN HELA, SIGNAL = 0.52; SWISSPROT HIT: Q63788, EVALUE 1.00e-01
VFQLLVAHGQPSQGQQGAVWARGGAQLGLQLPGIGPECQSLTIEASTGEALCPPQLRQHEEVLQVRGMAQLRHCLQVTQKLLKGPATAGNGLCSKIPAQPLTGEGDGSHWAPELPLQVSVQPLKVRVTARDLGWLAIWRSWADHGEGVELQGGWVSGQMQV

SEQ ID NO: 32263 - protein, 195 aa, Homo sapiens
  MAP TO AC004126.1; EXPRESSED IN ADULT LIVER, SIGNAL = 1.5; EXPRESSED IN BRAIN, SIGNAL = 1.2; EXPRESSED IN HELA, SIGNAL = 1.4; EXPRESSED IN BONE MARROW, SIGNAL = 1.2; EXPRESSED IN LUNG, SIGNAL =   1; EXPRESSED IN FETAL LIVER, SIGNAL = 1.4
PHDVGQRHTEATLPHPGADEPSPEPQQHQHPLHRPRGRAAARAGLAAGPGGEWSHPLRGGLPHAPDRGHHLGAAPGAVRPVGLCFPALLHLLLGRGPLVGAGHHLLQTALLHLLSQHVRQRLPAQRHQPGPLPAGGAAGVGAEPPHRGRGAQSLPGALGTSGAQHGALFRVPGHHLAAGRAHYVLLQCAAPEPGA

SEQ ID NO: 32264 - protein, 343 aa, Homo sapiens
  MAP TO AC004126.1; EXPRESSED IN ADULT LIVER, SIGNAL = 1.5; EXPRESSED IN BRAIN, SIGNAL = 1.2; EXPRESSED IN HELA, SIGNAL = 1.4; EXPRESSED IN BONE MARROW, SIGNAL = 1.2; EXPRESSED IN LUNG, SIGNAL =   1; EXPRESSED IN FETAL LIVER, SIGNAL = 1.4; SWISSPROT HIT: Q9Z2J6, EVALUE 1.00e-127
CPILEQMSRLQSHSNTSIRYIDHAAVLLHGLASLLGLVENGVILFVVGCRMRQTVVTTWVLHLALSDLLASASLPFFTYFLAVGHSWELGTTFCKLHSSIFFLNMFASGFLLSAISLDRCLQVVRPVWAQNHRTVAAAHKVCLVLWALAVLNTVPYFVFRDTISRLDGRIMCYYNVLLLNPGPDRDATCNSRQAALAVSKFLLAFLVPLAIIASSHAAVSLRLQHRGRRRPGRFVRLVAAVVAAFALCWGPYHVFSLLEARAHANPGLRPLVWRGLPFVTSLAFFNSVANPVLYVLTCPDMLRKLRRSLRTVLESVLVDDSELGGAGSSRRRRTSSTARSASP

SEQ ID NO: 32265 - protein, 21 aa, Homo sapiens
  MAP TO AP000885.1; EXPRESSED IN BRAIN, SIGNAL = 1.1; EXPRESSED IN ADULT LIVER, SIGNAL = 1.4; EXPRESSED IN HELA, SIGNAL = 2.6; EXPRESSED IN BONE MARROW, SIGNAL = 1.1; EXPRESSED IN LUNG, SIGNAL = 1.2; EXPRESSED IN FETAL LIVER, SIGNAL = 1.3
LFTGTKKLLVSQSRARWTTRA

SEQ ID NO: 32266 - protein, 32 aa, Homo sapiens
  MAP TO AP000885.1; EXPRESSED IN BRAIN, SIGNAL = 1.1; EXPRESSED IN ADULT LIVER, SIGNAL = 1.4; EXPRESSED IN HELA, SIGNAL = 2.6; EXPRESSED IN BONE MARROW, SIGNAL = 1.1; EXPRESSED IN LUNG, SIGNAL = 1.2; EXPRESSED IN FETAL LIVER, SIGNAL = 1.3
PEQDGRHVLNTWVRGWQPLNRGPRGLRLLDTT

SEQ ID NO: 32267 - protein, 214 aa, Homo sapiens
  MAP TO AC002550.1; EXPRESSED IN ADULT LIVER, SIGNAL =   2; EXPRESSED IN BRAIN, SIGNAL = 1.9; EXPRESSED IN HEART, SIGNAL = 2.6; EXPRESSED IN BONE MARROW, SIGNAL = 1.5; EXPRESSED IN LUNG, SIGNAL = 1.3; EXPRESSED IN HELA, SIGNAL = 1.3; SWISSPROT HIT: Q04750, EVALUE 2.00e+00
MITKTHKVDLGLPEKKKKKKVVKEPETRYSVLNNDDYFADVSPLRATSPSKSVAHGQAPEMPLVKKKKKKKKGVSTLCEEHVEPETTLPARRTEKSPSLRKQVFGHLEFLSGEKKNKKSPLAMSHASGVKTSPDPRQGEEETRVGKKLKKHKKEKKGAQDPTAFSVQDPWFCEAREARDVGDTCSVGKKDEEQAALGQKRKRKSPREHNGKVKK

SEQ ID NO: 32268 - protein, 587 aa, Homo sapiens
  MAP TO AC010328.4; EXPRESSED IN PLACENTA, SIGNAL = 3.6; EXPRESSED IN ADULT LIVER, SIGNAL =   3; EXPRESSED IN BRAIN, SIGNAL = 3.1; EXPRESSED IN HELA, SIGNAL = 2.7; EXPRESSED IN FETAL LIVER, SIGNAL = 3.9; EXPRESSED IN LUNG, SIGNAL =   3; EXPRESSED IN HEART, SIGNAL = 3.3; SWISSPROT HIT: P51522, EVALUE 0.00e+00
SSLKSMMEFSSTRHSITGEVIHTGTLQRHKSHHIGDFCFPEMKKDIHHFEFQWQEVERNGHEAPMTKIKKLTGSTDRSDHRHAGNKPIKDQLGLSFHSHLPELHMFQTKGKISNQLDKSIGASSASESQRISCRLKTHISNKYGKNFLHSSFTQIQEICMREKPCQSNECGKAFNYSSLLRRHHITHSREREYKCDVCGKIFNQKQYIVYHHRCHTGEKTYKCNECGKTFTQMSSLVCHRRLHTGEKPYKCNECGKTFSEKSSLRCHRRLHTGEKPYKCNECGKTFGRNSALVIHKAIHTGEKPYKCNECGKTFSQKSSLQCHHILHTGEKPYKCEECDNVYIRRSHLERHRKIHTGEGSYKCKVCDKVFRSDSYLAEHQRVHTGEKPYKCNKCGRSFSRKSSLQYHHTLHTGEKPYTCNECGKVFSRRENLARHHRLHAGEKPYKCEECDKVFSRRSHLERHRRIHTGEKPYKCKVCDKAFRSDSCLANHTRVHTGEKPYKCNKCAKVFNQKGILAQHQRVHTGEKPYKCNECGKVFNQKASLAKHQRVHTAEKPYKCNECGKAFTGQSTLIHHQAIHGCRETLQM

SEQ ID NO: 32269 - protein, 201 aa, Homo sapiens
  MAP TO AL031055.1; EXPRESSED IN HELA, SIGNAL = 0.64; EXPRESSED IN ADULT LIVER, SIGNAL = 2.2; EXPRESSED IN LUNG, SIGNAL = 1.5; EXPRESSED IN HEART, SIGNAL = 1.7; EXPRESSED IN FETAL LIVER, SIGNAL = 1.7; EXPRESSED IN BRAIN, SIGNAL = 2.5; SWISSPROT HIT: P87110, EVALUE 5.00e-20
HSPPVLPLCASVSLLGGLTFGYELAVISGALLPLQLDFGLSCLEQEFLVGSLLLGALLASLVGGFLIDCYGRKQAILGSNLVLLAGSLTLGLAGSLAWLVLGRAVVGFAISLSSMACCIYVSELVGPRQRGVLVSLYEAGITVGILLSYALNYALAGTPWGWRHMFGWATAPAVLQSLSLLFLPAGTDETATHKDLIPLQG

SEQ ID NO: 32270 - protein, 114 aa, Homo sapiens
  MAP TO AL031055.1; EXPRESSED IN HELA, SIGNAL = 0.64; EXPRESSED IN ADULT LIVER, SIGNAL = 2.2; EXPRESSED IN LUNG, SIGNAL = 1.5; EXPRESSED IN HEART, SIGNAL = 1.7; EXPRESSED IN FETAL LIVER, SIGNAL = 1.7; EXPRESSED IN BRAIN, SIGNAL = 2.5; SWISSPROT HIT: P08572, EVALUE 7.00e-01
LVSFAVPMDSGPSCLAVPNATGQTGLPGDSGLLQDSSLPPIPRTNEDQREPILSTAKKTKPHPRSGDPSAPPRLALSSALPGPPLPARGHALLRWTALLCLMVFVSAFSFGFGP

SEQ ID NO: 32271 - protein, 53 aa, Homo sapiens
  MAP TO D86994.1; EXPRESSED IN BONE MARROW, SIGNAL =  13; EXPRESSED IN LUNG, SIGNAL = 3.2; EXPRESSED IN HEART, SIGNAL = 1.6; EXPRESSED IN HELA, SIGNAL = 1.5; EXPRESSED IN ADULT LIVER, SIGNAL = 1.5; EXPRESSED IN PLACENTA, SIGNAL = 1.5; EXPRESSED IN BRAIN, SIGNAL = 1.1; SWISSPROT HIT: P01717, EVALUE 1.00e-17
SVASYELTQPSSVSVSPGQTARITCSGDVLAKKYARWFQQKPGQAPVLVIYKD

SEQ ID NO: 32272 - protein, 157 aa, Homo sapiens
  MAP TO M63544.1; EXPRESSED IN BONE MARROW, SIGNAL = 0.97; EXPRESSED IN LUNG, SIGNAL =   1; EXPRESSED IN HELA, SIGNAL = 0.81; EXPRESSED IN ADULT LIVER, SIGNAL = 1.3; EXPRESSED IN BRAIN, SIGNAL =   1; SWISSPROT HIT: Q29074, EVALUE 4.30e+00
YYVGMCLAASEKRIHALSQAPEAWRLFLLLAVTLPSIACILIYYWSRDRWACHPLARTLALYALPQSGWQAVASSVNTEFRRIDKFATGAPGARVIVTDTWVMKVTTYRVHVAQQQDVHLTVTESRQHELSPDSNLPVQLLTIRVASTNPAVQAFDI

SEQ ID NO: 32273 - protein, 125 aa, Homo sapiens
  MAP TO AL049557.19; EXPRESSED IN ADULT LIVER, SIGNAL = 3.6; EXPRESSED IN PLACENTA, SIGNAL = 4.9; SWISSPROT HIT: Q9UHI6, EVALUE 6.00e-68
PIPSGLMEECVDWDVEVKAAVHTYGIASVPNQPLKKQIQKIERTLQIQKAHGDHMASSRNNSVSGLSVKSKNNTKQKLPVKSHSECGIIEKATSPKELGCDRQSEEQMKNSVQTPVENSTNSQHQ

SEQ ID NO: 32274 - protein, 162 aa, Homo sapiens
  MAP TO AC015897.3; EXPRESSED IN ADULT LIVER, SIGNAL = 1.2; EXPRESSED IN BRAIN, SIGNAL = 1.1; EXPRESSED IN HELA, SIGNAL = 1.4; EXPRESSED IN BONE MARROW, SIGNAL =   1; SWISSPROT HIT: Q02752, EVALUE 1.50e-01
TTTMSSLLFFVDMKTASSTSSRSHPYSSDSEDESAVGDREAHTDSSTDESARRSSSQELSENDKPRKSHLPIEESLEIEIEDQEITKADVETKPMPIDESFENVLKEGTEKGTQEIAEGLSEKSGKHVSAEEKEKDKSKLWEESTAQVKDKKAGLPGLEEGG

SEQ ID NO: 32275 - protein, 243 aa, Homo sapiens
  MAP TO AC009336.2; EXPRESSED IN LUNG, SIGNAL =   2; EXPRESSED IN BONE MARROW, SIGNAL =   2; EXPRESSED IN FETAL LIVER, SIGNAL = 2.4; EXPRESSED IN ADULT LIVER, SIGNAL = 2.1; EXPRESSED IN BRAIN, SIGNAL = 1.9; EXPRESSED IN HELA, SIGNAL = 1.9; SWISSPROT HIT: Q03828, EVALUE 2.00e-74
VWFQNRRMKDKRQRLAMSWPHPADPSFYTYMMTHAAATGSLPYPFHSHVPLHYYPHVGVTAAAAAAAASGAAAAASSPFATSIRPLDTFRALSHPYSRPELLCSFRHPGLYQAPAAAAGLNSAASAAAAAAAAAAAASSAAAAGAPPSGGSAPCSCLSCHSSQSAAAAAAAAAAALGSRGGGGGGGGGGGGGGGGAGAGGGSDFGCSAAAPRSESGFLPYSAAVLSKTAVSPPDQRDEAPLTR

SEQ ID NO: 32276 - protein, 57 aa, Homo sapiens
  MAP TO AC009336.2; EXPRESSED IN LUNG, SIGNAL =   2; EXPRESSED IN BONE MARROW, SIGNAL =   2; EXPRESSED IN FETAL LIVER, SIGNAL = 2.4; EXPRESSED IN ADULT LIVER, SIGNAL = 2.1; EXPRESSED IN BRAIN, SIGNAL = 1.9; EXPRESSED IN HELA, SIGNAL = 1.9
EGQAAAPGHVLAAPSRPQLLHLHDDARGRHRKPALPLPLARAAALLPARGRHGGGGR

SEQ ID NO: 32277 - protein, 105 aa, Homo sapiens
  MAP TO AC009336.2; EXPRESSED IN LUNG, SIGNAL =   2; EXPRESSED IN BONE MARROW, SIGNAL =   2; EXPRESSED IN FETAL LIVER, SIGNAL = 2.4; EXPRESSED IN ADULT LIVER, SIGNAL = 2.1; EXPRESSED IN BRAIN, SIGNAL = 1.9; EXPRESSED IN HELA, SIGNAL = 1.9
QQRGLCRGSRGSRSGCGLLGGGGRRAPQRRLCTLLVPQLPQQSVGGGSRGSSCRSPGFPGWRWRRRWWWWRRRRGRRGRGRLGLRLQRGGAAFRERLPALLGRGA

SEQ ID NO: 32278 - protein, 55 aa, Homo sapiens
  MAP TO AF205588.1; EXPRESSED IN BRAIN, SIGNAL = 2.2; EXPRESSED IN HELA, SIGNAL = 2.6; EXPRESSED IN ADULT LIVER, SIGNAL = 1.9; EXPRESSED IN HEART, SIGNAL = 1.9; EXPRESSED IN FETAL LIVER, SIGNAL = 2.5; EXPRESSED IN LUNG, SIGNAL = 2.3; SWISSPROT HIT: Q58454, EVALUE 6.20e+00
VRNPMNVMNVGNLSLGVHILQYIRELTQARNPMNVRYVEKPFATSLMPLNIRRLT

SEQ ID NO: 32279 - protein, 356 aa, Homo sapiens
  MAP TO AF205588.1; EXPRESSED IN BRAIN, SIGNAL = 2.2; EXPRESSED IN HELA, SIGNAL = 2.6; EXPRESSED IN ADULT LIVER, SIGNAL = 1.9; EXPRESSED IN HEART, SIGNAL = 1.9; EXPRESSED IN FETAL LIVER, SIGNAL = 2.5; EXPRESSED IN LUNG, SIGNAL = 2.3; SWISSPROT HIT: Q06730, EVALUE 0.00e+00
EISPHSTSESPHRRETLCKECGKCFSRNSHLIIHQRTHTGEQPCECKECRKSFYHKSYLTVHQRIHTGEKPYECNQCGKTFISNSVLTIHRKTYTGEKPYECNECGKSFSRSSYLTIHQRTHPGEKPYECKVCRKTFCHKSDATKHQKTHLGGKPYECTQCGKTFSRNSGLKVHQRTHAKEKPYEYTECGKSFSEKSVLTVHQRIHTGEKPYKCNARGKTFYNKSDLTKHQRTHTGEKPCECKECGKFFSRNSYLTIHQRMHTGDKPYVCKKCGKTFYHKADYTVHKRTHRGEKSYYCNKCGKTFICNSVLKSHQRTHTGEKPYGCNECGKSFSEKSVLTVHQRIHTGEKPYKCNE

SEQ ID NO: 32280 - protein, 545 aa, Homo sapiens
  MAP TO AP000512.1; EXPRESSED IN BONE MARROW, SIGNAL = 3.8; EXPRESSED IN LUNG, SIGNAL = 2.8; EXPRESSED IN ADULT LIVER, SIGNAL = 1.7; EXPRESSED IN PLACENTA, SIGNAL =   2; EXPRESSED IN BRAIN, SIGNAL = 2.1; EXPRESSED IN HELA, SIGNAL =   2; SWISSPROT HIT: Q02817, EVALUE 7.00e-28
GDQESPDACLPPTVPEAPAPPQKPLNSQSQKHLAPPPLLSPLLPSIKPTVRKTRQDGSQEAPEAPLSSELEPFHPKPKIRTRKSSRMTPFPATSAAPEPHPSTSTAQPVTPKPTSQATRSRTNRSSVKTPEPVVPTAPELQPSTSTDQPVTSEPTSQVTRGRKSRSSVKTPETVVPTALELQPSTSTDRPVTSEPTSQATRGRKNRSSVKTPEPVVPTAPELQPSTSTDQPVTSEPTYQATRGRKNRSSVKTPEPVVPTAPELRPSTSTDRPVTPKPTSRTTRSRTNMSSVKTPETVVPTAPELQISTSTDQPVTPKPTSRTTRSRTNMSSVKNPESTVPIAPELPPSTSTEQPVTPEPTSRATRGRKNRSSGKTPETLVPTAPKLEPSTSTDQPVTPEPTSQATRGRTNRSSVKTPETVVPTAPELQPSTSTDQPVTPEPTSQATRGRTDRSSVKTPETVVPTAPELQASASTDQPVTSDPTSRTTRGRKNRSSVKTPETVVPAAPELQPPTSTDQPVTPEPTSRATRGRTNRSSVKTPESIVP

SEQ ID NO: 32281 - protein, 192 aa, Homo sapiens
  MAP TO AL078594.14; EXPRESSED IN BRAIN, SIGNAL = 1.3; EXPRESSED IN HELA, SIGNAL = 0.87; EXPRESSED IN ADULT LIVER, SIGNAL = 1.6; EXPRESSED IN PLACENTA, SIGNAL = 1.8; EXPRESSED IN LUNG, SIGNAL = 1.4; EXPRESSED IN HEART, SIGNAL = 2.2; EXPRESSED IN BONE MARROW, SIGNAL = 1.6; EXPRESSED IN FETAL LIVER, SIGNAL = 1.6; SWISSPROT HIT: O10358, EVALUE 4.40e+00
SCAVPELRGRPGLLGSAAGAACVSSQHLRHPAGGGGHDILHGPPPSSAPPASLGRRLPPPARSPAPAQRPPCLRVNPLSPLHNFRSASCPRLCSPHGHVCPCGFSPPNAIHGQRRPLRATSLHLSLVPLCHRPRRSRSSHRGCTQLPSVLRGGIPHASPKRSSSSGRGHSHQPALVSISHVQSSADQQWNKQ

SEQ ID NO: 32282 - protein, 215 aa, Homo sapiens
  MAP TO AL078594.14; EXPRESSED IN BRAIN, SIGNAL = 1.3; EXPRESSED IN HELA, SIGNAL = 0.87; EXPRESSED IN ADULT LIVER, SIGNAL = 1.6; EXPRESSED IN PLACENTA, SIGNAL = 1.8; EXPRESSED IN LUNG, SIGNAL = 1.4; EXPRESSED IN HEART, SIGNAL = 2.2; EXPRESSED IN BONE MARROW, SIGNAL = 1.6; EXPRESSED IN FETAL LIVER, SIGNAL = 1.6; SWISSPROT HIT: Q9Y5J3, EVALUE 6.00e-21
SIGFRECLTEVARYLSSVEGLDSSDPLRVRLVSHLSTCATQREAAAMTSSMAHHHHPLHPHHWAAAFHHLPAALLQPNGLHASESTPCRLSTTSEVPPAHGSALLTATFAHADSALRMPSTGSVAPCVPPLSTSLLSLSATVHAAAAAATAAAHSFPLSFAGAFPMLPPNAAAAVAAATAISPPLSVSATSSPQQTSSGTNNKPYRPWGTEVGAF

SEQ ID NO: 32283 - protein, 1247 aa, Homo sapiens [sequence omitted]

SEQ ID NO: 32284 - protein, 167 aa, Homo sapiens
  MAP TO AC008895.4; EXPRESSED IN BONE MARROW, SIGNAL = 5.9; EXPRESSED IN FETAL LIVER, SIGNAL = 5.8; EXPRESSED IN ADULT LIVER, SIGNAL = 5.7; EXPRESSED IN PLACENTA, SIGNAL = 6.2; EXPRESSED IN HELA, SIGNAL = 3.7; EXPRESSED IN LUNG, SIGNAL = 5.7; EXPRESSED IN HEART, SIGNAL = 6.5; SWISSPROT HIT: O93995, EVALUE 3.60e+00
WQESKMSEFPPTTSVWWDYLGPRRKRASVGLESLVCATASCARVLTSFTWTIPPSSAPVTLEGEWSIMTTFSTGEKLAAPWRIVWNVRCTLWSRLNLLMIRLFNLIEARPCSPISRELLRPSLHQLKNSCTFALTSWGWSRTLSRNKCQTESCWLMVFFLVLMLAGA

SEQ ID NO: 32285 - protein, 31 aa, Homo sapiens
  MAP TO AF036405.1; EXPRESSED IN ADULT LIVER, SIGNAL = 2.1; EXPRESSED IN HELA, SIGNAL = 4.3; EXPRESSED IN BRAIN, SIGNAL = 1.8; EXPRESSED IN FETAL LIVER, SIGNAL = 2.3; EXPRESSED IN LUNG, SIGNAL = 2.1; EXPRESSED IN BONE MARROW, SIGNAL = 2.2
LKLVLENLVGDLEVALTEIQLSSQIHLCFPL

SEQ ID NO: 32286 - protein, 294 aa, Homo sapiens
  MAP TO AF036405.1; EXPRESSED IN ADULT LIVER, SIGNAL = 2.1; EXPRESSED IN HELA, SIGNAL = 4.3; EXPRESSED IN BRAIN, SIGNAL = 1.8; EXPRESSED IN FETAL LIVER, SIGNAL = 2.3; EXPRESSED IN LUNG, SIGNAL = 2.1; EXPRESSED IN BONE MARROW, SIGNAL = 2.2; SWISSPROT HIT: Q03164, EVALUE 0.00e+00
KTSPRKPRGRPRSGSDRNSAILSDPSVFSPLNKSETKSGDKIKKKDSKSIEKKRGRPPTFPGVKIKITHGKDISELPKGNKEDSLKKIKRTPSATFQQATKIKKLRAGKLSPLKSKFKTGKLQIGRKGVQIVRRRGRPPSTERIKTPSGLLINSELEKPQKVRKDKEGTPPLTKEDKTVVRQSPRRIKPVRIIPSSKRTDATIAKQLLQRAKKGAQKKIEKEAAQLQGRKVKTQVKNIRQFIMPVVSAISSRIIKTPRRFIEDEDYDPPIKIARLESTPNSRFSAPSCGSSEKS

SEQ ID NO: 32287 - protein, 186 aa, Homo sapiens
  MAP TO AL133338.2; EXPRESSED IN HELA, SIGNAL = 4.7; EXPRESSED IN BRAIN, SIGNAL = 3.9; EXPRESSED IN ADULT LIVER, SIGNAL = 4.1; EXPRESSED IN BONE MARROW, SIGNAL = 5.7; EXPRESSED IN FETAL LIVER, SIGNAL = 4.6; EXPRESSED IN LUNG, SIGNAL = 4.7; SWISSPROT HIT: P41877, EVALUE 1.80e+00
GTDNGREAIESGAAFLFMTFHLKDSVGHKETKAIKQMFGPFPSSSATAACNATNRIISHFSQDDLTALVQMTEKEHGDRVFFGKNLAFSFDMHDLDHFDELPINGETQKTISLDYKKFLNEHLQEACTPELKPVEKTNGSFLWCEVEKYLNSTLKEMTEVPRVEDLCCTLYDMLASIKSGDELQDE

SEQ ID NO: 32288 - protein, 18 aa, Homo sapiens
  MAP TO AL133338.2; EXPRESSED IN HELA, SIGNAL = 4.7; EXPRESSED IN BRAIN, SIGNAL = 3.9; EXPRESSED IN ADULT LIVER, SIGNAL = 4.1; EXPRESSED IN BONE MARROW, SIGNAL = 5.7; EXPRESSED IN FETAL LIVER, SIGNAL = 4.6; EXPRESSED IN LUNG, SIGNAL = 4.7
LELIMGEKQLKVGLHFSS

SEQ ID NO: 32289 - protein, 57 aa, Homo sapiens
  MAP TO AC004131.1; EXPRESSED IN ADULT LIVER, SIGNAL = 1.3; EXPRESSED IN PLACENTA, SIGNAL = 2.3; EXPRESSED IN HELA, SIGNAL = 0.6
PRQLHVLLEGRLPHPGLRRVEVVGRVLLQGWQKGAVDLRDGVEDDEDPAAGRQRDGQ

SEQ ID NO: 32290 - protein, 20 aa, Homo sapiens
  MAP TO Z82192.1; EXPRESSED IN BRAIN, SIGNAL = 3.2; EXPRESSED IN ADULT LIVER, SIGNAL = 3.6; EXPRESSED IN PLACENTA, SIGNAL =   3; EXPRESSED IN HELA, SIGNAL = 7.5; EXPRESSED IN BONE MARROW, SIGNAL = 3.7; EXPRESSED IN LUNG, SIGNAL =   3; EXPRESSED IN HEART, SIGNAL = 3.4; EXPRESSED IN FETAL LIVER, SIGNAL = 3.7
MATASPRTAALWAWLKKRAA

SEQ ID NO: 32291 - protein, 155 aa, Homo sapiens
  MAP TO Z82192.1; EXPRESSED IN BRAIN, SIGNAL = 3.2; EXPRESSED IN ADULT LIVER, SIGNAL = 3.6; EXPRESSED IN PLACENTA, SIGNAL =   3; EXPRESSED IN HELA, SIGNAL = 7.5; EXPRESSED IN BONE MARROW, SIGNAL = 3.7; EXPRESSED IN LUNG, SIGNAL =   3; EXPRESSED IN HEART, SIGNAL = 3.4; EXPRESSED IN FETAL LIVER, SIGNAL = 3.7; SWISSPROT HIT: P42128, EVALUE 2.20e-01
GPAAQEAWVKVLSRASFGYMRLVVRELESQLQDARQSLALQRRSSWKSVASRCKPQAPNHRAAGLENGHCLSKDSSPVGLVEEAGSRSAGWGLAEWELQGPASLLLGKGQSPVSPETSCFSTLHDWYGQEIVELRQCWQKRAQGSHSKCEEQDRP

SEQ ID NO: 32292 - protein, 110 aa, Homo sapiens
  MAP TO AJ009613.3; EXPRESSED IN PLACENTA, SIGNAL =  11; EXPRESSED IN HELA, SIGNAL =  20; EXPRESSED IN BRAIN, SIGNAL = 8.1; EXPRESSED IN HEART, SIGNAL = 5.7; EXPRESSED IN LUNG, SIGNAL =  16; EXPRESSED IN ADULT LIVER, SIGNAL = 5.3
DAPVHGGAARQHVLAYKSLQMSTSHFMMELKVVLWMLQHSMPRKEGWNSASRHWNCLLPMAMTWPWAPHSYSPGRRRMRRWPSPARRATQLLLVMHDLPLGRGDQAVAKL

SEQ ID NO: 32293 - protein, 476 aa, Homo sapiens
  MAP TO AF038458.1; EXPRESSED IN BRAIN, SIGNAL = 1.8; EXPRESSED IN ADULT LIVER, SIGNAL = 1.4; EXPRESSED IN HELA, SIGNAL = 3.2; EXPRESSED IN BONE MARROW, SIGNAL = 1.7; EXPRESSED IN LUNG, SIGNAL = 1.7; EXPRESSED IN HEART, SIGNAL = 1.5; SWISSPROT HIT: O75325, EVALUE 6.00e-21
TPLPAMAILPLLLCLLPLAPASSPPQSATPSPCPRRCRCQTQSLPLSVLCPGAGLLFVPPSLDRRAAELRLADNFIASVRRRDLANMTGLLHLSLSRNTIRHVAAGAFADLRALRALHLDGNRLTSLGEGQLRGLVNLRHLILSNNQLAALAAGALDDCAETLEDLDLSYNNLEQLPWEALGRLGNVNTLGLDHNLLASVPAGAFSRLHKLARLDMTSNRLTTIPPDPLFSRLPLLARPRGSPASALVLAFGGNPLHCNCELVWLRRLAREDDLEACASPPALGGRYFWAVGEEEFVCEPPVVTHRSPPLAVPAGRPAALRCRAVGDPEPRVRWVSPQGRLLGNSSRARAFPNGTLELLVTEPGDGGIFTCIAANAAGEATAAVELTVGPPPPPQLANSTSCDPPRDGDPDALTPPSAASASAKVADTGPPTDRGVQVTEHGATAALVQWPDQRPIPGIRMYQIQYNSSADDILVY

SEQ ID NO: 32294 - protein, 195 aa, Homo sapiens [sequence omitted]

SEQ ID NO: 32295 - protein, 216 aa, Homo sapiens
  MAP TO AC006273.1; EXPRESSED IN HEART, SIGNAL = 2.1; EXPRESSED IN BONE MARROW, SIGNAL =   3; EXPRESSED IN ADULT LIVER, SIGNAL = 1.8; EXPRESSED IN PLACENTA, SIGNAL = 2.8; SWISSPROT HIT: Q29099, EVALUE 3.00e-53
AFIEMNTEEAANTMVNYYTSVTPVLRGQPIYIQFSNHKELKTDSSPNQAVRGPAADPSSPGTSGVGPAAGAGDSRLCLPQRAQAALQAVNSVQSGNLALAASAAAVDAGMAMAGQSPVLRIIVENLFYPVTLDVLHQVRWSHHRQGRSAAIAVGTGTREGPGRAGGHRAGAHAVARDLQIFSKFGTVLKIITFTKNNQFQALLQYADPVSAQHAKL

SEQ ID NO: 32296 - protein, 215 aa, Homo sapiens
  MAP TO AC006273.1; EXPRESSED IN HEART, SIGNAL = 2.1; EXPRESSED IN BONE MARROW, SIGNAL =   3; EXPRESSED IN ADULT LIVER, SIGNAL = 1.8; EXPRESSED IN PLACENTA, SIGNAL = 2.8; SWISSPROT HIT: P46804, EVALUE 3.10e+00
LHRDEHGGGCQHHGELLHLGDPCAARPAHLHPVLQPQGAEDRQLSQPGGAWPRGGPQQPGDLGGGPSRRGRGLTAVPPTAGPGGPAGGELGPVGEPGLGCLGGGRGRRDGDGRAEPRAQDHRGEPLLPCDPGCAAPGEVVPSPPGQVGCYCCGHRHTGGAWQGWWAPGRSSCCGPGPADFLQVRHSVEDHHLHQEQPVPGPAAVCGPRERPARQA

SEQ ID NO: 32297 - protein, 171 aa, Homo sapiens
  MAP TO AC006137.1; EXPRESSED IN FETAL LIVER, SIGNAL = 8.1; EXPRESSED IN ADULT LIVER, SIGNAL = 8.1; EXPRESSED IN PLACENTA, SIGNAL =  15; EXPRESSED IN HELA, SIGNAL = 4.7; EXPRESSED IN HEART, SIGNAL =  10; EXPRESSED IN LUNG, SIGNAL =   8; EXPRESSED IN BONE MARROW, SIGNAL = 9.5; SWISSPROT HIT: P35410, EVALUE 1.00e-25
FLSVFSGKLDWDNRTETPGQVNMSHTGGEWLVGKQVVFILTVLVAFCGLVGNGVVCWLFCFQVRSSPYMTYVLNLAAADMVNLSCVTVILLEKILMLYHQVTLQVAMFLEPVSYFSDTVSLCLLVAMNIESFLCVLCPTWCCHRPKHTSAVMSILSWALALSLHVVSQVCE

SEQ ID NO: 32298 - protein, 44 aa, Homo sapiens
  MAP TO AC009533.9; EXPRESSED IN LUNG, SIGNAL = 1.9; EXPRESSED IN HEART, SIGNAL =   2; EXPRESSED IN PLACENTA, SIGNAL = 2.3; EXPRESSED IN ADULT LIVER, SIGNAL = 1.8; SWISSPROT HIT: P43027, EVALUE 6.40e+00
RPTGVTPLLTRRLPRIAVLLIWHLWLRQALILKENYKNWKDLLE

SEQ ID NO: 32299 - protein, 202 aa, Homo sapiens
  MAP TO AC009533.9; EXPRESSED IN LUNG, SIGNAL = 1.9; EXPRESSED IN HEART, SIGNAL =   2; EXPRESSED IN PLACENTA, SIGNAL = 2.3; EXPRESSED IN ADULT LIVER, SIGNAL = 1.8; SWISSPROT HIT: P21416, EVALUE 7.00e-32
RKRALDDFHQYLLAGIKGAARKPINLSKTFEVVQGPDEPPGAFLERLQEAYRSYTPFDPAAPENSCAINLAFVAQAGPDIKRKLQKLEGFAGMNISQLLEIAQKVFDNREFEKRKRAAQATEKAADKASKRHAKILVAAIQEAKKERPPSQRNGQGTPGPRQKGKKGEQAPLEKNQHAYCKQTRHWKKECPLKPEEKPEKKN

SEQ ID NO: 32300 - protein, 158 aa, Homo sapiens
  MAP TO AL121907.2; EXPRESSED IN HELA, SIGNAL = 0.85; EXPRESSED IN BRAIN, SIGNAL = 1.8; EXPRESSED IN ADULT LIVER, SIGNAL = 2.2; EXPRESSED IN FETAL LIVER, SIGNAL = 1.9; EXPRESSED IN BONE MARROW, SIGNAL = 2.3; EXPRESSED IN LUNG, SIGNAL = 2.7; SWISSPROT HIT: P31896, EVALUE 1.60e+00
FKQATKSKVWRVVGCRPTFPRPLCYQVCHYYSPGLGCRRHRNRCTFARSREEALVWTFERQHNLQRLWLKAEVQGSGAQGGAGRAADAILTEFGGRFELLCSLCFRRCPPCICRVDPQGQCPEHGACPSLLAHVSAEGRRKQQFVVVRPRPRAGQPPA

SEQ ID NO: 32301 - protein, 569 aa, Homo sapiens
  MAP TO AC005622.1; EXPRESSED IN BRAIN, SIGNAL = 3.3; EXPRESSED IN ADULT LIVER, SIGNAL = 4.4; EXPRESSED IN HELA, SIGNAL =   3; EXPRESSED IN HEART, SIGNAL = 3.7; EXPRESSED IN BONE MARROW, SIGNAL = 3.8; EXPRESSED IN FETAL LIVER, SIGNAL = 3.5; SWISSPROT HIT: P75678, EVALUE 3.20e-02
MPITQRGASFCPWSHSKLVAEKGCEPGPARPQSPLTCAKNVSPILEGKRELWASRATPFTSVVSVSPCPMPRPRRCEWLPSPLQALRITHPVTLPCPPPPSEPLATMATSKLPVVPGEEENTILMAKERLEALRTAFESGDLPQAASHLQELLASTESIRLEVGVTGESGAGKSSLINALRGLEAEDPGAALTGVMETTMQPSPYPHPQFPDVTLWDLPGAGSPGCPADKYLKQVDFSRYDFFLLVSPRRCGAVETRLAAEILCQGKKFYFVRTKVDEDLAATRTQRPSGFREAAVLQEIRDHCAERLREAGVADPRIFLVSNLSPARYDFPTLVSTWEHDLPSHRRHAGLLSLPDISLEALQKKKAMLQEQVLKTALVLGVIQALPVPGLAAAYDDALLIHSLRGYHRSFGLDDDSLAKLAEQVGKQAGDLRSVIRSPLANEVSPETVLRLYSQSSDGAMRVARAFERGIPVFGTLVAGGISFGAVYTMLQGCLNEMAEDAQRVRIKALEDDEPQPEVSLEVASDNGVEKGGSGEGGGEEAPLSTCRKLGLLLKYILDSWKKHDSEEK

SEQ ID NO: 32302 - protein, 106 aa, Homo sapiens
  MAP TO AC005622.1; EXPRESSED IN BRAIN, SIGNAL = 3.3; EXPRESSED IN ADULT LIVER, SIGNAL = 4.4; EXPRESSED IN HELA, SIGNAL =   3; EXPRESSED IN HEART, SIGNAL = 3.7; EXPRESSED IN BONE MARROW, SIGNAL = 3.8; EXPRESSED IN FETAL LIVER, SIGNAL = 3.5; SWISSPROT HIT: P17471, EVALUE 4.80e+00
WLLQSCPWCLGRRKTPSLWPRKGWRPCAQPLSRVTSPRPPLTSRSCWPPRKASAWRWASRASRARASPPSSMPCVAWRPRTLARLSRASWRPRCNRRPIHTHSSLT

SEQ ID NO: 32303 - protein, 30 aa, Homo sapiens
  MAP TO AC005622.1; EXPRESSED IN BRAIN, SIGNAL = 3.3; EXPRESSED IN ADULT LIVER, SIGNAL = 4.4; EXPRESSED IN HELA, SIGNAL =   3; EXPRESSED IN HEART, SIGNAL = 3.7; EXPRESSED IN BONE MARROW, SIGNAL = 3.8; EXPRESSED IN FETAL LIVER, SIGNAL = 3.5; SWISSPROT HIT: P57728, EVALUE 2.30e+00
GYFKVARGAWGGGKHHPYGQGKAGGPAHSL

SEQ ID NO: 32304 - protein, 184 aa, Homo sapiens
  MAP TO AC002553.1; EXPRESSED IN LUNG, SIGNAL = 1.7; EXPRESSED IN ADULT LIVER, SIGNAL = 1.6; EXPRESSED IN BRAIN, SIGNAL = 1.6; EXPRESSED IN BONE MARROW, SIGNAL = 1.3; EXPRESSED IN HEART, SIGNAL = 1.7; EXPRESSED IN FETAL LIVER, SIGNAL = 1.3; SWISSPROT HIT: O75376, EVALUE 2.00e-83
AENSSDTESAPSPSPVEAVKPSEDSPENATSRGNTEPAVELEPTTETAPSTSPSLAVPSTKPAEDESVETQVNDSISAETAEQMDVDQQEHSAEEGSVCDPPPATKADSVDVEVRVPENHASKVEGDNTKERDLDRASEKVEPRDEDLVVAQQINAQRPEPQSDNDSSATCSADEDVDGEPERQ

SEQ ID NO: 32305 - protein, 271 aa, Homo sapiens
  MAP TO AC010644.6; EXPRESSED IN HELA, SIGNAL =   4; EXPRESSED IN ADULT LIVER, SIGNAL = 2.4; EXPRESSED IN PLACENTA, SIGNAL = 1.7; EXPRESSED IN LUNG, SIGNAL =   2; EXPRESSED IN BONE MARROW, SIGNAL = 2.2; EXPRESSED IN FETAL LIVER, SIGNAL = 1.9; SWISSPROT HIT: P34657, EVALUE 8.00e-51
MVDHLANTEINSQRIAAVESCFGASGQPLALPGRVLLGEGVLTKECRKKAKPRIFFLFNDILVYGSIVLNKRKYRSQHIIPLEEVTLELLPETLQAKNRWMIKTAKKSFVVSAASATERQEWISHIEECVRRQLRATGRPPSTEHAAPWIPDKATDICMRCTQTRFSALTRRHHCRKCGFVVCAECSRQRFLLPRLSPKPVRVCSLCYRELAAQQRQEEAEEQGAGSPGQPAHLARPICGASSGDDDDSDEDKEGSRDGDWPSSVEFYASG

SEQ ID NO: 32306 - protein, 46 aa, Homo sapiens
  MAP TO AC010644.6; EXPRESSED IN HELA, SIGNAL =   4; EXPRESSED IN ADULT LIVER, SIGNAL = 2.4; EXPRESSED IN PLACENTA, SIGNAL = 1.7; EXPRESSED IN LUNG, SIGNAL =   2; EXPRESSED IN BONE MARROW, SIGNAL = 2.2; EXPRESSED IN FETAL LIVER, SIGNAL = 1.9
ASWRRWWTTWPTRRSTASASRQWRAASGPRGSRWRCQAECCWARAC

SEQ ID NO: 32307 - protein, 63 aa, Homo sapiens
  MAP TO AC010644.6; EXPRESSED IN HELA, SIGNAL =   4; EXPRESSED IN ADULT LIVER, SIGNAL = 2.4; EXPRESSED IN PLACENTA, SIGNAL = 1.7; EXPRESSED IN LUNG, SIGNAL =   2; EXPRESSED IN BONE MARROW, SIGNAL = 2.2; EXPRESSED IN FETAL LIVER, SIGNAL = 1.9
PPAGDDGGPLGQHGDQQPAHRGSGELLRGLGAAAGAARPSAAGRGRADQRVPQEGQAAHLLPL

SEQ ID NO: 32308 - protein, 297 aa, Homo sapiens
  MAP TO AP001725.1; EXPRESSED IN BONE MARROW, SIGNAL = 2.1; EXPRESSED IN FETAL LIVER, SIGNAL = 1.5; EXPRESSED IN ADULT LIVER, SIGNAL = 1.5; EXPRESSED IN PLACENTA, SIGNAL = 1.6; EXPRESSED IN BRAIN, SIGNAL = 1.8; EXPRESSED IN HELA, SIGNAL = 2.7; SWISSPROT HIT: Q9Y3R5, EVALUE 0.00e+00
MGGRAYPKRSALLAAFQSESFKAGAKLSLVRVDSDKTQASESFSSDEEADLELQALTTSRLLKQQRERQEAVEALFKHILLYLQPYDSRRVLYAFSVLEAVLKTNPKEFIEAVSRTSMDTSSTAHLNLISNLLARHQEALIGQSFYGKLQTQVPNVCPHSLLLELLTYLCLSFLRSYYPCYLKVSHRDILGNRDVQVKSVEVLIRIMMQLVSVAKSSEGKNVEFIHSLLQRCKVQEFVLLSLSASMYTSQKRYGLATAHHGRALPEDSLFEESLINLGQDQIWSEHPLQIELLKLLQ

SEQ ID NO: 32309 - protein, 21 aa, Homo sapiens
  MAP TO AP001725.1; EXPRESSED IN BONE MARROW, SIGNAL = 2.1; EXPRESSED IN FETAL LIVER, SIGNAL = 1.5; EXPRESSED IN ADULT LIVER, SIGNAL = 1.5; EXPRESSED IN PLACENTA, SIGNAL = 1.6; EXPRESSED IN BRAIN, SIGNAL = 1.8; EXPRESSED IN HELA, SIGNAL = 2.7; SWISSPROT HIT: Q9Y3R5, EVALUE 3.00e-05
ICKNLDDLVKQYESESVKLSV

SEQ ID NO: 32310 - protein, 33 aa, Homo sapiens
  MAP TO AP001725.1; EXPRESSED IN BONE MARROW, SIGNAL = 2.1; EXPRESSED IN FETAL LIVER, SIGNAL = 1.5; EXPRESSED IN ADULT LIVER, SIGNAL = 1.5; EXPRESSED IN PLACENTA, SIGNAL = 1.6; EXPRESSED IN BRAIN, SIGNAL = 1.8; EXPRESSED IN HELA, SIGNAL = 2.7
MTCTVGLTGRKPLSERHAQCPSLRRAALKSTCL

SEQ ID NO: 32311 - protein, 394 aa, Homo sapiens
  MAP TO AC009079.4; EXPRESSED IN ADULT LIVER, SIGNAL = 1.2; EXPRESSED IN HELA, SIGNAL = 1.9; EXPRESSED IN BONE MARROW, SIGNAL = 1.2; EXPRESSED IN FETAL LIVER, SIGNAL = 1.4; EXPRESSED IN LUNG, SIGNAL = 1.2; SWISSPROT HIT: O43313, EVALUE 0.00e+00
WATADSSVSSCSQTDLSFDSQVSLPISVHTQTFLPSSKVTSSIAAQTDAFMDTCFQSGGVSRETQTSGIESPTDDHVQMDQAGMCGDIFESVHSSYNVATGNIISNSLVAETVTHSLLPQNEPKTLNQDIEKSAPIINFSAQNSMLPSQNMTDNQTQTIDLLSDLENILSSNLPAQTLDHRSLLSDTNPGPDTQLPSGPAQNPGIDFDIEEFFSASNIQTQTEESELSTMTTEPVLESLDIETQTDFLLADTSAQSYGCRGNSNFLGLEMFDTQTQTDLNFFLDSSPHLPLGSILKHSSFSVSTDSSDTETQTEGVSTAKNIPALESKVQLNSTETQTMSSGFETLGSLFFTSNETQTAMDDFLLADLAWNTMESQFSSVETQTSAEPHTVSNF

SEQ ID NO: 32312 - protein, 136 aa, Homo sapiens
  MAP TO AC004889.1; EXPRESSED IN HELA, SIGNAL = 1.3; EXPRESSED IN ADULT LIVER, SIGNAL = 1.5; EXPRESSED IN LUNG, SIGNAL = 1.2; EXPRESSED IN HEART, SIGNAL = 1.2; EXPRESSED IN BONE MARROW, SIGNAL = 1.1; SWISSPROT HIT: O15320, EVALUE 2.00e-52
MEEPGATPQPYLGLVLEELRRVVAALPESMRPDENPYGFPSELVVCAAVIGFFVVLLFLWRSFRSVRSRLYVGREQKLGATLSGLIEEKCKLLEKFSLIQKEYEGYEVESSLEDASFEKAAAEEARSLEATCEKLN

SEQ ID NO: 32313 - protein, 28 aa, Homo sapiens
  MAP TO AC004889.1; EXPRESSED IN HELA, SIGNAL = 1.3; EXPRESSED IN ADULT LIVER, SIGNAL = 1.5; EXPRESSED IN LUNG, SIGNAL = 1.2; EXPRESSED IN HEART, SIGNAL = 1.2; EXPRESSED IN BONE MARROW, SIGNAL = 1.1; SWISSPROT HIT: P37677, EVALUE 6.70e+00
RSLVLPLSPTWGWSWRSYAELWQHYLRV

SEQ ID NO: 32314 - protein, 34 aa, Homo sapiens
  MAP TO AL121919.19; EXPRESSED IN LUNG, SIGNAL = 1.9; EXPRESSED IN HELA, SIGNAL = 0.9; EXPRESSED IN ADULT LIVER, SIGNAL = 2.1; EXPRESSED IN BONE MARROW, SIGNAL = 1.4; EXPRESSED IN FETAL LIVER, SIGNAL = 1.9
WRFQNPPALPLLRGTSQLPLLALQGPQVARPHLT

SEQ ID NO: 32315 - protein, 72 aa, Homo sapiens
  MAP TO AL121919.19; EXPRESSED IN LUNG, SIGNAL = 1.9; EXPRESSED IN HELA, SIGNAL = 0.9; EXPRESSED IN ADULT LIVER, SIGNAL = 2.1; EXPRESSED IN BONE MARROW, SIGNAL = 1.4; EXPRESSED IN FETAL LIVER, SIGNAL = 1.9; SWISSPROT HIT: P48608, EVALUE 7.90e-02
GPRWPGLTSPDPGPCPSAARAGPGPPHCVPEGPAHPTVPHGASRGPPAPRPASDGQPRWGQRALHTQPCAAA

SEQ ID NO: 32316 - protein, 150 aa, Homo sapiens
  MAP TO AL035668.15; EXPRESSED IN ADULT LIVER, SIGNAL = 1.8; EXPRESSED IN HELA, SIGNAL = 1.3; EXPRESSED IN HEART, SIGNAL =   2; EXPRESSED IN FETAL LIVER, SIGNAL = 1.4; SWISSPROT HIT: P12643, EVALUE 3.00e-84
TSAELQVFREQMQDALGNNSSFHHRINIYEIIKPATANSKFPVTRLLDTRLVNQNASRWESFDVTPAVMRWTAQGHANHGFVVEVAHLEEKQGVSKRHVRISRSLHQDEHSWSQIRPLLVTFGHDGKGHPLHKREKRQAKHKQRKRLKSS

SEQ ID NO: 32317 - protein, 212 aa, Homo sapiens
  MAP TO AL133227.7; EXPRESSED IN ADULT LIVER, SIGNAL = 2.1; EXPRESSED IN BRAIN, SIGNAL = 1.6; EXPRESSED IN HELA, SIGNAL = 1.4; EXPRESSED IN BONE MARROW, SIGNAL = 1.7; EXPRESSED IN LUNG, SIGNAL = 1.7; EXPRESSED IN HEART, SIGNAL =   2; EXPRESSED IN FETAL LIVER, SIGNAL =   2; SWISSPROT HIT: P15620, EVALUE 6.00e-61
PSKVIQHQSMHSGLKPYKCDVCQKAFRFLSSLSIHQRFHVGNRVNLTRHQKTHTQRKPFSCNFCGKTFHRFSEKTQHLLIHTRKKYYTCNYCKKEFNPYSKFILHQRTHTGEKPHKCDVCEKSFKSISNLNKHQKTHTGEKPFSCNECKKAFAQRTDLARHQQIHTGKKSFICSSCKKTFVRLSDLTQHKGTHTGERPYQCTTCEKAFKYRS

SEQ ID NO: 32318 - protein, 174 aa, Homo sapiens
  MAP TO AL133316.2; EXPRESSED IN ADULT LIVER, SIGNAL = 1.6; EXPRESSED IN HELA, SIGNAL = 2.4; EXPRESSED IN BONE MARROW, SIGNAL = 1.5; EXPRESSED IN LUNG, SIGNAL = 1.6; SWISSPROT HIT: P51513, EVALUE 1.00e-52
LGLSQAAATGALAAAAASANPAAAAANLLATYASEASASGSTAGGTAGTFALGSLAAATAATNGYFGAASPLAASAILGTEKSTDGSKDVVEIAVPENLVGAILGKGGKTLVEYQELTGARIQISKKGEFVPGTRNRKVTITGTPAATQAAQYLITQRITYEQGVRAANPQKVG

SEQ ID NO: 32319 - protein, 501 aa, Homo sapiens
  MAP TO AC010203.13; EXPRESSED IN ADULT LIVER, SIGNAL = 1.4; EXPRESSED IN HELA, SIGNAL = 2.6; SWISSPROT HIT: P32583, EVALUE 1.60e-02
FVIPSEVKSECHQDQPRAISIQSSEMIATNTRHCPNCRHSDLEALFQDFKDCDFFSKTYTSFPKSCDNFNLLHPIFQRHAHEQDTKMHEIYKGNITPQLNKNTLKTSAATDVWAVYFSQFWIDYEGMKSGKGRPISFVDSFPLSIWICQPTRYAESQKEPQTCNQVSLNTSQSESSDLAGRLKRKKLLKEYYSTESEPLTNGGQKPSSSDTFFRFSPSSSEADIHLLVHVHKHVSMQINHYQYLLLLFLHESLILLSENLRKDVEAVTGSPASQTSICIGILLRSAELALLLHPVDQANTLKSPVSESVSPVVPDYLPTENGDFLSSKRKQISRDINRIRSVTVNHMSDNRSMSVDLSHIPLKDPLLFKSASDTNLQKGISFMDYLSDKHLGKISEDESSGLVYKSGSGEIGSETSDKKDSFYTDSSSILNYREDSNILSFDSDGNQNILSSTLTSKGNETIESIFKAEDLLPEAASLSENLDISKEETPPVRTLKSQSSL

SEQ ID NO: 32320 - protein, 21 aa, Homo sapiens
  MAP TO AC010203.13; EXPRESSED IN ADULT LIVER, SIGNAL = 1.4; EXPRESSED IN HELA, SIGNAL = 2.6
DMLMNKIPKCMKFIKEILLPN

SEQ ID NO: 32321 - protein, 185 aa, Homo sapiens
  MAP TO AC005618.1; EXPRESSED IN LUNG, SIGNAL = 1.4; EXPRESSED IN HEART, SIGNAL = 2.2; EXPRESSED IN BONE MARROW, SIGNAL = 1.1; EXPRESSED IN FETAL LIVER, SIGNAL = 1.1; EXPRESSED IN ADULT LIVER, SIGNAL = 1.5; EXPRESSED IN BRAIN, SIGNAL = 2.2; EXPRESSED IN HELA, SIGNAL = 0.97; SWISSPROT HIT: Q9Y5I2, EVALUE 4.00e-44
EILCQLKGNFPFKIVQDTKNTYRLVTDGALDREQIPEYNVTITATDKGNPPLSSSKTITLHILDVNDNVPVFHQASYTVHVAENNPPGASIAHVRASDPDLGPNGLVSYYIVASDLEPRELSSYVSVSARSGVVFAQRAFDHEQLRAFELTLQARDQGSPTLSANVSLRVLVDDRNDNAPLVLYP

SEQ ID NO: 32322 - protein, 239 aa, Homo sapiens
  MAP TO AL121747.19; EXPRESSED IN BONE MARROW, SIGNAL = 1.4; EXPRESSED IN LUNG, SIGNAL = 1.3; EXPRESSED IN FETAL LIVER, SIGNAL = 1.1; EXPRESSED IN HELA, SIGNAL = 2.2; EXPRESSED IN ADULT LIVER, SIGNAL = 1.6; EXPRESSED IN BRAIN, SIGNAL = 1.8; EXPRESSED IN HEART, SIGNAL = 1.4; SWISSPROT HIT: O15370, EVALUE 4.00e-43
MVQQRGARAKRDGGPPPPGPGPAEEGAREPGWCKTPSGHIKRPMNAFMVWSQHERRKIMDQWPDMHNAEISKRLGRRWQLLQDSEKIPFVREAERLRLKHMADYPDYKYRPRKKSKGAPAKARPRPPGGSGGGSRLKPGPQLPGRGGRRAAGGPLGGGAAAPEDDDEDDDEELLEVRLVETPGRELWRMVPAGRAARGQAERAQGPSGEGAAAAAAASPTPSEDEEPEEEEEEAAAAEE

SEQ ID NO: 32323 - protein, 250 aa, Homo sapiens
  MAP TO AL121747.19; EXPRESSED IN BONE MARROW, SIGNAL = 1.4; EXPRESSED IN LUNG, SIGNAL = 1.3; EXPRESSED IN FETAL LIVER, SIGNAL = 1.1; EXPRESSED IN HELA, SIGNAL = 2.2; EXPRESSED IN ADULT LIVER, SIGNAL = 1.6; EXPRESSED IN BRAIN, SIGNAL = 1.8; EXPRESSED IN HEART, SIGNAL = 1.4; SWISSPROT HIT: O15370, EVALUE 1.00e-21
WCGRSTNGGRSWTSGPTCTTPRSPSAWAAAGSCCRTRRRSRSCGRRSGCGSSTWRITRTTSTGRAKRARGRPPRRGPAPPVVAVAAAGSSPGRSCLAAGAAEQREGLWGAGRRRPRTTMKTTTRSCWKCAWSRPRGGSCGGWSRRDGPLGDKRSAPKGRRARGRPPPPPPPRHRRRTRSRRKRRRRRQRLRKVKRRRWRRGRSRWAFCPGCPLARPAWTAAPWIATRTCSLPRARRTSSSRTTAPPRLPR

SEQ ID NO: 32324 - protein, 820 aa, Homo sapiens
  MAP TO AC000066.1; EXPRESSED IN HELA, SIGNAL = 0.87; EXPRESSED IN ADULT LIVER, SIGNAL = 1.4; EXPRESSED IN BRAIN, SIGNAL = 1.1; EXPRESSED IN HEART, SIGNAL = 1.6; EXPRESSED IN LUNG, SIGNAL = 1.3; EXPRESSED IN BONE MARROW, SIGNAL = 1.3; SWISSPROT HIT: Q99996, EVALUE 0.00e+00
PEAKNAILTFSFFFLKEQDKKVENSNKEEIQEKETIIEELNTKIIEEEKKTLELKDKLTTADKLLGELQEQIVQKNQEIKNMKLELTNSKQKERQSSEEIKQLMGTVEELQKRNHKDSQFETDIVQRMEQETQRKLEQLRAELDEMYGQQIVQMKQELIRQHMAQMEEMKTRHKGEMENALRSYSNITVNEDQIKLMNVAINELNIKLQDTNSQKEKLKEELGLILEEKCALQRQLEDLVEELSFSREQIQRARQTIAEQESKLNEAHKSLSTVEDLKAEIVSASESRKELELKHEAEVTNYKIKLEMLEKEKNAVLDRMAESQEAELERLRTQLLFSHEEELSKLKEDLEIEHRINIEKLKDNLGIHYKQQIDGLQNEMSQKIETMQFEKDNLITKQNQLILEISKLKDLQQSLVNSKSEEMTLQINELQKEIEILRQEEKEKGTLEQEVQELQLKTELLEKQMKEKENDLQEKFAQLEAENSILKDEKKTLEDMLKIHTPVSQEERLIFLDSIKSKSKDSVWEKEIEILIEENEDLKQQCIQLNEEIEKQRNTFSFAEKNFEVNYQELQEEYACLLKVKDDLEDSKNKQELEYKSKLKALNEELHLQRINPTTVKMKSSVFDEDKTFVAETLEMGEVVEKDTTELMEKLEVTKREKLELSQRLSDLSEQLKQKHGEISFLNEEVKSLKQEKEQVSLRCRELEIIINHNRAENVQSCDTQVSSLLDGVVTMTSRGAEGSVSKVNKSFGEESKIMVEDKVSFENMTVGEESKQEQLILDHLPSVTKESSLRATQPSENDKLQKELNVLKSEQVCLLLHIW

SEQ ID NO: 32325 - protein, 27 aa, Homo sapiens
  MAP TO AC005263.1; EXPRESSED IN BRAIN, SIGNAL = 1.4; EXPRESSED IN ADULT LIVER, SIGNAL = 1.5; EXPRESSED IN HELA, SIGNAL = 2.6; EXPRESSED IN BONE MARROW, SIGNAL = 1.7; EXPRESSED IN FETAL LIVER, SIGNAL = 1.5; SWISSPROT HIT: O10304, EVALUE 8.80e+00
PRCWRACSRSAQVAPAASAIPCERCCS

SEQ ID NO: 32326 - protein, 285 aa, Homo sapiens
  MAP TO AC005263.1; EXPRESSED IN BRAIN, SIGNAL = 1.4; EXPRESSED IN ADULT LIVER, SIGNAL = 1.5; EXPRESSED IN HELA, SIGNAL = 2.6; EXPRESSED IN BONE MARROW, SIGNAL = 1.7; EXPRESSED IN FETAL LIVER, SIGNAL = 1.5; SWISSPROT HIT: P03971, EVALUE 7.00e-90
PSAELEESPPSADPFLETLTRLVRALRVPPARASAPRLALDPDALAGFPQGLVNLSDPAALERLLDGEEPLLLLLRPTAATTGDPAPLHDPTSAPWATALARRVAAELQAAAAELRSLPGLPPATAPLLARLLALCPGGPGGLGDPLRALLLLKALQGLRVEWRGRDPRGPGRAQRSAGATAADGPCALRELSVDLRAERSVLIPETYQANNCQGVCGWPQSDRNPRYGNHVVLLLKMQVRGAALARPPCCVPTAYAGKLLISLSEERISAHHVPNMVATECGCR

SEQ ID NO: 32327 - protein, 237 aa, Homo sapiens
  MAP TO AL034344.19; EXPRESSED IN LUNG, SIGNAL = 4.3; EXPRESSED IN FETAL LIVER, SIGNAL = 5.3; EXPRESSED IN ADULT LIVER, SIGNAL = 3.6; EXPRESSED IN HELA, SIGNAL =  10; EXPRESSED IN HEART, SIGNAL = 6.8; SWISSPROT HIT: Q12948, EVALUE 1.00e-102
GVVPYLGGEQSYYRAAAAAAGGGYTAMPAPMSVYSHPAHAEQYPGGMARAYGPYTPQPQPKDMVKPPYSYIALITMAIQNAPDKKITLNGIYQFIMDRFPFYRDNKQGWQNSIRHNLSLNECFVKVPRDDKKPGKGSYWTLDPDSYNMFENGSFLRRRRRFKKKDAVKDKEEKDRLHLKEPPPPGRQPPPAPPEQADGNAPGPQPPPVRIQDIKTENGTCPSPPQPLSPAAALGSGS

SEQ ID NO: 32328 - protein, 22 aa, Homo sapiens
  MAP TO AP000533.1; EXPRESSED IN ADULT LIVER, SIGNAL = 1.2; EXPRESSED IN BRAIN, SIGNAL = 1.6; EXPRESSED IN HELA, SIGNAL = 0.64; EXPRESSED IN HEART, SIGNAL = 1.4; EXPRESSED IN LUNG, SIGNAL = 1.1; EXPRESSED IN FETAL LIVER, SIGNAL = 0.99
WPSTARSIFLEILALMNSISSL

SEQ ID NO: 32329 - protein, 400 aa, Homo sapiens
  MAP TO AP000533.1; EXPRESSED IN ADULT LIVER, SIGNAL = 1.2; EXPRESSED IN BRAIN, SIGNAL = 1.6; EXPRESSED IN HELA, SIGNAL = 0.64; EXPRESSED IN HEART, SIGNAL = 1.4; EXPRESSED IN LUNG, SIGNAL = 1.1; EXPRESSED IN FETAL LIVER, SIGNAL = 0.99; SWISSPROT HIT: Q14694, EVALUE 0.00e+00
MALHSPQYIFGDFSPDEFNQFFVTPRSSVELPPCSGTVLCGTQAGDKLPDGQEYRRIEFGVNEVIEPSDTLLRTPSYSISSTLNPQAPEFILGCTASKTTPDGITKEASYGSIDQYPGCALALDGSSSVEAEVLENDGVSGGLGQRERKKKKKQPPGYYSCLKDGGDDSISTEALVNGHANSAVPNSVSAEDAEFMGDMPPSVTPRTFDSPQNSTDSVSDIVPDSPFPGALGSDTGTAGQQEGGPGVDFGQSCFPAGAGRDTLSRTAGAQPCVGTDTTENLGVANGQILESSGEGTATNGVELHTMESIDLDPAKPESPSPPADGTGSASGTLPVSQPRSWTSLFHDSKPSSSWPVAYVEAKYSPPAISPLVSEKQVEVKEGLVPVSGDPVARHWLLSRQ

SEQ ID NO: 32330 - protein, 26 aa, Homo sapiens
  MAP TO AC015805.3; EXPRESSED IN ADULT LIVER, SIGNAL = 1.5; EXPRESSED IN FETAL LIVER, SIGNAL = 1.6; EXPRESSED IN HEART, SIGNAL = 1.7; EXPRESSED IN BONE MARROW, SIGNAL = 1.4; EXPRESSED IN PLACENTA, SIGNAL = 2.4
MKPAPNNQKSMLEKLKLFNSKGGSKA

SEQ ID NO: 32331 - protein, 193 aa, Homo sapiens
  MAP TO AC015805.3; EXPRESSED IN ADULT LIVER, SIGNAL = 1.5; EXPRESSED IN FETAL LIVER, SIGNAL = 1.6; EXPRESSED IN HEART, SIGNAL = 1.7; EXPRESSED IN BONE MARROW, SIGNAL = 1.4; EXPRESSED IN PLACENTA, SIGNAL = 2.4; SWISSPROT HIT: P29966, EVALUE 1.00e+00
NEKEKEKQQREKDKEKSKDLAKRASVTERLDLKEEPKEDPSGAAVPEMPKKSSKIASFIPKGGKLNSAKKEPMAPSHSGIPKPGMKSMPGKSPSAPAPSKEGERSRSGKLSSGLPQQKPQLDGRHSSSSSSLASSEGKGPGGTTLNHSISSQTVSGSVGTTQTTGSNTVSVQLPQPQQQYNHPNTATVAPFLY

SEQ ID NO: 32332 - protein, 36 aa, Homo sapiens
  MAP TO AC015805.3; EXPRESSED IN ADULT LIVER, SIGNAL = 1.5; EXPRESSED IN FETAL LIVER, SIGNAL = 1.6; EXPRESSED IN HEART, SIGNAL = 1.7; EXPRESSED IN BONE MARROW, SIGNAL = 1.4; EXPRESSED IN PLACENTA, SIGNAL = 2.4
WLTLPGLQCRSTSMIQASSLLSLQSLWQVQPPPTPE

SEQ ID NO: 32333 - protein, 169 aa, Homo sapiens
  MAP TO AF146191.1; EXPRESSED IN ADULT LIVER, SIGNAL = 1.5; EXPRESSED IN HELA, SIGNAL = 0.41; SWISSPROT HIT: P51532, EVALUE 3.70e+00
QRTILPRTLSSQSILTQVRHFCFLLSGWALHLGFFQAFLQPLPCLPELKFQPHRCSSWEGRVQGAVHTGLPEGPLHGRVLADSSRATCRPRRWPRELGPSRVPRAHPRGQRDPQPSQASPVTPALRSGCAPLSSPSPPGATSSPAPGGGHARRTLGRDEGTGKRPFLHT

SEQ ID NO: 32334 - protein, 60 aa, Homo sapiens
  MAP TO AL158091.7; EXPRESSED IN BRAIN, SIGNAL = 1.8; EXPRESSED IN HELA, SIGNAL =   1; EXPRESSED IN ADULT LIVER, SIGNAL = 1.5; EXPRESSED IN PLACENTA, SIGNAL =   2; EXPRESSED IN LUNG, SIGNAL = 1.7; EXPRESSED IN HEART, SIGNAL = 2.3; EXPRESSED IN BONE MARROW, SIGNAL = 1.6
MRASVLLLDEAPISNSASSSEASDLMLMSSAALMKSWQACTMSVICRKLAADITSMTFLL

SEQ ID NO: 32335 - protein, 61 aa, Homo sapiens
  MAP TO AL158091.7; EXPRESSED IN BRAIN, SIGNAL = 1.8; EXPRESSED IN HELA, SIGNAL =   1; EXPRESSED IN ADULT LIVER, SIGNAL = 1.5; EXPRESSED IN PLACENTA, SIGNAL =   2; EXPRESSED IN LUNG, SIGNAL = 1.7; EXPRESSED IN HEART, SIGNAL = 2.3; EXPRESSED IN BONE MARROW, SIGNAL = 1.6
DVLVRLEDLALHDHADVAQDAVLPLLVELPQQVPVVGRDFHIFLSVVHLEALVSPLLQTLW

SEQ ID NO: 32336 - protein, 74 aa, Homo sapiens
  MAP TO AP001712.1; EXPRESSED IN HEART, SIGNAL = 2.8; EXPRESSED IN BONE MARROW, SIGNAL = 2.8; EXPRESSED IN FETAL LIVER, SIGNAL = 2.3; EXPRESSED IN ADULT LIVER, SIGNAL = 2.5; EXPRESSED IN PLACENTA, SIGNAL = 3.1; EXPRESSED IN BRAIN, SIGNAL = 2.7; EXPRESSED IN HELA, SIGNAL = 1.8; SWISSPROT HIT: P57058, EVALUE 5.00e-28
SFGCRNIFRKTSDSNCVASSSMEFIPVPPPRTPRIVKKPEPHQPGPGSTGIPHKEDPLMLDMVRSFESVDRDDH

SEQ ID NO: 32337 - protein, 42 aa, Homo sapiens
  MAP TO AP001712.1; EXPRESSED IN HEART, SIGNAL = 2.8; EXPRESSED IN BONE MARROW, SIGNAL = 2.8; EXPRESSED IN FETAL LIVER, SIGNAL = 2.3; EXPRESSED IN ADULT LIVER, SIGNAL = 2.5; EXPRESSED IN PLACENTA, SIGNAL = 3.1; EXPRESSED IN BRAIN, SIGNAL = 2.7; EXPRESSED IN HELA, SIGNAL = 1.8; SWISSPROT HIT: Q92837, EVALUE 8.40e+00
CFLGVQIPLAAAIFSAKPQIPIVWLLLPWSSSPCHRPGPRGL

SEQ ID NO: 32338 - protein, 225 aa, Homo sapiens
  MAP TO AF196971.1; EXPRESSED IN LUNG, SIGNAL =   1; EXPRESSED IN BONE MARROW, SIGNAL = 1.2; EXPRESSED IN ADULT LIVER, SIGNAL =   3; EXPRESSED IN BRAIN, SIGNAL = 1.2; EXPRESSED IN HELA, SIGNAL = 0.55; SWISSPROT HIT: Q9UBN7, EVALUE 1.00e-120
VEDREGPSSSKLVTKKAPQPAKPRLAERMTTREKKVLEAGMGKVTSASFGEESTPGQTNSETAVVALTQDQPSEAATGGATLAQTISEAAIGGAMLGQTTSEEAVGGATPDQTTSEETVGGAILDQTTSEDAVGGATLGQTTSEEAVGGATLAQTTSEAAMEGATLDQTTSEEAPGGTELIQTPLASSTDHQTPPTSPVQGTTPQISPSTLIGSLRTLELGSESQ

SEQ ID NO: 32339 - protein, 36 aa, Homo sapiens
  MAP TO AC002039.1; EXPRESSED IN BONE MARROW, SIGNAL = 1.9; EXPRESSED IN FETAL LIVER, SIGNAL = 1.9; EXPRESSED IN PLACENTA, SIGNAL =   3; EXPRESSED IN ADULT LIVER, SIGNAL = 1.9; EXPRESSED IN HELA, SIGNAL = 3.7; SWISSPROT HIT: P03218, EVALUE 6.50e+00
LPPHRRPRGERAEQKPRELGPGAGAHRGAGGRERAA

SEQ ID NO: 32340 - protein, 160 aa, Homo sapiens
  MAP TO AC002039.1; EXPRESSED IN BONE MARROW, SIGNAL = 1.9; EXPRESSED IN FETAL LIVER, SIGNAL = 1.9; EXPRESSED IN PLACENTA, SIGNAL =   3; EXPRESSED IN ADULT LIVER, SIGNAL = 1.9; EXPRESSED IN HELA, SIGNAL = 3.7; SWISSPROT HIT: P98161, EVALUE 1.00e-65
GPGRLSVHPVGPRRHLHAVAAGLLEIQVRAFNALGSENRTLVLEVQDAVQYVALRSGPCFTNRLAQFEAATSPSPRRVAYHWDFGDGSPGQDTDKPRAEHSYLRPGDYRVQVNASNLVSFFVAQATVTVQVLACREPEVDVVLPLQVLMRRSQRNCLDAY

SEQ ID NO: 32341 - protein, 521 aa, Homo sapiens
  MAP TO AC002039.1; EXPRESSED IN BONE MARROW, SIGNAL = 1.9; EXPRESSED IN FETAL LIVER, SIGNAL = 1.9; EXPRESSED IN PLACENTA, SIGNAL =   3; EXPRESSED IN ADULT LIVER, SIGNAL = 1.9; EXPRESSED IN HELA, SIGNAL = 3.7; SWISSPROT HIT: P98161, EVALUE 0.00e+00
GVLPSLYTFRSVGTFNIIVTAENEVGSAQDSIFVYVLQLIEGLQVVGGGRYFPTNHTVQLQAVVRDGTNIYSWTAWRDRGPALAGSGKGFSLTALEAGTYHVQLRATNMLGSAWADCTVDFVEPVGWLMVAASPNPAAVNTSVTLSAELAGGSGVVYTWSLEEGLSWETPEPFTTHSFPTPGLHLVTMTAGNPLGSANATVEVDVQVPVSGLSIRASEPGGSFVAAGSSVPFWGQLATGTNVSWCWAVPGGSSKRGPHVTMVFPDAGTFNIRLNASNAVSWVSATYNLTVEEPIVGLVLWASSKVVAPGQLVHFQILLAAGSAVTFRRQVGGASPEVLPGPRFSHSFPRIGDHVVSVQSKNHVSWAQAQVRIVVLEAVSGLQVPNCCEPGIAMGTERNFTARVQRGSRVAYAWYFSLQKVRGDSLFILSGRDVTYTPWPRGCWRSRCVPSTPWAVRTARWCWRFRTPSSMWPCGAAPASPTAWRSLRPPPAPAPGAWPTTGTLGMGPQGRTQISPGPSTPT

SEQ ID NO: 32342 - protein, 285 aa, Homo sapiens
  MAP TO AC009487.3; EXPRESSED IN HELA, SIGNAL = 3.5; EXPRESSED IN ADULT LIVER, SIGNAL =   2; EXPRESSED IN PLACENTA, SIGNAL = 2.1; EXPRESSED IN BRAIN, SIGNAL = 3.8; EXPRESSED IN LUNG, SIGNAL = 2.1; EXPRESSED IN FETAL LIVER, SIGNAL = 2.6; SWISSPROT HIT: Q16650, EVALUE 0.00e+00
IYTGCDMDRLTPSPNDSPRSQIVPGARYAMAGSFLQDQFVSNYAKARFHPGAGAGPGPGTDRSVPHTNGLLSPQQAEDPGAPSPQRWFVTPANNRLDFAASAYDTATDFAGNAATLLSYAAAGVKALPLQAAGCTGRPLGYYADPSGWGARSPPQYCGTKSGSVLPCWPNSAAAAARMAGANPYLGEEAEGLAAERSPLPPGAAEDAKPKDLSDSSWIETPSSIKSIDSSDSGIYEQAKRRRISPADTPVSESSSPLKSEVLAQRDCEKNCAKDISGYYGFYSHS

SEQ ID NO: 32343 - protein, 224 aa, Homo sapiens
  MAP TO AL031387.4; EXPRESSED IN PLACENTA, SIGNAL = 1.4; EXPRESSED IN BRAIN, SIGNAL = 1.3; EXPRESSED IN ADULT LIVER, SIGNAL = 1.6; EXPRESSED IN HEART, SIGNAL = 1.7; EXPRESSED IN BONE MARROW, SIGNAL = 1.4; EXPRESSED IN LUNG, SIGNAL = 1.3; EXPRESSED IN FETAL LIVER, SIGNAL = 1.7; SWISSPROT HIT: P51841, EVALUE 1.00e-130
KLLGHHGLASAKFLWCLCLLSVMSLPQQVWTLPYKIGVVGPWACDSLFSKALPEVAARLAIERINRDPSFDLSYSFEYVILNEDCQTSRALSSFISHHQMASGFIGPTNPGYCEAASLLGNSWDKGIFSWACVNYELDNKISYPTFSRTLPSPIRVLVTVMKYFQWAHAGVISSDEDIWVHTANRVASALRSHGLPVGVVLTTGQDSQSMRKALQRIHQADRIR

SEQ ID NO: 32344 - protein, 267 aa, Homo sapiens
  MAP TO AC010525.4; EXPRESSED IN ADULT LIVER, SIGNAL = 1.7; EXPRESSED IN HELA, SIGNAL = 1.2; EXPRESSED IN PLACENTA, SIGNAL = 2.5; EXPRESSED IN LUNG, SIGNAL = 1.4; EXPRESSED IN HEART, SIGNAL = 1.8; EXPRESSED IN BONE MARROW, SIGNAL = 2.1; SWISSPROT HIT: P15265, EVALUE 4.00e-09
RSLLSVHPAVPCTLLSVHPAVRAPCCPCTLLSRAPCCPVHPAVPCTLLSVHPAVPAPCCPVHPAVPCTLLSVHPAVPCTLLSRAPCCPVHPAVRAPCCPVHPAVPCTLLSRAPCCPMHPAVRAPCCPCTLLSRAPCCPVHPAVPCTLLSRAPCCPVHPAVRAPCCPVHPAVRAPCCPCTLLSVHPAVRAPCCPCTLLSRAPCCPCTLLSVHPAVPCTLLSRAPCCPCTLLSVQLLEDLHAVLSRGRGRIPGCTVRSGWSRSRGGSEQ

SEQ ID NO: 32345 - protein, 264 aa, Homo sapiens
  MAP TO AC010525.4; EXPRESSED IN ADULT LIVER, SIGNAL = 1.7; EXPRESSED IN HELA, SIGNAL = 1.2; EXPRESSED IN PLACENTA, SIGNAL = 2.5; EXPRESSED IN LUNG, SIGNAL = 1.4; EXPRESSED IN HEART, SIGNAL = 1.8; EXPRESSED IN BONE MARROW, SIGNAL = 2.1; SWISSPROT HIT: P15265, EVALUE 9.00e-05
VPAVRAPCCPVHPAVRAPCCPCTLLSVHPAVPCTLLSRAPCCPVHPAVRAPCCPCTLLSRAPCCPVHPAVRAPCCPVHPAVPCTLLSRAPCCPCTLLSRAPCCPVHPAVPCTLLSHAPCCPCTLLSVHPAVPCTLLSRAPCCPVHPAVPCTLLSRAPCCPCTLLSRAPCCPCTLLSVHPAVRAPCCPCTLLSVHPAVPCTLLSVHPAVRAPCCPVHPAVPCTLLSVHPAVRAAVRGPACRIESGQGPHSWVYCSFRVVKVKRWQ

SEQ ID NO: 32346 - protein, 41 aa, Homo sapiens
  MAP TO AL161722.2; EXPRESSED IN ADULT LIVER, SIGNAL = 1.3; EXPRESSED IN BRAIN, SIGNAL = 1.3; EXPRESSED IN HELA, SIGNAL = 2.3; EXPRESSED IN BONE MARROW, SIGNAL = 1.8; EXPRESSED IN LUNG, SIGNAL = 1.2; EXPRESSED IN HEART, SIGNAL = 1.4; EXPRESSED IN FETAL LIVER, SIGNAL = 1.2
AVILHCLPSCPHSCLLPPTRVIMSQDQESPRCTHDQHLQTF

SEQ ID NO: 32347 - protein, 218 aa, Homo sapiens
  MAP TO AL161722.2; EXPRESSED IN ADULT LIVER, SIGNAL = 1.3; EXPRESSED IN BRAIN, SIGNAL = 1.3; EXPRESSED IN HELA, SIGNAL = 2.3; EXPRESSED IN BONE MARROW, SIGNAL = 1.8; EXPRESSED IN LUNG, SIGNAL = 1.2; EXPRESSED IN HEART, SIGNAL = 1.4; EXPRESSED IN FETAL LIVER, SIGNAL = 1.2; SWISSPROT HIT: P43363, EVALUE 3.00e-44
PGKLKEAPAAKAESPLEVPQSFCSSSIAVTTTSSSESDEASSNQEEEDSPSSSEDTSDPRNVPADALDQKVAFLVNFMLHKCQMKKPITKADMLKIIIKDDESHFSEILLRASEHLEMIFGLDVVEVDPTTHCYGLFIKLGLTYDGMLSGEKGVPKTGLLIIVLGVIFMKGNRATEEEVWEVLNLTGVYSGKKHFIFGEPRMLITKDFVKEKYLEYQQ

SEQ ID NO: 32348 - protein, 44 aa, Homo sapiens
  MAP TO AL161722.2; EXPRESSED IN ADULT LIVER, SIGNAL = 1.3; EXPRESSED IN BRAIN, SIGNAL = 1.3; EXPRESSED IN HELA, SIGNAL = 2.3; EXPRESSED IN BONE MARROW, SIGNAL = 1.8; EXPRESSED IN LUNG, SIGNAL = 1.2; EXPRESSED IN HEART, SIGNAL = 1.4; EXPRESSED IN FETAL LIVER, SIGNAL = 1.2
CLRIRRVHDAHMISTFRPSVRPRAWRLHRSPRLWRRPSSPPPIL

SEQ ID NO: 32349 - protein, 126 aa, Homo sapiens
  MAP TO AL121997.7; EXPRESSED IN LUNG, SIGNAL =   1; EXPRESSED IN HEART, SIGNAL = 1.3; EXPRESSED IN BONE MARROW, SIGNAL = 1.5; EXPRESSED IN FETAL LIVER, SIGNAL = 1.2; EXPRESSED IN HELA, SIGNAL = 1.1; EXPRESSED IN ADULT LIVER, SIGNAL = 1.2; EXPRESSED IN BRAIN, SIGNAL = 1.1; SWISSPROT HIT: Q99698, EVALUE 2.00e-65
ENSSNIIPQQMAAHMLRSRSLPAFPTSSLLTQSQKLTGSLGCSIDRLQNIADTYVATQSKKQNSLGSSDTLKKGKEDAFISSCESAKTVCEMEAVLSAQVSVSDVPKGVLGFPVVKADHKQLGAEP

SEQ ID NO: 32350 - protein, 228 aa, Homo sapiens
  MAP TO AC005630.1; EXPRESSED IN HEART, SIGNAL = 3.1; EXPRESSED IN BONE MARROW, SIGNAL = 2.7; EXPRESSED IN LUNG, SIGNAL = 2.8; EXPRESSED IN FETAL LIVER, SIGNAL = 2.6; EXPRESSED IN ADULT LIVER, SIGNAL = 2.4; EXPRESSED IN BRAIN, SIGNAL = 2.6; EXPRESSED IN HELA, SIGNAL = 1.6; SWISSPROT HIT: Q00657, EVALUE 9.00e-98
GQTDLLPIQVNPVNDPPHIIFPHGSLMVILEHTHKPLGPEVLQAYDLDSTCEGLTFQLLGTPSGLPVEHRDQPGEPVTEFSCWELEAGSLVYVHCGGPTQDLTFRVSNGLQASPPAMLKVVAVQLAIQIHRSTGLHLAQGSAMPILPTNLLVETSAVGQDVTVLFHVTGGLPFRELQKQGAGGVEDAEWWVTQAFHQQDVEQGHVRYLSTDPQHYTEDTVENLDLQVQ

SEQ ID NO: 32351 - protein, 234 aa, Homo sapiens
  MAP TO L39891.1; EXPRESSED IN HELA, SIGNAL =   3; EXPRESSED IN ADULT LIVER, SIGNAL = 1.7; EXPRESSED IN BRAIN, SIGNAL =  12; EXPRESSED IN BONE MARROW, SIGNAL = 3.9; EXPRESSED IN LUNG, SIGNAL = 4.4; SWISSPROT HIT: P98161, EVALUE 3.00e-29
TTAHVGIMLYGVDSRSGHRHLDGDRAFHRNSLDIFRIATPHSLGSVWKIRVWHDNKGLCGPCQALPLCPRIGAPCEPDLPPAPLQGSALPGSCSTSSSGTCRRHAAPSSWSMTGFRWRRRPTGAWWRRRCWPRVRPRSMVPLRGRLGRVVLPRGLLQCGPPCLLGDAALLRFRRLLVAELQRGFFDKHIWLSIWDRPPRSRFTRIQRATCCVLLICLFLGANAVWYGAVGDSAY

SEQ ID NO: 32352 - protein, 56 aa, Homo sapiens
  MAP TO AC008567.3; EXPRESSED IN ADULT LIVER, SIGNAL = 2.8; EXPRESSED IN BRAIN, SIGNAL = 2.3; EXPRESSED IN HELA, SIGNAL = 5.3; EXPRESSED IN HEART, SIGNAL = 1.5; EXPRESSED IN BONE MARROW, SIGNAL = 2.5; EXPRESSED IN LUNG, SIGNAL = 2.8; SWISSPROT HIT: P18745, EVALUE 2.00e-06
EGKHNGRELCDCEQCGEVFSEHSCLKTHVRTQSTGNTHDCNQYGKDFLTLCEKTST

SEQ ID NO: 32353 - protein, 93 aa, Homo sapiens
  MAP TO AC008567.3; EXPRESSED IN ADULT LIVER, SIGNAL = 2.8; EXPRESSED IN BRAIN, SIGNAL = 2.3; EXPRESSED IN HELA, SIGNAL = 5.3; EXPRESSED IN HEART, SIGNAL = 1.5; EXPRESSED IN BONE MARROW, SIGNAL = 2.5; EXPRESSED IN LUNG, SIGNAL = 2.8; SWISSPROT HIT: P17024, EVALUE 1.00e-33
TLNAKKPYKCKECGKGYRYPAYLSIHMRTHTGEKPYECKECGKAFNYSNSFQIHGRTHTGEKPYVCKECGKAFTQYSGLSMHVRSHSGDKPYE

SEQ ID NO: 32354 - protein, 28 aa, Homo sapiens
  MAP TO AC008567.3; EXPRESSED IN ADULT LIVER, SIGNAL = 2.8; EXPRESSED IN BRAIN, SIGNAL = 2.3; EXPRESSED IN HELA, SIGNAL = 5.3; EXPRESSED IN HEART, SIGNAL = 1.5; EXPRESSED IN BONE MARROW, SIGNAL = 2.5; EXPRESSED IN LUNG, SIGNAL = 2.8
KENTMEGNSVTVSNVEKSSVNTHALRRT

SEQ ID NO: 32355 - protein, 86 aa, Homo sapiens
  MAP TO AL078591.18; EXPRESSED IN ADULT LIVER, SIGNAL = 1.4; EXPRESSED IN BRAIN, SIGNAL = 1.3; EXPRESSED IN HELA, SIGNAL = 1.5; EXPRESSED IN BONE MARROW, SIGNAL = 1.3; EXPRESSED IN LUNG, SIGNAL = 1.6; SWISSPROT HIT: P24276, EVALUE 2.40e+00
KLDISQDDSEITQMEHNLASRRSSDDCHDHQTTPSLGVRTIEIKPSNKDPFSGENITVKLGPWTELRQEEILVDNLLPNFESLESN

SEQ ID NO: 32356 - protein, 277 aa, Homo sapiens
  MAP TO AL078591.18; EXPRESSED IN ADULT LIVER, SIGNAL = 1.4; EXPRESSED IN BRAIN, SIGNAL = 1.3; EXPRESSED IN HELA, SIGNAL = 1.5; EXPRESSED IN BONE MARROW, SIGNAL = 1.3; EXPRESSED IN LUNG, SIGNAL = 1.6; SWISSPROT HIT: P53832, EVALUE 5.00e-02
EETSSDVKSSCSSKPNLDTMCKGFQSPDKSNNSTGTAITLNSKLICLGTPCVISGSISSNTDVSEDRTMKKNSDVLNLTQMYSEIPTVESETHLGTSDPFSASTDIVKQGLVENYFGSQSSTDISDTCAVSYSNALSPQKETSEKEISNLQQEQDKEDEEEEQDQQMVQNGYYEETDYSALDGTINAHYTSRDELMEERLTKSEKINSDYLRDGINMPTVCTSGCLSFPSAPRESPCNVKYSSKSKFDAITKQPSSTSYNFTSSISWYESSPKPQIQ

SEQ ID NO: 32357 - protein, 218 aa, Homo sapiens
  MAP TO AJ003147.1; EXPRESSED IN ADULT LIVER, SIGNAL = 1.3; EXPRESSED IN HELA, SIGNAL = 1.4; EXPRESSED IN BONE MARROW, SIGNAL = 1.3; EXPRESSED IN LUNG, SIGNAL = 1.3; EXPRESSED IN HEART, SIGNAL = 1.6; SWISSPROT HIT: O14771, EVALUE 2.00e-68
FGLKGQSEKSLLQEMVPVVPGQTGSDVTVSWSPEEAEAWESENRPRAALGPVVGARRGRPPTRRRQFRDLAAEKPHSCGQCGKRFRWGSDLARHQRTHTGEKPHKCPECDKSFRSSSDLVRHQGVHTGEKPFSCSECGKSFSRSAYLADHQRIHTGEKPFGCSDCGKSFSLRSYLLDHRRVHTGERPFGCGECDKSFKQRAHLIAHQSLHAKMAQPVG

SEQ ID NO: 32358 - protein, 1573 aa, Homo sapiens
  MAP TO AC005069.2; EXPRESSED IN BONE MARROW, SIGNAL = 1.4; EXPRESSED IN LUNG, SIGNAL = 1.5; EXPRESSED IN HEART, SIGNAL = 1.6; EXPRESSED IN FETAL LIVER, SIGNAL = 1.5; EXPRESSED IN ADULT LIVER, SIGNAL = 1.3; EXPRESSED IN BRAIN, SIGNAL = 1.6; EXPRESSED IN HELA, SIGNAL = 2.3; SWISSPROT HIT: P55879, EVALUE 2.00e-06
GKFVYFLPSPVNSSNPFFTSQTKANGNPACSAQLQHVSPPIFPAHLASVSTPLLSSMESVINPNITSQDKNEQGGMLCSQMENLPSTALPAQMEDLTKTVLPLNIDSGSDPFLPLPAESSSMSLFPSPADSGTNSVFSQLENNTNHYSSQIEGNTNSSFLKGGNGENAVFPSQVNVANNFSSTNAQQSAPEKVKKDRGRGPNGKERKPKHNKRAKWPAIIRDGKFICSRCYRAFTNPRSLGGHLSKRSYCKPLDGAEIAQELLQSNGQPSLLASMILSTNAVNLQQPQQSTFNPEACFKDPSFLQLLAENRSPAFLPNTFPRSGVTNFNTSVSQEGSEIIKQALETAGIPSTFEGAEMLSHVSTGCVSDASQVNATVMPNPTVPPLLHTVCHPNTLLTNQNRTSNSKTSSIEECSSLPVFPTNDLLLKTVENGLCSSSFPNSGGPSQNFTSNSSRVSVISGPQNTRSSHLNKKGNSASKRRKKVAPPLIAPNASQNLVTSDLTTMGLIAKSVEIPTTNLHSNVIPTCEPQSLVENLTQKLNNVNNQLFMTDVKENFKTSLESHTVLAPLTLKTENGDSQMMALNSCTTSINSDLQISEDNVIQNFEKTLEIIKTAMNSQILEVKSGSQGAGETSQNAQINYNIQLPSVNTVQNNKLPDSSPFSSFISVMPTKSNIPQSEVSHKEDQIQEILEGLQKLKLENDLSTPASQCVLINTSVTLTPTPVKSTADITVIQPVSEMINIQFNDKVNKPFVCQNQGCNYSAMTKDALFKHYGKIHQYTPEMILEIKKNQLKFAPFKCVVPTCTKTFTRNSNLRAHCQLVHHFTTEEMVKLKIKRPYGRKSQSENVPASRSTQVKKQLAMTEENKKESQPALELRAETQNTHSNVAVIPEKQLVEKKSPDKTESSLQVITVTSEQCNTNALTNTQTKGRKIRRHKKEKEEKKRKKPVSQSLEFPTRYSPYRPYRCVHQGCFAAFTIQQNLILHYQAVHKSDLPAFSAEVEEESEAGKESEETETKQTLKEFRCQVSDCSRIFQAITGLIQHYMKLHEMTPEEIESMTASVDVGKFPCDQLECKSSFTTYLNYVVHLEADHGIGLRASKTEEDGVYKCDCEGCDRIYATRSNLLRHIFNKHNDKHKAHLIRPRRLTPGQENMSSKANQEKSKSKHRGTKHSRCGKEGIKMPKTKRKKKNNLENKNAKIVQIEENKPYSLKRGKHVYSIKARNDALSECTSRFVTQYPCMIKGCTSVVTSESNIIRHYKCHKLSKAFTSQHRNLLIVFKRCCNSQVKETSEQEGAKNDVKDSDTCVSESNDNSRTTATVSQKEVEKNEKDEMDELTELFITKLINEDSTSVETQANTSSNVSNDFQEDNLCQSERQKASNLKRVNKEKNVSQNKKRKVEKAEPASAAELSSVRKEEETAVAIQTIEEHPASFDWSSFKPMGFEVSFLKFLEESAVKQKKNTDKDHPNTGNKKGSHSNSRKNIDKTAVTSGNHVCPCKESETFVQFANPSQLQCSDNVKIVLDKNLKDCTELVLKQLQEMKPTVSLKKLEVHSNDPDMSVMKDISIGKATGRGQY

SEQ ID NO: 32359 - protein, 410 aa, Homo sapiens
  MAP TO AL132639.2; EXPRESSED IN BRAIN, SIGNAL =   8; EXPRESSED IN HELA, SIGNAL =  11; EXPRESSED IN ADULT LIVER, SIGNAL = 6.3; EXPRESSED IN BONE MARROW, SIGNAL =  10; EXPRESSED IN FETAL LIVER, SIGNAL = 8.9; EXPRESSED IN LUNG, SIGNAL = 7.4; EXPRESSED IN HEART, SIGNAL = 6.7; SWISSPROT HIT: P41891, EVALUE 3.10e-01
ESDFLCLLGVSYTFDNEDSELNGDYGENIYPYEEDKDEKSSIYESDFQIEPGFYATYESTLFEDQVPALEAPEDIGSTSESKDWEEVVVESMEQDRIPEVHVPPSSAVSGVKEWFGLGGEQAEEKAFESVIEPVQESSFRSRKIAVEDENDLEELNNGEPQTEHQQESESEIDSVPKTQSELASESEHIPKPQSTGWFGGGFTSYLGFGDEDTGLELIAEESNPPLQDFPNSISSDKEATVPCTEILTEKKDTITNDSLSLKPSWFDFGFAILGFAYAKEDKIMLDDRKNEEDGGADEHEHPLTSELDPEKEQEIETIKIIETEDQIDKKPVSEKTDESDTIPYLKKFLYNFDNPWNFQNIPKETELPFPKQILDQNNVIENEETGEFSIDNYPTDNTKVMIFKSSYSLS

SEQ ID NO: 32360 - protein, 149 aa, Homo sapiens
  MAP TO AL135960.1; EXPRESSED IN LUNG, SIGNAL = 2.1; EXPRESSED IN ADULT LIVER, SIGNAL =   2; EXPRESSED IN PLACENTA, SIGNAL = 2.8; EXPRESSED IN HELA, SIGNAL = 1.3; EXPRESSED IN HEART, SIGNAL = 2.6; EXPRESSED IN BONE MARROW, SIGNAL = 4.2; SWISSPROT HIT: P17542, EVALUE 5.00e-74
PHTKVVRRIFTNSRERWRQQNVNGAFAELRKLIPTHPPDKKLSKNEILRLAMKYINFLAKLLNDQEEEGTQRAKTGKDPVVGAGGGGGGGGGGAPPDDLLQDVLSPNSSCGSSLDGAASPDSYTEEPAPKHTARSLHPAMLPAADGAGP

SEQ ID NO: 32361 - protein, 22 aa, Homo sapiens
  MAP TO AL135960.1; EXPRESSED IN LUNG, SIGNAL = 2.1; EXPRESSED IN ADULT LIVER, SIGNAL =   2; EXPRESSED IN PLACENTA, SIGNAL = 2.8; EXPRESSED IN HELA, SIGNAL = 1.3; EXPRESSED IN HEART, SIGNAL = 2.6; EXPRESSED IN BONE MARROW, SIGNAL = 4.2
VPTPKLCGVSSPTAGSDGGSRM

SEQ ID NO: 32362 - protein, 41 aa, Homo sapiens
  MAP TO AL135960.1; EXPRESSED IN LUNG, SIGNAL = 2.1; EXPRESSED IN ADULT LIVER, SIGNAL =   2; EXPRESSED IN PLACENTA, SIGNAL = 2.8; EXPRESSED IN HELA, SIGNAL = 1.3; EXPRESSED IN HEART, SIGNAL = 2.6; EXPRESSED IN BONE MARROW, SIGNAL = 4.2
AAAPWMGQPARTATRRSPRPNTRPAASILPCCLPPMEPALG

SEQ ID NO: 32363 - protein, 45 aa, Homo sapiens
  MAP TO AL135960.1; EXPRESSED IN LUNG, SIGNAL = 2.1; EXPRESSED IN ADULT LIVER, SIGNAL =   2; EXPRESSED IN PLACENTA, SIGNAL = 2.8; EXPRESSED IN HELA, SIGNAL = 1.3; EXPRESSED IN HEART, SIGNAL = 2.6; EXPRESSED IN BONE MARROW, SIGNAL = 4.2; SWISSPROT HIT: P29317, EVALUE 9.80e-01
SPHQSCAAYLHQQPGAMAAAECERGLCRAPQADPHTSPGQEAQQE

SEQ ID NO: 32364 - protein, 40 aa, Homo sapiens
  MAP TO AL138976.3; EXPRESSED IN LUNG, SIGNAL = 1.2; EXPRESSED IN ADULT LIVER, SIGNAL = 1.5; EXPRESSED IN HELA, SIGNAL = 1.5; EXPRESSED IN BRAIN, SIGNAL = 1.4; EXPRESSED IN BONE MARROW, SIGNAL = 1.3; SWISSPROT HIT: P10114, EVALUE 6.50e+00
MARAREGPCPFPGVTAKIQRRMDQVFTLAVRETEALIPPE

SEQ ID NO: 32365 - protein, 76 aa, Homo sapiens
  MAP TO AL138976.3; EXPRESSED IN LUNG, SIGNAL = 1.2; EXPRESSED IN ADULT LIVER, SIGNAL = 1.5; EXPRESSED IN HELA, SIGNAL = 1.5; EXPRESSED IN BRAIN, SIGNAL = 1.4; EXPRESSED IN BONE MARROW, SIGNAL = 1.3
TTLDTQFACGRSPSSARRGRRSGSARRSRQTRRPRCWKSWTRRTPSTWSRSRTWTSATATASRCSGACAARPRSRP

SEQ ID NO: 32366 - protein, 150 aa, Homo sapiens
  MAP TO AL138976.3; EXPRESSED IN LUNG, SIGNAL = 1.2; EXPRESSED IN ADULT LIVER, SIGNAL = 1.5; EXPRESSED IN HELA, SIGNAL = 1.5; EXPRESSED IN BRAIN, SIGNAL = 1.4; EXPRESSED IN BONE MARROW, SIGNAL = 1.3
PRWTRSSRAAAPRAVRGVGGGAAPRGDRGKRGARAAGNRGRGGRRAPGHAPGPGHPPRRRLRGAPGRVQRGLVPGREAAARAPARAVGTRGRPAGAGGHPGRPGLRAPGADGAGPRGALPVPGGHGQDPAEDGPGVHAGGARDGGPDPAR

SEQ ID NO: 32367 - protein, 658 aa, Homo sapiens
  MAP TO AC010150.2; EXPRESSED IN PLACENTA, SIGNAL = 2.4; EXPRESSED IN BRAIN, SIGNAL = 2.3; EXPRESSED IN HEART, SIGNAL = 2.7; EXPRESSED IN BONE MARROW, SIGNAL = 2.7; EXPRESSED IN FETAL LIVER, SIGNAL = 3.2; EXPRESSED IN HELA, SIGNAL = 2.2; EXPRESSED IN ADULT LIVER, SIGNAL = 2.4; EXPRESSED IN LUNG, SIGNAL = 2.4; SWISSPROT HIT: P08640, EVALUE 8.00e-07
IPVSRISPMPFHPSQVSPRARFPVSITSPNRTGARTLADIKAKAQLVKAQRAAAAAAAAAAAAASVGGTIPGPGPGGGQGPGEGGEGQTARGGSPGSDRVSETGKGPTLELAGTGSRGGTRELLPCGPETQPQSETKTTPSQAQPHSVSGAQLQQTPPVPPTPAVSGACTSVPSPAHIEKLDNEKLNPTRATATVASVSHPQGPSSCRQEKAPSPTGPALISGASPVHCAADGTVELKAGPSKNIPNPSASSKTDASVPVAVTPSPLTSLLTTATLEKLPVPQVSATTAPAGSAPPSSTLPAASSLKTPGTSLNMNGPTLRPTSSIPANNPLVTQLLQGKDVPMEQILPKPLTKVEMKTVPLTAKEERGMGALIATNTTENSTREEVNERQSHPATQQQLGKTLQSKQLPQVPRPLQLFSAKELRDSSIDTHQYHEGLSKATQDQILQTLIQRVRRQNLLSVVPPSQFNFAHSGFQLEDISTSQRFMLGFAGRRTSKPAMAGHYLLNISTYGRGSESFRRTHSVNPEDRFCLSSPTEALKMGYTDCKNATGESSSSKEDDTDEESTGDEQESVTVKEEPQVSQSAGKGDTSSGPHSRETLSTSDCLASKNVKAEIPLNEQTTLSKENYLFTRGQTFDEKTLARDLIQAAQKQMAHAVR

SEQ ID NO: 32368 - protein, 161 aa, Homo sapiens
  MAP TO AC010150.2; EXPRESSED IN PLACENTA, SIGNAL = 2.4; EXPRESSED IN BRAIN, SIGNAL = 2.3; EXPRESSED IN HEART, SIGNAL = 2.7; EXPRESSED IN BONE MARROW, SIGNAL = 2.7; EXPRESSED IN FETAL LIVER, SIGNAL = 3.2; EXPRESSED IN HELA, SIGNAL = 2.2; EXPRESSED IN ADULT LIVER, SIGNAL = 2.4; EXPRESSED IN LUNG, SIGNAL = 2.4
LPGLVFQSPSLVLTEQEPELLQTSKQKPNWSKHRGQQLPLPPQLLQPPQLEGPFQDLAQGVDKVQERVVKGRLLEEAVQAQTESVKLERAPHWNWQELEAGEVRESFYPVVQRLSPSLRPRPPQARHSLIVSLEHNYSKPPQCLQHLPSVEHAQVSHHQPT

SEQ ID NO: 32369 - protein, 407 aa, Homo sapiens
  MAP TO AC013648.3; EXPRESSED IN ADULT LIVER, SIGNAL = 1.7; EXPRESSED IN HELA, SIGNAL = 7.6; EXPRESSED IN HEART, SIGNAL = 3.3; EXPRESSED IN BONE MARROW, SIGNAL = 1.6; EXPRESSED IN FETAL LIVER, SIGNAL = 1.4; SWISSPROT HIT: gi1351900, EVALUE 2.00e-37
GPNVDLKGPKAEVTAPDVKMSLSSMEVDVQAPRAKLDGARLEGDLSLADKGMTAKDSKFKMPKFKMPSFGVSAPGKSIEASVDVSELKVEADGSFPSMQGDLKTTDISIQPPSAQLEVQAGQVDVKLPEGHVPEGAGLKGHLPKVQMPSFKMPKVDLKGPQIDVKGPKLDLKGPKAEVTAPDVEVSLPSVEVDVEAPRAKLDGARLEGDLSLADKDVTAKDSKFKMPKFKMPSFGVSAPGKSIEVSVDVSAPKVEAEVSLPSMQGDLKTTDISIEPPSAQLEVQAGQVDLKLPEGHVPEGAGLKGHLPKLQMPSFKMPKVDRKGPQIDVKGPKLDLKGPKTDVTAPDVEVSQPGMEVDVEAPGAKLDGARLEGDLSLADKDVTAKDSKFKMPKFKMPSFGVSAPGKS

SEQ ID NO: 32370 - protein, 479 aa, Homo sapiens
  MAP TO AL117187.3; EXPRESSED IN LUNG, SIGNAL = 2.6; EXPRESSED IN FETAL LIVER, SIGNAL =   2; EXPRESSED IN HELA, SIGNAL = 2.1; EXPRESSED IN BRAIN, SIGNAL = 2.5; EXPRESSED IN PLACENTA, SIGNAL = 3.2; EXPRESSED IN ADULT LIVER, SIGNAL =   3; EXPRESSED IN BONE MARROW, SIGNAL = 2.6; EXPRESSED IN HEART, SIGNAL = 2.8; SWISSPROT HIT: P08116, EVALUE 5.00e-04
MKEFRLDGVSSHALSDSSTEFMHQIIDQVLQGGPGKTSDISEPSPESSILSSRKENGRSNSLPIKKTVHFEADTYKDPFCSKNLSLCFEGSPRVAKESLRQDGHVLAVEVAEEKEQKQESSKIPESSSDKVAGDIFLVEGTNNNSQSSSCNGALESTARHDEESHSLSPPGENTVMADSFQIKVNLMTVEALEEGDYFEAIPLKASKFNSDLIDFASTSQAFNKVPSPHETKPDEDAEAFENHAEKLGKRSIKSAHKKKDSPEPQVKMDKHEPHQDSGEEAEGCPSAPEETPVDKKPEVHEKAKRKSTRPHYEEEGEDDDLQGVGEELSSSPPSSCVSLETLGSHSEEGLDFKPSPPLSKVSVIPHDLFYFPHYEVPLAAVLEAYVEDPEDLKNEEMDLEEPEGYMPDLDSREEEADGSQSSSSSSVPGESLPSASDQVLYLSRGGVGTTPASEPAPLAPHEDHQQRETKENDPMDSHQ

SEQ ID NO: 32371 - protein, 32 aa, Homo sapiens
  MAP TO AL117187.3; EXPRESSED IN LUNG, SIGNAL = 2.6; EXPRESSED IN FETAL LIVER, SIGNAL =   2; EXPRESSED IN HELA, SIGNAL = 2.1; EXPRESSED IN BRAIN, SIGNAL = 2.5; EXPRESSED IN PLACENTA, SIGNAL = 3.2; EXPRESSED IN ADULT LIVER, SIGNAL =   3; EXPRESSED IN BONE MARROW, SIGNAL = 2.6; EXPRESSED IN HEART, SIGNAL = 2.8
KIFSIQIKKFLSNPLLFASKKLLLNRRAKSSF

SEQ ID NO: 32372 - protein, 207 aa, Homo sapiens
  MAP TO AL138842.2; EXPRESSED IN ADULT LIVER, SIGNAL = 1.7; EXPRESSED IN HELA, SIGNAL = 0.79; SWISSPROT HIT: Q9NR30, EVALUE 5.90e+00
LTIIFKNMQECIDQKVYQAEVDNLPVAFEDGSINGGDRPGGSSLSIQTANPGNHVEIQAAYIGTTIIIRQTAGQLSFSIKVAEDVAMAFSAEQDLQLCVGGCPPSQRLSRSERNRRGAITIDTARRLCKEGLPVEDAYFHSCVFDVLISGDPNFTVAAQAALEDARAFLPDLEKLHLFPSDAGVPLSSATLLAPLLSGLFVLWLCIQ

SEQ ID NO: 32373 - protein, 25 aa, Homo sapiens
  MAP TO AL138842.2; EXPRESSED IN ADULT LIVER, SIGNAL = 1.7; EXPRESSED IN HELA, SIGNAL = 0.79
SPSYLRTCRNALIRRCIRLRWIIFL

SEQ ID NO: 32374 - protein, 54 aa, Homo sapiens
  MAP TO AL121883.13; EXPRESSED IN BONE MARROW, SIGNAL = 1.6; EXPRESSED IN FETAL LIVER, SIGNAL = 1.5; EXPRESSED IN ADULT LIVER, SIGNAL = 1.4; EXPRESSED IN HELA, SIGNAL = 1.4
WAALGKLAAWPLVWLSGLVPATVYTDWLGEETRTRKSGTKTRSLRTPQRLGLRL

SEQ ID NO: 32375 - protein, 154 aa, Homo sapiens
  MAP TO AF009663.1; EXPRESSED IN ADULT LIVER, SIGNAL = 1.5; EXPRESSED IN BRAIN, SIGNAL = 1.4; EXPRESSED IN HELA, SIGNAL = 1.8; EXPRESSED IN HEART, SIGNAL = 1.5; EXPRESSED IN LUNG, SIGNAL = 1.4; SWISSPROT HIT: P04213, EVALUE 3.00e-23
TQTPKFQVLKTGQSMTLQCAQDMNHEYMSWYRQDPGMGLRLIHYSVGAGITDQGEVPNGYNVSRSTTEDFPLRLLSAAPSQTSVYFCASSYSTALQGRLLSAHKGREVLPSSPTQDSGMPWAEISAPGTLEPTVAPSGLDSMSLALCQVPLQAS

SEQ ID NO: 32376 - protein, 215 aa, Homo sapiens
  MAP TO AL132708.3; EXPRESSED IN LUNG, SIGNAL = 6.2; EXPRESSED IN ADULT LIVER, SIGNAL =  39; EXPRESSED IN HELA, SIGNAL = 0.95; EXPRESSED IN BONE MARROW, SIGNAL = 1.8; SWISSPROT HIT: P01009, EVALUE 1.00e-121
MPSSVSWGILLLAGLCCLVPVSLAEDPQGDAAQKTDTSHHDQDHPTFNKITPNLAEFAFSLYRQLAHQSNSTNIFFSPVSIATAFAMLSLGTKADTHDEILEGLNFNLTEIPEAQIHEGFQELLRTLNQPDSQLQLTTGNGLFLSEGLKLVDKFLEDVKKLYHSEAFTVNFGDTEEAKKQINDYVEKGTQGKIVDLVKELDRDTVFALVNYIFFK

SEQ ID NO: 32377 - protein, 296 aa, Homo sapiens
  MAP TO AP001725.1; EXPRESSED IN HELA, SIGNAL = 1.4; EXPRESSED IN BONE MARROW, SIGNAL =   2; EXPRESSED IN LUNG, SIGNAL =   2; EXPRESSED IN ADULT LIVER, SIGNAL = 1.6; EXPRESSED IN PLACENTA, SIGNAL = 1.7; EXPRESSED IN BRAIN, SIGNAL = 1.3; SWISSPROT HIT: Q14149, EVALUE 0.00e+00
LKRRLSTRSSILNAKNRRLSSQFENSVYKGDDDDEDVIILEENSTPKPAVDHDIDMKSEQSHVEQGGVQVEFVGDSEPCGQTGSTSTSSSRCDQGNTAATQTEVPSLVVKKEETVEDEIDVRNDAVILPSCVEAEAKIHETQETTDKSADDAGCQLQELRNQLLLVTEEKENYKRQCHMFTDQIKVLQQRILEMNDKYVKKETCHQSTETDAVFLLESINGKSESPDHMVSQYQQALEEIERLKKQCSALQHVKAECSQCSNNESKSEMDEMAVQLDDVFRQLDKCSIERDQYKSE

SEQ ID NO: 32378 - protein, 166 aa, Homo sapiens
  MAP TO AC005670.1; EXPRESSED IN ADULT LIVER, SIGNAL = 1.6; EXPRESSED IN PLACENTA, SIGNAL = 1.8; EXPRESSED IN HELA, SIGNAL = 1.5; SWISSPROT HIT: O60309, EVALUE 2.00e-52
HSHLTQATVQPLDLELTITTIPTTEVKPSPTTEETSTQPPDLGLAITPEPTTEIGHSTALEKTTAPHPDQLQTLHRKLTEVTGPPTVLEPSQDSLVQSESYIQDKALTAPEEQKASTSTNICELCTCGDEMLSCIDLNPEQRLRKCLCQSPTPTMAPSPSCKNHLS

SEQ ID NO: 32379 - protein, 303 aa, Homo sapiens
  MAP TO Z49250.1; EXPRESSED IN LUNG, SIGNAL = 1.2; EXPRESSED IN BONE MARROW, SIGNAL = 1.3; EXPRESSED IN FETAL LIVER, SIGNAL = 1.6; EXPRESSED IN ADULT LIVER, SIGNAL = 1.5; EXPRESSED IN HELA, SIGNAL = 1.2; SWISSPROT HIT: P37690, EVALUE 5.00e-04
MSCGNEFVETLKKIGYPKADNLNGEDFDWLFEGVEDESFLKWFCGNVNEQNVLSERELEAFSILQKSGKPILEGAALDEALKTCKTSDLKTPRLDDKELEKLEDEVQTLLKLKNLKIQRRNKCQLMASVTSHKSLRLNAKEEEATKKLKQSQGILNAMITKISNELQALTDEVTQLMMFFRHSNLGQGTNPLVFLSQFSLEKYLSQEEQSTAALTLYTKKQFFQGIHEVVESSNEDNFQLLDIQTPSICDNQEILEERRLEMARLQLAYICAQHQLIHLKASNSSMKSSIKWAEESLHSLTSK

SEQ ID NO: 32380 - protein, 69 aa, Homo sapiens
  MAP TO AP000962.2; EXPRESSED IN PLACENTA, SIGNAL = 5.3; EXPRESSED IN ADULT LIVER, SIGNAL = 3.4; EXPRESSED IN HELA, SIGNAL = 3.7; EXPRESSED IN BONE MARROW, SIGNAL = 4.4; EXPRESSED IN FETAL LIVER, SIGNAL = 3.5; SWISSPROT HIT: O43759, EVALUE 2.40e+00
MVNEIQAEVVSDGDEECVGNWNKGDTCYVVAKRLAAFCPCPRDLWNFELERDDLGYLAEEISKQQRIQE

SEQ ID NO: 32381 - protein, 19 aa, Homo sapiens
  MAP TO AL163247.2; EXPRESSED IN ADULT LIVER, SIGNAL = 1.8; EXPRESSED IN HELA, SIGNAL = 3.1; EXPRESSED IN BRAIN, SIGNAL = 1.6; EXPRESSED IN HEART, SIGNAL = 1.5; EXPRESSED IN BONE MARROW, SIGNAL = 1.8; EXPRESSED IN LUNG, SIGNAL = 1.6
WKFKKETMNLNYTLQQKWT

SEQ ID NO: 32382 - protein, 34 aa, Homo sapiens
  MAP TO AL355075.2; EXPRESSED IN HELA, SIGNAL = 4.1; EXPRESSED IN ADULT LIVER, SIGNAL = 1.9; EXPRESSED IN BRAIN, SIGNAL = 2.1; EXPRESSED IN LUNG, SIGNAL = 1.9; EXPRESSED IN HEART, SIGNAL = 1.7; EXPRESSED IN BONE MARROW, SIGNAL =   3; SWISSPROT HIT: P79241, EVALUE 6.60e+00
TSSPWRTGAWLCSLTYSPWRNYISMYLPTQISSP

SEQ ID NO: 32383 - protein, 523 aa, Homo sapiens
  MAP TO AC006130.1; EXPRESSED IN ADULT LIVER, SIGNAL = 1.7; EXPRESSED IN PLACENTA, SIGNAL = 1.7; EXPRESSED IN BRAIN, SIGNAL = 1.8; EXPRESSED IN HELA, SIGNAL = 2.8; EXPRESSED IN LUNG, SIGNAL = 1.6; EXPRESSED IN BONE MARROW, SIGNAL = 1.9; EXPRESSED IN FETAL LIVER, SIGNAL = 1.8; SWISSPROT HIT: Q05481, EVALUE 0.00e+00
RNHGLERLCESNDQCGEALSQIPHLNLYKKIPPGVKQYEYNTYGKVFMHRRTSLKSPITVHTGHKPYQCQECGQAYSCRSHLRMHVRTHNGERPYVCKLCGKTFPRTSSLNRHVRIHTAEKTYECKQCGKAFIDFSSLTSHLRSHTGEKPYKCKECGKAFSYSSTFRRHTITHTGEKPYKCKECAEAFSYSSTFRRHMISHTGEKPHKCKECGEAFSYSSAFRRHMITHTGEKPYECKQCGKTFIYLQSFRRHERIHTGEKPYECKQCGKTFIYPQSFRRHERTHGGEKPYECNQCGKAFSHPSSFRGHMRVHTGEKPYECKQCGKTFNWPISLRKHMRTHTREKPYECKQCGKAFSLSACFREHVRMHPEDKSYECKLCGKAFYCHISLQKHMRRHTAEKLYKCKQCGKAFSWPELLQQHVRTHTVEKPYECKECGKVFKWPSSLPIHMRLHTGEKPYQCKHCGKAFNCSSSLRRHVRIHTTEKQYKCNVGHPPANEFMCSASEKSHQERDLIKVVNMVLPL

SEQ ID NO: 32384 - protein, 51 aa, Homo sapiens
  MAP TO AL160176.3; EXPRESSED IN ADULT LIVER, SIGNAL = 4.7; EXPRESSED IN LUNG, SIGNAL = 5.7; EXPRESSED IN HEART, SIGNAL = 4.5; EXPRESSED IN PLACENTA, SIGNAL = 2.3
MVFHLSEHLLENSEKLTEASECFFLCSSRQVCTKNAYDDILPLGFLGSPLP

SEQ ID NO: 32385 - protein, 191 aa, Homo sapiens
  MAP TO Z93242.1; EXPRESSED IN ADULT LIVER, SIGNAL = 1.8; EXPRESSED IN HELA, SIGNAL = 0.52; EXPRESSED IN FETAL LIVER, SIGNAL = 1.8; SWISSPROT HIT: Q9Y5P3, EVALUE 1.00e-104
EDAALDLSVAAHRKSEPPPETLYDSGASVDSSGHTVMEKLPSGMEISFAPATSHEAPAMMDSHISSSDAATEMLSQPNHPSGEVKAENNIEMVGESQAAKVIVSVEDAVPTIFCGKIKGLSGVSTKNFSFKREDSVLQGYDINSQGEESMGNAEPLRKPIKNRSIKLKKVNSQEIHMLPIKKQRLATFFPR

SEQ ID NO: 32386 - protein, 18 aa, Homo sapiens
  MAP TO Z93242.1; EXPRESSED IN ADULT LIVER, SIGNAL = 1.8; EXPRESSED IN HELA, SIGNAL = 0.52; EXPRESSED IN FETAL LIVER, SIGNAL = 1.8
RCSPRPVSGSPPEIRASP

SEQ ID NO: 32387 - protein, 183 aa, Homo sapiens
  MAP TO AL133224.2; EXPRESSED IN FETAL LIVER, SIGNAL =   1; EXPRESSED IN HEART, SIGNAL = 1.4; EXPRESSED IN LUNG, SIGNAL = 1.1; EXPRESSED IN PLACENTA, SIGNAL = 2.1; EXPRESSED IN HELA, SIGNAL = 0.34; EXPRESSED IN ADULT LIVER, SIGNAL = 1.2; SWISSPROT HIT: P16088, EVALUE 2.00e-04
RIRKPRNQRVEMKVAPLTITPSNPLAKFLLPVPTTLCSAGLEVLAPEGGMLPPGDRTMIQLNWKLRLALHHFGLLLPLSQQTKNGVTVLAGVIDPNYQDEISLLLHSGGKEEYARNTRDALGSLLVLPCPMIKVNGKLQQPNPDRTENGPDPSGMKVWVTSIDKKKNQDLLRCLLKAKGIQNG

SEQ ID NO: 32388 - protein, 25 aa, Homo sapiens
  MAP TO AC025436.2; EXPRESSED IN PLACENTA, SIGNAL = 1.5; EXPRESSED IN ADULT LIVER, SIGNAL = 1.8; EXPRESSED IN BRAIN, SIGNAL = 2.8; EXPRESSED IN HELA, SIGNAL = 0.6; EXPRESSED IN BONE MARROW, SIGNAL = 1.8; EXPRESSED IN LUNG, SIGNAL = 2.4; EXPRESSED IN HEART, SIGNAL = 2.7; EXPRESSED IN FETAL LIVER, SIGNAL = 1.6
WCSCLRFASSLFVILCWRKQRAAPL

SEQ ID NO: 32389 - protein, 860 aa, Homo sapiens
  MAP TO AC025436.2; EXPRESSED IN PLACENTA, SIGNAL = 1.5; EXPRESSED IN ADULT LIVER, SIGNAL = 1.8; EXPRESSED IN BRAIN, SIGNAL = 2.8; EXPRESSED IN HELA, SIGNAL = 0.6; EXPRESSED IN BONE MARROW, SIGNAL = 1.8; EXPRESSED IN LUNG, SIGNAL = 2.4; EXPRESSED IN HEART, SIGNAL = 2.7; EXPRESSED IN FETAL LIVER, SIGNAL = 1.6; SWISSPROT HIT: Q9Y5E5, EVALUE 0.00e+00
TQSKTHGRSVTSSAGLPTAWGSDILNKFNIKSNCVTIPPSKKLELNVSSLVAVAEGIGYRDLDSNMKKLGRIHPNRQVLAFILMVFLSQVRLEPIRYSVLEETESGSFVAHLAKDLGLGIGELASRSARVLSDDDKQRLQLDRQTGDLLLREKLDREELCGPIEPCVLHFQVFLEMPVQFFQGELLIQDINDHSPIFPEREVLLKILENSQPGTLFPLLIAEDLDVGSNGLQKYTISPNSHFHILTRNHSEGKKYPDLVQDKPLDREEQPEFSLTLVALDGGSPPRSGTVMVRILIMDINDNAPEFVHTPYGVQVLENSPLDSPIVRVLARDIDAGNFGSVSYGLFQASDEIKQTFSINEVTGEILLKKKLDFEKIKSYHVEIEATDGGGLSGKGTVVIEVVDVNDNPPELIISSLTSSIPENAPETVVSIFRIRDRDSGENGKMICSIPDNLPFILKPTLKNFYTLVTERPLDRETSAEYNITIAVTDLGTPRLKTQQNITVQVSDVNDNAPAFTQTSYTLFVRENNSPALHIGSVSATDRDSGTNAQVTYSLLPPQDPHLPLASLVSINADNGHLFALRSLDYEALQAFEFRVGASDRGSPALSSEALVRVLVLDTNDNSPFVLYPLQNGSAPCTELVPRAAEPGYLVTKVVAVDGDSGQNAWLSYQLLKATEPGLFGVWAHNGEVRTARLLSERDAAKHRLVVLVKDNGEPPRSATATLHVLLVDGFSQPYLPLPEAAPAQAQADSLTVYLVVALASVSSLFLFSVLLFVAVRLCRRSRAASVGRCSVPEGPFPGHLVDVSGTGTLSQSYQYEVCLTGDSGTGEFKFLKPIFPNLLVQDTGREVKENPKFRNSLVFS

SEQ ID NO: 32390 - protein, 290 aa, Homo sapiens
  MAP TO AC006547.9; EXPRESSED IN PLACENTA, SIGNAL = 3.4; EXPRESSED IN ADULT LIVER, SIGNAL = 3.2; EXPRESSED IN BRAIN, SIGNAL = 3.6; EXPRESSED IN HELA, SIGNAL = 5.6; EXPRESSED IN LUNG, SIGNAL = 3.5; EXPRESSED IN HEART, SIGNAL = 3.7; EXPRESSED IN BONE MARROW, SIGNAL = 4.1; EXPRESSED IN FETAL LIVER, SIGNAL =   3; SWISSPROT HIT: Q9Z5I9, EVALUE 2.60e-02
VPGPDSLTLGDDSIRSLDFVSEPSLDLPDYGPGGLHAAYPPSPPLSASDAFSGALRSLSLKASSRRGGDHVALQPLRSEGGPPTPHRSIFAPHALPNRNGSLSYDSLLNPGSPGGHACPAHPAVGVAGYHSPYLHPGATGDPPRPLPRSFSPVLGPRPREPSPVRYDNLSRTIMASIQERKDREERERLLRSQADSLFGDSGVYDAPSSYSLQQASVLSEGPRGPALRYGSRDDLVAGPGFGGARNPALQTSLSSLSSSVSRAPRTSSSSLQADQASSNAPGPRPSSGSH

SEQ ID NO: 32391 - protein, 110 aa, Homo sapiens
  MAP TO AC006547.9; EXPRESSED IN PLACENTA, SIGNAL = 3.4; EXPRESSED IN ADULT LIVER, SIGNAL = 3.2; EXPRESSED IN BRAIN, SIGNAL = 3.6; EXPRESSED IN HELA, SIGNAL = 5.6; EXPRESSED IN LUNG, SIGNAL = 3.5; EXPRESSED IN HEART, SIGNAL = 3.7; EXPRESSED IN BONE MARROW, SIGNAL = 4.1; EXPRESSED IN FETAL LIVER, SIGNAL =   3; SWISSPROT HIT: Q61982, EVALUE 1.00e-02
SAPCWAPAPGSPRLCATTTCPGPSWHPSRSARTGRSVSACCAPRPTHSSATQASMTLPAPTACSRPVCCPRAPEVPRCAMAPETTLWLGPASVAPATLPCRRHCPRCPAP

SEQ ID NO: 32392 - protein, 246 aa, Homo sapiens
  MAP TO AC011467.3; EXPRESSED IN ADULT LIVER, SIGNAL = 1.9; EXPRESSED IN PLACENTA, SIGNAL = 1.9; EXPRESSED IN HELA, SIGNAL = 1.8; EXPRESSED IN LUNG, SIGNAL = 1.7; EXPRESSED IN HEART, SIGNAL = 1.9; EXPRESSED IN FETAL LIVER, SIGNAL = 1.6; SWISSPROT HIT: P21414, EVALUE 8.00e-37
SEKATAVISSLLSDIIPRFGLPTSIQSDNGPAFTSQITQAVSQALGIQWKLHIPYHPQSSGKVERTNGLLKTHLTKLSLQLKTEWTVLLPLALLRIRAFPREATGYSPFELSYGCTFLLGPNLIPGTSPLGDYLPVLQQARQEIHQAANLLLPTPDPQLYEDNLAGRSVLVKNLTPQTLQPRWTGPYLVIYSTLTAVRLQDPPHWVHRSRIKLCPSDSQPNPSSSSWKSQVLSPTSLKLTRISEEQ

SEQ ID NO: 32393 - protein, 69 aa, Homo sapiens
  MAP TO AD000092.1; EXPRESSED IN ADULT LIVER, SIGNAL =  14; EXPRESSED IN BRAIN, SIGNAL =   6; EXPRESSED IN HELA, SIGNAL =  16; EXPRESSED IN LUNG, SIGNAL =  11; EXPRESSED IN HEART, SIGNAL =  12; SWISSPROT HIT: P52193, EVALUE 3.00e-13
PDICGPGTKKVHVIFNYKGKNVLINKDIRCKVCLGVVANGCHGEIQRSASLGGGPRSPSSFFRMMSLHT

SEQ ID NO: 32394 - protein, 94 aa, Homo sapiens
  MAP TO AD000092.1; EXPRESSED IN ADULT LIVER, SIGNAL =  14; EXPRESSED IN BRAIN, SIGNAL =   6; EXPRESSED IN HELA, SIGNAL =  16; EXPRESSED IN LUNG, SIGNAL =  11; EXPRESSED IN HEART, SIGNAL =  12; SWISSPROT HIT: P15253, EVALUE 2.00e-37
DDEFTHLYTLIVRPDNTYEVKIDNSQVESGSLEDDWDFLPPKKIKDPDASKPEDWDERAKIDDPTDSKPEVGVWAGALLSTLEGVEDIWANSDL

SEQ ID NO: 32395 - protein, 193 aa, Homo sapiens
  MAP TO AL023585.1; EXPRESSED IN ADULT LIVER, SIGNAL = 3.4; EXPRESSED IN LUNG, SIGNAL = 3.4; EXPRESSED IN HEART, SIGNAL = 2.8; EXPRESSED IN FETAL LIVER, SIGNAL =   2; EXPRESSED IN PLACENTA, SIGNAL = 2.7; EXPRESSED IN BRAIN, SIGNAL = 3.3; SWISSPROT HIT: O60810, EVALUE 3.00e-96
RWKLQVLDLQDVCENFWMVWSEAMARGSFLNAKRNKTPVQDCPRMRGQQPLTVFVELWLKNRTLDEYLTYLLLWVKQRKDLLHLCCKKLKILGMPFRNIRSILKMVNLDCIQEVEVNCKWVLPILTQFTPYLGHMRNLQKLVLSHMDVSRYVSPEQKKEIVTKFTTQFLKLHCLQKLYMNSVSFLEGHLDQLL

SEQ ID NO: 32396 - protein, 199 aa, Homo sapiens
  MAP TO U91327.1; EXPRESSED IN ADULT LIVER, SIGNAL = 1.2; EXPRESSED IN HELA, SIGNAL = 2.2; EXPRESSED IN BRAIN, SIGNAL = 1.4; EXPRESSED IN HEART, SIGNAL = 1.4; EXPRESSED IN LUNG, SIGNAL = 1.6; EXPRESSED IN FETAL LIVER, SIGNAL = 1.5; SWISSPROT HIT: P87293, EVALUE 6.20e-01
TTGVQEERKNRTSVHVPLEARVSNAESSTPKEEPSSIEDRDPQILLEPEGVKFVLGPTPVQKQLMEKEKLEQLGRDQVSGSGANNTEWDTGYDSDERRDAPSVNKLVYENINGLSIPSASGVRRGRLTSTSTSDTQNINNSAQRRTALLNYENLPSLPPVWEARKLSRDEDDNLGPKTPSLNGYHNNLDPMHNYVNTEN

SEQ ID NO: 32397 - protein, 23 aa, Homo sapiens
  MAP TO U91327.1; EXPRESSED IN ADULT LIVER, SIGNAL = 1.2; EXPRESSED IN HELA, SIGNAL = 2.2; EXPRESSED IN BRAIN, SIGNAL = 1.4; EXPRESSED IN HEART, SIGNAL = 1.4; EXPRESSED IN LUNG, SIGNAL = 1.6; EXPRESSED IN FETAL LIVER, SIGNAL = 1.5
HYRCARRAEKPHKCACSIGGKGF

SEQ ID NO: 32398 - protein, 154 aa, Homo sapiens
  MAP TO AL358293.1; EXPRESSED IN HEART, SIGNAL = 1.7; EXPRESSED IN LUNG, SIGNAL =   2; EXPRESSED IN ADULT LIVER, SIGNAL =   2; EXPRESSED IN BRAIN, SIGNAL =   2; EXPRESSED IN BONE MARROW, SIGNAL = 2.3
RKKERKMEGRKEGRKEGRKEGRKEGERKKERKKERKRKEGRRKEKEGWKEGRKEGRKERKKERKKERKKERKRKKEKERKRKGKKRKEGRKERKKETKRKKEKEKEGRKERKERKKERKKERKKERKKERKKRKERERKRKRKRDRKRKHLPLF

SEQ ID NO: 32399 - protein, 165 aa, Homo sapiens
  MAP TO AL358293.1; EXPRESSED IN HEART, SIGNAL = 1.7; EXPRESSED IN LUNG, SIGNAL =   2; EXPRESSED IN ADULT LIVER, SIGNAL =   2; EXPRESSED IN BRAIN, SIGNAL =   2; EXPRESSED IN BONE MARROW, SIGNAL = 2.3
KERRKERWKEGRKEGRKEGRKEGRKEKERKKERKKERGRKEGEKKRKDGRKEGRKEGKKERKKERKKERKKERERKRKKEREKERKEKKEGRKERKKQKERKRKKRKEGRKERKERKKERKKERKKERKKERKEKKEKEREKERETERENIYLFFEDNSSSSIME

SEQ ID NO: 32400 - protein, 187 aa, Homo sapiens
  MAP TO AL133367.2; EXPRESSED IN ADULT LIVER, SIGNAL = 6.7; EXPRESSED IN FETAL LIVER, SIGNAL =   4; EXPRESSED IN HEART, SIGNAL =   7; EXPRESSED IN BONE MARROW, SIGNAL =  14; EXPRESSED IN LUNG, SIGNAL = 9.4; EXPRESSED IN HELA, SIGNAL =  11; SWISSPROT HIT: P52859, EVALUE 3.00e-49
MVELQISLKNYDPQKDKRFSGTVRLKSTPCPKCGSWGNSSTVTRPRPRISPQVDTEVPKKLKNKNLVKKLAKKYDAFLASESLIKQIPRILGIGLTKAVKFPSLLTHDENTVAKVDEAKSTIKFHMNMLCLAVAVGHVKMTDDELVHNIHLAVNFLVSLLEKKLAECPGLIYQEHHGQAPAPILRHI

SEQ ID NO: 32401 - protein, 430 aa, Homo sapiens
  MAP TO AD000671.1; EXPRESSED IN ADULT LIVER, SIGNAL = 1.8; EXPRESSED IN PLACENTA, SIGNAL = 1.7; EXPRESSED IN LUNG, SIGNAL = 1.8; EXPRESSED IN HEART, SIGNAL = 1.8; EXPRESSED IN BONE MARROW, SIGNAL = 2.2; EXPRESSED IN FETAL LIVER, SIGNAL = 1.9; EXPRESSED IN BRAIN, SIGNAL = 2.1; SWISSPROT HIT: Q9UMN6, EVALUE 1.00e-110
SPSSLTHHIPTVGDPDFPAPPRRSRRPSPLAPRPPPSRWASPPLKTSPQLRVPPPTSVVTALTPTSGELAPPGPAPSPPPPEDLGPDFEDMEVVSGLSAADLDFAASLLGTEPFQEEIVAAGAMGSSHGGPGDSSEEESSPTSRYIHFPVTVVSAPGLAPSATPGAPRIEQLDGVDDGTDSEAEAVQQPRGQGTPPSGPGVVRAGVLGAAGDRARPPEDLPSEIVDFVLKNLGGPGDGGAGPREESLPPAPPLANGSQPSQGLTASPADPTRTFAWLPGAPGVRVLSLGPAPEPPKPATSKIILVNKLGQVFVKMAGEGEPVPPPVKQPPLPPTISPTAPTSWTLPPGPLLGVLPVVGVVRPAPPPPPPPLTLVLSSGPASPPRQAIRVKRVSTFSGRSPPAPPPYKAPRLDEDGEASEDTPQVPGLGSG

SEQ ID NO: 32402 - protein, 39 aa, Homo sapiens
  MAP TO AD000671.1; EXPRESSED IN ADULT LIVER, SIGNAL = 1.8; EXPRESSED IN PLACENTA, SIGNAL = 1.7; EXPRESSED IN LUNG, SIGNAL = 1.8; EXPRESSED IN HEART, SIGNAL = 1.8; EXPRESSED IN BONE MARROW, SIGNAL = 2.2; EXPRESSED IN FETAL LIVER, SIGNAL = 1.9; EXPRESSED IN BRAIN, SIGNAL = 2.1
SSQPSHLPQGSWLPLARPHLHHPLKTWAQTSRTWRWCQD

SEQ ID NO: 32403 - protein, 1066 aa, Homo sapiens
  MAP TO AC020582.3; EXPRESSED IN ADULT LIVER, SIGNAL = 1.1; EXPRESSED IN HELA, SIGNAL = 2.4; EXPRESSED IN BRAIN, SIGNAL = 1.2; EXPRESSED IN HEART, SIGNAL = 1.4; EXPRESSED IN BONE MARROW, SIGNAL = 1.5; EXPRESSED IN LUNG, SIGNAL = 1.3; SWISSPROT HIT: P08640, EVALUE 2.00e-08
SSSQKQNNKTEMYDKKTTDQAPNTDASRSQGYPMSAAYGRRWRRKGASVSGLSGCEFKGRSLKQSSEGYGLGDRAGSSPTNKTARNVPFSHLSLEKDNMEQPTTSQPETTTPQGLLSDKDDMGRRNAGIDFGSRKASAAQPIPENMDNSMVSDPQPYHEDAASGAEKTEARASLSLMVESLSTTQEEAILSVAAEAQVFMNPSHIQLEDQEAFSFDLQKAQSKMESAQDVQTICKEKPSGNVHQTFTASVLGMTSTTAKGDVYAKTLPPRSLFQSSRKPDAEEVSSDSENIPEEGDGSEELAHGHSSQSLGKFEDEQEVFSESKSFVEDLSSSEEELDLRCLSQALEEPEDAEVFTESSSYVEKYNTSEDCSSSEEDLPLRHPAQALGKPKNQQEVSSASNNTPEEQNDFMQQLPSRCPSQPIMNPTVQQQVPTSSVGTSIKQSDSVEPIPPRHPFQPWVNPKVEQEVSSSPKSMAVEESISMKPLPPKLLCQPLMNPKVQQNMFSGSEDIAVERVISVEPLLPRYSPQSLTDPQIRQISESTAVEEGTYVEPLPPRCLSQPSERPKFLDSMSTSAEWSSPVAPTPSKYTSPPWVTPKFEELYQLSAHPESTTVEEDISKEQLLPRHLSQLTVGNKVQQLSSNFERAAIEADISGSPLPPQYATQFLKRSKVQEMTSRLEKMAVEGTSNKSPIPRRPTQSFVKFMAQQIFSESSALKRGSDVAPLPPNLPSKSLSKPEVKHQVFSDSGSANPKGGISSKMLPMKHPLQSLGRPEDPQKVFSYSERAPGKCSSFKEQLSPRQLSQALRKPEYEQKVSPVSASSPKEWRNSKKQLPPKHSSQASDRSKFQPQMSSKGPVNVPVKQSSGEKHLPSSSPFQQQVHSSSVNAAARRSVFESNSDNWFLGRDEAFAIKTKKFSQGSKNPIKSIPAPATKPGKFTIAPVRQTSTSGGIYSKKEDLESGDGNNNQHANLSNQDDVEKLFGVRLKRAPPSQKYKSEKQDNFTQLASVPSGPISSSVGRGHKIRSTSQGLLDAAGNLTKISYVADKQQSRPKSESMAKKQPACKTP

SEQ ID NO: 32404 - protein, 34 aa, Homo sapiens
  MAP TO AC020582.3; EXPRESSED IN ADULT LIVER, SIGNAL = 1.1; EXPRESSED IN HELA, SIGNAL = 2.4; EXPRESSED IN BRAIN, SIGNAL = 1.2; EXPRESSED IN HEART, SIGNAL = 1.4; EXPRESSED IN BONE MARROW, SIGNAL = 1.5; EXPRESSED IN LUNG, SIGNAL = 1.3
IPQARNRTTKLRCMIRRQQTRLQTLMLLGVRAIQ

SEQ ID NO: 32405 - protein, 26 aa, Homo sapiens
  MAP TO AC020582.3; EXPRESSED IN ADULT LIVER, SIGNAL = 1.1; EXPRESSED IN HELA, SIGNAL = 2.4; EXPRESSED IN BRAIN, SIGNAL = 1.2; EXPRESSED IN HEART, SIGNAL = 1.4; EXPRESSED IN BONE MARROW, SIGNAL = 1.5; EXPRESSED IN LUNG, SIGNAL = 1.3
WLVIHNHTMKMQLLELRRQKPELLSH

SEQ ID NO: 32406 - protein, 46 aa, Homo sapiens
  MAP TO AP000303.1; EXPRESSED IN ADULT LIVER, SIGNAL = 1.7; EXPRESSED IN BONE MARROW, SIGNAL = 2.4
APPAAAAAPPAAAAAPPAAAAAPPAAGAAPLAVGAAPQAAGEDQGL

SEQ ID NO: 32407 - protein, 1087 aa, Homo sapiens
  MAP TO AP000303.1; EXPRESSED IN ADULT LIVER, SIGNAL = 1.7; EXPRESSED IN BONE MARROW, SIGNAL = 2.4; SWISSPROT HIT: P18583, EVALUE 0.00e+00
PRPYRIAPRSYRIAPRPYRLAPRPLMLASRRSMMMSYAAERSMMSSYERSMMSYERSMMSPMAERSMMSAYERSMMSAYERSMMSPMAERSMMSAYERSMMSAYERSMMSPMADRSMMSMGADRSMMSSYSAADRSMMSSYSAADRSMMSSYTADRSMMSMAADSYTDSYTDTYTEAYMVPPLPPEEPPTMPPLPPEEPPMTPPLPPEEPPEGPALPTEQSALTAENTWPTEVPSSPSEESVSQPEPPVSQSEISEPSAVPTDYSVSASDPSVLVSEAAVTVPEPPPEPESSITLTPVESAVVAEEHEVVPERPVTCMVSETPAMSAEPTVLASEPPVMSETAETFDSMRASGHVASEVSTSLLVPAVTTPVLAESILEPPAMAAPESSAMAVLESSAVTVLESSTVTVLESSTVTVLEPSVVTVPEPPVVAEPDYVTIPVPVVSALEPSVPVLEPAVSVLQPSMIVSEPSVSVQESTVTVSEPAVTVSEQTQVIPTEVAIESTPMILESSIMSSHVMKGINLSSGDQNLAPEIGMQEIALHSGEEPHAEEHLKGDFYESEHGINIDLNINNHLIAKEMEHNTVCAAGTSPVGEIGEEKILPTSETKQRTVLDTYPGVSEADAGETLSSTGPFALEPDATGTSKGIEFTTASTLSLVNKYDVDLSLTTQDTEHDMVISTSPSGGSEADIEGPLPAKDIHLDLPSNNNLVSKDTEEPLPVKESDQTLAALLSPKESSGGEKEVPPPPKETLPDSGFSANIEDINEADLVRPLLPKDMERLTSLRAGIEGPLLASDVGRDRSAASPVVSSMPERASESSSEEKDDYEIFVKVKDTHEKSKKNKNRDKGEKEKKRDSSLRSRSKRSKSSEHKSRKRTSESRSRARKRSSKSKSHRSQTRSRSRSRRRRRSSRSRSKSRGRRSVSKEKRKRSPKHRSKSRERKRKRSSSRDNRKTVRARSRTPSRRSRSHTPSRRRRSRSVGRRRSFSISPSRRSRTPSRRSRTPSRRSRTPSRRSRTPSRRSRTPSRRSRTPSRRRRSRSVVRRRSFSISPVRLRRSRTPLRRRFSRSPIRRKRSRSSERGRSPKRLTDL

SEQ ID NO: 32408 - protein, 93 aa, Homo sapiens
  MAP TO AC000380.1; EXPRESSED IN PLACENTA, SIGNAL =  22; EXPRESSED IN LUNG, SIGNAL =  12; EXPRESSED IN HELA, SIGNAL =  19; EXPRESSED IN BRAIN, SIGNAL =  15; EXPRESSED IN ADULT LIVER, SIGNAL =  17; EXPRESSED IN FETAL LIVER, SIGNAL =  12; EXPRESSED IN BONE MARROW, SIGNAL =  11; EXPRESSED IN HEART, SIGNAL =  27; SWISSPROT HIT: P54843, EVALUE 9.90e-02
RSRALHHAVEHRHHVGRRFHEAGGARSSDGGSHVGEAEGAECGRSSAGRGGPLGPLEDSKEPLPGWEDRHQAAVEVAAARAARALQAQLDVGL

SEQ ID NO: 32409 - protein, 50 aa, Homo sapiens
  MAP TO AC000380.1; EXPRESSED IN PLACENTA, SIGNAL =  22; EXPRESSED IN LUNG, SIGNAL =  12; EXPRESSED IN HELA, SIGNAL =  19; EXPRESSED IN BRAIN, SIGNAL =  15; EXPRESSED IN ADULT LIVER, SIGNAL =  17; EXPRESSED IN FETAL LIVER, SIGNAL =  12; EXPRESSED IN BONE MARROW, SIGNAL =  11; EXPRESSED IN HEART, SIGNAL =  27
VREAPRVLARGLRQLRSVTQRAVGHRAHGRLGLQAQVGARQLIEAVDGRQ

SEQ ID NO: 32410 - protein, 34 aa, Homo sapiens
  MAP TO AC000380.1; EXPRESSED IN PLACENTA, SIGNAL =  22; EXPRESSED IN LUNG, SIGNAL =  12; EXPRESSED IN HELA, SIGNAL =  19; EXPRESSED IN BRAIN, SIGNAL =  15; EXPRESSED IN ADULT LIVER, SIGNAL =  17; EXPRESSED IN FETAL LIVER, SIGNAL =  12; EXPRESSED IN BONE MARROW, SIGNAL =  11; EXPRESSED IN HEART, SIGNAL =  27
GAGPRRPQEQQQQQRHRAPRRRLERRGAGSGAGP

SEQ ID NO: 32411 - protein, 172 aa, Homo sapiens
  MAP TO AL133367.2; EXPRESSED IN BONE MARROW, SIGNAL = 1.7; EXPRESSED IN HELA, SIGNAL = 1.1; EXPRESSED IN ADULT LIVER, SIGNAL = 1.2; EXPRESSED IN PLACENTA, SIGNAL = 1.6
IPGLARAVPRRVPGLILSLPRRPRRGDREGGSGGAEPAGGGLRFGPPASPCLRAPRDPGPPHLLLHSLPSHREFQLAGLHTAPPAAPENEEAEEDVKEVERKTGRRGLWAPTMERAAEEAPAPDCFSLSSELAASASALLAAAAAAAPRHLRASRSQDGRPSASSAASGCRK

SEQ ID NO: 32412 - protein, 187 aa, Homo sapiens
  MAP TO AL109798.8; EXPRESSED IN PLACENTA, SIGNAL = 2.2; EXPRESSED IN HEART, SIGNAL = 2.6; EXPRESSED IN LUNG, SIGNAL = 2.5; EXPRESSED IN BONE MARROW, SIGNAL = 2.7; EXPRESSED IN FETAL LIVER, SIGNAL = 2.2; EXPRESSED IN BRAIN, SIGNAL = 2.8; EXPRESSED IN HELA, SIGNAL = 4.6; EXPRESSED IN ADULT LIVER, SIGNAL =   2; SWISSPROT HIT: O76039, EVALUE 1.00e-103
NQAGKSTALQSHHRSNSKDIQNLSVGLPRADEGLPANESFLNGNLAGASLSPLHTKTYQASSQPGSTSKDLTNNNIPHLLSPKEAKSKTEFDFNIDPKPSEGPGTKYLKSNSRSQQNRHSFMESSQSKAGTLQPNEKQSRHSYIDTIPQSSRSPSYRTKAKSHGALSDSKSVSNLSEARAQIAEPST

SEQ ID NO: 32413 - protein, 212 aa, Homo sapiens
  MAP TO AC004500.1; EXPRESSED IN ADULT LIVER, SIGNAL = 1.8; EXPRESSED IN BRAIN, SIGNAL = 1.9; EXPRESSED IN HELA, SIGNAL = 1.9; EXPRESSED IN LUNG, SIGNAL = 1.9; EXPRESSED IN FETAL LIVER, SIGNAL = 1.6; SWISSPROT HIT: P51825, EVALUE 6.00e-13
PEPPPTNKWQLDNWLNKVNPHKVSPASSVDSNIPSSQGYKKEGREQGTGNSYTDTSGPKETSSATPGRDSKTIQKGSESGRGRQKSPAQSDSTTQRRTVGKKQPKKAEKAAAEEPRGGLKIESETPVDLASSMPSSRHKAATKGSRKPNIKKESKSSPRPTAEKKKYKSTSKSSQKSREIIETDTSSSDSDESESLPPSSQTPKYPESNRTP

SEQ ID NO: 32414 - protein, 216 aa, Homo sapiens
  MAP TO AL049839.3; EXPRESSED IN ADULT LIVER, SIGNAL =   2; EXPRESSED IN HELA, SIGNAL = 0.58; SWISSPROT HIT: P29622, EVALUE 1.00e-108
MHLIDYLLLLLVGLLALSHGQLHVEHDGESCSNSSHQQILETGEGSPSLKIAPANADFAFRFYYLIASETPGKNIFFSPLSISAAYAMLSLGACSHSRSQILEGLGFNLTELSESDVHRGFQHLLHTLNLPGHGLETRVGSALFLSHNLKFLAKFLNDTMAVYEAKLFHTNFYDTVGTIQLINDHVKKETRGKIVDLVSELKKDVLMVLVNYIYFK

SEQ ID NO: 32415 - protein, 222 aa, Homo sapiens
  MAP TO AC011330.4; EXPRESSED IN BRAIN, SIGNAL = 3.1; EXPRESSED IN ADULT LIVER, SIGNAL = 3.1; EXPRESSED IN PLACENTA, SIGNAL = 2.1; EXPRESSED IN LUNG, SIGNAL = 2.6; EXPRESSED IN HEART, SIGNAL = 2.6; EXPRESSED IN BONE MARROW, SIGNAL = 2.6; EXPRESSED IN FETAL LIVER, SIGNAL = 2.4; SWISSPROT HIT: P35324, EVALUE 3.00e-04
SSPTTVDGNSQFGFSDQPSLNSHVAEEHQGLGLLQETPGSGAQELSIEGEQELFEPNQSPQVPPMETSQPYEEVSQPCQEVPDISQPCQDISEALSQPCQKVPDISQQCQENHDNGNHTCQEVPHISQPCQKSSQLCQKVSEEVCQLCLENSEEVSQPCQGVSVEVGKLVHKFHVGVGSLVQETLVEVGSPAEEIPEEVIQPYQEFSVEVGRLAPRDFCDQS

SEQ ID NO: 32416 - protein, 53 aa, Homo sapiens
  MAP TO AL137846.1; EXPRESSED IN HEART, SIGNAL = 1.5; EXPRESSED IN ADULT LIVER, SIGNAL = 1.5; EXPRESSED IN LUNG, SIGNAL = 1.2; EXPRESSED IN BONE MARROW, SIGNAL = 1.1
AQVCLACSISMSRLLRGISLPRCLWYRYSLACMLRARTSTRHSSSCWNLSPQC

SEQ ID NO: 32417 - protein, 246 aa, Homo sapiens
  MAP TO AL137846.1; EXPRESSED IN HEART, SIGNAL = 1.5; EXPRESSED IN ADULT LIVER, SIGNAL = 1.5; EXPRESSED IN LUNG, SIGNAL = 1.2; EXPRESSED IN BONE MARROW, SIGNAL = 1.1
EEEGMTSDPRDVEAHQGIPNLLPGPAGFRLQERELGAGRGRGGWLTATSLGHSKQQASASGHSTSARPCPASPTFPNTQCQNSGAAASGTGLGLLGGHQKMNHAEPAVWLRPRPGPAPSPAPSPGPAPGPGSSLLGLQHFDEQVVAGHLVAQVLVVQVLLGLHAQGPHLHQAQQQLLEFVPAVRVVAQGVVKQGGVGLLLSVFHQDVVIQELQICKGRFSVTIASPSMPIRAGPTPSPASPIPPSL

SEQ ID NO: 32418 - protein, 166 aa, Homo sapiens
  MAP TO AC012064.1; EXPRESSED IN LUNG, SIGNAL = 2.6; EXPRESSED IN BONE MARROW, SIGNAL = 2.3; EXPRESSED IN BRAIN, SIGNAL = 2.5; EXPRESSED IN ADULT LIVER, SIGNAL = 2.9; EXPRESSED IN HELA, SIGNAL =   1; SWISSPROT HIT: Q00657, EVALUE 3.00e-64
ADHGWIPLQVSDGQHQAITVLEVQALEPYLCVANGSGLMVPQGGQGTINMAELHLGTNLNICSRDEAHYHVTDSPHWGQLLQATQPATAFSQQDLLVGAVFYGHNGSLSSRNTLAFSMDVGPVHTDATLQVTIALEGPVAPLKLAQHKEIYIFQGEAAEIRRDQLE

SEQ ID NO: 32419 - protein, 113 aa, Homo sapiens
  MAP TO AC012064.1; EXPRESSED IN LUNG, SIGNAL = 2.6; EXPRESSED IN BONE MARROW, SIGNAL = 2.3; EXPRESSED IN BRAIN, SIGNAL = 2.5; EXPRESSED IN ADULT LIVER, SIGNAL = 2.9; EXPRESSED IN HELA, SIGNAL =   1
SRCWRCRPWSLTSVWPMAPASWFLKEARVPSTWPSSTWAPTSTSAVGMRPTTTSQTALTGDSCSKPLSQPQPSLSRTCWLGLFSMATMAASAPATPWPSQWMWDQCTQMPPYK

SEQ ID NO: 32420 - protein, 19 aa, Homo sapiens
  MAP TO AC008747.4; EXPRESSED IN ADULT LIVER, SIGNAL = 1.8; EXPRESSED IN HEART, SIGNAL =   2; EXPRESSED IN BRAIN, SIGNAL = 1.5; EXPRESSED IN BONE MARROW, SIGNAL = 1.7; EXPRESSED IN FETAL LIVER, SIGNAL = 1.2; EXPRESSED IN HELA, SIGNAL = 0.54
WSPCSRLTGPPGMIVSNAF

SEQ ID NO: 32421 - protein, 448 aa, Homo sapiens
  MAP TO AC004477.1; EXPRESSED IN BRAIN, SIGNAL = 4.6; EXPRESSED IN HELA, SIGNAL = 1.5; EXPRESSED IN ADULT LIVER, SIGNAL = 4.3; EXPRESSED IN HEART, SIGNAL =  23; EXPRESSED IN LUNG, SIGNAL = 4.6; EXPRESSED IN BONE MARROW, SIGNAL = 1.8; SWISSPROT HIT: Q14494, EVALUE 0.00e+00
AMEVNTSASEILYSAPPGDPLSTNYSLAPNTPINQNVSLHQASLGGCSQDFLLFSPEVESLPVASSSTLLPLAPSNSTSLNSTFGSTNLTGLFFPPQLNGTANDTAGPELPDPLGGLLDEAMLDEISLMDLAIEEGFNPVQASQLEEEFDSDSGLSLDSSHSPSSLSSSEGSSSSSSSSSSSSSSASSSASSSFSEEGAVGYSSDSETLDLEEAEGAVGYQPEYSKFCRMSYQDPAQLSCLPYLEHVGHNHTYNMAPSALDSADLPPPSALKKGSKEKQADFLDKQMSRDEHRARAMKIPFTNDKIINLPVEEFNELLSKYQLSEAQLSLIRDIRRRGKNKMAAQNCRKRKLDTILNLERDVEDLQRDKARLLREKVEFLRSLRQMKQKVQSLYQEVFGRLRDENGRPYSPSQYALQYAGDGSVLLIPRTMADQQARRQERKPKDRRK

SEQ ID NO: 32422 - protein, 360 aa, Homo sapiens
  MAP TO AC013648.3; EXPRESSED IN ADULT LIVER, SIGNAL =   2; EXPRESSED IN BRAIN, SIGNAL = 4.9; EXPRESSED IN HELA, SIGNAL = 7.9; EXPRESSED IN LUNG, SIGNAL = 2.4; EXPRESSED IN HEART, SIGNAL = 2.4; EXPRESSED IN BONE MARROW, SIGNAL = 2.5; EXPRESSED IN FETAL LIVER, SIGNAL = 2.4; SWISSPROT HIT: Q13105, EVALUE 2.10e-01
DTDVADGCRETPTKTLEGDGDQERLISKPRVGRGRQSQRERLSWPKFQSIKSKRGPGPQRSHSSSEAYEPRDAHDVSPTSTDTEAQLTVERQEQKAGPGSQRRRKFLNLRFRTGSGQGPSSTGQPGRGFQSGVGRAGVLEELGPWGDSLEETGAATGSRREERAEQDREVMPAQSMPLPTELGDPRLCEGTPQEGGLRAARLHGKTLEGQAQETAVAQRKPRAQPTPGMSREGEGEGLQSLEIGIARLSLRDTTEGGTQIGPPEIRVRVHDLKTPKFAFSTEKEPERERRLSTPQRGKRQDASSKAGTGLKGEEVEGAGWMPGREPTTHAEAQGDEGDGEEGLQRTRITEEQDKGREDTE

SEQ ID NO: 32423 - protein, 22 aa, Homo sapiens
  MAP TO AC000090.2; EXPRESSED IN HEART, SIGNAL = 1.4; EXPRESSED IN LUNG, SIGNAL = 1.1; EXPRESSED IN BRAIN, SIGNAL =   1; EXPRESSED IN HELA, SIGNAL = 0.7; EXPRESSED IN ADULT LIVER, SIGNAL = 1.2
CWNLLMLKGYKCVDIRRSILPF

SEQ ID NO: 32424 - protein, 126 aa, Homo sapiens
  MAP TO U91328.1; EXPRESSED IN LUNG, SIGNAL = 1.2; EXPRESSED IN HELA, SIGNAL = 1.2; EXPRESSED IN ADULT LIVER, SIGNAL = 1.2; EXPRESSED IN BRAIN, SIGNAL =   1; SWISSPROT HIT: Q99879, EVALUE 4.00e-45
MPEPAKSAPAPKKGSKKAVTKAQKKDGKKRKRSRKESYSVYVYKVLKQVHPDTGISSKAMGIMNSFVNDIFERIAGEASRLAHYNKRSTITSREIQTAVRLLLPGELAKHAVSEGTKAVTKYTSSK

SEQ ID NO: 32425 - protein, 23 aa, Homo sapiens
  MAP TO AP001678.1; EXPRESSED IN ADULT LIVER, SIGNAL = 1.2; EXPRESSED IN BRAIN, SIGNAL = 1.2; EXPRESSED IN HELA, SIGNAL = 1.8; EXPRESSED IN LUNG, SIGNAL =   1
EIAEIVEKETQALTTRVADLQQK

SEQ ID NO: 32426 - protein, 209 aa, Homo sapiens
  MAP TO L39891.1; EXPRESSED IN HELA, SIGNAL = 2.4; EXPRESSED IN ADULT LIVER, SIGNAL = 2.6; EXPRESSED IN HEART, SIGNAL =   6; EXPRESSED IN BRAIN, SIGNAL =  13; EXPRESSED IN BONE MARROW, SIGNAL = 4.8; SWISSPROT HIT: P98161, EVALUE 1.00e-107
DLIHLASSDVRAPQPSELGAESPSRMVASQAYNLTSALMRILMRSRVLNEEPLTLAGEEIVAQGKRSDPRSLLCYGGAPGPGCHFSIPEAFSGALANLSDVVQLIFLVDSNPFPFGYISNYTVSTKVASMAFQTQAGAQIPIERLASERAITVKVPNNSDWAARGHRSSANSANSVVVQPQASVGAVVTLDSSNPAAGLHLQLNYTLLD

SEQ ID NO: 32427 - protein, 135 aa, Homo sapiens
  MAP TO AC004943.1; EXPRESSED IN ADULT LIVER, SIGNAL = 4.1; EXPRESSED IN HEART, SIGNAL = 1.8; EXPRESSED IN LUNG, SIGNAL = 4.4; EXPRESSED IN PLACENTA, SIGNAL =  18; EXPRESSED IN BRAIN, SIGNAL = 1.4; EXPRESSED IN HELA, SIGNAL = 7.9; SWISSPROT HIT: P05783, EVALUE 2.00e-39
MASVYAGTRGSGSWISMSHSASFWGGMGSGGLSAGMAGGLARMGGIQNKKETMQSLKYCLTSYLNTVRNLEMENWKLESKIREHLEKKGPQFRDWSRYFQTIKDLRAQIFANTVDNACIVLQIDSARLAADDFRV

SEQ ID NO: 32428 - protein, 151 aa, Homo sapiens
  MAP TO AC004943.1; EXPRESSED IN ADULT LIVER, SIGNAL = 4.1; EXPRESSED IN HEART, SIGNAL = 1.8; EXPRESSED IN LUNG, SIGNAL = 4.4; EXPRESSED IN PLACENTA, SIGNAL =  18; EXPRESSED IN BRAIN, SIGNAL = 1.4; EXPRESSED IN HELA, SIGNAL = 7.9; SWISSPROT HIT: Q03692, EVALUE 2.70e-02
HHSLHLLHQLPVPGLCPGAQLQCPASQQHGQRLCRHQGLWFLDLHVPLRQLLGRHGVWGPVRGDGWGSCKNGRHPEQEGDHAKPEVLPDLLPEHSEEPGDGELEAREQNPGAPGEEGTPVQRLEPLLPDHQGPEGSDLRKYCGQCLHRSAD

SEQ ID NO: 32429 - protein, 138 aa, Homo sapiens
  MAP TO AC004065.1; EXPRESSED IN LUNG, SIGNAL = 1.5; EXPRESSED IN ADULT LIVER, SIGNAL = 1.9; EXPRESSED IN BRAIN, SIGNAL = 1.6; EXPRESSED IN HELA, SIGNAL = 1.5; SWISSPROT HIT: P29371, EVALUE 1.00e-48
MATLPAAETWIDGGGGVGADAVNLTASLAAGAATGAVETGWLQLLDQAGNLSSSPSALGLPVASPAPSQPWANLTNQFVQPSWRIALWSLAYGVVVAVAVLGNLIVIWIILAHKRMRTVTNYFLVNLAFSDASMAAFN

SEQ ID NO: 32430 - protein, 40 aa, Homo sapiens
  MAP TO AC004065.1; EXPRESSED IN LUNG, SIGNAL = 1.5; EXPRESSED IN ADULT LIVER, SIGNAL = 1.9; EXPRESSED IN BRAIN, SIGNAL = 1.6; EXPRESSED IN HELA, SIGNAL = 1.5
TSSCSRPGASRSGPWRMVWWWQWQFWEISSSSGSSWPTSA

SEQ ID NO: 32431 - protein, 201 aa, Homo sapiens
  MAP TO AC001070.1; EXPRESSED IN HELA, SIGNAL =   7; EXPRESSED IN LUNG, SIGNAL = 6.6; EXPRESSED IN HEART, SIGNAL = 4.3; EXPRESSED IN FETAL LIVER, SIGNAL = 2.4; EXPRESSED IN ADULT LIVER, SIGNAL = 3.3; SWISSPROT HIT: O66540, EVALUE 3.40e+00
MAGGDLVKDRLPRAVRGVRDLERRRIASGERLRERLRGNSGVRDLERRRIAGGVRDLERRRVTGEVRERDLLRVTGDVRDRDLLRVTGDVLDLDLLRVIGEVLLRDRLLVTGGVLDLDLLRVTGGVLERERRRVVGVLDLERRRVTGGVLDLDRLLLTGDALDRDLRRVTEVLDLDRLRLTGEVRDLDLRRLIRGVLDLDR

SEQ ID NO: 32432 - protein, 345 aa, Homo sapiens
  MAP TO AC004789.1; EXPRESSED IN ADULT LIVER, SIGNAL =   2; EXPRESSED IN PLACENTA, SIGNAL = 2.6; EXPRESSED IN BRAIN, SIGNAL = 1.8; EXPRESSED IN LUNG, SIGNAL = 1.8; EXPRESSED IN FETAL LIVER, SIGNAL = 2.1; SWISSPROT HIT: Q9Y5V3, EVALUE 7.60e-01
MILPTLQSPAQEEPPPLTEPPPLTEPPPLTQSPPLTQSPPLTEPPPLTEPPPLTEPPPSHNPLLLRNPLLLRNPLLSQNPLLSRNPLLSRNPLLSQNPPSHNPLLSRNPLLSQNPLLSRNPLLSHSPLLSQNPLLSHNPLTEPPPLTEPPPLTEPPPLTEPPTLTQSPPLTEPPPLTEPRRLTEPLPLTEPPPLTQSPPLREPPPLTQSPPLTEPPPLTEPPPLTQSPHLTQPPPLTEPPPLTQSPPLTEPPPLTQSPPLTESPPLTQSPPLTEPPPLTEPPPLTQSPPLREPPPLTEPPPLTQSPPLTEPPPLTEPPPLTQSPPLTEPPPLTEPPPLTQSPPLT

SEQ ID NO: 32433 - protein, 221 aa, Homo sapiens
  MAP TO AL022152.1; EXPRESSED IN PLACENTA, SIGNAL = 1.5; EXPRESSED IN BRAIN, SIGNAL = 1.2; EXPRESSED IN HELA, SIGNAL = 1.4; EXPRESSED IN ADULT LIVER, SIGNAL = 1.7; EXPRESSED IN HEART, SIGNAL = 1.5; EXPRESSED IN BONE MARROW, SIGNAL = 1.5; EXPRESSED IN LUNG, SIGNAL = 1.5; SWISSPROT HIT: Q92794, EVALUE 2.10e+00
MPLFLNLPRPSFEQGFQKAIFILELVDAEDPPDEEEEEASSIFSSSFHFLFPSSSSCFSFSSSSSSLLLRSPGDKDMPTAGMPSLLQSSSESPQSCPEGEDSQSPLQIPQSSPESDDTLYPLQSPQSRSEGEDSSDPLQRPPEGKDSQSPLQIPQSSPEGDDTQSPLQNSQSSPEGKDSLSPLEISQSPPEGEDVQSPLQNPASSFFSSALLSIFQSSPES

SEQ ID NO: 32434 - protein, 20 aa, Homo sapiens
  MAP TO D84394.1; EXPRESSED IN ADULT LIVER, SIGNAL =  37; EXPRESSED IN HELA, SIGNAL =  27; EXPRESSED IN BONE MARROW, SIGNAL =  29; EXPRESSED IN LUNG, SIGNAL =  29; EXPRESSED IN HEART, SIGNAL =  11; EXPRESSED IN FETAL LIVER, SIGNAL = 9.2
FALGHPDDVDHLILPKHLVH

SEQ ID NO: 32435 - protein, 29 aa, Homo sapiens
  MAP TO AC004687.1; EXPRESSED IN ADULT LIVER, SIGNAL = 1.2; EXPRESSED IN BRAIN, SIGNAL = 1.1; EXPRESSED IN HELA, SIGNAL = 0.93; EXPRESSED IN LUNG, SIGNAL = 1.1; EXPRESSED IN HEART, SIGNAL = 1.5; EXPRESSED IN FETAL LIVER, SIGNAL = 1.8; SWISSPROT HIT: P12625, EVALUE 8.70e+00
LLGWGSHCRDEAASGPSRAPGHSGHAPAL

SEQ ID NO: 32436 - protein, 175 aa, Homo sapiens
  MAP TO AC004687.1; EXPRESSED IN ADULT LIVER, SIGNAL = 1.2; EXPRESSED IN BRAIN, SIGNAL = 1.1; EXPRESSED IN HELA, SIGNAL = 0.93; EXPRESSED IN LUNG, SIGNAL = 1.1; EXPRESSED IN HEART, SIGNAL = 1.5; EXPRESSED IN FETAL LIVER, SIGNAL = 1.8; SWISSPROT HIT: P05164, EVALUE 7.00e-10
CMVDLGPCWAGGLTAEMKLLLALAGLLAILATPQPSEGAAPGNSSQGGRRWCVGVVVFQRPLFSEQAFLALGPDRGLGPIPDFVIPALGSCPGGGGHLVGAELHGGGQAAGGQGLQGAAGKVGHEALPSSGQGCPRPFREAAGSRELEGGRGGLWGPMWTPFLSVCPCVSGWENS

SEQ ID NO: 32437 - protein, 236 aa, Homo sapiens
  MAP TO AL031058.1; EXPRESSED IN BRAIN, SIGNAL = 0.9; EXPRESSED IN ADULT LIVER, SIGNAL = 1.9; EXPRESSED IN HELA, SIGNAL = 1.5; EXPRESSED IN BONE MARROW, SIGNAL = 0.85; EXPRESSED IN FETAL LIVER, SIGNAL = 1.2; EXPRESSED IN LUNG, SIGNAL = 1.4; EXPRESSED IN HEART, SIGNAL = 6.1; SWISSPROT HIT: P15924, EVALUE 1.00e-111
MNKELIEKGHGIRLLEAQIATGGIIDPKESHRLPVDIAYKRGYFNEELSEILSDPSDDTKGFFDPNTEENLTYLQLKERCIKDEETGLCLLPLKEKKKQVQTSQKNTLRKRRVVIVDPETNKEMSVQEAYKKGLIDYETFKELCEQECEWEEITITGSDGSTRVVLVDRKTGSQYDIQDAIDKGLVDRKFFDQYRSGSLSLTQFADMISLKNGVGTSSSMGSGVSDDVFSSSRHES

SEQ ID NO: 32438 - protein, 5701 aa, Homo sapiens
  MAP TO AC010680.2; EXPRESSED IN ADULT LIVER, SIGNAL = 1.6; EXPRESSED IN BONE MARROW, SIGNAL = 2.1; EXPRESSED IN LUNG, SIGNAL = 1.7; EXPRESSED IN PLACENTA, SIGNAL = 1.6; EXPRESSED IN BRAIN, SIGNAL = 1.6; EXPRESSED IN HELA, SIGNAL = 2.2; SWISSPROT HIT: P16419, EVALUE 2.00e-72
PPGPPSNPHVTDTTKKSASLAWGKPHYDGGLEITGYVVEHQKVGDEAWIKDTTGTALRITQFVVPDLQTKEKYNFRISAINDAGVGEPAVIPDVEIVEREMAPDFELDAELRRTLVVRAGLSIRIFVPIKGRPAPEVTWTKDNINLKNRANIENTESFTLLIIPECNRYDTGKFVMTIENPAGKKSGFVNVRVLDTPGPVLNLRPTDITKDSVTLHWDLPLIDGGSRITNYIVEKREATRKSYSTATTKCHKCTYKVTGLSEGCEYFFRVMAENEYGIGEPTETTEPVKASEAPSPPDSLNIMDITKSTVSLAWPKPKHDGGSKITGYVIEAQRKGSDQWTHITTVKGLECVVRNLTEGEEYTFQVMAVNSAGRSAPRESRPVIVKEQTMLPELDLRGIYQKLVIAKAGDNIKVEIPVLGRPKPTVTWKKGDQILKQTQRVNFETTATSTILNINECVRSDSGPYPLTARNIVGEVGDVITIQVHDIPGPPTGPIKFDEVSSDFVTFSWDPPENDGGVPISNYVVEMRQTDSTTWVELATTVIRTTYKATRLTTGLEYQFRVKAQNRYGVGPGITSACIVANYPFKVPGPPGTPQVTAVTKDSMTISWHEPLSDGGSPILGYHVERKERNGILWQTVSKALVPGNIFKSSGLTDGIAYEFRVIAENMAGKSKPSKPSEPMLALDPIDPPGKPVPLNITRHTVTLKWAKPEYTGGFKITSYIVEKRDLPNGRWLKANFSNILENEFTVSGLTEDAAYEFRVIAKNAAGAISPPSEPSDAITCRDDVEAPKIKVDVKFKDTVILKAGEAFRLEADVSGRPPPTMEWSKDGKELEGTAKLEIKIADFSTNLVNKDSTRRDSGAYTLTATNPGGFAKHIFNVKVLDRPGPPEGPLAVTEVTSEKCVLSWFPPLDDGGAKIDHYIVQKRETSRLAWTNVASEVQVTKLKVTKLLKGNEYIFRVMAVNKYGVGEPLESEPVLAVNPYGPPDPPKNPEVTTITKDSMVVCWGHPDSDGGSEIINYIVERRDKAGQRWIKCNKKTLTDLRYKVSGLTEGHEYEFRIMAENAAGISAPSPTSPFYKACDTVFKPGPPGNPRVLDTSRSSISIAWNKPIYDGGSEITGYMVEIALPEEDEWQIVTPPAGLKATSYTITGLTENQEYKIRIYAMNSEGLGEPALVPGTPKAEDRMLPPEIELDADLRKVVTIRACCTLRLFVPIKGRPAPEVKWARDHGESLDKASIESTSSYTLLIVGNVNRFDSGKYILTVENSSGSKSAFVNVRVLDTPGPPQDLKVKEVTKTSVTLTWDPPLLDGGSKIKNYIVEKRESTRKAYSTVATNCHKTSWKVDQLQEGCSYYFRVLAENEYGIGLPAETAESVKASERPLPPGKITLMDVTRNSVSLSWEKPEHDGGSRILGYIVEMQTKGSDKWATCATVKVTEATITGLIQGEEYSFRVSAQNEKGISDPRQLSVPVIAKDLVIPPAFKLLFNTFTVLAGEDLKVDVPFIGRPTPAVTWHKDNVPLKQTTRVNAESTENNSLLTIKDACREDVGHYVVKLTNSAGEAIETLNVIVLDKPGPPTGPVKMDEVTADSITLSWGPPKYDGGSSINNYIVEKRDTSTTTWQIVSATVARTTIKACRLKTGCEYQFRIAAENRYGKSTYLNSEPTVAQYPFKVPGPPGTPVVTLSSRDSMEVQWNEPISDGGSRVIGYHLERKERNSILWVKLNKTPIPQTKFKTTGLEEGVEYEFRVSAENIVGIGKPSKVSECYVARDPCDPPGRPEAIIVTRNSVTLQWKKPTYDGGSKITGYIVEKKELPEGRWMKASFTNIIDTHFEVTGLVEDHRYEFRVIARNAAGVFSEPSESTGAITARDEVDPPRISMDPKYKDTIVVHAGESFKVDADIYGKPIPTIQWIKGDQELSNTARLEIKSTDFATSLSVKDAVRVDSGNYILKAKNVAGERSVTVNVKVLDRPGPPEGPVVISGVTAEKCTLAWKPPLQDGGSDIINYIVERRETSRLVWTVVDANVQTLSCKVTKLLEGNEYTFRIMAVNKYGVGEPLESEPVVAKNPFVVPDAPKAPEVTTVTKDSMIVVWERPASDGGSEILGYVLEKRDKEGIRWTRCHKRLIGELRLRVTGLIENHDYEFRVSAENAAGLSEPSPPSAYQKACDPIYKPGPPNNPKVIDITRSSVFLSWSKPIYDGGCEIQGYIVEKCDVSVGEWTMCTPPTGINKTNIEVEKLLEKHEYNFRICAINKAGVGEHADVPGPIIVEEKLEAPDIDLDLELRKIINIRAGGSLRLFVPIKGRPTPEVKWGKVDGEIRDAAIIDVTSSFTSLVLDNVNRYDSGKYTLTLENSSGTKSAFVTVRVLDTPSPPVNLKVTEITKDSVSITWEPPLLDGGSKIKNYIVEKREATRKSYAAVVTNCHKNSWKIDQLQEGCSYYFRVTAENEYGIGLPAQTADPIKVAEVPQPPGKITVDDVTRNSVSLSWTKPEHDGGSKIIQYIVEMQAKHSEKWSECARVKSLQAVITNLTQGEEYLFRVVAVNEKGRSDPRSLAVPIVAKDLVIEPDVKPAFSSYSVQVGQDLKIEVPISGRPKPTITWTKDGLPLKQTTRINVTDSLDLTTLSIKETHKDDGGQYGITVANVVGQKTASIEIVTLDKPDPPKGPVKFDDVSAESITLSWNPPLYTGGCQITNYIVQKRDTTTTVWDVVSATVARTTLKVTKLKTGTEYQFRIFAENRYGQSFALESDPIVAQYPYKEPGPPGTPFATAISKDSMVIQWHEPVNNGGSPVIGYHLERKERNSILWTKVNKTIIHDTQFKAQNLEEGIEYEFRVYAENIVGVGKASKNSECYVARDPCDPPGTPEPIMVKRNEITLQWTKPVYDGGSMITGYIVEKRDLPDGRWMKASFTNVIETQFTVSGLTEDQRYEFRVIAKNAAGAISKPSDSTGPITAKDEVELPRISMDPKFRDTIVVNAGETFRLEADVHGKPLPTIEWLRGDKEIEESARCEIKNTDFKALLIVKDAIRIDGGQYILRASNVAGSKSFPVNVKVLDRPGPPEGPVQVTGVTSEKCSLTWSPPLQDGGSDISHYVVEKRETSRLAWTVVASEVVTNSLKVTKLLEGNEYVFRIMAVNKYGVGEPLESAPVLMKNPFVLPGPPKSLEVTNIAKDSMTVCWNRPDSDGGSEIIGYIVEKRDRSGIRWIKCNKRRITDLRLRVTGLTEDHEYEFRVSAENAAGVGEPSPATVYYKACDPVFKPGPPTNAHIVDTTKNSITLAWGKPIYDGGSEILGYVVEICKADEEEWQIVTPQTGLRVTRFEISKLTEHQEYKIRVCALNKVGLGEATSVPGTVKPEDKLEAPELDLDSELRKGIVVRAGGSARIHIPFKGRPTPEITWSREEGEFTDKVQIEKGVNYTQLSIDNCDRNDAGKYILKLENSSGSKSAFVTVKVLDTPGPPQNLAVKEVRKDSAFLVWEPPIIDGGAKVKNYVIDKRESTRKAYANVSSKCSKTSFKVENLTEGAIYYFRVMAENEFGVGVPVETVDAVKAAEPPSPPGKVTLTDVSQTSASLMWEKPEHDGGSRVLGYVVEMQPKGTEKWSIVAESKVCNAVVTGLSSGQEYQFRVKAYNEKGKSDPRVLGVPVIAKDLTIQPSLKLPFNTYSIQAGEDLKIEIPVIGRPRPNISWVKDGEPLKQTTRVNVEETATSTVLHIKEGNKDDFGKYTVTATNSAGTATENLSVIVLEKPGPPVGPVRFDEVSADFVVISWEPPAYTGGCQISNYIVEKRDTTTTTWHMVSATVARTTIKITKLKTGTEYQFRIFAENRYGKSAPLDSKAVIVQYPFKEPGPPGTPFVTSISKDQMLVQWHEPVNDGGTKIIGYHLEQKEKNSILWVKLNKTPIQDTKFKTTGLDEGLEYEFKVSAENIVGIGKPSKVSECFVARDPCDPPGRPEAIVITRNNVTLKWKKPAYDGGSKITGYIVEKKDLPDGRWMKASFTNVLETEFTVSGLVEDQRYEFRVIARNAAGNFSEPSDSSGAITARDEIDAPNASLDPKYKDVIVVHAGETFVLEADIRGKPIPDVVWSKDGKELEETAARMEIKSTIQKTTLVVKDCIRTDGGQYILKLSNVGGTKSIPITVKVLDRPGPPEGPLKVTGVTAEKCYLAWNPPLQDGGANISHYIIEKRETSRLSWTQVSTEVQALNYKVTKLLPGNEYIFRVMAVNKYGIGEPLESGPVTACNPYKPPGPPSTPEVSAITKDSMVVTWARPVDDGGTEIEGYILEKRDKEGVRWTKCNKKTLTDLRLRVTGLTEGHSYEFRVAAENAAGVGEPSEPSVFYRACDALYPPGPPSNPKVTDTSRSSVSLAWSKPIYDGGAPVKGYVVEVKEAAADEWTTCTPPTGLQGKQFTVTKLKENTEYNFRICAINSEGVGEPATLPGSVVAQERIEPPEIELDADLRKVVVLRASATLRLFVTIKGRPEPEVKWEKAEGILTDRAQIEVTSSFTMLVIDNVTRFDSGRYNLTLENNSGSKTAFVNVRVLDSPSAPVNLTIREVKKDSVTLSWEPPLIDGGAKITNYIVEKRETTRKAYATITNNCTKTTFRIENLQEGCSYYFRVLASNEYGIGLPAETTEPVKVSEPPLPPGRVTLVDVTRNTATIKWEKPESDGGSKITGYVVEMQTKGSEKWSTCTQVKTLEATISGLTAGEEYVFRVAAVNEKGRSDPRQLGVPVIARDIEIKPSVELPFHTFNVKAREQLKIDVPFKGRPQATVNWRKDGQTLKETTRVNVSSSKTVTSLSIKEASKEDVGTYELCVSNSAGSITVPITIIVLDRPGPPGPIRIDEVSCDSITISWNPPEYDGGCQISNYIVEKKETTSTTWHIVSQAVARTSIKIVRLTTGSEYQFRVCAENRYGKSSYSESSAVVAEYPFSPPGPPGTPKVVHATKSTMLVTWQVPVNDGGSRVIGYHLEYKERSSILWSKANKILIADTQMKVSGLDEGLMYEYRVYAENIAGIGKCSKSCEPVPARDPCDPPGQPEVTNITRKSVSLKWSKPHYDGGAKITGYIVERRELPDGRWLKCNYTNIQETYFEVTELTEDQRYEFRVFARNAADSVSEPSESTGPIIVKDDVEPPRVMMDVKFRDVIVVKAGEVLKINADIAGRPLPVISWAKDGIEIEERARTEIISTDNHTLLTVKDCIRRDTGQYVLTLKNVAGTRSVAVNCKVLDKPGPPAGPLEINGLTAEKCSLSWGRPQEDGGADIDYYIVEKRETSHLAWTICEGELQMTSCKVTKLLKGNEYIFRVTGVNKYGVGEPLESVAIKALDPFTVPSPPTSLEITSVTKESMTLCWSRPESDGGSEISGYIIERREKNSLRWVRVNKKPVYDLRVKSTGLREGCEYEYRVYAENAAGLSLPSETSPLIRAEDPVFLPSPPSKPKIVDSGKTTITIAWVKPLFDGGAPITGYTVEYKKSDDTDWKTSIQSLRGTEYTISGLTTGAEYVFRVKSVNKVGASDPSDSSDPQIAKEREEEPLFDIDSEMRKTLIVKAGASFTMTVPFRGRPVPNVLWSKPDTDLRTRAYVDTTDSRTSLTIENANRNDSGKYTLTIQNVLSAASLTLVVKVLDTPGPPTNITVQDVTKESAVLSWDVPENDGGAPVKNYHIEKREASKKAWVSVTNNCNRLSYKVTNLQEGAIYYFRVSGENEFGVGIPAETKEGVKIT

SEQ ID NO: 32439 - protein, 20 aa, Homo sapiens
  MAP TO AC010680.2; EXPRESSED IN ADULT LIVER, SIGNAL = 1.6; EXPRESSED IN BONE MARROW, SIGNAL = 2.1; EXPRESSED IN LUNG, SIGNAL = 1.7; EXPRESSED IN PLACENTA, SIGNAL = 1.6; EXPRESSED IN BRAIN, SIGNAL = 1.6; EXPRESSED IN HELA, SIGNAL = 2.2
FNTVHSRVPIFYLNYPKAKL

SEQ ID NO: 32440 - protein, 412 aa, Homo sapiens
  MAP TO AC010422.6; EXPRESSED IN ADULT LIVER, SIGNAL = 1.7; EXPRESSED IN PLACENTA, SIGNAL = 1.6; EXPRESSED IN BRAIN, SIGNAL = 1.7; EXPRESSED IN HELA, SIGNAL = 2.1; EXPRESSED IN BONE MARROW, SIGNAL = 1.9; EXPRESSED IN LUNG, SIGNAL = 1.6; EXPRESSED IN HEART, SIGNAL = 1.6; SWISSPROT HIT: P52737, EVALUE 0.00e+00
SPMVEALCENKEDCPCGKSTSQIPDLNTNLETPTGLKPCDCSVCGEVFMHQVSLNRHMRSHTEQKPNECHEYGEKPHKCKECGKTFTRSSSIRTHERIHTGEKPYECKECGKAFAFLFSFRNHIRIHTGETPYECKECGKAFRYLTALRRHEKNHTGEKPYKCKQCGKAFIYYQPFLTHERTHTGEKPYECKQCGKAFSCPTYLRSHEKTHTGEKPFVCRECGRAFFSHSSLRKHVKTHTGVQPYTCKKCGEAFKSSSSCEVHERTHFGEKPYECKQCGKAFNSSSYLQLHERVHTGEKTYECKECGKAFLYSTHFRIHERTHTREKPYECKQCGRVFIYFSHLRRHERSHTGVKPCECKQCGKAFTCLNSLKVHKRIHTGERPFQCRQCGKAFSYSKSLHVHERTHSRQKP

SEQ ID NO: 32441 - protein, 35 aa, Homo sapiens
  MAP TO AC010422.6; EXPRESSED IN ADULT LIVER, SIGNAL = 1.7; EXPRESSED IN PLACENTA, SIGNAL = 1.6; EXPRESSED IN BRAIN, SIGNAL = 1.7; EXPRESSED IN HELA, SIGNAL = 2.1; EXPRESSED IN BONE MARROW, SIGNAL = 1.9; EXPRESSED IN LUNG, SIGNAL = 1.6; EXPRESSED IN HEART, SIGNAL = 1.6
VLWLKHSVKIKKIVHVEKALARFLILIRTWKLLLD

SEQ ID NO: 32442 - protein, 485 aa, Homo sapiens
  MAP TO AC003043.1; EXPRESSED IN LUNG, SIGNAL = 2.1; EXPRESSED IN HEART, SIGNAL = 1.9; EXPRESSED IN FETAL LIVER, SIGNAL = 2.3; EXPRESSED IN ADULT LIVER, SIGNAL = 2.8; EXPRESSED IN PLACENTA, SIGNAL = 2.2; EXPRESSED IN HELA, SIGNAL = 3.8; EXPRESSED IN BONE MARROW, SIGNAL =   2
RRCLKPRQQHRKLQLSGPSDGNKRDQATSMSQLHLICGGPLEPAPSGDPEAPPPGPLHSAFSSSRDLASSRDDFFRTKPRSASRPAAEPSGARGGESAGLKGARSAEGPGGLEPGLEEHRRGPSGAAAFLHEPPSPPPPFDHYLGHKGAAEGKTPDFLLSQSVDQLARPPSLGQAGQLIFCGSIDHLKDNVYRNVMPTLVIPAHYVRLGGEAGAAGVGDEPAPPEGTAPGPARAFPQPDPQRPQMPGHSGPGGEGGGGGGEGWGAGRAAPVSGSVTIPVLFNESTMAQLNGELQALTEKKLLELGVKPHPRAWFVSLDGRSNSQVRHSYIDLQAGGGARSTDASLDSGVDVHEARPARRRPAREERERAPPAAPPPPPAPPRLALSEDTEPSSSESRTGLCSPEDNSLTPLLDEVAAPEGRAATVPRGRGRSRGDSSRSSASELRRDSLTSPEDELGAEVGDEAGDKKSPWQRREERPLMVFNVK

SEQ ID NO: 32443 - protein, 223 aa, Homo sapiens
  MAP TO AC004506.1; EXPRESSED IN PLACENTA, SIGNAL = 1.5; EXPRESSED IN BRAIN, SIGNAL = 1.3; EXPRESSED IN ADULT LIVER, SIGNAL = 1.2; EXPRESSED IN HELA, SIGNAL = 1.5; EXPRESSED IN BONE MARROW, SIGNAL = 1.4; EXPRESSED IN LUNG, SIGNAL = 1.2; EXPRESSED IN FETAL LIVER, SIGNAL = 1.1; SWISSPROT HIT: P18171, EVALUE 1.50e-01
HLPRLVLACVPPVIPAPGAPGEPASAATVKRKPKSRWRPEENKVELSPAELVQRDVDASPSPLSVQDLKGLGYENGKSVGLAGLTELSCSQKQQLKDQQEMHQMYDMIMQHKWAMQDMQLLWEKAVQQHQHGYHSDEEVSSELRTWEHQLQRMEMNKTREWAEQLTKMSRGKHFIGDFLPPDKLEKFMETFKALKEGREPDYSEYKEFKLTEENVLMKMGWKE

SEQ ID NO: 32444 - protein, 198 aa, Homo sapiens
  MAP TO AP001101.1; EXPRESSED IN LUNG, SIGNAL = 2.7; EXPRESSED IN HELA, SIGNAL = 0.83; EXPRESSED IN ADULT LIVER, SIGNAL = 1.6; EXPRESSED IN HEART, SIGNAL = 3.4; EXPRESSED IN BRAIN, SIGNAL = 1.3; EXPRESSED IN FETAL LIVER, SIGNAL = 1.5; EXPRESSED IN BONE MARROW, SIGNAL = 1.6; SWISSPROT HIT: P12110, EVALUE 1.00e-101
LSVAQCTQRPVDIVFLLDGSERLGEQNFHKARRFVEQVARRLTLARRDDDPLNARVALLQFGGPGEQQVAFPLSHNLTAIHEALETTQYLNSFSHVGAGVVHAINAIVRSPRGGARRHAELSFVFLTDGVTGNDSLHESAHSMRKQNVVPTVLALGSDVDMDVLTTLSLGDRAAVFHEKDYDSLAQPGFFDRFIRWIC

SEQ ID NO: 32445 - protein, 42 aa, Homo sapiens
  MAP TO AP001101.1; EXPRESSED IN LUNG, SIGNAL = 2.7; EXPRESSED IN HELA, SIGNAL = 0.83; EXPRESSED IN ADULT LIVER, SIGNAL = 1.6; EXPRESSED IN HEART, SIGNAL = 3.4; EXPRESSED IN BRAIN, SIGNAL = 1.3; EXPRESSED IN FETAL LIVER, SIGNAL = 1.5; EXPRESSED IN BONE MARROW, SIGNAL = 1.6; SWISSPROT HIT: P52172, EVALUE 2.20e+00
SCPWHSARSGPWTSSSCWTAPSGWVSRTSTRPGASWSRWRGG

SEQ ID NO: 32446 - protein, 584 aa, Homo sapiens
  MAP TO AF015416.1; EXPRESSED IN ADULT LIVER, SIGNAL = 1.5; EXPRESSED IN HEART, SIGNAL = 1.3; EXPRESSED IN FETAL LIVER, SIGNAL = 1.9; EXPRESSED IN LUNG, SIGNAL = 1.3; EXPRESSED IN BONE MARROW, SIGNAL = 1.4; EXPRESSED IN HELA, SIGNAL = 0.84; SWISSPROT HIT: P33076, EVALUE 3.00e-12
YKKKYREHVLQLHARVKERNARSVKITKRFTKLLIAPESAAPEEALGPAEEPEPGRARRSDTHTFNRLFRRDEEGRRPLTVVLQGPAGIGKTMAAKKILYDWAAGKLYQGQVDFAFFMPCGELLERPGTRSLADLILDQCPDRGAPVPQMLAQPQRLLFILDGADELPALGGPEAAPCTDPFEAASGARVLGGLLSKALLPTALLLVTTRAAAPGRLQGRLCSPQCAEVRGFSDKDKKKYFYKFFRDERRAERAYRFVKENETLFALCFVPFVCWIVCTVLRQQLELGRDLSRTSKTTTSVYLLFITSVLSSAPVADGPRLQGDLRNLCRLAREGVLGRRAQFAEKELEQLELRGSKVQTLFLSKKELPGVLETEVTYQFIDQSFQEFLAALSYLLEDGGVPRTAAGGVGTLLRGDAQPHSHLVLTTRFLFGLLSAERMRDIERHFGCMVSERVKQEALRWVQGQGQGCPGVAPEVTEGAKGLEDTEEPEEEEEGEEPNYPLELLYCLYETQEDAFVRQALCRFPELALQRVRFCRMDVAVLSYCVRCCPAGQALRLISCRLVAAQEKKKKSLGKRLQASLGGG

SEQ ID NO: 32447 - protein, 46 aa, Homo sapiens
  MAP TO AF015416.1; EXPRESSED IN ADULT LIVER, SIGNAL = 1.5; EXPRESSED IN HEART, SIGNAL = 1.3; EXPRESSED IN FETAL LIVER, SIGNAL = 1.9; EXPRESSED IN LUNG, SIGNAL = 1.3; EXPRESSED IN BONE MARROW, SIGNAL = 1.4; EXPRESSED IN HELA, SIGNAL = 0.84
GARAAAARSGEGEERPLREDHQALHQAAHRARERRPGGGAGARGRA

SEQ ID NO: 32448 - protein, 183 aa, Homo sapiens
  MAP TO AC005042.1; EXPRESSED IN LUNG, SIGNAL =   2; EXPRESSED IN HEART, SIGNAL = 2.5; EXPRESSED IN FETAL LIVER, SIGNAL = 2.6; EXPRESSED IN ADULT LIVER, SIGNAL =   2; EXPRESSED IN PLACENTA, SIGNAL = 3.5; EXPRESSED IN HELA, SIGNAL = 5.7; SWISSPROT HIT: Q10172, EVALUE 1.50e-01
PSVANRAMRRVSSVPSRAQSPSYVISTGVSPSRGSLRTSLGSGFGSPSVTDPRPLNPSAYSSTTLPAARAASPYSQRPASPTAIRRIGSVTSRQTSNPNGPTPQYQTTARVGSPLTLTDAQTRVASPSQGQVGSSSPKRSGMTAVPQHLGPSLQRTVHDMEQFGQQQYDIYERMVPPRPDSLT

SEQ ID NO: 32449 - protein, 39 aa, Homo sapiens
  MAP TO AC005042.1; EXPRESSED IN LUNG, SIGNAL =   2; EXPRESSED IN HEART, SIGNAL = 2.5; EXPRESSED IN FETAL LIVER, SIGNAL = 2.6; EXPRESSED IN ADULT LIVER, SIGNAL =   2; EXPRESSED IN PLACENTA, SIGNAL = 3.5; EXPRESSED IN HELA, SIGNAL = 5.7
PPYHSIWDLHCKGLFMTWSNSDSSSMTFMRGWFHPGQTA

SEQ ID NO: 32450 - protein, 213 aa, Homo sapiens
  MAP TO AC005488.2; EXPRESSED IN BRAIN, SIGNAL = 4.9; EXPRESSED IN ADULT LIVER, SIGNAL = 2.3; EXPRESSED IN HELA, SIGNAL = 1.6; EXPRESSED IN LUNG, SIGNAL = 2.5; EXPRESSED IN HEART, SIGNAL = 2.9; SWISSPROT HIT: Q9Y2N3, EVALUE 6.00e-27
SPAAAAAGAGERRRPIASVRDGRGRGCGGPARAVLLGLSLVGLLLYLVPAAAALAWLTVGATAAWWGLSREPRGSRPLSSFVRKARHRRPLSSFVRKARHRRTLFASPLAKSTANGNLLEPRTLLEGPDPAELLLMGSYLGKPGPPQPAAAPEGQDLRDRPGRRPPARPAPRSPPPRSPPPRSPPPSPPTHRAHHVYPSLPTPLLRPSRRPSP

SEQ ID NO: 32451 - protein, 576 aa, Homo sapiens
  MAP TO AC004127.1; EXPRESSED IN HEART, SIGNAL = 2.6; EXPRESSED IN PLACENTA, SIGNAL = 3.9; EXPRESSED IN ADULT LIVER, SIGNAL = 2.7; EXPRESSED IN FETAL LIVER, SIGNAL = 2.8; SWISSPROT HIT: P10266, EVALUE 0.00e+00
DINWIRPTLGIPTYVTSNLFSILRGDPDLNSKRIFTPEATKKIKLVEEKIQPAQINRIDPLAPLQLLIFATAHSPAGINVQNTDLVEWSFLPHSTIKTFTLYLDQIVTLIGQAKLRIIKLCGNDPDKIVVPLNKERVRQAFINSGAWQIGLTDFVGITDNHYPKTKIVQFLKLTTWILPKITRHEPLENALTVFTDGSSNGKAAYIGPKEQVIKTHYQSAQRAELVAVFTVLQDFNQPINIVSDSAYVVQATRDVETALIKYSMDDQLNQLFNLLQQTVRNRNFPFYITHIRAHTNLPGPLTKANEQADLLVPSAFIKAQELHALTHINAAGLKNKFDVTWKQAKNIVQHCTQCQVLHLPTQEAGVNPRGLCPNVLWQMDVTHVPSFGRLSYVHVTVDTYSHFIWAACQTGESTSHVKKHLLSCFAVMGVPEKIKTDNGPGYCSKAFQKFLNQWKITHTTGIPYNSQGQAIVERTNRTLKTQLVKQNEGGDSKECTTPQMQLNLALYTLNFLNIYRNQTTTSAEHLTGKKNSPHEGKLIWWKDNKNKTWEIGKVVTWGKGFACFTRRKSASCLDTH

SEQ ID NO: 32452 - protein, 255 aa, Homo sapiens
  MAP TO AL117259.3; EXPRESSED IN ADULT LIVER, SIGNAL = 4.8; EXPRESSED IN HELA, SIGNAL = 5.7; EXPRESSED IN PLACENTA, SIGNAL = 4.4; EXPRESSED IN LUNG, SIGNAL = 2.9; EXPRESSED IN HEART, SIGNAL =   3; EXPRESSED IN BONE MARROW, SIGNAL = 3.1; EXPRESSED IN FETAL LIVER, SIGNAL =   4; SWISSPROT HIT: Q9UK55, EVALUE 1.00e-110
SLAAEGRHSLASAADHMKVVPSLLLSVLLAQVWLVPGLAPSPQSPETPAPQNQTSRVVQAPKEEEEDEQEASEEKASEEEKAWLMASRQQLAKETSNFGFSLLRKISMRHDGNMVFSPFGMSLAMTGLMLGATGPTETQIKRGLHLQALKPTKPGLLPSLFKGLRETLSRNLELGLTQGSFAFIHKDFDVKETFFNLSKRYFDTECVPMNFRNASQAKRLMNHYINKETRGKIPKLFDEINPETKLILVDYILFK

SEQ ID NO: 32453 - protein, 17 aa, Homo sapiens
  MAP TO AL117259.3; EXPRESSED IN ADULT LIVER, SIGNAL = 4.8; EXPRESSED IN HELA, SIGNAL = 5.7; EXPRESSED IN PLACENTA, SIGNAL = 4.4; EXPRESSED IN LUNG, SIGNAL = 2.9; EXPRESSED IN HEART, SIGNAL =   3; EXPRESSED IN BONE MARROW, SIGNAL = 3.1; EXPRESSED IN FETAL LIVER, SIGNAL =   4
EVLQLKGGTPWPPQPIT

SEQ ID NO: 32454 - protein, 156 aa, Homo sapiens [sequence omitted]

SEQ ID NO: 32455 - protein, 32 aa, Homo sapiens
  MAP TO AC002481.1; EXPRESSED IN HELA, SIGNAL =  10; EXPRESSED IN PLACENTA, SIGNAL = 8.8; EXPRESSED IN HEART, SIGNAL = 5.8; EXPRESSED IN BONE MARROW, SIGNAL = 5.9; EXPRESSED IN LUNG, SIGNAL = 5.8; EXPRESSED IN FETAL LIVER, SIGNAL = 6.2; EXPRESSED IN ADULT LIVER, SIGNAL = 5.5
MADHFAFATFFPEILQPVVGLLANLVHSLLVK

SEQ ID NO: 32456 - protein, 35 aa, Homo sapiens
  MAP TO U73629.1; EXPRESSED IN ADULT LIVER, SIGNAL = 3.6; EXPRESSED IN BRAIN, SIGNAL = 3.9; EXPRESSED IN LUNG, SIGNAL = 3.3; EXPRESSED IN HEART, SIGNAL = 3.8; EXPRESSED IN FETAL LIVER, SIGNAL = 4.9; SWISSPROT HIT: P39748, EVALUE 3.00e-06
SSLLCVAMGIQGLAKLIADVAPSAIRENDIRATLA

SEQ ID NO: 32457 - protein, 149 aa, Homo sapiens
  MAP TO U73629.1; EXPRESSED IN ADULT LIVER, SIGNAL = 3.6; EXPRESSED IN BRAIN, SIGNAL = 3.9; EXPRESSED IN LUNG, SIGNAL = 3.3; EXPRESSED IN HEART, SIGNAL = 3.8; EXPRESSED IN FETAL LIVER, SIGNAL = 4.9; SWISSPROT HIT: P39748, EVALUE 5.00e-71
SDYCESIRGIGPKRAVDLIQKHKSIEEIVRRLDPNKYPVPENWLHKEAHQLFLEPEVLDPESVELKWSEPNEEELIKFMCGEKQFSEERIRSGVKRLSKSRQGSTQGRLDDFFKVTGSLSSAKRKEPEPKGSTKKKAKTGAAGKFKRGK

SEQ ID NO: 32458 - protein, 17 aa, Homo sapiens
  MAP TO U73629.1; EXPRESSED IN ADULT LIVER, SIGNAL = 3.6; EXPRESSED IN BRAIN, SIGNAL = 3.9; EXPRESSED IN LUNG, SIGNAL = 3.3; EXPRESSED IN HEART, SIGNAL = 3.8; EXPRESSED IN FETAL LIVER, SIGNAL = 4.9
IPPLCCHGNSRPGQTNC

SEQ ID NO: 32459 - protein, 291 aa, Homo sapiens
  MAP TO AL136450.1; EXPRESSED IN HELA, SIGNAL = 2.1; EXPRESSED IN ADULT LIVER, SIGNAL = 1.3; EXPRESSED IN LUNG, SIGNAL = 1.4; EXPRESSED IN HEART, SIGNAL = 1.2; EXPRESSED IN FETAL LIVER, SIGNAL = 1.4; SWISSPROT HIT: Q02817, EVALUE 1.50e-02
TPPAAPAPPSVPMPTPTPSSGPPSTPTLIPAFAPTPVPAPTPAPIFTPAPTPMPAATPAAIPTSAPIPASFSLSRVCFPAAQAPAMQKVPLSFQPGTVLTPSQPLVYIPPPSCGQPLSVATLPTTLGVSSTLTLPVLPSYLQDRCLPGVLASPELRSYPYAFSVARPLTSDSKLVSLEVNRLPCTSPSGSTTTQPAPDGVPGPLADTSLVTASAKVLPTPQPLLPAPSGSSAPPHPAKMPSGTEQQTEGTSVTFSPLKSPPQLEREMASPPECSEMPLDLSSKSNRQKLPL

SEQ ID NO: 32460 - protein, 39 aa, Homo sapiens
  MAP TO AC025761.3; EXPRESSED IN ADULT LIVER, SIGNAL = 1.5; EXPRESSED IN PLACENTA, SIGNAL = 1.9; EXPRESSED IN BRAIN, SIGNAL = 1.3; EXPRESSED IN LUNG, SIGNAL = 1.1; EXPRESSED IN BONE MARROW, SIGNAL = 1.3
VMSCPLFWCAQPIGLAAWILPEPAWALPRTSSRSPRSRP

SEQ ID NO: 32461 - protein, 189 aa, Homo sapiens
  MAP TO AC008812.4; EXPRESSED IN LUNG, SIGNAL = 1.5; EXPRESSED IN BONE MARROW, SIGNAL = 1.7; EXPRESSED IN ADULT LIVER, SIGNAL = 2.3; EXPRESSED IN HELA, SIGNAL = 2.2; SWISSPROT HIT: P15924, EVALUE 6.00e-05
SKVPSSLSQEQSEQDAIYQNLTQLKAAVGELSEKSKLQEIYQELTQLKAAVGELPEKSKLQEIYQELTRLKAAVGELPEKSKLQEIYQELTRLKAAVGELPEKSKLQEIYQELTRLKAAVGELPEKSKLQEIYQELTELKAAVGELPEKSKLQEIYQELTQLKAAVGELPDQSKQQQIYQELTDLKTAF

SEQ ID NO: 32462 - protein, 424 aa, Homo sapiens
  MAP TO AC013648.3; EXPRESSED IN HEART, SIGNAL =   2; EXPRESSED IN BONE MARROW, SIGNAL = 1.5; EXPRESSED IN LUNG, SIGNAL = 1.8; EXPRESSED IN FETAL LIVER, SIGNAL = 1.7; EXPRESSED IN PLACENTA, SIGNAL = 3.6; EXPRESSED IN HELA, SIGNAL = 3.3; EXPRESSED IN ADULT LIVER, SIGNAL = 1.8; SWISSPROT HIT: gi1351900, EVALUE 1.00e-47
APKVEADVSLPSMQGDLKNTDISIEPPSAQLEVQAGQVDVKLPEGHVLEGAGLKGHLPKLQMPSFKMPKVDHKGPQIDIKGPKLDLKGPKTDVTAPDVEVSQPGMEVDVEAPGAKLDGARLEGDLSLADKDVTAKDSKFKMPKFKMPSFGVSAPGKSIEVLVDVSAPKVEADVSLPSMQGDLKNTDISIEPPSAQLEVQAGQVDVKLPEGHVLEGAGLKGHLPKLQMPSFKMPKVDRKGPQIDIKGPKLDLKGPKMDVTAPDVEVSQPSMEVDVEAPGAKLDGARLEGDLSLADKDVTAKDSKFKMPKFKMPSYRASAPGRSIEASLDVSAPKAEADVSLPSMQGDLKATDLSIQPPSADLEVQAVQVDVELLEGPVPEGAGLKGHLPKVEMPSLKTPKVDLKGPQIDVKGPKLDLKGPKAEVR

SEQ ID NO: 32463 - protein, 151 aa, Homo sapiens
  MAP TO AP001760.1; EXPRESSED IN LUNG, SIGNAL = 5.3; EXPRESSED IN HEART, SIGNAL =   5; EXPRESSED IN BONE MARROW, SIGNAL = 5.5; EXPRESSED IN FETAL LIVER, SIGNAL = 5.1; EXPRESSED IN ADULT LIVER, SIGNAL = 4.9; EXPRESSED IN HELA, SIGNAL = 3.9; SWISSPROT HIT: O95613, EVALUE 5.00e-71
VKHNLIEDHQKELNNAKQKTELMKQEFQRKETDWKVMKEELQREAEEKLTLMLLELREKAESEKQTIINKFELREAEMRQLQDQQAAQILDLERSLTEQQGRLQQLEQDLTSDDALHCSQCGREPPTAQDGELAALHVKEDCALQLMLARS

SEQ ID NO: 32464 - protein, 190 aa, Homo sapiens
  MAP TO AF114156.1; EXPRESSED IN HELA, SIGNAL = 2.7; EXPRESSED IN ADULT LIVER, SIGNAL = 1.4; EXPRESSED IN BRAIN, SIGNAL = 1.5; EXPRESSED IN HEART, SIGNAL = 1.7; EXPRESSED IN FETAL LIVER, SIGNAL = 1.8; EXPRESSED IN LUNG, SIGNAL = 1.5; SWISSPROT HIT: P08048, EVALUE 9.00e-93
ADATHMDGDQIVVEIQEAVFVSNIVDSDITVHNFVPDDPDSVVIQDVVEDVVIEEDVQCSDILEEADVSENVIIPEQVLDSDVTEEVSLPHCTVPDDVLASDITSTSMSMPEHVLTSESMHVCDIGHVEHMVHDSVVEAEIITDPLTSDIVSEEVLVADCAPEAVIDASGISVDQQDNDKASCEDYLMIS

SEQ ID NO: 32465 - protein, 29 aa, Homo sapiens
  MAP TO AF114156.1; EXPRESSED IN HELA, SIGNAL = 2.7; EXPRESSED IN ADULT LIVER, SIGNAL = 1.4; EXPRESSED IN BRAIN, SIGNAL = 1.5; EXPRESSED IN HEART, SIGNAL = 1.7; EXPRESSED IN FETAL LIVER, SIGNAL = 1.8; EXPRESSED IN LUNG, SIGNAL = 1.5
ELMLHTWMVIRLLWKYKKQFLFLILWILT

SEQ ID NO: 32466 - protein, 223 aa, Homo sapiens
  MAP TO AC010422.6; EXPRESSED IN BONE MARROW, SIGNAL =  71; EXPRESSED IN LUNG, SIGNAL =  58; EXPRESSED IN HEART, SIGNAL =  59; EXPRESSED IN BRAIN, SIGNAL =  13; EXPRESSED IN HELA, SIGNAL =  22; EXPRESSED IN ADULT LIVER, SIGNAL =  60; SWISSPROT HIT: P45634, EVALUE 1.00e-123
CATEDPGVAMGRRPARCYRYCKNKPYPKSRFCRGVPDAKIRIFDLGRKKAKVDEFPLCGHMVSDEYEQLSSEALEAARICANKYMVKSCGKDGFHIRVRLHPFHVIRINKMSSCAGADRLQTGMRGAFGKPQGTVARVHIGQVIMSIRTKLQNKERVIEALRRAKFKFPGRQKIHISKKWGFTKFNADEFEDMVAEKRLIPDGCGVKYIPNRGPLDKWWALHS

SEQ ID NO: 32467 - protein, 85 aa, Homo sapiens
  MAP TO AC010422.6; EXPRESSED IN BONE MARROW, SIGNAL =  71; EXPRESSED IN LUNG, SIGNAL =  58; EXPRESSED IN HEART, SIGNAL =  59; EXPRESSED IN BRAIN, SIGNAL =  13; EXPRESSED IN HELA, SIGNAL =  22; EXPRESSED IN ADULT LIVER, SIGNAL =  60; SWISSPROT HIT: Q9JI76, EVALUE 1.30e+00
VPLKILVSPWAAAPPVVTGIVRTSRTQSLASAEVSLMPRFAFLTWGGKRQKWMSFRSVATWCQMNMSSCPLKPWRLPEFVPISTW

SEQ ID NO: 32468 - protein, 182 aa, Homo sapiens
  MAP TO AC005070.1; EXPRESSED IN ADULT LIVER, SIGNAL = 2.6; EXPRESSED IN PLACENTA, SIGNAL = 3.6; EXPRESSED IN HELA, SIGNAL = 1.9; EXPRESSED IN FETAL LIVER, SIGNAL = 1.7; SWISSPROT HIT: P13983, EVALUE 5.00e-04
PGSPGSVIPAQAHGKIFTKPDPQWDSTVSASEAENGVHLKTELQQKQLSNNNQALSKNHPPQTHVRNSSEQLSQKLPSVPTKLHCPPSPHLENPPKSSTPHTPVQHGYLSPKPPSQQLGSPYRPHHSQSPQVGTPQREPQRNFYPAAQNLPANTQQATSGTLFTQTPSGQSSATYSQFNQQS

SEQ ID NO: 32469 - protein, 210 aa, Homo sapiens
  MAP TO Z97986.3; EXPRESSED IN HELA, SIGNAL = 0.34; EXPRESSED IN ADULT LIVER, SIGNAL = 1.5; EXPRESSED IN BRAIN, SIGNAL = 1.9; EXPRESSED IN BONE MARROW, SIGNAL = 1.5; EXPRESSED IN LUNG, SIGNAL = 1.3; SWISSPROT HIT: P05142, EVALUE 1.50e-01
LPTGSSVMLWPEDGDPGGPETPGPEGPLPLQPRGPVPGSPEHVGEDLTRALGDYARVEQRLGQLGPAGGLAPRPLREQLGKIRLELLTIHQALEQAVRPPDAPLDLSVKRAPAKGPQALGEAWGRPELGPVLTGGTPEPPGMLGPAAPQPFSGHTTKCEADSSVPPPGLPLAAPDDPVIPGSGWGTCVATRSSQTPEAVCGLQSPQGAEV

SEQ ID NO: 32470 - protein, 39 aa, Homo sapiens
  MAP TO Z97986.3; EXPRESSED IN HELA, SIGNAL = 0.34; EXPRESSED IN ADULT LIVER, SIGNAL = 1.5; EXPRESSED IN BRAIN, SIGNAL = 1.9; EXPRESSED IN BONE MARROW, SIGNAL = 1.5; EXPRESSED IN LUNG, SIGNAL = 1.3
CCGLRTGIQAALRPPALRAPSPCSHGAQCQEARSMWART

SEQ ID NO: 32471 - protein, 89 aa, Homo sapiens
  MAP TO AC005795.1; EXPRESSED IN ADULT LIVER, SIGNAL = 3.9; EXPRESSED IN BRAIN, SIGNAL = 4.9; EXPRESSED IN PLACENTA, SIGNAL = 6.9; EXPRESSED IN LUNG, SIGNAL =  12; EXPRESSED IN HEART, SIGNAL =   5; EXPRESSED IN BONE MARROW, SIGNAL =  11; SWISSPROT HIT: P12324, EVALUE 5.00e-21
MAGITTIEAVKRKIQVLQQQADDAEERAERLQREVEGERWAREQAEAEVASLNVGSSWLKRSWTVLRSTWLLPCKSWKKRKKLLMRVRE

SEQ ID NO: 32472 - protein, 191 aa, Homo sapiens
  MAP TO AC005795.1; EXPRESSED IN ADULT LIVER, SIGNAL = 3.9; EXPRESSED IN BRAIN, SIGNAL = 4.9; EXPRESSED IN PLACENTA, SIGNAL = 6.9; EXPRESSED IN LUNG, SIGNAL =  12; EXPRESSED IN HEART, SIGNAL =   5; EXPRESSED IN BONE MARROW, SIGNAL =  11; SWISSPROT HIT: P21107, EVALUE 2.00e-78
LVEEELDRAQEHLATALQKLEEAEKAADESERGKKVIENRALKDEEKMELQEIQLREAKHIAEEADRKYEEVARKLVIIEGDLERTEERAELAESLCREMDEQIRLMDQNLKCLSAAEEKYSQKEDKYEEEIKILTDKIKEAETHAEFAERSVAKLEKTIDDLEDKLKCTKGEHLCTQRMLDQTLLDLNEM

SEQ ID NO: 32473 - protein, 29 aa, Homo sapiens
  MAP TO AL163195.3; EXPRESSED IN LUNG, SIGNAL = 0.95; EXPRESSED IN HEART, SIGNAL = 1.2; EXPRESSED IN BONE MARROW, SIGNAL = 1.1; EXPRESSED IN FETAL LIVER, SIGNAL = 1.3; EXPRESSED IN ADULT LIVER, SIGNAL = 1.3; EXPRESSED IN BRAIN, SIGNAL = 1.1
HMKSQPQAHPQAQQQHQQHEKDLHQIQLH

SEQ ID NO: 32474 - protein, 43 aa, Homo sapiens
  MAP TO AL117259.3; EXPRESSED IN ADULT LIVER, SIGNAL =  37; EXPRESSED IN PLACENTA, SIGNAL = 1.7; EXPRESSED IN BRAIN, SIGNAL = 0.84; EXPRESSED IN BONE MARROW, SIGNAL = 1.3; EXPRESSED IN LUNG, SIGNAL = 4.1; SWISSPROT HIT: P20848, EVALUE 4.00e-10
DTEEAKEQINNYVEKRTGRKVVDLVKHLKKDTSLALVDYISFH

SEQ ID NO: 32475 - protein, 78 aa, Homo sapiens
  MAP TO AL117259.3; EXPRESSED IN ADULT LIVER, SIGNAL =  37; EXPRESSED IN PLACENTA, SIGNAL = 1.7; EXPRESSED IN BRAIN, SIGNAL = 0.84; EXPRESSED IN BONE MARROW, SIGNAL = 1.3; EXPRESSED IN LUNG, SIGNAL = 4.1
QYHSLSHGASSCWQACAAWSPAPWLRIPRKMLPKRRIHPTMIKGTGRTLLARRSPITSPTSPLICTKSWLIYHKPAMS

SEQ ID NO: 32476 - protein, 384 aa, Homo sapiens
  MAP TO AC007721.10; EXPRESSED IN FETAL LIVER, SIGNAL =   2; EXPRESSED IN LUNG, SIGNAL = 1.7; EXPRESSED IN ADULT LIVER, SIGNAL = 1.8; EXPRESSED IN HELA, SIGNAL =   3; SWISSPROT HIT: P09815, EVALUE 5.00e-06
FLCVQILDVGSFFNGEHACDSKWKKARQPSPGHLPLLEAASVEMPVCLGRGLLEGVSVEMPVCLGRGLLEGTSVEMSVCLGCGLLEGVSVEMPVCLGHGLLEGTSVEMSVCLGCGLLEGVSVEMPVCLGHGLLEGTSVEMSVCLGRGLLEGVSVEMPVCLGHGLLEGTSVEMPVCLGRGLLEGVSVEMPVCLGRGLLEGTSVEMPVCLGRGLLEGVSVEMPVCLGRGLLEGTSVEMPVCLGRGLPEGVSVEMPVCLGRGLLEGVSVEMPVCLGRGLLEGTSAEMSVCLGRGLPEGVSVEMSVCLGRGLLEGASAEMPVCLGRGLLEGTSVEMPMCLGRGLLEGVSVEMPVCLGRGLLEGTSVEMPVCLGRGLLEGVSVEMPVCL

SEQ ID NO: 32477 - protein, 40 aa, Homo sapiens
  MAP TO AC007721.10; EXPRESSED IN FETAL LIVER, SIGNAL =   2; EXPRESSED IN LUNG, SIGNAL = 1.7; EXPRESSED IN ADULT LIVER, SIGNAL = 1.8; EXPRESSED IN HELA, SIGNAL =   3
LMENTHVIPNGKRPDSPALATCPSWRQPVWRCQCAWGVAS

SEQ ID NO: 32478 - protein, 66 aa, Homo sapiens
  MAP TO AC007721.10; EXPRESSED IN FETAL LIVER, SIGNAL =   2; EXPRESSED IN LUNG, SIGNAL = 1.7; EXPRESSED IN ADULT LIVER, SIGNAL = 1.8; EXPRESSED IN HELA, SIGNAL =   3; SWISSPROT HIT: Q25464, EVALUE 1.90e+00
ASWREPVRRCRCAWGVASRRESVWRCRCAWGVASWREPVRRCPCAWGGASWREPAWRCPCAWGVAS

SEQ ID NO: 32479 - protein, 129 aa, Homo sapiens
  MAP TO AC012433.5; EXPRESSED IN ADULT LIVER, SIGNAL =   2; EXPRESSED IN BRAIN, SIGNAL = 2.1; EXPRESSED IN HELA, SIGNAL = 1.7; EXPRESSED IN LUNG, SIGNAL = 2.3; EXPRESSED IN HEART, SIGNAL = 2.2; EXPRESSED IN BONE MARROW, SIGNAL = 2.2; EXPRESSED IN FETAL LIVER, SIGNAL = 2.6; SWISSPROT HIT: Q20875, EVALUE 5.20e+00
RALLQQACQVGLHVLLDDVRHAELEQLTLQVSALGTEHLVHFDDVVVVQAPNDLDLSERVLHAAGIAQGNLLHSDLPAGPAVHGRQHQTIDTEAQGLEVNKAPTEVIPIDTGDAVTLLSHCGLSDLELP

SEQ ID NO: 32480 - protein, 319 aa, Homo sapiens
  MAP TO AC004597.1; EXPRESSED IN ADULT LIVER, SIGNAL = 1.8; EXPRESSED IN FETAL LIVER, SIGNAL = 1.7; EXPRESSED IN LUNG, SIGNAL =   2; EXPRESSED IN BRAIN, SIGNAL = 1.7; SWISSPROT HIT: O60404, EVALUE 0.00e+00
TVSMPGQNYRTISEFILSGFSAFPQQLLPVLFLLYLLMFLFTLLGNLLIMATVWIERRLHTPMYLFLCALSISEILFTVAITPRMLADLLFTHRSITFVACAIQMFFSFMFGFTHSFLLMVMGYDHYVTICHPLHYNMLMSPRGCAHLVAWTWAGGSVMGMMVTMMVFHLTFCGSNVIHHFLCHVLSLLKLACGSKTSSVIMGVMLVCVTALIGCLFLIILSFVFIVAAILRIPSAEGRHKTFSTCVSHLTVVVMHYSFASLIYLKPKGLHSMYSDALMATTYTVFTPFLSPIIFSLRNKELKNAINKNFCRRFCPLSS

SEQ ID NO: 32481 - protein, 37 aa, Homo sapiens
  MAP TO AC004597.1; EXPRESSED IN ADULT LIVER, SIGNAL = 1.8; EXPRESSED IN FETAL LIVER, SIGNAL = 1.7; EXPRESSED IN LUNG, SIGNAL =   2; EXPRESSED IN BRAIN, SIGNAL = 1.7
IQYPCLVRTTEPYLNLSSLASQPSPSSSCLSCSCCTS

SEQ ID NO: 32482 - protein, 96 aa, Homo sapiens
  MAP TO AC002472.3; EXPRESSED IN BRAIN, SIGNAL = 1.2; EXPRESSED IN ADULT LIVER, SIGNAL = 1.3; EXPRESSED IN HELA, SIGNAL = 0.35; EXPRESSED IN HEART, SIGNAL = 1.3; EXPRESSED IN FETAL LIVER, SIGNAL = 1.3; EXPRESSED IN LUNG, SIGNAL = 1.6; SWISSPROT HIT: Q03368, EVALUE 2.10e-01
VPWPRRWLALLCSCPSVWPLWPPCWQPYAMQNLGHVCHARALPTCSPTYPWASCGPSSSAGMFSSNTSSVAPPWPVPGVATWTLCSATASATSLRP

SEQ ID NO: 32483 - protein, 55 aa, Homo sapiens
  MAP TO AC002472.3; EXPRESSED IN BRAIN, SIGNAL = 1.2; EXPRESSED IN ADULT LIVER, SIGNAL = 1.3; EXPRESSED IN HELA, SIGNAL = 0.35; EXPRESSED IN HEART, SIGNAL = 1.3; EXPRESSED IN FETAL LIVER, SIGNAL = 1.3; EXPRESSED IN LUNG, SIGNAL = 1.6; SWISSPROT HIT: O43246, EVALUE 5.00e-19
LLVILFIVILGFILAQPHNWSADEGGFAPFGFSGVMAGTASCFYAFVGFDVIAAS
